United States Patent Application Publication US 2010/0144538 A1 - sequence listing, part 5

SEQ ID NO: 7866 - DNA, 5539 bp, Homo sapiens
aaatgtggaagctgaagctgcaagtcaagggcccgtctgacaagtccggcagggccgggaaaggggttaaggcgagcaagtgggtgtggcccgtgcgttgattggcaggggtgggaccgggcttgtcacccgccccggctactccaacccctgggcgggcgggggtaccgcctgggcaagggccggggcgccgggccgagccacctcttcccctcccccgcttccctgtcgcgctccgctggctggacgcgctggaggagtggagcagcacccggccggccctgggggctgacagtcggcaaagtttggcccgaagaggaagtggtctcaaaccccggcaggtggcgaccaggccagaccaggggcgctcgctgcctgcgggcgggctgtaggcgagggcgcgccccagtgccgagacccggggcttcaggagccggccccgggagagaagagtgcggcggcggacggagaaaacaactccaaagttggcgaaaggcaccgcccctactcccgggctgccgccgcctccccgcccccagccctggcatccagagtacgggtcgagcccgggccatggagcccccctggggaggcggcaccagggagcctgggcgcccggggctccgccgcgaccccatcgggtagaccacagaagctccgggacccttccggcacctctggacagcccaggatgctgttggccaccctcctcctcctcctccttggaggcgctctggcccatccagaccggattatttttccaaatcatgcttgtgaggaccccccagcagtgctcttagaagtgcagggcaccttacagaggcccctggtccgggacagccgcacctcccctgccaactgcacctgtagaagactttcctacagagaatcctaatgataactcagtgctgggcaacctgcgttctctgctacagatcttacgccaggatatgactccaggaggtggcccaggtgcccgccgtcgtcagcggggccgcttgatgcgacgcctggtacgccgtctccgccgctggggcttgctccctcgaaccaacaccccggctcgggcctctgaggccagatcccaggtcacaccttctgctgctccccttgaggccctagatggtggcacaggtccagcccgtgagggcggggcagtgggtgggcaagatggggagcaggcacccccactgcccatcaaggctcccctcccatctgctagcacgtctccagcccccactactgtccctgaagccccagggccactgccctcactgcccctagagccatcactattgtctggagtggtgcaggccctgcgaggccgcctgttgcccagcctggggcccccaggaccaacccggagcccccctggaccccacacagcagtcctggccctggaagatgaggacgatgtgctactggtgccactggctgagccgggggtgtgggtagctgaggcagaggatgagccactgcttacctgaggggacctgggggctctactgaggcctctcccctgggggctctactcatagtggcacaaccttttagaggtgggtcagcctcccctccaccacttccttccctgtccctggatttcagggacttggtgggcctcccgttgaccctatgtagctgctataaagttaagtgtccctcaggcagggagagggctcacagagtctcctctgtacgtggccatggccagacaccccagtcccttcaccaccacctgctccccacgccaccaccatttgggtggctgtttttaaaaagtaaagttcttagaggatcataggtctggacactccatccttgccaaacctctacccaaaagtggccttaagcaccggaatgccaattaactagagaccctccagcccccaaggggaggatttgggcagaacctgaggttttgccatccacaatccctcctacagggcctggctcacaaaaagagtgcaacaaatgcttctattccatagctacggcattgctcagtaagttgaggtcaaaaataaaggaatcatacatctcaaaattttgcaaattagctgcgagcctgagccccgcctctgcccatctcagtctatgctcacctcatcccactcctccctgtggagccctttgcttggccctctacctcctgccctcttcctgttcatctcccaaccactgcactcttgatttttataccacacagaaggtaagaaaattctaggaaccctaaggatcaatcctctccattttcactcaaatgcctggggcccagctctgcaatgactgactccagggcctctttcctcactgccagcatagaagtcaggggagccagctgggccctgcggtcaggaaggttctcatttttggagcataccctgagcccagatcataggagcagctgtccctggtgggacacaggagtcatgactcctaccctccaccctccacacccaccaggcatttagcagtctgtcctatgcaagacagatgaattctcagccaggatacctcaaggcaggcaaaggtgagtggagggagaattcacaaacattcagggtgtgtggtgctggcatcaccatggccaaatccaagaggtcttcctggaagagggcccaaactggaaccaaaagaatgctgtcagcagttggaatagagctgtgaattctagacagggggagtgtccccagaacaagcaaacggaggagacaagagggcaagggttataggaaagaccctgggcctgagagcacaagcagcggccagagctgcagcgctggggtgggtgatggagggaatgattcgcaagcagtgttggaacccagcccctagtgagcaaagtgacagaagctgccccagagtttggaaggaagatcgaggcagaagatgtagaaggaagctgtgggggtgggagtgatgcctcaggaacaaaactgaggaattccctaacggacccagtccctggggaaagaggctcccctcaggctctccttgtctagccccacacctggcagagcctgtcacccagcctagccccacgcctggcagagcccatcacccagcctagccccacacctggtggagaggccctgttgattacaccctgtcagcctcctcaaacccagcactaattgcacaattttcctctcttctagtgagcaagagcctgaggaagtagcagagaggggtgtgggcccatgtgcagttctgggaccctggcaccttggctcagggaagacccgagctcctttcactgcagaccctctccagagactggggagagggctctggagaacctggttcttgcttactgttctccctttgggccctccttcccaaacgcaaacaatccaggatccactcagcgtcaggcccaatggaaatagtgaagcagtgattttccctcccctgcctctccatagcctggtcttttgccctctcctttgctcttctcttcccccatagccacctcaaatacctgcagcctgatatcttcatcccttcatccagaccttttctctcctagtggtattgcaaactgaaagtggacaaagacttaaggtaaacctgctcctcatggtggaatgcttccaaatgctggaaggaggactttagggcagagttcactaaggaggcttgtgcttatagatcagtgggcctgaaagaagtttctctaggttctggttgtgtgctgtacgaggtgtaggtagtaataatactcttgtcagccacagtgaagccccaagctagccgggataggggactgaccttgtacaggcagcatggagaaactaagacagagtgtcctgcccaagtgatggcactggggagcagtcactcaggtttatttccaccagggcccaagaaaaaaagaaatgaggcaacctaaaattccatcaagatagataccaatatccaaggtgcttggtcttagcggtgtgggacccacgttaaggctcttggtgggaaggtgggaggtgttttcagcatgagatagggttcaggctgtgaatcagagtctagagcctaagataaaagaagataccagggctgggccacggtggctttcgcctgtaatcctagcactttgggaggccaaggcaggcagactgcctgagctcaggagttcgagactagcctgagcaacacggtgaaaccctgtctctactaaaatacaaaaaagtagccaggtgtggcggcatgcacctgtagtcccagctactcgagaggctgaggcaggagaattgcttgaacccgggaggcggaggttgcagtgagtggagatcgcgccactgcactctagcctgggtgacagagcgagactccttctccaaaaaaaaagaaaagaagataccagaactcagtccttaagaaacaaaattctgccaggcgcagtagctcacacctgtaatcccagcactttggaggggccaaggcaggcggatcgcttgaggccaagagttcaagaacagcctgggcaacatgatgaaaccctgtctctaccaaaaatactaaaaattagccagtctcacaacctggtctcaaaataaataaatagatttaaaaaaaaaatcatgggcctgaaccaagctccagacctcactaggaggggagaaggaccccccagccacacagcccaaggctgcagaagcacctaggtggttagagagtgagtgcctggatggggcgcagtggctcacacctgtaatcccagcactttgggaggccgaggcaggcggatcacgaggtcaagagatcaagaccatcctggccaacatggtgacaccgtgtctctactaaaaatacaaaaataagctgggcatggtggtgcgtgcctgtagtcccatctactcgggaggctgaagcaggagaatcacttgaacctgggaggcaaaggttgcagtgagctgagatcgcgccactgcactccagcctggcaacagagcgagacaagactccatctcaaaaaaaaaagtgagtgcccgatgatgccagattcttcatcacctgaagtgaacccacacaacagggctgggccatgggcatcataaaccccattttgcaagctcaggaggagctttagggaaatcagaagactggcccagtctctaccaagtggtggatttagagccggcatggcttcgttccaaatctcacccttgtcccaccattccatgggacctcccattcctgagggagcctggatacgggcaagtgcacaacccgggaggttgaggttacagtgagccatgatcgcaccactgcagtccagcccgagcaatagggtgagaccctccctctgaaaaaaataaaaatactcattttggaaggaagtcattctaaaatgttacacttgtcttcagcatatctgcaatataataattttctgcataactgaggatcattcacagaaaccaatggcttttctccagcagtgtcttctgaagttgtaacagtaggggcacggggagctatttgcttttatgctaaatgaccttagaccacttataaaatgcatatgagtgctttaaatgtt

SEQ ID NO: 7867 - protein, 67 aa, Homo sapiens; identical to SEQ ID NO: 7861

SEQ ID NO: 7868 - DNA, 6885 bp, Homo sapiens
aaatgtggaagctgaagctgcaagtcaagggcccgtctgacaagtccggcagggccgggaaaggggttaaggcgagcaagtgggtgtggcccgtgcgttgattggcaggggtgggaccgggcttgtcacccgccccggctactccaacccctgggcgggcgggggtaccgcctgggcaagggccggggcgccgggccgagccacctcttcccctcccccgcttccctgtcgcgctccgctggctggacgcgctggaggagtggagcagcacccggccggccctgggggctgacagtcggcaaagtttggcccgaagaggaagtggtctcaaaccccggcaggtggcgaccaggccagaccaggggcgctcgctgcctgcgggcgggctgtaggcgagggcgcgccccagtgccgagacccggggcttcaggagccggccccgggagagaagagtgcggcggcggacggagaaaacaactccaaagttggcgaaaggcaccgcccctactcccgggctgccgccgcctccccgcccccagccctggcatccagagtacgggtcgagcccgggccatggagcccccctggggaggcggcaccagggagcctgggcgcccggggctccgccgcgaccccatcgggtagaccacagaagctccgggacccttccggcacctctggacagcccaggatgctgttggccaccctcctcctcctcctccttggaggcgctctggcccatccagaccggattatttttccaaatcatgcttgtgaggaccccccagcagtgctcttagaagtgcagggcaccttacagaggcccctggtccgggacagccgcacctcccctgccaactgcacctggctcatcctgggcagcaaggaacagactgtcaccatcaggttccagaagctacacctggcctgtggctcagagcgcttaaccctacgctcccctctccagccactgatctccctgtgtgaggcacctcccagccctctgcagctgcccgggggcaacgtcaccatcacttacagctatgctggggccagagcacccatgggccagggcttcctgctctcctacagccaagattggctgatgtgcctgcaggaagagtttcagtgcctgaaccaccgctgtgtatctgctgtccagcgctgtgatggggttgatgcctgtggcgatggctctgatgaagcaggttgcagctcagaccccttccctggcctgaccccaagacccgtcccctccctgccttgcaatgtcaccttggaggacttctatggggtcttctcctctcctggatatacacacctagcctcagtctcccacccccagtcctgccattggctgctggacccccatgatggccggcggctggccgtgcgcttcacagccctggacttgggctttggagatgcagtgcatgtgtatgacggccctgggccccctgagagctcccgactactgcgtagtctcacccacttcagcaatggcaaggctgtcactgtggagacactgtctggccaggctgttgtgtcctaccacacagttgcttggagcaatggtcgtggcttcaatgccacctaccatgtgcggggctattgcttgccttgggacagaccctgtggcttaggctctggcctgggagctggcgaaggcctaggtgagcgctgctacagtgaggcacagcgctgtgacggctcatgggactgtgctgacggcacagatgaggaggactgcccaggctgcccacctggacacttcccctgtggggctgctggcacctctggtgccacagcctgctacctgcctgctgaccgctgcaactaccagactttctgtgctgatggagcagatgagagacgctgtcggcattgccagcctggcaatttccgatgccgggacgagaagtgcgtgtatgagacgtgggtgtgcgatgggcagccagactgtgcggacggcagtgatgagtgggactgctcctatgttctgccccgcaaggtcattacagctgcagtcattggcagcctagtgtgcggcctgctcctggtcatcgccctgggctgcacctgcaagctctatgccattcgcacccaggagtacagcatctttgcccccctctcccggatggaggctgagattgtgcagcagcaggcacccccttcctacgggcagctcattgcccagggtgccatcccacctgtagaagactttcctacagagaatcctaatgataactcagtgctgggcaacctgcgttctctgctacagatcttacgccaggatatgactccaggaggtggcccaggtgcccgccgtcgtcagcggggccgcttgatgcgacgcctggtacgccgtctccgccgctggggcttgctccctcgaaccaacaccccggctcgggcctctgaggccagatcccaggtcacaccttctgctgctccccttgaggccctagatggtggcacaggtccagcccgtgagggcggggcagtgggtgggcaagatggggagcaggcacccccactgcccatcaaggctcccctcccatctgctagcacgtctccagcccccactactgtccctgaagccccagggccactgccctcactgcccctagagccatcactattgtctggagtggtgcaggccctgcgaggccgcctgttgcccagcctggggcccccaggaccaacccggagcccccctggaccccacacagcagtcctggccctggaagatgaggacgatgtgctactggtgccactggctgagccgggggtgtgggtagctgaggcagaggatgagccactgcttacctgaggggacctgggggctctactgaggcctctcccctgggggctctactcatagtggcacaaccttttagaggtgggtcagcctcccctccaccacttccttccctgtccctggatttcagggacttggtgggcctcccgttgaccctatgtagctgctataaagttaagtgtccctcaggcagggagagggctcacagagtctcctctgtacgtggccatggccagacaccccagtcccttcaccaccacctgctccccacgccaccaccatttgggtggctgtttttaaaaagtaaagttcttagaggatcataggtctggacactccatccttgccaaacctctacccaaaagtggccttaagcaccggaatgccaattaactagagaccctccagcccccaaggggaggatttgggcagaacctgaggttttgccatccacaatccctcctacagggcctggctcacaaaaagagtgcaacaaatgcttctattccatagctacggcattgctcagtaagttgaggtcaaaaataaaggaatcatacatctcaaaattttgcaaattagctgcgagcctgagccccgcctctgcccatctcagtctatgctcacctcatcccactcctccctgtggagccctttgcttggccctctacctcctgccctcttcctgttcatctcccaaccactgcactcttgatttttataccacacagaaggtaagaaaattctaggaaccctaaggatcaatcctctccattttcactcaaatgcctggggcccagctctgcaatgactgactccagggcctctttcctcactgccagcatagaagtcaggggagccagctgggccctgcggtcaggaaggttctcatttttggagcataccctgagcccagatcataggagcagctgtccctggtgggacacaggagtcatgactcctaccctccaccctccacacccaccaggcatttagcagtctgtcctatgcaagacagatgaattctcagccaggatacctcaaggcaggcaaaggtgagtggagggagaattcacaaacattcagggtgtgtggtgctggcatcaccatggccaaatccaagaggtcttcctggaagagggcccaaactggaaccaaaagaatgctgtcagcagttggaatagagctgtgaattctagacagggggagtgtccccagaacaagcaaacggaggagacaagagggcaagggttataggaaagaccctgggcctgagagcacaagcagcggccagagctgcagcgctggggtgggtgatggagggaatgattcgcaagcagtgttggaacccagcccctagtgagcaaagtgacagaagctgccccagagtttggaaggaagatcgaggcagaagatgtagaaggaagctgtgggggtgggagtgatgcctcaggaacaaaactgaggaattccctaacggacccagtccctggggaaagaggctcccctcaggctctccttgtctagccccacacctggcagagcctgtcacccagcctagccccacgcctggcagagcccatcacccagcctagccccacacctggtggagaggccctgttgattacaccctgtcagcctcctcaaacccagcactaattgcacaattttcctctcttctagtgagcaagagcctgaggaagtagcagagaggggtgtgggcccatgtgcagttctgggaccctggcaccttggctcagggaagacccgagctcctttcactgcagaccctctccagagactggggagagggctctggagaacctggttcttgcttactgttctccctttgggccctccttcccaaacgcaaacaatccaggatccactcagcgtcaggcccaatggaaatagtgaagcagtgattttccctcccctgcctctccatagcctggtcttttgccctctcctttgctcttctcttcccccatagccacctcaaatacctgcagcctgatatcttcatcccttcatccagaccttttctctcctagtggtattgcaaactgaaagtggacaaagacttaaggtaaacctgctcctcatggtggaatgcttccaaatgctggaaggaggactttagggcagagttcactaaggaggcttgtgcttatagatcagtgggcctgaaagaagtttctctaggttctggttgtgtgctgtacgaggtgtaggtagtaataatactcttgtcagccacagtgaagccccaagctagccgggataggggactgaccttgtacaggcagcatggagaaactaagacagagtgtcctgcccaagtgatggcactggggagcagtcactcaggtttatttccaccagggcccaagaaaaaaagaaatgaggcaacctaaaattccatcaagatagataccaatatccaaggtgcttggtcttagcggtgtgggacccacgttaaggctcttggtgggaaggtgggaggtgttttcagcatgagatagggttcaggctgtgaatcagagtctagagcctaagataaaagaagataccagggctgggccacggtggctttcgcctgtaatcctagcactttgggaggccaaggcaggcagactgcctgagctcaggagttcgagactagcctgagcaacacggtgaaaccctgtctctactaaaatacaaaaaagtagccaggtgtggcggcatgcacctgtagtcccagctactcgagaggctgaggcaggagaattgcttgaacccgggaggcggaggttgcagtgagtggagatcgcgccactgcactctagcctgggtgacagagcgagactccttctccaaaaaaaaagaaaagaagataccagaactcagtccttaagaaacaaaattctgccaggcgcagtagctcacacctgtaatcccagcactttggaggggccaaggcaggcggatcgcttgaggccaagagttcaagaacagcctgggcaacatgatgaaaccctgtctctaccaaaaatactaaaaattagccagtctcacaacctggtctcaaaataaataaatagatttaaaaaaaaaatcatgggcctgaaccaagctccagacctcactaggaggggagaaggaccccccagccacacagcccaaggctgcagaagcacctaggtggttagagagtgagtgcctggatggggcgcagtggctcacacctgtaatcccagcactttgggaggccgaggcaggcggatcacgaggtcaagagatcaagaccatcctggccaacatggtgacaccgtgtctctactaaaaatacaaaaataagctgggcatggtggtgcgtgcctgtagtcccatctactcgggaggctgaagcaggagaatcacttgaacctgggaggcaaaggttgcagtgagctgagatcgcgccactgcactccagcctggcaacagagcgagacaagactccatctcaaaaaaaaaagtgagtgcccgatgatgccagattcttcatcacctgaagtgaacccacacaacagggctgggccatgggcatcataaaccccattttgcaagctcaggaggagctttagggaaatcagaagactggcccagtctctaccaagtggtggatttagagccggcatggcttcgttccaaatctcacccttgtcccaccattccatgggacctcccattcctgagggagcctggatacgggcaagtgcacaacccgggaggttgaggttacagtgagccatgatcgcaccactgcagtccagcccgagcaatagggtgagaccctccctctgaaaaaaataaaaatactcattttggaaggaagtcattctaaaatgttacacttgtcttcagcatatctgcaatataataattttctgcataactgaggatcattcacagaaaccaatggcttttctccagcagtgtcttctgaagttgtaacagtaggggcacggggagctatttgcttttatgctaaatgaccttagaccacttataaaatgcatatgagtgctttaaatgtt

SEQ ID NO: 7869 - protein, 713 aa, Homo sapiens; identical to SEQ ID NO: 1142

SEQ ID NO: 7870 - DNA, 7019 bp, Homo sapiens
aaatgtggaagctgaagctgcaagtcaagggcccgtctgacaagtccggcagggccgggaaaggggttaaggcgagcaagtgggtgtggcccgtgcgttgattggcaggggtgggaccgggcttgtcacccgccccggctactccaacccctgggcgggcgggggtaccgcctgggcaagggccggggcgccgggccgagccacctcttcccctcccccgcttccctgtcgcgctccgctggctggacgcgctggaggagtggagcagcacccggccggccctgggggctgacagtcggcaaagtttggcccgaagaggaagtggtctcaaaccccggcaggtggcgaccaggccagaccaggggcgctcgctgcctgcgggcgggctgtaggcgagggcgcgccccagtgccgagacccggggcttcaggagccggccccgggagagaagagtgcggcggcggacggagaaaacaactccaaagttggcgaaaggcaccgcccctactcccgggctgccgccgcctccccgcccccagccctggcatccagagtacgggtcgagcccgggccatggagcccccctggggaggcggcaccagggagcctgggcgcccggggctccgccgcgaccccatcgggtagaccacagaagctccgggacccttccggcacctctggacagcccaggatgctgttggccaccctcctcctcctcctccttggaggcgctctggcccatccagaccggattatttttccaaatcatgcttgtgaggaccccccagcagtgctcttagaagtgcagggcaccttacagaggcccctggtccgggacagccgcacctcccctgccaactgcacctggctcatcctgggcagcaaggaacagactgtcaccatcaggttccagaagctacacctggcctgtggctcagagcgcttaaccctacgctcccctctccagccactgatctccctgtgtgaggcacctcccagccctctgcagctgcccgggggcaacgtcaccatcacttacagctatgctggggccagagcacccatgggccagggcttcctgctctcctacagccaagattggctgatgtgcctgcaggaagagtttcagtgcctgaaccaccgctgtgtatctgctgtccagcgctgtgatggggttgatgcctgtggcgatggctctgatgaagcaggttgcagctcagaccccttccctggcctgaccccaagacccgtcccctccctgccttgcaatgtcaccttggaggacttctatggggtcttctcctctcctggatatacacacctagcctcagtctcccacccccagtcctgccattggctgctggacccccatgatggccggcggctggccgtgcgcttcacagccctggacttgggctttggagatgcagtgcatgtgtatgacggccctgggccccctgagagctcccgactactgcgtagtctcacccacttcagcaatggcaaggctgtcactgtggagacactgtctggccaggctgttgtgtcctaccacacagttgcttggagcaatggtcgtggcttcaatgccacctaccatgtgcggggctattgcttgccttgggacagaccctgtggcttaggctctggcctgggagctggcgaaggcctaggtgagcgctgctacagtgaggcacagcgctgtgacggctcatgggactgtgctgacggcacagatgaggaggactgcccaggctgcccacctggacacttcccctgtggggctgctggcacctctggtgccacagcctgctacctgcctgctgaccgctgcaactaccagactttctgtgctgatggagcagatgagagacgctgtcggcattgccagcctggcaatttccgatgccgggacgagaagtgcgtgtatgagacgtgggtgtgcgatgggcagccagactgtgcggacggcagtgatgagtgggactgctcctatgttctgccccgcaaggtcattacagctgcagtcattggcagcctagtgtgcggcctgctcctggtcatcgccctgggctgcacctgcaagctctatgccattcgcacccaggagtacagcatctttgcccccctctcccggatggaggctgagattgtgcagcagcaggcacccccttcctacgggcagctcattgcccagggtgccatcccacctgtagaagactttcctacagagaatcctaatgataactcagtgctgggcaacctgcgttctctgctacagatcttacgccaggatatgactccaggaggtggcccaggtgcccgccgtcgtcagcggggccgcttgatgcgacgcctggtacgccgtctccgccgctggggcttgctccctcgaaccaacaccccggctcgggcctctgaggccagatcccaggtcacaccttctgctgctccccttgaggccctagatggtggcacaggtccagcccgtgagggcggggcagtgggtgggcaagatggggagcaggcacccccactgcccatcaaggctcccctcccatctgctagcacgtctccagcccccactactgtccctgaagccccagggccactgccctcactgcccctagagccatcactattgtctggagtggtgcaggccctgcgaggccgcctgttgcccagcctggggcccccaggaccaacccggagcccccctggaccccacacagcagtcctggccctggaagatgaggacgatgtgctactggtgccactggctgagccgggggtgtgggtagctgaggcagaggatgagccactgcttacctgaggggacctgggggctctactgaggcctctcccctgggggctctactcatagtggcacaaccttttagaggtgggtcagcctcccctccaccacttccttccctgtccctggatttcagggacttggtgggcctcccgttgaccctatgtagctgctataaagttaagtgtccctcaggcagggagagggctcacagagtctcctctgtacgtggccatggccagacaccccagtcccttcaccaccacctgctccccacgccaccaccatttgggtggctgtttttaaaaagtaaagttcttagaggatcataggtctggacactccatccttgccaaacctctacccaaaagtggccttaagcaccggaatgccaattaactagagaccctccagcccccaaggggaggatttgggcagaacctgaggttttgccatccacaatccctcctacagggcctggctcacaaaaagagtgcaacaaatgcttctattccatagctacggcattgctcagtaagttgaggtcaaaaataaaggaatcatacatctcaaaattttgcaaattagctgcgagcctgagccccgcctctgcccatctcagtctatgctcacctcatcccactcctccctgtggagccctttgcttggccctctacctcctgccctcttcctgttcatctcccaaccactgcactcttgatttttataccacacagaaggtaagaaaattctaggaaccctaaggatcaatcctctccattttcactcaaatgcctggggcccagctctgcaatgactgactccagggcctctttcctcactgccagcatagaagtcaggggagccagctgggccctgcggtcaggaaggttctcatttttggagcataccctgagcccagatcataggagcagctgtccctggtgggacacaggagtcatgactcctaccctccaccctccacacccaccaggcatttagcagtctgtcctatgcaagacagatgaattctcagccaggatacctcaaggcaggcaaaggtgagtggagggagaattcacaaacattcagggtgtgtggtgctggcatcaccatggccaaatccaagaggtcttcctggaagagggcccaaactggaaccaaaagaatgctgtcagcagttggaatagagctgtgaattctagacagggggagtgtccccagaacaagcaaacggaggagacaagagggcaagggttataggaaagaccctgggcctgagagcacaagcagcggccagagctgcagcgctggggtgggtgatggagggaatgattcgcaagcagtgttggaacccagcccctagtgagcaaagtgacagaagctgccccagagtttggaaggaagatcgaggcagaagatgtagaaggaagctgtgggggtgggagtgatgcctcaggaacaaaactgaggaattccctaacggacccagtccctggggaaagaggctcccctcaggctctccttgtctagccccacacctggcagagcctgtcacccagcctagccccacgcctggcagagcccatcacccagcctagccccacacctggtggagaggccctgttgattacaccctgtcagcctcctcaaacccagcactaattgcacaattttcctctcttctagtgagcaagagcctgaggaagtagcagagaggggtgtgggcccatgtgcagttctgggaccctggcaccttggctcagggaagacccgagctcctttcactgcagaccctctccagagactggggagagggctctggagaacctggttcttgcttactgttctccctttgggccctccttcccaaacgcaaacaatccaggatccactcagcgtcaggcccaatggaaatagtgaagcagtgattttccctcccctgcctctccatagcctggtcttttgccctctcctttgctcttctcttcccccatagccacctcaaatacctgcagcctgatatcttcatcccttcatccagaccttttctctcctagtggtattgcaaactgaaagtggacaaagacttaaggtaaacctgctcctcatggtggaatgcttccaaatgctggaaggaggactttagggcagagttcactaaggaggcttgtgcttatagatcagtgggcctgaaagaagtttctctaggttctggttgtgtgctgtacgaggtgtaggtagtaataatactcttgtcagccacagtgaagccccaagctagccgggataggggactgaccttgtacaggcagcatggagaaactaagacagagtgtcctgcccaagtgatggcactggggagcagtcactcaggtttatttccaccagggcccaagaaaaaaagaaatgaggcaacctaaaattccatcaagatagataccaatatccaaggtgcttggtcttagcggtgtgggacccacgttaaggctcttggtgggaaggtgggaggtgttttcagcatgagatagggttcaggctgtgaatcagagtctagagcctaagataaaagaagataccagggctgggccacggtggctttcgcctgtaatcctagcactttgggaggccaaggcaggcagactgcctgagctcaggagttcgagactagcctgagcaacacggtgaaaccctgtctctactaaaatacaaaaaagtagccaggtgtggcggcatgcacctgtagtcccagctactcgagaggctgaggcaggagaattgcttgaacccgggaggcggaggttgcagtgagtggagatcgcgccactgcactctagcctgggtgacagagcgagactccttctccaaaaaaaaagaaaagaagataccagaactcagtccttaagaaacaaaattctgccaggcgcagtagctcacacctgtaatcccagcactttggaggggccaaggcaggcggatcgcttgaggccaagagttcaagaacagcctgggcaacatgatgaaaccctgtctctaccaaaaatactaaaaattagccagtctcacaacctggtctcaaaataaataaatagatttaaaaaaaaaatcatgggcctgaaccaagctccagacctcactaggaggggagaaggaccccccagccacacagcccaaggctgcagaagcacctaggtggttagagagtgagtgcctggatggggcgcagtggctcacacctgtaatcccagcactttgggaggccgaggcaggcggatcacgaggtcaagagatcaagaccatcctggccaacatggtgacaccgtgtctctactaaaaatacaaaaataagctgggcatggtggtgcgtgcctgtagtcccatctactcgggaggctgaagcaggagaatcacttgaacctgggaggcaaaggttgcagtgagctgagatcgcgccactgcactccagcctggcaacagagcgagacaagactccatctcaaaaaaaaaagtgagtgcccgatgatgccagattcttcatcacctgaagtgaacccacacaacagggctgggccatgggcatcataaaccccattttgcaagctcaggaggagctttagggaaatcagaagactggcccagtctctaccaagtggtggatttagagccggcatggcttcgttccaaatctcacccttgtcccaccattccatgggacctcccattcctgagggagcctggatacgggcaagtgcacaacccgggaggttgaggttacagtgagccatgatcgcaccactgcagtccagcccgagcaatagggtgagaccctccctctgaaaaaaataaaaatactcattttggaaggaagtcattctaaaatgttacacttgtcttcagcatatctgcaatataataattttctgcataactgaggatcattcacagaaaccaatggcttttctccagcagtgtcttctgaagttgtaacagtaggggcacggggagctatttgcttttatgctaaatgaccttagaccacttataaaatgcatatgagtgctttaaatgttattttgtgtgtgtgtggtgttgcctccctgactacaaggggtcacttgctactctaaatgtgtttctaatctactagtacaggaacacacatggacacgttaaaattgtgaataaaagtaagtaaaaagtaaaa

SEQ ID NO: 7871 - protein, 713 aa, Homo sapiens; identical to SEQ ID NO: 1142

SEQ ID NO: 7872 - DNA, 5673 bp, Homo sapiens
aaatgtggaagctgaagctgcaagtcaagggcccgtctgacaagtccggcagggccgggaaaggggttaaggcgagcaagtgggtgtggcccgtgcgttgattggcaggggtgggaccgggcttgtcacccgccccggctactccaacccctgggcgggcgggggtaccgcctgggcaagggccggggcgccgggccgagccacctcttcccctcccccgcttccctgtcgcgctccgctggctggacgcgctggaggagtggagcagcacccggccggccctgggggctgacagtcggcaaagtttggcccgaagaggaagtggtctcaaaccccggcaggtggcgaccaggccagaccaggggcgctcgctgcctgcgggcgggctgtaggcgagggcgcgccccagtgccgagacccggggcttcaggagccggccccgggagagaagagtgcggcggcggacggagaaaacaactccaaagttggcgaaaggcaccgcccctactcccgggctgccgccgcctccccgcccccagccctggcatccagagtacgggtcgagcccgggccatggagcccccctggggaggcggcaccagggagcctgggcgcccggggctccgccgcgaccccatcgggtagaccacagaagctccgggacccttccggcacctctggacagcccaggatgctgttggccaccctcctcctcctcctccttggaggcgctctggcccatccagaccggattatttttccaaatcatgcttgtgaggaccccccagcagtgctcttagaagtgcagggcaccttacagaggcccctggtccgggacagccgcacctcccctgccaactgcacctgtagaagactttcctacagagaatcctaatgataactcagtgctgggcaacctgcgttctctgctacagatcttacgccaggatatgactccaggaggtggcccaggtgcccgccgtcgtcagcggggccgcttgatgcgacgcctggtacgccgtctccgccgctggggcttgctccctcgaaccaacaccccggctcgggcctctgaggccagatcccaggtcacaccttctgctgctccccttgaggccctagatggtggcacaggtccagcccgtgagggcggggcagtgggtgggcaagatggggagcaggcacccccactgcccatcaaggctcccctcccatctgctagcacgtctccagcccccactactgtccctgaagccccagggccactgccctcactgcccctagagccatcactattgtctggagtggtgcaggccctgcgaggccgcctgttgcccagcctggggcccccaggaccaacccggagcccccctggaccccacacagcagtcctggccctggaagatgaggacgatgtgctactggtgccactggctgagccgggggtgtgggtagctgaggcagaggatgagccactgcttacctgaggggacctgggggctctactgaggcctctcccctgggggctctactcatagtggcacaaccttttagaggtgggtcagcctcccctccaccacttccttccctgtccctggatttcagggacttggtgggcctcccgttgaccctatgtagctgctataaagttaagtgtccctcaggcagggagagggctcacagagtctcctctgtacgtggccatggccagacaccccagtcccttcaccaccacctgctccccacgccaccaccatttgggtggctgtttttaaaaagtaaagttcttagaggatcataggtctggacactccatccttgccaaacctctacccaaaagtggccttaagcaccggaatgccaattaactagagaccctccagcccccaaggggaggatttgggcagaacctgaggttttgccatccacaatccctcctacagggcctggctcacaaaaagagtgcaacaaatgcttctattccatagctacggcattgctcagtaagttgaggtcaaaaataaaggaatcatacatctcaaaattttgcaaattagctgcgagcctgagccccgcctctgcccatctcagtctatgctcacctcatcccactcctccctgtggagccctttgcttggccctctacctcctgccctcttcctgttcatctcccaaccactgcactcttgatttttataccacacagaaggtaagaaaattctaggaaccctaaggatcaatcctctccattttcactcaaatgcctggggcccagctctgcaatgactgactccagggcctctttcctcactgccagcatagaagtcaggggagccagctgggccctgcggtcaggaaggttctcatttttggagcataccctgagcccagatcataggagcagctgtccctggtgggacacaggagtcatgactcctaccctccaccctccacacccaccaggcatttagcagtctgtcctatgcaagacagatgaattctcagccaggatacctcaaggcaggcaaaggtgagtggagggagaattcacaaacattcagggtgtgtggtgctggcatcaccatggccaaatccaagaggtcttcctggaagagggcccaaactggaaccaaaagaatgctgtcagcagttggaatagagctgtgaattctagacagggggagtgtccccagaacaagcaaacggaggagacaagagggcaagggttataggaaagaccctgggcctgagagcacaagcagcggccagagctgcagcgctggggtgggtgatggagggaatgattcgcaagcagtgttggaacccagcccctagtgagcaaagtgacagaagctgccccagagtttggaaggaagatcgaggcagaagatgtagaaggaagctgtgggggtgggagtgatgcctcaggaacaaaactgaggaattccctaacggacccagtccctggggaaagaggctcccctcaggctctccttgtctagccccacacctggcagagcctgtcacccagcctagccccacgcctggcagagcccatcacccagcctagccccacacctggtggagaggccctgttgattacaccctgtcagcctcctcaaacccagcactaattgcacaattttcctctcttctagtgagcaagagcctgaggaagtagcagagaggggtgtgggcccatgtgcagttctgggaccctggcaccttggctcagggaagacccgagctcctttcactgcagaccctctccagagactggggagagggctctggagaacctggttcttgcttactgttctccctttgggccctccttcccaaacgcaaacaatccaggatccactcagcgtcaggcccaatggaaatagtgaagcagtgattttccctcccctgcctctccatagcctggtcttttgccctctcctttgctcttctcttcccccatagccacctcaaatacctgcagcctgatatcttcatcccttcatccagaccttttctctcctagtggtattgcaaactgaaagtggacaaagacttaaggtaaacctgctcctcatggtggaatgcttccaaatgctggaaggaggactttagggcagagttcactaaggaggcttgtgcttatagatcagtgggcctgaaagaagtttctctaggttctggttgtgtgctgtacgaggtgtaggtagtaataatactcttgtcagccacagtgaagccccaagctagccgggataggggactgaccttgtacaggcagcatggagaaactaagacagagtgtcctgcccaagtgatggcactggggagcagtcactcaggtttatttccaccagggcccaagaaaaaaagaaatgaggcaacctaaaattccatcaagatagataccaatatccaaggtgcttggtcttagcggtgtgggacccacgttaaggctcttggtgggaaggtgggaggtgttttcagcatgagatagggttcaggctgtgaatcagagtctagagcctaagataaaagaagataccagggctgggccacggtggctttcgcctgtaatcctagcactttgggaggccaaggcaggcagactgcctgagctcaggagttcgagactagcctgagcaacacggtgaaaccctgtctctactaaaatacaaaaaagtagccaggtgtggcggcatgcacctgtagtcccagctactcgagaggctgaggcaggagaattgcttgaacccgggaggcggaggttgcagtgagtggagatcgcgccactgcactctagcctgggtgacagagcgagactccttctccaaaaaaaaagaaaagaagataccagaactcagtccttaagaaacaaaattctgccaggcgcagtagctcacacctgtaatcccagcactttggaggggccaaggcaggcggatcgcttgaggccaagagttcaagaacagcctgggcaacatgatgaaaccctgtctctaccaaaaatactaaaaattagccagtctcacaacctggtctcaaaataaataaatagatttaaaaaaaaaatcatgggcctgaaccaagctccagacctcactaggaggggagaaggaccccccagccacacagcccaaggctgcagaagcacctaggtggttagagagtgagtgcctggatggggcgcagtggctcacacctgtaatcccagcactttgggaggccgaggcaggcggatcacgaggtcaagagatcaagaccatcctggccaacatggtgacaccgtgtctctactaaaaatacaaaaataagctgggcatggtggtgcgtgcctgtagtcccatctactcgggaggctgaagcaggagaatcacttgaacctgggaggcaaaggttgcagtgagctgagatcgcgccactgcactccagcctggcaacagagcgagacaagactccatctcaaaaaaaaaagtgagtgcccgatgatgccagattcttcatcacctgaagtgaacccacacaacagggctgggccatgggcatcataaaccccattttgcaagctcaggaggagctttagggaaatcagaagactggcccagtctctaccaagtggtggatttagagccggcatggcttcgttccaaatctcacccttgtcccaccattccatgggacctcccattcctgagggagcctggatacgggcaagtgcacaacccgggaggttgaggttacagtgagccatgatcgcaccactgcagtccagcccgagcaatagggtgagaccctccctctgaaaaaaataaaaatactcattttggaaggaagtcattctaaaatgttacacttgtcttcagcatatctgcaatataataattttctgcataactgaggatcattcacagaaaccaatggcttttctccagcagtgtcttctgaagttgtaacagtaggggcacggggagctatttgcttttatgctaaatgaccttagaccacttataaaatgcatatgagtgctttaaatgttattttgtgtgtgtgtggtgttgcctccctgactacaaggggtcacttgctactctaaatgtgtttctaatctactagtacaggaacacacatggacacgttaaaattgtgaataaaagtaagtaaaaagtaaaa

SEQ ID NO: 7873 - protein, 67 aa, Homo sapiens; identical to SEQ ID NO: 7861

SEQ ID NO: 7874 - DNA, 1462 bp, Homo sapiens
tactccaacccctgggcgggcgggggtaccgcctgggcaagggccggggcgccgggccgagccacctcttcccctcccccgcttccctgtcgcgctccgctggctggacgcgctggaggagtggagcagcacccggccggccctgggggctgacagtcggcaaagtttggcccgaagaggaagtggtctcaaaccccggcaggtggcgaccaggccagaccaggggcgctcgctgcctgcgggcgggctgtaggcgagggcgcgccccagtgccgagacccggggcttcaggagccggccccgggagagaagagtgcggcggcggacggagaaaacaactccaaagttggcgaaaggcaccgcccctactcccgggctgccgccgcctccccgcccccagccctggcatccagagtacgggtcgagcccgggccatggagcccccctggggaggcggcaccagggagcctgggcgcccggggctccgccgcgaccccatcgggtagaccacagaagctccgggacccttccggcacctctggacagcccaggatgctgttggccaccctcctcctcctcctccttggaggcgctctggcccatccagaccggattatttttccaaatcatgcttgtgaggaccccccagcagtgctcttagaagtgcagggcaccttacagaggcccctggtccgggacagccgcacctcccctgccaactgcacctggctcatcctgggcagcaaggaacagactgtcaccatcaggttccagaagctacacctggcctgtggctcagagcgcttaaccctacgctcccctctccagccactgatctccctgtgtgaggcacctcccagccctctgcagctgcccgggggcaacgtcaccatcacttacagctatgctggggccagagcacccatgggccagggcttcctgctctcctacagccaagattggctgatgtgcctgcaggaagagtttcagtgcctgaaccaccgctcgctgtgacggctcatgggactgtgctgacggcacagatgaggaggactgcccaggctgcccacctggacacttcccctgtggggctgctggcacctctggtgccacagcctgctacctgcctgctgaccgctgcaactaccagactttctgtgctgatggagcagatgagagacgctgtcggcattgccagcctggcaatttccgatgccgggacgagaagtgcgtgtatgagacgtgggtgtgcgatgggcagccagactgtgcggacggcagtgatgagtgggactgctcctatgttctgccccgcaaggtcattacagctgcagtcattggcagcctagtgtgcggcctgctcctggtcatcgccctgggctgcacctgcaagctctatgccattcgcacccaggagtacaggtcagtgggagtggggctggcagtagaagagtagaccctg

SEQ ID NO: 7875 - protein, 153 aa, Homo sapiens
MLLATLLLLLLGGALAHPDRIIFPNHACEDPPAVLLEVQGTLQRPLVRDSRTSPANCTWLILGSKEQTVTIRFQKLHLACGSERLTLRSPLQPLISLCEAPPSPLQLPGGNVTITYSYAGARAPMGQGFLLSYSQDWLMCLQEEFQCLNHRSL

SEQ ID NO: 7876 - DNA, 882 bp, Homo sapiens
gggcaagggccggggcgccgggccgagccacctcttcccgtctccagcccccactactgtccctgaagccccagggccactgccctcactgcccctagagccatcactattgtctggagtggtgcaggccctgcgaggccgcctgttgcccagcctggggcccccaggaccaacccggagcccccctggaccccacacagcagtcctggccctggaagatgaggacgatgtgctactggtgccactggctgagccgggggtgtgggtagctgaggcagaggatgagccactgcttacctgaggggacctgggggctctactgaggcctctcccctgggggctctactcatagtggcacaaccttttagaggtgggtcagcctcccctccaccacttccttccctgtccctggatttcagggacttggtgggcctcccgttgaccctatgtagctgctataaagttaagtgtccctcaggcagggagagggctcacagagtctcctctgtacgtggccatggccagacaccccagtcccttcaccaccacctgctccccacgccaccaccatttgggtggctgtttttaaaaagtaaagttcttagaggatcataggtctggacactccatccttgccaaacctctacccaaaagtggccttaagcaccggaatgccaattaactagagaccctccagcccccaaggggaggatttgggcagaacctgaggttttgccatccacaatccctcctacagggcctggctcacaaaaagagtgcaacaaatgcttctattccatagctacggcattgctcagtaagttgaggtcaaaaataaaggaatcatacatctcaaaattttgcaaattagctgcgagcctg

SEQ ID NO: 7877 - protein, 99 aa, Homo sapiens
GKGRGAGPSHLFPSPAPTTVPEAPGPLPSLPLEPSLLSGVVQALRGRLLPSLGPPGPTRSPPGPHTAVLALEDEDDVLLVPLAEPGVWVAEAEDEPLLT

SEQ ID NO: 7878 - DNA, 4353 bp, Homo sapiens
gggcaagggccggggcgccgggccgagccacctcttcccgtctccagcccccactactgtccctgaagccccagggccactgccctcactgcccctagagccatcactattgtctggagtggtgcaggccctgcgaggccgcctgttgcccagcctggggcccccaggaccaacccggagcccccctggaccccacacagcagtcctggccctggaagatgaggacgatgtgctactggtgccactggctgagccgggggtgtgggtagctgaggcagaggatgagccactgcttacctgaggggacctgggggctctactgaggcctctcccctgggggctctactcatagtggcacaaccttttagaggtgggtcagcctcccctccaccacttccttccctgtccctggatttcagggacttggtgggcctcccgttgaccctatgtagctgctataaagttaagtgtccctcaggcagggagagggctcacagagtctcctctgtacgtggccatggccagacaccccagtcccttcaccaccacctgctccccacgccaccaccatttgggtggctgtttttaaaaagtaaagttcttagaggatcataggtctggacactccatccttgccaaacctctacccaaaagtggccttaagcaccggaatgccaattaactagagaccctccagcccccaaggggaggatttgggcagaacctgaggttttgccatccacaatccctcctacagggcctggctcacaaaaagagtgcaacaaatgcttctattccatagctacggcattgctcagtaagttgaggtcaaaaataaaggaatcatacatctcaaaattttgcaaattagctgcgagcctgagccccgcctctgcccatctcagtctatgctcacctcatcccactcctccctgtggagccctttgcttggccctctacctcctgccctcttcctgttcatctcccaaccactgcactcttgatttttataccacacagaaggtaagaaaattctaggaaccctaaggatcaatcctctccattttcactcaaatgcctggggcccagctctgcaatgactgactccagggcctctttcctcactgccagcatagaagtcaggggagccagctgggccctgcggtcaggaaggttctcatttttggagcataccctgagcccagatcataggagcagctgtccctggtgggacacaggagtcatgactcctaccctccaccctccacacccaccaggcatttagcagtctgtcctatgcaagacagatgaattctcagccaggatacctcaaggcaggcaaaggtgagtggagggagaattcacaaacattcagggtgtgtggtgctggcatcaccatggccaaatccaagaggtcttcctggaagagggcccaaactggaaccaaaagaatgctgtcagcagttggaatagagctgtgaattctagacagggggagtgtccccagaacaagcaaacggaggagacaagagggcaagggttataggaaagaccctgggcctgagagcacaagcagcggccagagctgcagcgctggggtgggtgatggagggaatgattcgcaagcagtgttggaacccagcccctagtgagcaaagtgacagaagctgccccagagtttggaaggaagatcgaggcagaagatgtagaaggaagctgtgggggtgggagtgatgcctcaggaacaaaactgaggaattccctaacggacccagtccctggggaaagaggctcccctcaggctctccttgtctagccccacacctggcagagcctgtcacccagcctagccccacgcctggcagagcccatcacccagcctagccccacacctggtggagaggccctgttgattacaccctgtcagcctcctcaaacccagcactaattgcacaattttcctctcttctagtgagcaagagcctgaggaagtagcagagaggggtgtgggcccatgtgcagttctgggaccctggcaccttggctcagggaagacccgagctcctttcactgcagaccctctccagagactggggagagggctctggagaacctggttcttgcttactgttctccctttgggccctccttcccaaacgcaaacaatccaggatccactcagcgtcaggcccaatggaaatagtgaagcagtgattttccctcccctgcctctccatagcctggtcttttgccctctcctttgctcttctcttcccccatagccacctcaaatacctgcagcctgatatcttcatcccttcatccagaccttttctctcctagtggtattgcaaactgaaagtggacaaagacttaaggtaaacctgctcctcatggtggaatgcttccaaatgctggaaggaggactttagggcagagttcactaaggaggcttgtgcttatagatcagtgggcctgaaagaagtttctctaggttctggttgtgtgctgtacgaggtgtaggtagtaataatactcttgtcagccacagtgaagccccaagctagccgggataggggactgaccttgtacaggcagcatggagaaactaagacagagtgtcctgcccaagtgatggcactggggagcagtcactcaggtttatttccaccagggcccaagaaaaaaagaaatgaggcaacctaaaattccatcaagatagataccaatatccaaggtgcttggtcttagcggtgtgggacccacgttaaggctcttggtgggaaggtgggaggtgttttcagcatgagatagggttcaggctgtgaatcagagtctagagcctaagataaaagaagataccagggctgggccacggtggctttcgcctgtaatcctagcactttgggaggccaaggcaggcagactgcctgagctcaggagttcgagactagcctgagcaacacggtgaaaccctgtctctactaaaatacaaaaaagtagccaggtgtggcggcatgcacctgtagtcccagctactcgagaggctgaggcaggagaattgcttgaacccgggaggcggaggttgcagtgagtggagatcgcgccactgcactctagcctgggtgacagagcgagactccttctccaaaaaaaaagaaaagaagataccagaactcagtccttaagaaacaaaattctgccaggcgcagtagctcacacctgtaatcccagcactttggaggggccaaggcaggcggatcgcttgaggccaagagttcaagaacagcctgggcaacatgatgaaaccctgtctctaccaaaaatactaaaaattagccagtctcacaacctggtctcaaaataaataaatagatttaaaaaaaaaatcatgggcctgaaccaagctccagacctcactaggaggggagaaggaccccccagccacacagcccaaggctgcagaagcacctaggtggttagagagtgagtgcctggatggggcgcagtggctcacacctgtaatcccagcactttgggaggccgaggcaggcggatcacgaggtcaagagatcaagaccatcctggccaacatggtgacaccgtgtctctactaaaaatacaaaaataagctgggcatggtggtgcgtgcctgtagtcccatctactcgggaggctgaagcaggagaatcacttgaacctgggaggcaaaggttgcagtgagctgagatcgcgccactgcactccagcctggcaacagagcgagacaagactccatctcaaaaaaaaaagtgagtgcccgatgatgccagattcttcatcacctgaagtgaacccacacaacagggctgggccatgggcatcataaaccccattttgcaagctcaggaggagctttagggaaatcagaagactggcccagtctctaccaagtggtggatttagagccggcatggcttcgttccaaatctcacccttgtcccaccattccatgggacctcccattcctgagggagcctggatacgggcaagtgcacaacccgggaggttgaggttacagtgagccatgatcgcaccactgcagtccagcccgagcaatagggtgagaccctccctctgaaaaaaataaaaatactcattttggaaggaagtcattctaaaatgttacacttgtcttcagcatatctgcaatataataattttctgcataactgaggatcattcacagaaaccaatggcttttctccagcagtgtcttctgaagttgtaacagtaggggcacggggagctatttgcttttatgctaaatgaccttagaccacttataaaatgcatatgagtgctttaaatgtt

SEQ ID NO: 7879 - protein, 62 aa, Homo sapiens
MCSSGTLAPWLREDPSSFHCRPSPETGERALENLVLAYCSPFGPSFPNANNPGSTQRQAQWK

SEQ ID NO: 7880 - DNA, 4487 bp, Homo sapiens
gggcaagggccggggcgccgggccgagccacctcttcccgtctccagcccccactactgtccctgaagccccagggccactgccctcactgcccctagagccatcactattgtctggagtggtgcaggccctgcgaggccgcctgttgcccagcctggggcccccaggaccaacccggagcccccctggaccccacacagcagtcctggccctggaagatgaggacgatgtgctactggtgccactggctgagccgggggtgtgggtagctgaggcagaggatgagccactgcttacctgaggggacctgggggctctactgaggcctctcccctgggggctctactcatagtggcacaaccttttagaggtgggtcagcctcccctccaccacttccttccctgtccctggatttcagggacttggtgggcctcccgttgaccctatgtagctgctataaagttaagtgtccctcaggcagggagagggctcacagagtctcctctgtacgtggccatggccagacaccccagtcccttcaccaccacctgctccccacgccaccaccatttgggtggctgtttttaaaaagtaaagttcttagaggatcataggtctggacactccatccttgccaaacctctacccaaaagtggccttaagcaccggaatgccaattaactagagaccctccagcccccaaggggaggatttgggcagaacctgaggttttgccatccacaatccctcctacagggcctggctcacaaaaagagtgcaacaaatgcttctattccatagctacggcattgctcagtaagttgaggtcaaaaataaaggaatcatacatctcaaaattttgcaaattagctgcgagcctgagccccgcctctgcccatctcagtctatgctcacctcatcccactcctccctgtggagccctttgcttggccctctacctcctgccctcttcctgttcatctcccaaccactgcactcttgatttttataccacacagaaggtaagaaaattctaggaaccctaaggatcaatcctctccattttcactcaaatgcctggggcccagctctgcaatgactgactccagggcctctttcctcactgccagcatagaagtcaggggagccagctgggccctgcggtcaggaaggttctcatttttggagcataccctgagcccagatcataggagcagctgtccctggtgggacacaggagtcatgactcctaccctccaccctccacacccaccaggcatttagcagtctgtcctatgcaagacagatgaattctcagccaggatacctcaaggcaggcaaaggtgagtggagggagaattcacaaacattcagggtgtgtggtgctggcatcaccatggccaaatccaagaggtcttcctggaagagggcccaaactggaaccaaaagaatgctgtcagcagttggaatagagctgtgaattctagacagggggagtgtccccagaacaagcaaacggaggagacaagagggcaagggttataggaaagaccctgggcctgagagcacaagcagcggccagagctgcagcgctggggtgggtgatggagggaatgattcgcaagcagtgttggaacccagcccctagtgagcaaagtgacagaagctgccccagagtttggaaggaagatcgaggcagaagatgtagaaggaagctgtgggggtgggagtgatgcctcaggaacaaaactgaggaattccctaacggacccagtccctggggaaagaggctcccctcaggctctccttgtctagccccacacctggcagagcctgtcacccagcctagccccacgcctggcagagcccatcacccagcctagccccacacctggtggagaggccctgttgattacaccctgtcagcctcctcaaacccagcactaattgcacaattttcctctcttctagtgagcaagagcctgaggaagtagcagagaggggtgtgggcccatgtgcagttctgggaccctggcaccttggctcagggaagacccgagctcctttcactgcagaccctctccagagactggggagagggctctggagaacctggttcttgcttactgttctccctttgggccctccttcccaaacgcaaacaatccaggatccactcagcgtcaggcccaatggaaatagtgaagcagtgattttccctcccctgcctctccatagcctggtcttttgccctctcctttgctcttctcttcccccatagccacctcaaatacctgcagcctgatatcttcatcccttcatccagaccttttctctcctagtggtattgcaaactgaaagtggacaaagacttaaggtaaacctgctcctcatggtggaatgcttccaaatgctggaaggaggactttagggcagagttcactaaggaggcttgtgcttatagatcagtgggcctgaaagaagtttctctaggttctggttgtgtgctgtacgaggtgtaggtagtaataatactcttgtcagccacagtgaagccccaagctagccgggataggggactgaccttgtacaggcagcatggagaaactaagacagagtgtcctgcccaagtgatggcactggggagcagtcactcaggtttatttccaccagggcccaagaaaaaaagaaatgaggcaacctaaaattccatcaagatagataccaatatccaaggtgcttggtcttagcggtgtgggacccacgttaaggctcttggtgggaaggtgggaggtgttttcagcatgagatagggttcaggctgtgaatcagagtctagagcctaagataaaagaagataccagggctgggccacggtggctttcgcctgtaatcctagcactttgggaggccaaggcaggcagactgcctgagctcaggagttcgagactagcctgagcaacacggtgaaaccctgtctctactaaaatacaaaaaagtagccaggtgtggcggcatgcacctgtagtcccagctactcgagaggctgaggcaggagaattgcttgaacccgggaggcggaggttgcagtgagtggagatcgcgccactgcactctagcctgggtgacagagcgagactccttctccaaaaaaaaagaaaagaagataccagaactcagtccttaagaaacaaaattctgccaggcgcagtagctcacacctgtaatcccagcactttggaggggccaaggcaggcggatcgcttgaggccaagagttcaagaacagcctgggcaacatgatgaaaccctgtctctaccaaaaatactaaaaattagccagtctcacaacctggtctcaaaataaataaatagatttaaaaaaaaaatcatgggcctgaaccaagctccagacctcactaggaggggagaaggaccccccagccacacagcccaaggctgcagaagcacctaggtggttagagagtgagtgcctggatggggcgcagtggctcacacctgtaatcccagcactttgggaggccgaggcaggcggatcacgaggtcaagagatcaagaccatcctggccaacatggtgacaccgtgtctctactaaaaatacaaaaataagctgggcatggtggtgcgtgcctgtagtcccatctactcgggaggctgaagcaggagaatcacttgaacctgggaggcaaaggttgcagtgagctgagatcgcgccactgcactccagcctggcaacagagcgagacaagactccatctcaaaaaaaaaagtgagtgcccgatgatgccagattcttcatcacctgaagtgaacccacacaacagggctgggccatgggcatcataaaccccattttgcaagctcaggaggagctttagggaaatcagaagactggcccagtctctaccaagtggtggatttagagccggcatggcttcgttccaaatctcacccttgtcccaccattccatgggacctcccattcctgagggagcctggatacgggcaagtgcacaacccgggaggttgaggttacagtgagccatgatcgcaccactgcagtccagcccgagcaatagggtgagaccctccctctgaaaaaaataaaaatactcattttggaaggaagtcattctaaaatgttacacttgtcttcagcatatctgcaatataataattttctgcataactgaggatcattcacagaaaccaatggcttttctccagcagtgtcttctgaagttgtaacagtaggggcacggggagctatttgcttttatgctaaatgaccttagaccacttataaaatgcatatgagtgctttaaatgttattttgtgtgtgtgtggtgttgcctccctgactacaaggggtcacttgctactctaaatgtgtttctaatctactagtacaggaacacacatggacacgttaaaattgtgaataaaagtaagtaaaaagtaaaa

SEQ ID NO: 7881 - protein, 62 aa, Homo sapiens; identical to SEQ ID NO: 7879

SEQ ID NO: 7882 - DNA, 775 bp, Homo sapiens
agattggctgatgtgcctgcaggaagagtttcagtgcctgaaccaccgctgtgtatctgctgtccagcgctgtgatggggttgatgcctgtggcgatggctctgatgaagcaggttgcagctcagaccccttccctggcctgaccccaagacccgtcccctccctgccttgcaatgtcaccttggaggacttctatggggtcttctcctctcctggatatacacacctagcctcagtctcccacccccagtcctgccattggctgctggacccccatgatggccggcggctggccgtgcgcttcacagccctggacttgggctttggagatgcagtgcatgtgtatgacggccctgggccccctgagagctcccgactactgcgtagtctcacccacttcagcaatggcaaggctgtcactgtggagacactgtctggccaggctgttgtgtcgccaccaccatttgggtggctgtttttaaaaagtaaagttcttagaggatcataggtctggacactccatccttgccaaacctctacccaaaagtggccttaagcaccggaatgccaattaactagagaccctccagcccccaaggggaggatttgggcagaacctgaggttttgccatccacaatccctcctacagggcctggctcacaaaaagagtgcaacaaatgcttctattccatagctacggcattgctcagtaagttgaggtcaaaaataaaggaatcatacatctcaaaattttgcaaattagctgcgagcctg

SEQ ID NO: 7883 - protein, 165 aa, Homo sapiens
MCLQEEFQCLNHRCVSAVQRCDGVDACGDGSDEAGCSSDPFPGLTPRPVPSLPCNVTLEDFYGVFSSPGYTHLASVSHPQSCHWLLDPHDGRRLAVRFTALDLGFGDAVHVYDGPGPPESSRLLRSLTHFSNGKAVTVETLSGQAVVSPPPFGWLFLKSKVLRGS

SEQ ID NO: 7884 - DNA, 4246 bp, Homo sapiens
agattggctgatgtgcctgcaggaagagtttcagtgcctgaaccaccgctgtgtatctgctgtccagcgctgtgatggggttgatgcctgtggcgatggctctgatgaagcaggttgcagctcagaccccttccctggcctgaccccaagacccgtcccctccctgccttgcaatgtcaccttggaggacttctatggggtcttctcctctcctggatatacacacctagcctcagtctcccacccccagtcctgccattggctgctggacccccatgatggccggcggctggccgtgcgcttcacagccctggacttgggctttggagatgcagtgcatgtgtatgacggccctgggccccctgagagctcccgactactgcgtagtctcacccacttcagcaatggcaaggctgtcactgtggagacactgtctggccaggctgttgtgtcgccaccaccatttgggtggctgtttttaaaaagtaaagttcttagaggatcataggtctggacactccatccttgccaaacctctacccaaaagtggccttaagcaccggaatgccaattaactagagaccctccagcccccaaggggaggatttgggcagaacctgaggttttgccatccacaatccctcctacagggcctggctcacaaaaagagtgcaacaaatgcttctattccatagctacggcattgctcagtaagttgaggtcaaaaataaaggaatcatacatctcaaaattttgcaaattagctgcgagcctgagccccgcctctgcccatctcagtctatgctcacctcatcccactcctccctgtggagccctttgcttggccctctacctcctgccctcttcctgttcatctcccaaccactgcactcttgatttttataccacacagaaggtaagaaaattctaggaaccctaaggatcaatcctctccattttcactcaaatgcctggggcccagctctgcaatgactgactccagggcctctttcctcactgccagcatagaagtcaggggagccagctgggccctgcggtcaggaaggttctcatttttggagcataccctgagcccagatcataggagcagctgtccctggtgggacacaggagtcatgactcctaccctccaccctccacacccaccaggcatttagcagtctgtcctatgcaagacagatgaattctcagccaggatacctcaaggcaggcaaaggtgagtggagggagaattcacaaacattcagggtgtgtggtgctggcatcaccatggccaaatccaagaggtcttcctggaagagggcccaaactggaaccaaaagaatgctgtcagcagttggaatagagctgtgaattctagacagggggagtgtccccagaacaagcaaacggaggagacaagagggcaagggttataggaaagaccctgggcctgagagcacaagcagcggccagagctgcagcgctggggtgggtgatggagggaatgattcgcaagcagtgttggaacccagcccctagtgagcaaagtgacagaagctgccccagagtttggaaggaagatcgaggcagaagatgtagaaggaagctgtgggggtgggagtgatgcctcaggaacaaaactgaggaattccctaacggacccagtccctggggaaagaggctcccctcaggctctccttgtctagccccacacctggcagagcctgtcacccagcctagccccacgcctggcagagcccatcacccagcctagccccacacctggtggagaggccctgttgattacaccctgtcagcctcctcaaacccagcactaattgcacaattttcctctcttctagtgagcaagagcctgaggaagtagcagagaggggtgtgggcccatgtgcagttctgggaccctggcaccttggctcagggaagacccgagctcctttcactgcagaccctctccagagactggggagagggctctggagaacctggttcttgcttactgttctccctttgggccctccttcccaaacgcaaacaatccaggatccactcagcgtcaggcccaatggaaatagtgaagcagtgattttccctcccctgcctctccatagcctggtcttttgccctctcctttgctcttctcttcccccatagccacctcaaatacctgcagcctgatatcttcatcccttcatccagaccttttctctcctagtggtattgcaaactgaaagtggacaaagacttaaggtaaacctgctcctcatggtggaatgcttccaaatgctggaaggaggactttagggcagagttcactaaggaggcttgtgcttatagatcagtgggcctgaaagaagtttctctaggttctggttgtgtgctgtacgaggtgtaggtagtaataatactcttgtcagccacagtgaagccccaagctagccgggataggggactgaccttgtacaggcagcatggagaaactaagacagagtgtcctgcccaagtgatggcactggggagcagtcactcaggtttatttccaccagggcccaagaaaaaaagaaatgaggcaacctaaaattccatcaagatagataccaatatccaaggtgcttggtcttagcggtgtgggacccacgttaaggctcttggtgggaaggtgggaggtgttttcagcatgagatagggttcaggctgtgaatcagagtctagagcctaagataaaagaagataccagggctgggccacggtggctttcgcctgtaatcctagcactttgggaggccaaggcaggcagactgcctgagctcaggagttcgagactagcctgagcaacacggtgaaaccctgtctctactaaaatacaaaaaagtagccaggtgtggcggcatgcacctgtagtcccagctactcgagaggctgaggcaggagaattgcttgaacccgggaggcggaggttgcagtgagtggagatcgcgccactgcactctagcctgggtgacagagcgagactccttctccaaaaaaaaagaaaagaagataccagaactcagtccttaagaaacaaaattctgccaggcgcagtagctcacacctgtaatcccagcactttggaggggccaaggcaggcggatcgcttgaggccaagagttcaagaacagcctgggcaacatgatgaaaccctgtctctaccaaaaatactaaaaattagccagtctcacaacctggtctcaaaataaataaatagatttaaaaaaaaaatcatgggcctgaaccaagctccagacctcactaggaggggagaaggaccccccagccacacagcccaaggctgcagaagcacctaggtggttagagagtgagtgcctggatggggcgcagtggctcacacctgtaatcccagcactttgggaggccgaggcaggcggatcacgaggtcaagagatcaagaccatcctggccaacatggtgacaccgtgtctctactaaaaatacaaaaataagctgggcatggtggtgcgtgcctgtagtcccatctactcgggaggctgaagcaggagaatcacttgaacctgggaggcaaaggttgcagtgagctgagatcgcgccactgcactccagcctggcaacagagcgagacaagactccatctcaaaaaaaaaagtgagtgcccgatgatgccagattcttcatcacctgaagtgaacccacacaacagggctgggccatgggcatcataaaccccattttgcaagctcaggaggagctttagggaaatcagaagactggcccagtctctaccaagtggtggatttagagccggcatggcttcgttccaaatctcacccttgtcccaccattccatgggacctcccattcctgagggagcctggatacgggcaagtgcacaacccgggaggttgaggttacagtgagccatgatcgcaccactgcagtccagcccgagcaatagggtgagaccctccctctgaaaaaaataaaaatactcattttggaaggaagtcattctaaaatgttacacttgtcttcagcatatctgcaatataataattttctgcataactgaggatcattcacagaaaccaatggcttttctccagcagtgtcttctgaagttgtaacagtaggggcacggggagctatttgcttttatgctaaatgaccttagaccacttataaaatgcatatgagtgctttaaatgtt

SEQ ID NO: 7885 - protein, 165 aa, Homo sapiens; identical to SEQ ID NO: 7883

SEQ ID NO: 7886 - DNA, 4380 bp, Homo sapiens
agattggctgatgtgcctgcaggaagagtttcagtgcctgaaccaccgctgtgtatctgctgtccagcgctgtgatggggttgatgcctgtggcgatggctctgatgaagcaggttgcagctcagaccccttccctggcctgaccccaagacccgtcccctccctgccttgcaatgtcaccttggaggacttctatggggtcttctcctctcctggatatacacacctagcctcagtctcccacccccagtcctgccattggctgctggacccccatgatggccggcggctggccgtgcgcttcacagccctggacttgggctttggagatgcagtgcatgtgtatgacggccctgggccccctgagagctcccgactactgcgtagtctcacccacttcagcaatggcaaggctgtcactgtggagacactgtctggccaggctgttgtgtcgccaccaccatttgggtggctgtttttaaaaagtaaagttcttagaggatcataggtctggacactccatccttgccaaacctctacccaaaagtggccttaagcaccggaatgccaattaactagagaccctccagcccccaaggggaggatttgggcagaacctgaggttttgccatccacaatccctcctacagggcctggctcacaaaaagagtgcaacaaatgcttctattccatagctacggcattgctcagtaagttgaggtcaaaaataaaggaatcatacatctcaaaattttgcaaattagctgcgagcctgagccccgcctctgcccatctcagtctatgctcacctcatcccactcctccctgtggagccctttgcttggccctctacctcctgccctcttcctgttcatctcccaaccactgcactcttgatttttataccacacagaaggtaagaaaattctaggaaccctaaggatcaatcctctccattttcactcaaatgcctggggcccagctctgcaatgactgactccagggcctctttcctcactgccagcatagaagtcaggggagccagctgggccctgcggtcaggaaggttctcatttttggagcataccctgagcccagatcataggagcagctgtccctggtgggacacaggagtcatgactcctaccctccaccctccacacccaccaggcatttagcagtctgtcctatgcaagacagatgaattctcagccaggatacctcaaggcaggcaaaggtgagtggagggagaattcacaaacattcagggtgtgtggtgctggcatcaccatggccaaatccaagaggtcttcctggaagagggcccaaactggaaccaaaagaatgctgtcagcagttggaatagagctgtgaattctagacagggggagtgtccccagaacaagcaaacggaggagacaagagggcaagggttataggaaagaccctgggcctgagagcacaagcagcggccagagctgcagcgctggggtgggtgatggagggaatgattcgcaagcagtgttggaacccagcccctagtgagcaaagtgacagaagctgccccagagtttggaaggaagatcgaggcagaagatgtagaaggaagctgtgggggtgggagtgatgcctcaggaacaaaactgaggaattccctaacggacccagtccctggggaaagaggctcccctcaggctctccttgtctagccccacacctggcagagcctgtcacccagcctagccccacgcctggcagagcccatcacccagcctagccccacacctggtggagaggccctgttgattacaccctgtcagcctcctcaaacccagcactaattgcacaattttcctctcttctagtgagcaagagcctgaggaagtagcagagaggggtgtgggcccatgtgcagttctgggaccctggcaccttggctcagggaagacccgagctcctttcactgcagaccctctccagagactggggagagggctctggagaacctggttcttgcttactgttctccctttgggccctccttcccaaacgcaaacaatccaggatccactcagcgtcaggcccaatggaaatagtgaagcagtgattttccctcccctgcctctccatagcctggtcttttgccctctcctttgctcttctcttcccccatagccacctcaaatacctgcagcctgatatcttcatcccttcatccagaccttttctctcctagtggtattgcaaactgaaagtggacaaagacttaaggtaaacctgctcctcatggtggaatgcttccaaatgctggaaggaggactttagggcagagttcactaaggaggcttgtgcttatagatcagtgggcctgaaagaagtttctctaggttctggttgtgtgctgtacgaggtgtaggtagtaataatactcttgtcagccacagtgaagccccaagctagccgggataggggactgaccttgtacaggcagcatggagaaactaagacagagtgtcctgcccaagtgatggcactggggagcagtcactcaggtttatttccaccagggcccaagaaaaaaagaaatgaggcaacctaaaattccatcaagatagataccaatatccaaggtgcttggtcttagcggtgtgggacccacgttaaggctcttggtgggaaggtgggaggtgttttcagcatgagatagggttcaggctgtgaatcagagtctagagcctaagataaaagaagataccagggctgggccacggtggctttcgcctgtaatcctagcactttgggaggccaaggcaggcagactgcctgagctcaggagttcgagactagcctgagcaacacggtgaaaccctgtctctactaaaatacaaaaaagtagccaggtgtggcggcatgcacctgtagtcccagctactcgagaggctgaggcaggagaattgcttgaacccgggaggcggaggttgcagtgagtggagatcgcgccactgcactctagcctgggtgacagagcgagactccttctccaaaaaaaaagaaaagaagataccagaactcagtccttaagaaacaaaattctgccaggcgcagtagctcacacctgtaatcccagcactttggaggggccaaggcaggcggatcgcttgaggccaagagttcaagaacagcctgggcaacatgatgaaaccctgtctctaccaaaaatactaaaaattagccagtctcacaacctggtctcaaaataaataaatagatttaaaaaaaaaatcatgggcctgaaccaagctccagacctcactaggaggggagaaggaccccccagccacacagcccaaggctgcagaagcacctaggtggttagagagtgagtgcctggatggggcgcagtggctcacacctgtaatcccagcactttgggaggccgaggcaggcggatcacgaggtcaagagatcaagaccatcctggccaacatggtgacaccgtgtctctactaaaaatacaaaaataagctgggcatggtggtgcgtgcctgtagtcccatctactcgggaggctgaagcaggagaatcacttgaacctgggaggcaaaggttgcagtgagctgagatcgcgccactgcactccagcctggcaacagagcgagacaagactccatctcaaaaaaaaaagtgagtgcccgatgatgccagattcttcatcacctgaagtgaacccacacaacagggctgggccatgggcatcataaaccccattttgcaagctcaggaggagctttagggaaatcagaagactggcccagtctctaccaagtggtggatttagagccggcatggcttcgttccaaatctcacccttgtcccaccattccatgggacctcccattcctgagggagcctggatacgggcaagtgcacaacccgggaggttgaggttacagtgagccatgatcgcaccactgcagtccagcccgagcaatagggtgagaccctccctctgaaaaaaataaaaatactcattttggaaggaagtcattctaaaatgttacacttgtcttcagcatatctgcaatataataattttctgcataactgaggatcattcacagaaaccaatggcttttctccagcagtgtcttctgaagttgtaacagtaggggcacggggagctatttgcttttatgctaaatgaccttagaccacttataaaatgcatatgagtgctttaaatgttattttgtgtgtgtgtggtgttgcctccctgactacaaggggtcacttgctactctaaatgtgtttctaatctactagtacaggaacacacatggacacgttaaaattgtgaataaaagtaagtaaaaagtaaaa

SEQ ID NO: 7887 - protein, 165 aa, Homo sapiens; identical to SEQ ID NO: 7883

SEQ ID NO: 7888 - DNA, 1288 bp, Homo sapiens
gcagctacaggagaccacgaaagtgcccaccttggggagaggctcccatgatcagcttgtcagttgtgtcctgtaagggacaggtccagatcctgaaagcagtttcaagggaggagggacctcagatgacctttgggaaagccatggcacagctccagctggcctggcccgggtgtggaagtgggaggactgtccaggctgaggtggtctactctggccgagaactaccagtgactgagcagtcctcattccttctagcatctttgcccccctctcccggatggaggctgagattgtgcagcagcaggcacccccttcctacgggcagctcattgcccagggtgccatcccacctgtagaagactttcctacagagaatcctaatgataactcagtgctgggcaacctgcgttctctgctacagatcttacgccaggatatgactccaggaggtggcccaggtgcccgccgtcgtcagcggggccgcttgatgcgacgcctggtacgccgtctccgccgctggggcttgctccctcgaaccaacaccccggctcgggcctctgaggccagatcccaggtcacaccttctgctgctccccttgaggccctagatggtggcacaggtccagcccgtgagggcggggcagtgggtgggcaagatggggagcaggcacccccactgcccatcaaggctcccctcccatctgctagcacgtctccagcccccactactgtccctgaagccccagggccactgccctcactgcccctagagccatcactattgtctggagtggtgcaggccctgcgaggccgcctgttgcccagcctggggcccccaggaccaacccggagcccccctggaccccacacagcagtcctggccctggaagatgaggacgatgtgctactggtgccactggctgagccgggggtgtgggtagctgaggcagaggatgagccactgcttacctgaggggacctgggggctctactgaggcctctcccctgggggctctactcatagtggcacaaccttttagaggtgggtcagcctcccctccaccacttccttccctgtccctggatttcagggacttggtgggcctcccgttgaccctatgtagctgctataaagttaagtgtccctcaggcagggagagggctcacagagtctcctctgtacgtggccatggccagacaccccagtcccttcaccaccacctgctccccacgccaccaccatttgggtggctgtttttaaaaagtaaagttcttagaggatcat

SEQ ID NO: 7889 - protein, 231 aa, Homo sapiens
MEAEIVQQQAPPSYGQLIAQGAIPPVEDFPTENPNDNSVLGNLRSLLQILRQDMTPGGGPGARRRQRGRLMRRLVRRLRRWGLLPRTNTPARASEARSQVTPSAAPLEALDGGTGPAREGGAVGGQDGEQAPPLPIKAPLPSASTSPAPTTVPEAPGPLPSLPLEPSLLSGVVQALRGRLLPSLGPPGPTRSPPGPHTAVLALEDEDDVLLVPLAEPGVWVAEAEDEPLLT

SEQ ID NO: 7890 - DNA, 1557 bp, Homo sapiens
gcagctacaggagaccacgaaagtgcccaccttggggagaggctcccatgatcagcttgtcagttgtgtcctgtaagggacaggtccagatcctgaaagcagtttcaagggaggagggacctcagatgacctttgggaaagccatggcacagctccagctggcctggcccgggtgtggaagtgggaggactgtccaggctgaggtggtctactctggccgagaactaccagtgactgagcagtcctcattccttctagcatctttgcccccctctcccggatggaggctgagattgtgcagcagcaggcacccccttcctacgggcagctcattgcccagggtgccatcccacctgtagaagactttcctacagagaatcctaatgataactcagtgctgggcaacctgcgttctctgctacagatcttacgccaggatatgactccaggaggtggcccaggtgcccgccgtcgtcagcggggccgcttgatgcgacgcctggtacgccgtctccgccgctggggcttgctccctcgaaccaacaccccggctcgggcctctgaggccagatcccaggtcacaccttctgctgctccccttgaggccctagatggtggcacaggtccagcccgtgagggcggggcagtgggtgggcaagatggggagcaggcacccccactgcccatcaaggctcccctcccatctgctagcacgtctccagcccccactactgtccctgaagccccagggccactgccctcactgcccctagagccatcactattgtctggagtggtgcaggccctgcgaggccgcctgttgcccagcctggggcccccaggaccaacccggagcccccctggaccccacacagcagtcctggccctggaagatgaggacgatgtgctactggtgccactggctgagccgggggtgtgggtagctgaggcagaggatgagccactgcttacctgaggggacctgggggctctactgaggcctctcccctgggggctctactcatagtggcacaaccttttagaggtgggtcagcctcccctccaccacttccttccctgtccctggatttcagggacttggtgggcctcccgttgaccctatgtagctgctataaagttaagtgtccctcaggcagggagagggctcacagagtctcctctgtacgtggccatggccagacaccccagtcccttcaccaccacctgctccccacgccaccaccatttgggtggctgtttttaaaaagtaaagttcttagaggatcataggtctggacactccatccttgccaaacctctacccaaaagtggccttaagcaccggaatgccaattaactagagaccctccagcccccaaggggaggatttgggcagaacctgaggttttgccatccacaatccctcctacagggcctggctcacaaaaagagtgcaacaaatgcttctattccatagctacggcattgctcagtaagttgaggtcaaaaataaaggaatcatacatctcaaaattttgcaaattagctgcgagcctg

SEQ ID NO: 7891 - protein, 231 aa, Homo sapiens; identical to SEQ ID NO: 7889

SEQ ID NO: 7892 - DNA, 5028 bp, Homo sapiens
gcagctacaggagaccacgaaagtgcccaccttggggagaggctcccatgatcagcttgtcagttgtgtcctgtaagggacaggtccagatcctgaaagcagtttcaagggaggagggacctcagatgacctttgggaaagccatggcacagctccagctggcctggcccgggtgtggaagtgggaggactgtccaggctgaggtggtctactctggccgagaactaccagtgactgagcagtcctcattccttctagcatctttgcccccctctcccggatggaggctgagattgtgcagcagcaggcacccccttcctacgggcagctcattgcccagggtgccatcccacctgtagaagactttcctacagagaatcctaatgataactcagtgctgggcaacctgcgttctctgctacagatcttacgccaggatatgactccaggaggtggcccaggtgcccgccgtcgtcagcggggccgcttgatgcgacgcctggtacgccgtctccgccgctggggcttgctccctcgaaccaacaccccggctcgggcctctgaggccagatcccaggtcacaccttctgctgctccccttgaggccctagatggtggcacaggtccagcccgtgagggcggggcagtgggtgggcaagatggggagcaggcacccccactgcccatcaaggctcccctcccatctgctagcacgtctccagcccccactactgtccctgaagccccagggccactgccctcactgcccctagagccatcactattgtctggagtggtgcaggccctgcgaggccgcctgttgcccagcctggggcccccaggaccaacccggagcccccctggaccccacacagcagtcctggccctggaagatgaggacgatgtgctactggtgccactggctgagccgggggtgtgggtagctgaggcagaggatgagccactgcttacctgaggggacctgggggctctactgaggcctctcccctgggggctctactcatagtggcacaaccttttagaggtgggtcagcctcccctccaccacttccttccctgtccctggatttcagggacttggtgggcctcccgttgaccctatgtagctgctataaagttaagtgtccctcaggcagggagagggctcacagagtctcctctgtacgtggccatggccagacaccccagtcccttcaccaccacctgctccccacgccaccaccatttgggtggctgtttttaaaaagtaaagttcttagaggatcataggtctggacactccatccttgccaaacctctacccaaaagtggccttaagcaccggaatgccaattaactagagaccctccagcccccaaggggaggatttgggcagaacctgaggttttgccatccacaatccctcctacagggcctggctcacaaaaagagtgcaacaaatgcttctattccatagctacggcattgctcagtaagttgaggtcaaaaataaaggaatcatacatctcaaaattttgcaaattagctgcgagcctgagccccgcctctgcccatctcagtctatgctcacctcatcccactcctccctgtggagccctttgcttggccctctacctcctgccctcttcctgttcatctcccaaccactgcactcttgatttttataccacacagaaggtaagaaaattctaggaaccctaaggatcaatcctctccattttcactcaaatgcctggggcccagctctgcaatgactgactccagggcctctttcctcactgccagcatagaagtcaggggagccagctgggccctgcggtcaggaaggttctcatttttggagcataccctgagcccagatcataggagcagctgtccctggtgggacacaggagtcatgactcctaccctccaccctccacacccaccaggcatttagcagtctgtcctatgcaagacagatgaattctcagccaggatacctcaaggcaggcaaaggtgagtggagggagaattcacaaacattcagggtgtgtggtgctggcatcaccatggccaaatccaagaggtcttcctggaagagggcccaaactggaaccaaaagaatgctgtcagcagttggaatagagctgtgaattctagacagggggagtgtccccagaacaagcaaacggaggagacaagagggcaagggttataggaaagaccctgggcctgagagcacaagcagcggccagagctgcagcgctggggtgggtgatggagggaatgattcgcaagcagtgttggaacccagcccctagtgagcaaagtgacagaagctgccccagagtttggaaggaagatcgaggcagaagatgtagaaggaagctgtgggggtgggagtgatgcctcaggaacaaaactgaggaattccctaacggacccagtccctggggaaagaggctcccctcaggctctccttgtctagccccacacctggcagagcctgtcacccagcctagccccacgcctggcagagcccatcacccagcctagccccacacctggtggagaggccctgttgattacaccctgtcagcctcctcaaacccagcactaattgcacaattttcctctcttctagtgagcaagagcctgaggaagtagcagagaggggtgtgggcccatgtgcagttctgggaccctggcaccttggctcagggaagacccgagctcctttcactgcagaccctctccagagactggggagagggctctggagaacctggttcttgcttactgttctccctttgggccctccttcccaaacgcaaacaatccaggatccactcagcgtcaggcccaatggaaatagtgaagcagtgattttccctcccctgcctctccatagcctggtcttttgccctctcctttgctcttctcttcccccatagccacctcaaatacctgcagcctgatatcttcatcccttcatccagaccttttctctcctagtggtattgcaaactgaaagtggacaaagacttaaggtaaacctgctcctcatggtggaatgcttccaaatgctggaaggaggactttagggcagagttcactaaggaggcttgtgcttatagatcagtgggcctgaaagaagtttctctaggttctggttgtgtgctgtacgaggtgtaggtagtaataatactcttgtcagccacagtgaagccccaagctagccgggataggggactgaccttgtacaggcagcatggagaaactaagacagagtgtcctgcccaagtgatggcactggggagcagtcactcaggtttatttccaccagggcccaagaaaaaaagaaatgaggcaacctaaaattccatcaagatagataccaatatccaaggtgcttggtcttagcggtgtgggacccacgttaaggctcttggtgggaaggtgggaggtgttttcagcatgagatagggttcaggctgtgaatcagagtctagagcctaagataaaagaagataccagggctgggccacggtggctttcgcctgtaatcctagcactttgggaggccaaggcaggcagactgcctgagctcaggagttcgagactagcctgagcaacacggtgaaaccctgtctctactaaaatacaaaaaagtagccaggtgtggcggcatgcacctgtagtcccagctactcgagaggctgaggcaggagaattgcttgaacccgggaggcggaggttgcagtgagtggagatcgcgccactgcactctagcctgggtgacagagcgagactccttctccaaaaaaaaagaaaagaagataccagaactcagtccttaagaaacaaaattctgccaggcgcagtagctcacacctgtaatcccagcactttggaggggccaaggcaggcggatcgcttgaggccaagagttcaagaacagcctgggcaacatgatgaaaccctgtctctaccaaaaatactaaaaattagccagtctcacaacctggtctcaaaataaataaatagatttaaaaaaaaaatcatgggcctgaaccaagctccagacctcactaggaggggagaaggaccccccagccacacagcccaaggctgcagaagcacctaggtggttagagagtgagtgcctggatggggcgcagtggctcacacctgtaatcccagcactttgggaggccgaggcaggcggatcacgaggtcaagagatcaagaccatcctggccaacatggtgacaccgtgtctctactaaaaatacaaaaataagctgggcatggtggtgcgtgcctgtagtcccatctactcgggaggctgaagcaggagaatcacttgaacctgggaggcaaaggttgcagtgagctgagatcgcgccactgcactccagcctggcaacagagcgagacaagactccatctcaaaaaaaaaagtgagtgcccgatgatgccagattcttcatcacctgaagtgaacccacacaacagggctgggccatgggcatcataaaccccattttgcaagctcaggaggagctttagggaaatcagaagactggcccagtctctaccaagtggtggatttagagccggcatggcttcgttccaaatctcacccttgtcccaccattccatgggacctcccattcctgagggagcctggatacgggcaagtgcacaacccgggaggttgaggttacagtgagccatgatcgcaccactgcagtccagcccgagcaatagggtgagaccctccctctgaaaaaaataaaaatactcattttggaaggaagtcattctaaaatgttacacttgtcttcagcatatctgcaatataataattttctgcataactgaggatcattcacagaaaccaatggcttttctccagcagtgtcttctgaagttgtaacagtaggggcacggggagctatttgcttttatgctaaatgaccttagaccacttataaaatgcatatgagtgctttaaatgtt

SEQ ID NO: 7893 - protein, 231 aa, Homo sapiens; identical to SEQ ID NO: 7889

SEQ ID NO: 7894 - DNA, 5162 bp, Homo sapiens
gcagctacaggagaccacgaaagtgcccaccttggggagaggctcccatgatcagcttgtcagttgtgtcctgtaagggacaggtccagatcctgaaagcagtttcaagggaggagggacctcagatgacctttgggaaagccatggcacagctccagctggcctggcccgggtgtggaagtgggaggactgtccaggctgaggtggtctactctggccgagaactaccagtgactgagcagtcctcattccttctagcatctttgcccccctctcccggatggaggctgagattgtgcagcagcaggcacccccttcctacgggcagctcattgcccagggtgccatcccacctgtagaagactttcctacagagaatcctaatgataactcagtgctgggcaacctgcgttctctgctacagatcttacgccaggatatgactccaggaggtggcccaggtgcccgccgtcgtcagcggggccgcttgatgcgacgcctggtacgccgtctccgccgctggggcttgctccctcgaaccaacaccccggctcgggcctctgaggccagatcccaggtcacaccttctgctgctccccttgaggccctagatggtggcacaggtccagcccgtgagggcggggcagtgggtgggcaagatggggagcaggcacccccactgcccatcaaggctcccctcccatctgctagcacgtctccagcccccactactgtccctgaagccccagggccactgccctcactgcccctagagccatcactattgtctggagtggtgcaggccctgcgaggccgcctgttgcccagcctggggcccccaggaccaacccggagcccccctggaccccacacagcagtcctggccctggaagatgaggacgatgtgctactggtgccactggctgagccgggggtgtgggtagctgaggcagaggatgagccactgcttacctgaggggacctgggggctctactgaggcctctcccctgggggctctactcatagtggcacaaccttttagaggtgggtcagcctcccctccaccacttccttccctgtccctggatttcagggacttggtgggcctcccgttgaccctatgtagctgctataaagttaagtgtccctcaggcagggagagggctcacagagtctcctctgtacgtggccatggccagacaccccagtcccttcaccaccacctgctccccacgccaccaccatttgggtggctgtttttaaaaagtaaagttcttagaggatcataggtctggacactccatccttgccaaacctctacccaaaagtggccttaagcaccggaatgccaattaactagagaccctccagcccccaaggggaggatttgggcagaacctgaggttttgccatccacaatccctcctacagggcctggctcacaaaaagagtgcaacaaatgcttctattccatagctacggcattgctcagtaagttgaggtcaaaaataaaggaatcatacatctcaaaattttgcaaattagctgcgagcctgagccccgcctctgcccatctcagtctatgctcacctcatcccactcctccctgtggagccctttgcttggccctctacctcctgccctcttcctgttcatctcccaaccactgcactcttgatttttataccacacagaaggtaagaaaattctaggaaccctaaggatcaatcctctccattttcactcaaatgcctggggcccagctctgcaatgactgactccagggcctctttcctcactgccagcatagaagtcaggggagccagctgggccctgcggtcaggaaggttctcatttttggagcataccctgagcccagatcataggagcagctgtccctggtgggacacaggagtcatgactcctaccctccaccctccacacccaccaggcatttagcagtctgtcctatgcaagacagatgaattctcagccaggatacctcaaggcaggcaaaggtgagtggagggagaattcacaaacattcagggtgtgtggtgctggcatcaccatggccaaatccaagaggtcttcctggaagagggcccaaactggaaccaaaagaatgctgtcagcagttggaatagagctgtgaattctagacagggggagtgtccccagaacaagcaaacggaggagacaagagggcaagggttataggaaagaccctgggcctgagagcacaagcagcggccagagctgcagcgctggggtgggtgatggagggaatgattcgcaagcagtgttggaacccagcccctagtgagcaaagtgacagaagctgccccagagtttggaaggaagatcgaggcagaagatgtagaaggaagctgtgggggtgggagtgatgcctcaggaacaaaactgaggaattccctaacggacccagtccctggggaaagaggctcccctcaggctctccttgtctagccccacacctggcagagcctgtcacccagcctagccccacgcctggcagagcccatcacccagcctagccccacacctggtggagaggccctgttgattacaccctgtcagcctcctcaaacccagcactaattgcacaattttcctctcttctagtgagcaagagcctgaggaagtagcagagaggggtgtgggcccatgtgcagttctgggaccctggcaccttggctcagggaagacccgagctcctttcactgcagaccctctccagagactggggagagggctctggagaacctggttcttgcttactgttctccctttgggccctccttcccaaacgcaaacaatccaggatccactcagcgtcaggcccaatggaaatagtgaagcagtgattttccctcccctgcctctccatagcctggtcttttgccctctcctttgctcttctcttcccccatagccacctcaaatacctgcagcctgatatcttcatcccttcatccagaccttttctctcctagtggtattgcaaactgaaagtggacaaagacttaaggtaaacctgctcctcatggtggaatgcttccaaatgctggaaggaggactttagggcagagttcactaaggaggcttgtgcttatagatcagtgggcctgaaagaagtttctctaggttctggttgtgtgctgtacgaggtgtaggtagtaataatactcttgtcagccacagtgaagccccaagctagccgggataggggactgaccttgtacaggcagcatggagaaactaagacagagtgtcctgcccaagtgatggcactggggagcagtcactcaggtttatttccaccagggcccaagaaaaaaagaaatgaggcaacctaaaattccatcaagatagataccaatatccaaggtgcttggtcttagcggtgtgggacccacgttaaggctcttggtgggaaggtgggaggtgttttcagcatgagatagggttcaggctgtgaatcagagtctagagcctaagataaaagaagataccagggctgggccacggtggctttcgcctgtaatcctagcactttgggaggccaaggcaggcagactgcctgagctcaggagttcgagactagcctgagcaacacggtgaaaccctgtctctactaaaatacaaaaaagtagccaggtgtggcggcatgcacctgtagtcccagctactcgagaggctgaggcaggagaattgcttgaacccgggaggcggaggttgcagtgagtggagatcgcgccactgcactctagcctgggtgacagagcgagactccttctccaaaaaaaaagaaaagaagataccagaactcagtccttaagaaacaaaattctgccaggcgcagtagctcacacctgtaatcccagcactttggaggggccaaggcaggcggatcgcttgaggccaagagttcaagaacagcctgggcaacatgatgaaaccctgtctctaccaaaaatactaaaaattagccagtctcacaacctggtctcaaaataaataaatagatttaaaaaaaaaatcatgggcctgaaccaagctccagacctcactaggaggggagaaggaccccccagccacacagcccaaggctgcagaagcacctaggtggttagagagtgagtgcctggatggggcgcagtggctcacacctgtaatcccagcactttgggaggccgaggcaggcggatcacgaggtcaagagatcaagaccatcctggccaacatggtgacaccgtgtctctactaaaaatacaaaaataagctgggcatggtggtgcgtgcctgtagtcccatctactcgggaggctgaagcaggagaatcacttgaacctgggaggcaaaggttgcagtgagctgagatcgcgccactgcactccagcctggcaacagagcgagacaagactccatctcaaaaaaaaaagtgagtgcccgatgatgccagattcttcatcacctgaagtgaacccacacaacagggctgggccatgggcatcataaaccccattttgcaagctcaggaggagctttagggaaatcagaagactggcccagtctctaccaagtggtggatttagagccggcatggcttcgttccaaatctcacccttgtcccaccattccatgggacctcccattcctgagggagcctggatacgggcaagtgcacaacccgggaggttgaggttacagtgagccatgatcgcaccactgcagtccagcccgagcaatagggtgagaccctccctctgaaaaaaataaaaatactcattttggaaggaagtcattctaaaatgttacacttgtcttcagcatatctgcaatataataattttctgcataactgaggatcattcacagaaaccaatggcttttctccagcagtgtcttctgaagttgtaacagtaggggcacggggagctatttgcttttatgctaaatgaccttagaccacttataaaatgcatatgagtgctttaaatgttattttgtgtgtgtgtggtgttgcctccctgactacaaggggtcacttgctactctaaatgtgtttctaatctactagtacaggaacacacatggacacgttaaaattgtgaataaaagtaagtaaaaagtaaaa

SEQ ID NO: 7895 - protein, 231 aa, Homo sapiens; identical to SEQ ID NO: 7889

SEQ ID NO: 7896 - DNA, 805 bp, Homo sapiens
caacctgcgttctctgctacagatcttacgccaggatatgactccaggaggtggcccaggtgcccgccgtcgtcagcggggccgcttgatgcgacgcctggtacgccgtctccgccgctggggcttgctccctcgaaccaacaccccggctcgggcctctgaggccagatcccaggtcacaccttctgctgctccccttgaggccctagatggtggcacaggtccagcccgtgagggcggggcagtgggtgggcaagatggggagcaggcacccccactgcccatcaaggctcccctcccatctgctagcacgtctccagcccccactactgtccctgaagccccagggccactgccctcactgcccctagagccatcactattgtctggagtggtgcaggccctggaagatgaggacgatgtgctactggtgccactggctgagccgggggtgtgggtagctgaggcagaggatgagccactgcttacctgaggggacctgggggctctactgaggcctctcccctgggggctctactcatagtggcacaaccttttagaggtgggtcagcctcccctccaccacttccttccctgtccctggatttcagggacttggtgggcctcccgttgaccctatgtagctgctataaagttaagtgtccctcaggcagggagagggctcacagagtctcctctgtacgtggccatggccagacaccccagtcccttcaccaccacctgctccccacgccaccaccatttgggtggctgtttttaaaaagtaaagttcttagaggatcat

SEQ ID NO: 7897 - protein, 151 aa, Homo sapiens
MTPGGGPGARRRQRGRLMRRLVRRLRRWGLLPRTNTPARASEARSQVTPSAAPLEALDGGTGPAREGGAVGGQDGEQAPPLPIKAPLPSASTSPAPTTVPEAPGPLPSLPLEPSLLSGVVQALEDEDDVLLVPLAEPGVWVAEAEDEPLLT

SEQ ID NO: 7898 - DNA, 1074 bp, Homo sapiens
caacctgcgttctctgctacagatcttacgccaggatatgactccaggaggtggcccaggtgcccgccgtcgtcagcggggccgcttgatgcgacgcctggtacgccgtctccgccgctggggcttgctccctcgaaccaacaccccggctcgggcctctgaggccagatcccaggtcacaccttctgctgctccccttgaggccctagatggtggcacaggtccagcccgtgagggcggggcagtgggtgggcaagatggggagcaggcacccccactgcccatcaaggctcccctcccatctgctagcacgtctccagcccccactactgtccctgaagccccagggccactgccctcactgcccctagagccatcactattgtctggagtggtgcaggccctggaagatgaggacgatgtgctactggtgccactggctgagccgggggtgtgggtagctgaggcagaggatgagccactgcttacctgaggggacctgggggctctactgaggcctctcccctgggggctctactcatagtggcacaaccttttagaggtgggtcagcctcccctccaccacttccttccctgtccctggatttcagggacttggtgggcctcccgttgaccctatgtagctgctataaagttaagtgtccctcaggcagggagagggctcacagagtctcctctgtacgtggccatggccagacaccccagtcccttcaccaccacctgctccccacgccaccaccatttgggtggctgtttttaaaaagtaaagttcttagaggatcataggtctggacactccatccttgccaaacctctacccaaaagtggccttaagcaccggaatgccaattaactagagaccctccagcccccaaggggaggatttgggcagaacctgaggttttgccatccacaatccctcctacagggcctggctcacaaaaagagtgcaacaaatgcttctattccatagctacggcattgctcagtaagttgaggtcaaaaataaaggaatcatacatctcaaaattttgcaaattagctgcgagcctg

SEQ ID NO: 7899 - protein, 151 aa, Homo sapiens; identical to SEQ ID NO: 7897

SEQ ID NO: 7900 - DNA, 4545 bp, Homo sapiens
caacctgcgttctctgctacagatcttacgccaggatatgactccaggaggtggcccaggtgcccgccgtcgtcagcggggccgcttgatgcgacgcctggtacgccgtctccgccgctggggcttgctccctcgaaccaacaccccggctcgggcctctgaggccagatcccaggtcacaccttctgctgctccccttgaggccctagatggtggcacaggtccagcccgtgagggcggggcagtgggtgggcaagatggggagcaggcacccccactgcccatcaaggctcccctcccatctgctagcacgtctccagcccccactactgtccctgaagccccagggccactgccctcactgcccctagagccatcactattgtctggagtggtgcaggccctggaagatgaggacgatgtgctactggtgccactggctgagccgggggtgtgggtagctgaggcagaggatgagccactgcttacctgaggggacctgggggctctactgaggcctctcccctgggggctctactcatagtggcacaaccttttagaggtgggtcagcctcccctccaccacttccttccctgtccctggatttcagggacttggtgggcctcccgttgaccctatgtagctgctataaagttaagtgtccctcaggcagggagagggctcacagagtctcctctgtacgtggccatggccagacaccccagtcccttcaccaccacctgctccccacgccaccaccatttgggtggctgtttttaaaaagtaaagttcttagaggatcataggtctggacactccatccttgccaaacctctacccaaaagtggccttaagcaccggaatgccaattaactagagaccctccagcccccaaggggaggatttgggcagaacctgaggttttgccatccacaatccctcctacagggcctggctcacaaaaagagtgcaacaaatgcttctattccatagctacggcattgctcagtaagttgaggtcaaaaataaaggaatcatacatctcaaaattttgcaaattagctgcgagcctgagccccgcctctgcccatctcagtctatgctcacctcatcccactcctccctgtggagccctttgcttggccctctacctcctgccctcttcctgttcatctcccaaccactgcactcttgatttttataccacacagaaggtaagaaaattctaggaaccctaaggatcaatcctctccattttcactcaaatgcctggggcccagctctgcaatgactgactccagggcctctttcctcactgccagcatagaagtcaggggagccagctgggccctgcggtcaggaaggttctcatttttggagcataccctgagcccagatcataggagcagctgtccctggtgggacacaggagtcatgactcctaccctccaccctccacacccaccaggcatttagcagtctgtcctatgcaagacagatgaattctcagccaggatacctcaaggcaggcaaaggtgagtggagggagaattcacaaacattcagggtgtgtggtgctggcatcaccatggccaaatccaagaggtcttcctggaagagggcccaaactggaaccaaaagaatgctgtcagcagttggaatagagctgtgaattctagacagggggagtgtccccagaacaagcaaacggaggagacaagagggcaagggttataggaaagaccctgggcctgagagcacaagcagcggccagagctgcagcgctggggtgggtgatggagggaatgattcgcaagcagtgttggaacccagcccctagtgagcaaagtgacagaagctgccccagagtttggaaggaagatcgaggcagaagatgtagaaggaagctgtgggggtgggagtgatgcctcaggaacaaaactgaggaattccctaacggacccagtccctggggaaagaggctcccctcaggctctccttgtctagccccacacctggcagagcctgtcacccagcctagccccacgcctggcagagcccatcacccagcctagccccacacctggtggagaggccctgttgattacaccctgtcagcctcctcaaacccagcactaattgcacaattttcctctcttctagtgagcaagagcctgaggaagtagcagagaggggtgtgggcccatgtgcagttctgggaccctggcaccttggctcagggaagacccgagctcctttcactgcagaccctctccagagactggggagagggctctggagaacctggttcttgcttactgttctccctttgggccctccttcccaaacgcaaacaatccaggatccactcagcgtcaggcccaatggaaatagtgaagcagtgattttccctcccctgcctctccatagcctggtcttttgccctctcctttgctcttctcttcccccatagccacctcaaatacctgcagcctgatatcttcatcccttcatccagaccttttctctcctagtggtattgcaaactgaaagtggacaaagacttaaggtaaacctgctcctcatggtggaatgcttccaaatgctggaaggaggactttagggcagagttcactaaggaggcttgtgcttatagatcagtgggcctgaaagaagtttctctaggttctggttgtgtgctgtacgaggtgtaggtagtaataatactcttgtcagccacagtgaagccccaagctagccgggataggggactgaccttgtacaggcagcatggagaaactaagacagagtgtcctgcccaagtgatggcactggggagcagtcactcaggtttatttccaccagggcccaagaaaaaaagaaatgaggcaacctaaaattccatcaagatagataccaatatccaaggtgcttggtcttagcggtgtgggacccacgttaaggctcttggtgggaaggtgggaggtgttttcagcatgagatagggttcaggctgtgaatcagagtctagagcctaagataaaagaagataccagggctgggccacggtggctttcgcctgtaatcctagcactttgggaggccaaggcaggcagactgcctgagctcaggagttcgagactagcctgagcaacacggtgaaaccctgtctctactaaaatacaaaaaagtagccaggtgtggcggcatgcacctgtagtcccagctactcgagaggctgaggcaggagaattgcttgaacccgggaggcggaggttgcagtgagtggagatcgcgccactgcactctagcctgggtgacagagcgagactccttctccaaaaaaaaagaaaagaagataccagaactcagtccttaagaaacaaaattctgccaggcgcagtagctcacacctgtaatcccagcactttggaggggccaaggcaggcggatcgcttgaggccaagagttcaagaacagcctgggcaacatgatgaaaccctgtctctaccaaaaatactaaaaattagccagtctcacaacctggtctcaaaataaataaatagatttaaaaaaaaaatcatgggcctgaaccaagctccagacctcactaggaggggagaaggaccccccagccacacagcccaaggctgcagaagcacctaggtggttagagagtgagtgcctggatggggcgcagtggctcacacctgtaatcccagcactttgggaggccgaggcaggcggatcacgaggtcaagagatcaagaccatcctggccaacatggtgacaccgtgtctctactaaaaatacaaaaataagctgggcatggtggtgcgtgcctgtagtcccatctactcgggaggctgaagcaggagaatcacttgaacctgggaggcaaaggttgcagtgagctgagatcgcgccactgcactccagcctggcaacagagcgagacaagactccatctcaaaaaaaaaagtgagtgcccgatgatgccagattcttcatcacctgaagtgaacccacacaacagggctgggccatgggcatcataaaccccattttgcaagctcaggaggagctttagggaaatcagaagactggcccagtctctaccaagtggtggatttagagccggcatggcttcgttccaaatctcacccttgtcccaccattccatgggacctcccattcctgagggagcctggatacgggcaagtgcacaacccgggaggttgaggttacagtgagccatgatcgcaccactgcagtccagcccgagcaatagggtgagaccctccctctgaaaaaaataaaaatactcattttggaaggaagtcattctaaaatgttacacttgtcttcagcatatctgcaatataataattttctgcataactgaggatcattcacagaaaccaatggcttttctccagcagtgtcttctgaagttgtaacagtaggggcacggggagctatttgcttttatgctaaatgaccttagaccacttataaaatgcatatgagtgctttaaatgtt

SEQ ID NO: 7901 - protein, 151 aa, Homo sapiens; identical to SEQ ID NO: 7897

SEQ ID NO: 7902 - DNA, 4679 bp, Homo sapiens
caacctgcgttctctgctacagatcttacgccaggatatgactccaggaggtggcccaggtgcccgccgtcgtcagcggggccgcttgatgcgacgcctggtacgccgtctccgccgctggggcttgctccctcgaaccaacaccccggctcgggcctctgaggccagatcccaggtcacaccttctgctgctccccttgaggccctagatggtggcacaggtccagcccgtgagggcggggcagtgggtgggcaagatggggagcaggcacccccactgcccatcaaggctcccctcccatctgctagcacgtctccagcccccactactgtccctgaagccccagggccactgccctcactgcccctagagccatcactattgtctggagtggtgcaggccctggaagatgaggacgatgtgctactggtgccactggctgagccgggggtgtgggtagctgaggcagaggatgagccactgcttacctgaggggacctgggggctctactgaggcctctcccctgggggctctactcatagtggcacaaccttttagaggtgggtcagcctcccctccaccacttccttccctgtccctggatttcagggacttggtgggcctcccgttgaccctatgtagctgctataaagttaagtgtccctcaggcagggagagggctcacagagtctcctctgtacgtggccatggccagacaccccagtcccttcaccaccacctgctccccacgccaccaccatttgggtggctgtttttaaaaagtaaagttcttagaggatcataggtctggacactccatccttgccaaacctctacccaaaagtggccttaagcaccggaatgccaattaactagagaccctccagcccccaaggggaggatttgggcagaacctgaggttttgccatccacaatccctcctacagggcctggctcacaaaaagagtgcaacaaatgcttctattccatagctacggcattgctcagtaagttgaggtcaaaaataaaggaatcatacatctcaaaattttgcaaattagctgcgagcctgagccccgcctctgcccatctcagtctatgctcacctcatcccactcctccctgtggagccctttgcttggccctctacctcctgccctcttcctgttcatctcccaaccactgcactcttgatttttataccacacagaaggtaagaaaattctaggaaccctaaggatcaatcctctccattttcactcaaatgcctggggcccagctctgcaatgactgactccagggcctctttcctcactgccagcatagaagtcaggggagccagctgggccctgcggtcaggaaggttctcatttttggagcataccctgagcccagatcataggagcagctgtccctggtgggacacaggagtcatgactcctaccctccaccctccacacccaccaggcatttagcagtctgtcctatgcaagacagatgaattctcagccaggatacctcaaggcaggcaaaggtgagtggagggagaattcacaaacattcagggtgtgtggtgctggcatcaccatggccaaatccaagaggtcttcctggaagagggcccaaactggaaccaaaagaatgctgtcagcagttggaatagagctgtgaattctagacagggggagtgtccccagaacaagcaaacggaggagacaagagggcaagggttataggaaagaccctgggcctgagagcacaagcagcggccagagctgcagcgctggggtgggtgatggagggaatgattcgcaagcagtgttggaacccagcccctagtgagcaaagtgacagaagctgccccagagtttggaaggaagatcgaggcagaagatgtagaaggaagctgtgggggtgggagtgatgcctcaggaacaaaactgaggaattccctaacggacccagtccctggggaaagaggctcccctcaggctctccttgtctagccccacacctggcagagcctgtcacccagcctagccccacgcctggcagagcccatcacccagcctagccccacacctggtggagaggccctgttgattacaccctgtcagcctcctcaaacccagcactaattgcacaattttcctctcttctagtgagcaagagcctgaggaagtagcagagaggggtgtgggcccatgtgcagttctgggaccctggcaccttggctcagggaagacccgagctcctttcactgcagaccctctccagagactggggagagggctctggagaacctggttcttgcttactgttctccctttgggccctccttcccaaacgcaaacaatccaggatccactcagcgtcaggcccaatggaaatagtgaagcagtgattttccctcccctgcctctccatagcctggtcttttgccctctcctttgctcttctcttcccccatagccacctcaaatacctgcagcctgatatcttcatcccttcatccagaccttttctctcctagtggtattgcaaactgaaagtggacaaagacttaaggtaaacctgctcctcatggtggaatgcttccaaatgctggaaggaggactttagggcagagttcactaaggaggcttgtgcttatagatcagtgggcctgaaagaagtttctctaggttctggttgtgtgctgtacgaggtgtaggtagtaataatactcttgtcagccacagtgaagccccaagctagccgggataggggactgaccttgtacaggcagcatggagaaactaagacagagtgtcctgcccaagtgatggcactggggagcagtcactcaggtttatttccaccagggcccaagaaaaaaagaaatgaggcaacctaaaattccatcaagatagataccaatatccaaggtgcttggtcttagcggtgtgggacccacgttaaggctcttggtgggaaggtgggaggtgttttcagcatgagatagggttcaggctgtgaatcagagtctagagcctaagataaaagaagataccagggctgggccacggtggctttcgcctgtaatcctagcactttgggaggccaaggcaggcagactgcctgagctcaggagttcgagactagcctgagcaacacggtgaaaccctgtctctactaaaatacaaaaaagtagccaggtgtggcggcatgcacctgtagtcccagctactcgagaggctgaggcaggagaattgcttgaacccgggaggcggaggttgcagtgagtggagatcgcgccactgcactctagcctgggtgacagagcgagactccttctccaaaaaaaaagaaaagaagataccagaactcagtccttaagaaacaaaattctgccaggcgcagtagctcacacctgtaatcccagcactttggaggggccaaggcaggcggatcgcttgaggccaagagttcaagaacagcctgggcaacatgatgaaaccctgtctctaccaaaaatactaaaaattagccagtctcacaacctggtctcaaaataaataaatagatttaaaaaaaaaatcatgggcctgaaccaagctccagacctcactaggaggggagaaggaccccccagccacacagcccaaggctgcagaagcacctaggtggttagagagtgagtgcctggatggggcgcagtggctcacacctgtaatcccagcactttgggaggccgaggcaggcggatcacgaggtcaagagatcaagaccatcctggccaacatggtgacaccgtgtctctactaaaaatacaaaaataagctgggcatggtggtgcgtgcctgtagtcccatctactcgggaggctgaagcaggagaatcacttgaacctgggaggcaaaggttgcagtgagctgagatcgcgccactgcactccagcctggcaacagagcgagacaagactccatctcaaaaaaaaaagtgagtgcccgatgatgccagattcttcatcacctgaagtgaacccacacaacagggctgggccatgggcatcataaaccccattttgcaagctcaggaggagctttagggaaatcagaagactggcccagtctctaccaagtggtggatttagagccggcatggcttcgttccaaatctcacccttgtcccaccattccatgggacctcccattcctgagggagcctggatacgggcaagtgcacaacccgggaggttgaggttacagtgagccatgatcgcaccactgcagtccagcccgagcaatagggtgagaccctccctctgaaaaaaataaaaatactcattttggaaggaagtcattctaaaatgttacacttgtcttcagcatatctgcaatataataattttctgcataactgaggatcattcacagaaaccaatggcttttctccagcagtgtcttctgaagttgtaacagtaggggcacggggagctatttgcttttatgctaaatgaccttagaccacttataaaatgcatatgagtgctttaaatgttattttgtgtgtgtgtggtgttgcctccctgactacaaggggtcacttgctactctaaatgtgtttctaatctactagtacaggaacacacatggacacgttaaaattgtgaataaaagtaagtaaaaagtaaaa

SEQ ID NO: 7903 - protein, 151 aa, Homo sapiens; identical to SEQ ID NO: 7897

SEQ ID NO: 7904 - DNA, 973 bp, Homo sapiens
cgttctctgctacagatcttacgccaggatatgactccaggaggtggcccaggtgcccgccgtcgtcagcggggccgcttgatgcgacgcctggtacgccgtctccgccgctggggcttgctccctcgaaccaacaccccggctcgggcctctgaggccagatcccaggtcacaccttctgctgctccccttgaggccctagatggtggcacaggtccagcccgtgagggcggggcagtgggtgggcaagatggggagcaggcacccccactgcccatcaaggctcccctcccatctgctagcacgtctccagcccccactactgtccctgaagccccagggccactgccctcactgcccctagagccatcactattgtctggagtggtgcaggccctgcgaggccgcctgttgcccagcctggggcccccaggaccaacccggagcccccctggaccccacacagcagtcctggccctggaagatgaggacgatgtgctactggtgccactggctgagccgggggtgtgggtagctgaggcagaggatgagccactgcttacctgaggggacctgggggcttcacagagtctcctctgtacgtggccatggccagacaccccagtcccttcaccaccacctgctccccacgccaccaccatttgggtggctgtttttaaaaagtaaagttcttagaggatcataggtctggacactccatccttgccaaacctctacccaaaagtggccttaagcaccggaatgccaattaactagagaccctccagcccccaaggggaggatttgggcagaacctgaggttttgccatccacaatccctcctacagggcctggctcacaaaaagagtgcaacaaatgcttctattccatagctacggcattgctcagtaagttgaggtcaaaaataaaggaatcatacatctcaaaattttgcaaattagctgcgagcctg

SEQ ID NO: 7905 - protein, 52 aa, Homo sapiens
MSHCLPEGTWGLHRVSSVRGHGQTPQSLHHHLLPTPPPFGWLFLKSKVLRGS

SEQ ID NO: 7906 - DNA, 4444 bp, Homo sapiens
cgttctctgctacagatcttacgccaggatatgactccaggaggtggcccaggtgcccgccgtcgtcagcggggccgcttgatgcgacgcctggtacgccgtctccgccgctggggcttgctccctcgaaccaacaccccggctcgggcctctgaggccagatcccaggtcacaccttctgctgctccccttgaggccctagatggtggcacaggtccagcccgtgagggcggggcagtgggtgggcaagatggggagcaggcacccccactgcccatcaaggctcccctcccatctgctagcacgtctccagcccccactactgtccctgaagccccagggccactgccctcactgcccctagagccatcactattgtctggagtggtgcaggccctgcgaggccgcctgttgcccagcctggggcccccaggaccaacccggagcccccctggaccccacacagcagtcctggccctggaagatgaggacgatgtgctactggtgccactggctgagccgggggtgtgggtagctgaggcagaggatgagccactgcttacctgaggggacctgggggcttcacagagtctcctctgtacgtggccatggccagacaccccagtcccttcaccaccacctgctccccacgccaccaccatttgggtggctgtttttaaaaagtaaagttcttagaggatcataggtctggacactccatccttgccaaacctctacccaaaagtggccttaagcaccggaatgccaattaactagagaccctccagcccccaaggggaggatttgggcagaacctgaggttttgccatccacaatccctcctacagggcctggctcacaaaaagagtgcaacaaatgcttctattccatagctacggcattgctcagtaagttgaggtcaaaaataaaggaatcatacatctcaaaattttgcaaattagctgcgagcctgagccccgcctctgcccatctcagtctatgctcacctcatcccactcctccctgtggagccctttgcttggccctctacctcctgccctcttcctgttcatctcccaaccactgcactcttgatttttataccacacagaaggtaagaaaattctaggaaccctaaggatcaatcctctccattttcactcaaatgcctggggcccagctctgcaatgactgactccagggcctctttcctcactgccagcatagaagtcaggggagccagctgggccctgcggtcaggaaggttctcatttttggagcataccctgagcccagatcataggagcagctgtccctggtgggacacaggagtcatgactcctaccctccaccctccacacccaccaggcatttagcagtctgtcctatgcaagacagatgaattctcagccaggatacctcaaggcaggcaaaggtgagtggagggagaattcacaaacattcagggtgtgtggtgctggcatcaccatggccaaatccaagaggtcttcctggaagagggcccaaactggaaccaaaagaatgctgtcagcagttggaatagagctgtgaattctagacagggggagtgtccccagaacaagcaaacggaggagacaagagggcaagggttataggaaagaccctgggcctgagagcacaagcagcggccagagctgcagcgctggggtgggtgatggagggaatgattcgcaagcagtgttggaacccagcccctagtgagcaaagtgacagaagctgccccagagtttggaaggaagatcgaggcagaagatgtagaaggaagctgtgggggtgggagtgatgcctcaggaacaaaactgaggaattccctaacggacccagtccctggggaaagaggctcccctcaggctctccttgtctagccccacacctggcagagcctgtcacccagcctagccccacgcctggcagagcccatcacccagcctagccccacacctggtggagaggccctgttgattacaccctgtcagcctcctcaaacccagcactaattgcacaattttcctctcttctagtgagcaagagcctgaggaagtagcagagaggggtgtgggcccatgtgcagttctgggaccctggcaccttggctcagggaagacccgagctcctttcactgcagaccctctccagagactggggagagggctctggagaacctggttcttgcttactgttctccctttgggccctccttcccaaacgcaaacaatccaggatccactcagcgtcaggcccaatggaaatagtgaagcagtgattttccctcccctgcctctccatagcctggtcttttgccctctcctttgctcttctcttcccccatagccacctcaaatacctgcagcctgatatcttcatcccttcatccagaccttttctctcctagtggtattgcaaactgaaagtggacaaagacttaaggtaaacctgctcctcatggtggaatgcttccaaatgctggaaggaggactttagggcagagttcactaaggaggcttgtgcttatagatcagtgggcctgaaagaagtttctctaggttctggttgtgtgctgtacgaggtgtaggtagtaataatactcttgtcagccacagtgaagccccaagctagccgggataggggactgaccttgtacaggcagcatggagaaactaagacagagtgtcctgcccaagtgatggcactggggagcagtcactcaggtttatttccaccagggcccaagaaaaaaagaaatgaggcaacctaaaattccatcaagatagataccaatatccaaggtgcttggtcttagcggtgtgggacccacgttaaggctcttggtgggaaggtgggaggtgttttcagcatgagatagggttcaggctgtgaatcagagtctagagcctaagataaaagaagataccagggctgggccacggtggctttcgcctgtaatcctagcactttgggaggccaaggcaggcagactgcctgagctcaggagttcgagactagcctgagcaacacggtgaaaccctgtctctactaaaatacaaaaaagtagccaggtgtggcggcatgcacctgtagtcccagctactcgagaggctgaggcaggagaattgcttgaacccgggaggcggaggttgcagtgagtggagatcgcgccactgcactctagcctgggtgacagagcgagactccttctccaaaaaaaaagaaaagaagataccagaactcagtccttaagaaacaaaattctgccaggcgcagtagctcacacctgtaatcccagcactttggaggggccaaggcaggcggatcgcttgaggccaagagttcaagaacagcctgggcaacatgatgaaaccctgtctctaccaaaaatactaaaaattagccagtctcacaacctggtctcaaaataaataaatagatttaaaaaaaaaatcatgggcctgaaccaagctccagacctcactaggaggggagaaggaccccccagccacacagcccaaggctgcagaagcacctaggtggttagagagtgagtgcctggatggggcgcagtggctcacacctgtaatcccagcactttgggaggccgaggcaggcggatcacgaggtcaagagatcaagaccatcctggccaacatggtgacaccgtgtctctactaaaaatacaaaaataagctgggcatggtggtgcgtgcctgtagtcccatctactcgggaggctgaagcaggagaatcacttgaacctgggaggcaaaggttgcagtgagctgagatcgcgccactgcactccagcctggcaacagagcgagacaagactccatctcaaaaaaaaaagtgagtgcccgatgatgccagattcttcatcacctgaagtgaacccacacaacagggctgggccatgggcatcataaaccccattttgcaagctcaggaggagctttagggaaatcagaagactggcccagtctctaccaagtggtggatttagagccggcatggcttcgttccaaatctcacccttgtcccaccattccatgggacctcccattcctgagggagcctggatacgggcaagtgcacaacccgggaggttgaggttacagtgagccatgatcgcaccactgcagtccagcccgagcaatagggtgagaccctccctctgaaaaaaataaaaatactcattttggaaggaagtcattctaaaatgttacacttgtcttcagcatatctgcaatataataattttctgcataactgaggatcattcacagaaaccaatggcttttctccagcagtgtcttctgaagttgtaacagtaggggcacggggagctatttgcttttatgctaaatgaccttagaccacttataaaatgcatatgagtgctttaaatgtt

SEQ ID NO: 7907 - protein, 52 aa, Homo sapiens; identical to SEQ ID NO: 7905

SEQ ID NO: 7908 - DNA, 4578 bp, Homo sapiens
cgttctctgctacagatcttacgccaggatatgactccaggaggtggcccaggtgcccgccgtcgtcagcggggccgcttgatgcgacgcctggtacgccgtctccgccgctggggcttgctccctcgaaccaacaccccggctcgggcctctgaggccagatcccaggtcacaccttctgctgctccccttgaggccctagatggtggcacaggtccagcccgtgagggcggggcagtgggtgggcaagatggggagcaggcacccccactgcccatcaaggctcccctcccatctgctagcacgtctccagcccccactactgtccctgaagccccagggccactgccctcactgcccctagagccatcactattgtctggagtggtgcaggccctgcgaggccgcctgttgcccagcctggggcccccaggaccaacccggagcccccctggaccccacacagcagtcctggccctggaagatgaggacgatgtgctactggtgccactggctgagccgggggtgtgggtagctgaggcagaggatgagccactgcttacctgaggggacctgggggcttcacagagtctcctctgtacgtggccatggccagacaccccagtcccttcaccaccacctgctccccacgccaccaccatttgggtggctgtttttaaaaagtaaagttcttagaggatcataggtctggacactccatccttgccaaacctctacccaaaagtggccttaagcaccggaatgccaattaactagagaccctccagcccccaaggggaggatttgggcagaacctgaggttttgccatccacaatccctcctacagggcctggctcacaaaaagagtgcaacaaatgcttctattccatagctacggcattgctcagtaagttgaggtcaaaaataaaggaatcatacatctcaaaattttgcaaattagctgcgagcctgagccccgcctctgcccatctcagtctatgctcacctcatcccactcctccctgtggagccctttgcttggccctctacctcctgccctcttcctgttcatctcccaaccactgcactcttgatttttataccacacagaaggtaagaaaattctaggaaccctaaggatcaatcctctccattttcactcaaatgcctggggcccagctctgcaatgactgactccagggcctctttcctcactgccagcatagaagtcaggggagccagctgggccctgcggtcaggaaggttctcatttttggagcataccctgagcccagatcataggagcagctgtccctggtgggacacaggagtcatgactcctaccctccaccctccacacccaccaggcatttagcagtctgtcctatgcaagacagatgaattctcagccaggatacctcaaggcaggcaaaggtgagtggagggagaattcacaaacattcagggtgtgtggtgctggcatcaccatggccaaatccaagaggtcttcctggaagagggcccaaactggaaccaaaagaatgctgtcagcagttggaatagagctgtgaattctagacagggggagtgtccccagaacaagcaaacggaggagacaagagggcaagggttataggaaagaccctgggcctgagagcacaagcagcggccagagctgcagcgctggggtgggtgatggagggaatgattcgcaagcagtgttggaacccagcccctagtgagcaaagtgacagaagctgccccagagtttggaaggaagatcgaggcagaagatgtagaaggaagctgtgggggtgggagtgatgcctcaggaacaaaactgaggaattccctaacggacccagtccctggggaaagaggctcccctcaggctctccttgtctagccccacacctggcagagcctgtcacccagcctagccccacgcctggcagagcccatcacccagcctagccccacacctggtggagaggccctgttgattacaccctgtcagcctcctcaaacccagcactaattgcacaattttcctctcttctagtgagcaagagcctgaggaagtagcagagaggggtgtgggcccatgtgcagttctgggaccctggcaccttggctcagggaagacccgagctcctttcactgcagaccctctccagagactggggagagggctctggagaacctggttcttgcttactgttctccctttgggccctccttcccaaacgcaaacaatccaggatccactcagcgtcaggcccaatggaaatagtgaagcagtgattttccctcccctgcctctccatagcctggtcttttgccctctcctttgctcttctcttcccccatagccacctcaaatacctgcagcctgatatcttcatcccttcatccagaccttttctctcctagtggtattgcaaactgaaagtggacaaagacttaaggtaaacctgctcctcatggtggaatgcttccaaatgctggaaggaggactttagggcagagttcactaaggaggcttgtgcttatagatcagtgggcctgaaagaagtttctctaggttctggttgtgtgctgtacgaggtgtaggtagtaataatactcttgtcagccacagtgaagccccaagctagccgggataggggactgaccttgtacaggcagcatggagaaactaagacagagtgtcctgcccaagtgatggcactggggagcagtcactcaggtttatttccaccagggcccaagaaaaaaagaaatgaggcaacctaaaattccatcaagatagataccaatatccaaggtgcttggtcttagcggtgtgggacccacgttaaggctcttggtgggaaggtgggaggtgttttcagcatgagatagggttcaggctgtgaatcagagtctagagcctaagataaaagaagataccagggctgggccacggtggctttcgcctgtaatcctagcactttgggaggccaaggcaggcagactgcctgagctcaggagttcgagactagcctgagcaacacggtgaaaccctgtctctactaaaatacaaaaaagtagccaggtgtggcggcatgcacctgtagtcccagctactcgagaggctgaggcaggagaattgcttgaacccgggaggcggaggttgcagtgagtggagatcgcgccactgcactctagcctgggtgacagagcgagactccttctccaaaaaaaaagaaaagaagataccagaactcagtccttaagaaacaaaattctgccaggcgcagtagctcacacctgtaatcccagcactttggaggggccaaggcaggcggatcgcttgaggccaagagttcaagaacagcctgggcaacatgatgaaaccctgtctctaccaaaaatactaaaaattagccagtctcacaacctggtctcaaaataaataaatagatttaaaaaaaaaatcatgggcctgaaccaagctccagacctcactaggaggggagaaggaccccccagccacacagcccaaggctgcagaagcacctaggtggttagagagtgagtgcctggatggggcgcagtggctcacacctgtaatcccagcactttgggaggccgaggcaggcggatcacgaggtcaagagatcaagaccatcctggccaacatggtgacaccgtgtctctactaaaaatacaaaaataagctgggcatggtggtgcgtgcctgtagtcccatctactcgggaggctgaagcaggagaatcacttgaacctgggaggcaaaggttgcagtgagctgagatcgcgccactgcactccagcctggcaacagagcgagacaagactccatctcaaaaaaaaaagtgagtgcccgatgatgccagattcttcatcacctgaagtgaacccacacaacagggctgggccatgggcatcataaaccccattttgcaagctcaggaggagctttagggaaatcagaagactggcccagtctctaccaagtggtggatttagagccggcatggcttcgttccaaatctcacccttgtcccaccattccatgggacctcccattcctgagggagcctggatacgggcaagtgcacaacccgggaggttgaggttacagtgagccatgatcgcaccactgcagtccagcccgagcaatagggtgagaccctccctctgaaaaaaataaaaatactcattttggaaggaagtcattctaaaatgttacacttgtcttcagcatatctgcaatataataattttctgcataactgaggatcattcacagaaaccaatggcttttctccagcagtgtcttctgaagttgtaacagtaggggcacggggagctatttgcttttatgctaaatgaccttagaccacttataaaatgcatatgagtgctttaaatgttattttgtgtgtgtgtggtgttgcctccctgactacaaggggtcacttgctactctaaatgtgtttctaatctactagtacaggaacacacatggacacgttaaaattgtgaataaaagtaagtaaaaagtaaaa

SEQ ID NO: 7909 - protein, 52 aa, Homo sapiens; identical to SEQ ID NO: 7905

SEQ ID NO: 7910 - DNA, 872 bp, Homo sapiens
tcttacgccaggatatgactccaggaggtggcccaggtgcccgccgtcgtcagcggggccgcttgatgcgacgcctggtacgccgtctccgccgctggggcttgctccctcgaaccaacaccccggctcgggcctctgaggccagatcccaggtcacaccttctgctgctccccttgaggccctagatggtggcacaggtccagcccgtgagggcggggcagtgggtgggcaagatggggagcaggcacccccactgcccatcaaggctcccctcccatctgctagcacgtctccagcccccactactgtccctgaagccccagggccactgccctcactgcccctagagccatcactattgtctggagtggtgcaggccctgcgaggccgcctgttgcccagcctggggcccccaggaccaacccggagcccccctggaccccacacagcagtcctggccctggaagatgaggacgatgtgctactggtgccactggctgagccgggggtgtgggtagctgaggcagaggatgagccactgctccccacgccaccaccatttgggtggctgtttttaaaaagtaaagttcttagaggatcataggtctggacactccatccttgccaaacctctacccaaaagtggccttaagcaccggaatgccaattaactagagaccctccagcccccaaggggaggatttgggcagaacctgaggttttgccatccacaatccctcctacagggcctggctcacaaaaagagtgcaacaaatgcttctattccatagctacggcattgctcagtaagttgaggtcaaaaataaaggaatcatacatctcaaaattttgcaaattagctgcgagcctg

SEQ ID NO: 7911 - protein, 196 aa, Homo sapiens
MTPGGGPGARRRQRGRLMRRLVRRLRRWGLLPRTNTPARASEARSQVTPSAAPLEALDGGTGPAREGGAVGGQDGEQAPPLPIKAPLPSASTSPAPTTVPEAPGPLPSLPLEPSLLSGVVQALRGRLLPSLGPPGPTRSPPGPHTAVLALEDEDDVLLVPLAEPGVWVAEAEDEPLLPTPPPFGWLFLKSKVLRGS

SEQ ID NO: 7912 - DNA, 4343 bp, Homo sapiens
tcttacgccaggatatgactccaggaggtggcccaggtgcccgccgtcgtcagcggggccgcttgatgcgacgcctggtacgccgtctccgccgctggggcttgctccctcgaaccaacaccccggctcgggcctctgaggccagatcccaggtcacaccttctgctgctccccttgaggccctagatggtggcacaggtccagcccgtgagggcggggcagtgggtgggcaagatggggagcaggcacccccactgcccatcaaggctcccctcccatctgctagcacgtctccagcccccactactgtccctgaagccccagggccactgccctcactgcccctagagccatcactattgtctggagtggtgcaggccctgcgaggccgcctgttgcccagcctggggcccccaggaccaacccggagcccccctggaccccacacagcagtcctggccctggaagatgaggacgatgtgctactggtgccactggctgagccgggggtgtgggtagctgaggcagaggatgagccactgctccccacgccaccaccatttgggtggctgtttttaaaaagtaaagttcttagaggatcataggtctggacactccatccttgccaaacctctacccaaaagtggccttaagcaccggaatgccaattaactagagaccctccagcccccaaggggaggatttgggcagaacctgaggttttgccatccacaatccctcctacagggcctggctcacaaaaagagtgcaacaaatgcttctattccatagctacggcattgctcagtaagttgaggtcaaaaataaaggaatcatacatctcaaaattttgcaaattagctgcgagcctgagccccgcctctgcccatctcagtctatgctcacctcatcccactcctccctgtggagccctttgcttggccctctacctcctgccctcttcctgttcatctcccaaccactgcactcttgatttttataccacacagaaggtaagaaaattctaggaaccctaaggatcaatcctctccattttcactcaaatgcctggggcccagctctgcaatgactgactccagggcctctttcctcactgccagcatagaagtcaggggagccagctgggccctgcggtcaggaaggttctcatttttggagcataccctgagcccagatcataggagcagctgtccctggtgggacacaggagtcatgactcctaccctccaccctccacacccaccaggcatttagcagtctgtcctatgcaagacagatgaattctcagccaggatacctcaaggcaggcaaaggtgagtggagggagaattcacaaacattcagggtgtgtggtgctggcatcaccatggccaaatccaagaggtcttcctggaagagggcccaaactggaaccaaaagaatgctgtcagcagttggaatagagctgtgaattctagacagggggagtgtccccagaacaagcaaacggaggagacaagagggcaagggttataggaaagaccctgggcctgagagcacaagcagcggccagagctgcagcgctggggtgggtgatggagggaatgattcgcaagcagtgttggaacccagcccctagtgagcaaagtgacagaagctgccccagagtttggaaggaagatcgaggcagaagatgtagaaggaagctgtgggggtgggagtgatgcctcaggaacaaaactgaggaattccctaacggacccagtccctggggaaagaggctcccctcaggctctccttgtctagccccacacctggcagagcctgtcacccagcctagccccacgcctggcagagcccatcacccagcctagccccacacctggtggagaggccctgttgattacaccctgtcagcctcctcaaacccagcactaattgcacaattttcctctcttctagtgagcaagagcctgaggaagtagcagagaggggtgtgggcccatgtgcagttctgggaccctggcaccttggctcagggaagacccgagctcctttcactgcagaccctctccagagactggggagagggctctggagaacctggttcttgcttactgttctccctttgggccctccttcccaaacgcaaacaatccaggatccactcagcgtcaggcccaatggaaatagtgaagcagtgattttccctcccctgcctctccatagcctggtcttttgccctctcctttgctcttctcttcccccatagccacctcaaatacctgcagcctgatatcttcatcccttcatccagaccttttctctcctagtggtattgcaaactgaaagtggacaaagacttaaggtaaacctgctcctcatggtggaatgcttccaaatgctggaaggaggactttagggcagagttcactaaggaggcttgtgcttatagatcagtgggcctgaaagaagtttctctaggttctggttgtgtgctgtacgaggtgtaggtagtaataatactcttgtcagccacagtgaagccccaagctagccgggataggggactgaccttgtacaggcagcatggagaaactaagacagagtgtcctgcccaagtgatggcactggggagcagtcactcaggtttatttccaccagggcccaagaaaaaaagaaatgaggcaacctaaaattccatcaagatagataccaatatccaaggtgcttggtcttagcggtgtgggacccacgttaaggctcttggtgggaaggtgggaggtgttttcagcatgagatagggttcaggctgtgaatcagagtctagagcctaagataaaagaagataccagggctgggccacggtggctttcgcctgtaatcctagcactttgggaggccaaggcaggcagactgcctgagctcaggagttcgagactagcctgagcaacacggtgaaaccctgtctctactaaaatacaaaaaagtagccaggtgtggcggcatgcacctgtagtcccagctactcgagaggctgaggcaggagaattgcttgaacccgggaggcggaggttgcagtgagtggagatcgcgccactgcactctagcctgggtgacagagcgagactccttctccaaaaaaaaagaaaagaagataccagaactcagtccttaagaaacaaaattctgccaggcgcagtagctcacacctgtaatcccagcactttggaggggccaaggcaggcggatcgcttgaggccaagagttcaagaacagcctgggcaacatgatgaaaccctgtctctaccaaaaatactaaaaattagccagtctcacaacctggtctcaaaataaataaatagatttaaaaaaaaaatcatgggcctgaaccaagctccagacctcactaggaggggagaaggaccccccagccacacagcccaaggctgcagaagcacctaggtggttagagagtgagtgcctggatggggcgcagtggctcacacctgtaatcccagcactttgggaggccgaggcaggcggatcacgaggtcaagagatcaagaccatcctggccaacatggtgacaccgtgtctctactaaaaatacaaaaataagctgggcatggtggtgcgtgcctgtagtcccatctactcgggaggctgaagcaggagaatcacttgaacctgggaggcaaaggttgcagtgagctgagatcgcgccactgcactccagcctggcaacagagcgagacaagactccatctcaaaaaaaaaagtgagtgcccgatgatgccagattcttcatcacctgaagtgaacccacacaacagggctgggccatgggcatcataaaccccattttgcaagctcaggaggagctttagggaaatcagaagactggcccagtctctaccaagtggtggatttagagccggcatggcttcgttccaaatctcacccttgtcccaccattccatgggacctcccattcctgagggagcctggatacgggcaagtgcacaacccgggaggttgaggttacagtgagccatgatcgcaccactgcagtccagcccgagcaatagggtgagaccctccctctgaaaaaaataaaaatactcattttggaaggaagtcattctaaaatgttacacttgtcttcagcatatctgcaatataataattttctgcataactgaggatcattcacagaaaccaatggcttttctccagcagtgtcttctgaagttgtaacagtaggggcacggggagctatttgcttttatgctaaatgaccttagaccacttataaaatgcatatgagtgctttaaatgtt

SEQ ID NO: 7913 - protein, 196 aa, Homo sapiens; identical to SEQ ID NO: 7911

SEQ ID NO: 7914 - DNA, 4477 bp, Homo sapiens
tcttacgccaggatatgactccaggaggtggcccaggtgcccgccgtcgtcagcggggccgcttgatgcgacgcctggtacgccgtctccgccgctggggcttgctccctcgaaccaacaccccggctcgggcctctgaggccagatcccaggtcacaccttctgctgctccccttgaggccctagatggtggcacaggtccagcccgtgagggcggggcagtgggtgggcaagatggggagcaggcacccccactgcccatcaaggctcccctcccatctgctagcacgtctccagcccccactactgtccctgaagccccagggccactgccctcactgcccctagagccatcactattgtctggagtggtgcaggccctgcgaggccgcctgttgcccagcctggggcccccaggaccaacccggagcccccctggaccccacacagcagtcctggccctggaagatgaggacgatgtgctactggtgccactggctgagccgggggtgtgggtagctgaggcagaggatgagccactgctccccacgccaccaccatttgggtggctgtttttaaaaagtaaagttcttagaggatcataggtctggacactccatccttgccaaacctctacccaaaagtggccttaagcaccggaatgccaattaactagagaccctccagcccccaaggggaggatttgggcagaacctgaggttttgccatccacaatccctcctacagggcctggctcacaaaaagagtgcaacaaatgcttctattccatagctacggcattgctcagtaagttgaggtcaaaaataaaggaatcatacatctcaaaattttgcaaattagctgcgagcctgagccccgcctctgcccatctcagtctatgctcacctcatcccactcctccctgtggagccctttgcttggccctctacctcctgccctcttcctgttcatctcccaaccactgcactcttgatttttataccacacagaaggtaagaaaattctaggaaccctaaggatcaatcctctccattttcactcaaatgcctggggcccagctctgcaatgactgactccagggcctctttcctcactgccagcatagaagtcaggggagccagctgggccctgcggtcaggaaggttctcatttttggagcataccctgagcccagatcataggagcagctgtccctggtgggacacaggagtcatgactcctaccctccaccctccacacccaccaggcatttagcagtctgtcctatgcaagacagatgaattctcagccaggatacctcaaggcaggcaaaggtgagtggagggagaattcacaaacattcagggtgtgtggtgctggcatcaccatggccaaatccaagaggtcttcctggaagagggcccaaactggaaccaaaagaatgctgtcagcagttggaatagagctgtgaattctagacagggggagtgtccccagaacaagcaaacggaggagacaagagggcaagggttataggaaagaccctgggcctgagagcacaagcagcggccagagctgcagcgctggggtgggtgatggagggaatgattcgcaagcagtgttggaacccagcccctagtgagcaaagtgacagaagctgccccagagtttggaaggaagatcgaggcagaagatgtagaaggaagctgtgggggtgggagtgatgcctcaggaacaaaactgaggaattccctaacggacccagtccctggggaaagaggctcccctcaggctctccttgtctagccccacacctggcagagcctgtcacccagcctagccccacgcctggcagagcccatcacccagcctagccccacacctggtggagaggccctgttgattacaccctgtcagcctcctcaaacccagcactaattgcacaattttcctctcttctagtgagcaagagcctgaggaagtagcagagaggggtgtgggcccatgtgcagttctgggaccctggcaccttggctcagggaagacccgagctcctttcactgcagaccctctccagagactggggagagggctctggagaacctggttcttgcttactgttctccctttgggccctccttcccaaacgcaaacaatccaggatccactcagcgtcaggcccaatggaaatagtgaagcagtgattttccctcccctgcctctccatagcctggtcttttgccctctcctttgctcttctcttcccccatagccacctcaaatacctgcagcctgatatcttcatcccttcatccagaccttttctctcctagtggtattgcaaactgaaagtggacaaagacttaaggtaaacctgctcctcatggtggaatgcttccaaatgctggaaggaggactttagggcagagttcactaaggaggcttgtgcttatagatcagtgggcctgaaagaagtttctctaggttctggttgtgtgctgtacgaggtgtaggtagtaataatactcttgtcagccacagtgaagccccaagctagccgggataggggactgaccttgtacaggcagcatggagaaactaagacagagtgtcctgcccaagtgatggcactggggagcagtcactcaggtttatttccaccagggcccaagaaaaaaagaaatgaggcaacctaaaattccatcaagatagataccaatatccaaggtgcttggtcttagcggtgtgggacccacgttaaggctcttggtgggaaggtgggaggtgttttcagcatgagatagggttcaggctgtgaatcagagtctagagcctaagataaaagaagataccagggctgggccacggtggctttcgcctgtaatcctagcactttgggaggccaaggcaggcagactgcctgagctcaggagttcgagactagcctgagcaacacggtgaaaccctgtctctactaaaatacaaaaaagtagccaggtgtggcggcatgcacctgtagtcccagctactcgagaggctgaggcaggagaattgcttgaacccgggaggcggaggttgcagtgagtggagatcgcgccactgcactctagcctgggtgacagagcgagactccttctccaaaaaaaaagaaaagaagataccagaactcagtccttaagaaacaaaattctgccaggcgcagtagctcacacctgtaatcccagcactttggaggggccaaggcaggcggatcgcttgaggccaagagttcaagaacagcctgggcaacatgatgaaaccctgtctctaccaaaaatactaaaaattagccagtctcacaacctggtctcaaaataaataaatagatttaaaaaaaaaatcatgggcctgaaccaagctccagacctcactaggaggggagaaggaccccccagccacacagcccaaggctgcagaagcacctaggtggttagagagtgagtgcctggatggggcgcagtggctcacacctgtaatcccagcactttgggaggccgaggcaggcggatcacgaggtcaagagatcaagaccatcctggccaacatggtgacaccgtgtctctactaaaaatacaaaaataagctgggcatggtggtgcgtgcctgtagtcccatctactcgggaggctgaagcaggagaatcacttgaacctgggaggcaaaggttgcagtgagctgagatcgcgccactgcactccagcctggcaacagagcgagacaagactccatctcaaaaaaaaaagtgagtgcccgatgatgccagattcttcatcacctgaagtgaacccacacaacagggctgggccatgggcatcataaaccccattttgcaagctcaggaggagctttagggaaatcagaagactggcccagtctctaccaagtggtggatttagagccggcatggcttcgttccaaatctcacccttgtcccaccattccatgggacctcccattcctgagggagcctggatacgggcaagtgcacaacccgggaggttgaggttacagtgagccatgatcgcaccactgcagtccagcccgagcaatagggtgagaccctccctctgaaaaaaataaaaatactcattttggaaggaagtcattctaaaatgttacacttgtcttcagcatatctgcaatataataattttctgcataactgaggatcattcacagaaaccaatggcttttctccagcagtgtcttctgaagttgtaacagtaggggcacggggagctatttgcttttatgctaaatgaccttagaccacttataaaatgcatatgagtgctttaaatgttattttgtgtgtgtgtggtgttgcctccctgactacaaggggtcacttgctactctaaatgtgtttctaatctactagtacaggaacacacatggacacgttaaaattgtgaataaaagtaagtaaaaagtaaaa

SEQ ID NO: 7915 - protein, 196 aa, Homo sapiens; identical to SEQ ID NO: 7911

SEQ ID NO: 7916 - DNA, 632 bp, Homo sapiens
gacagggtcagtcccctatcccggctagcttggggcttcactgtggctgacaagagtattattactacctacacctcgtacagcacacaaccagaacctagagaaacttctttcaggcccactgatctataagcacaagcctccttagtgaactctgccctaaagtcctccttccagcatttggaagcattccaccatgaggagcaggtttaccttaagtctttgtccactttcagtttgcaataccactaggagagaaaaggtctggatgaagggatgaagatatcaggctgcaggtatttgaggtggctatgggggaagagaagagcaaaggagagggcaaaagaccaggctatggagaggcaggggagggaaaatcactgcttcactatttccattgggcctgacgctgagtggatcctggattgtttgcgtttgggaaggagggcccaaagggagaacagtaagcaagaaccaggttctccagagccctctccccagtctctggagagggtctgcagtgaaaggagctcgggtcttccctgagccaaggtgccagggtcccagaactgcacatgggcccacacccctctctgctacttcctcaggctcttgctcactagaagagagga

SEQ ID NO: 7917 - protein, 89 aa, Homo sapiens [sequence omitted]

SEQ ID NO: 7918 - DNA, 1865 bp, Homo sapiens
agtgagggagagggtgctgcgagctgctgggctgcacacgcacacgcacacgcacacgcacactgatgcacacggacctggacacagacatggacatggacacagaaaccacagcactctgcccctctggcagccgccgggcctcccctccagggacgcccacaccagaagcagatgccacgctactaaagaagtcagagaaactgttggcagagttggaccggagcgggttaccctctgcccctggggcccccagacgaagaggcagtatgcctgtcccctacaagcaccagctccggcgggcccaggctgtagatgaacttgactggccacctcaggcctcatcctctggctcgtctgactccttgggctcaggggaggcagcccctgctcaaaaggatggcatcttcaaggtcatgctagtgggggagagcggcgtgggcaagagcaccctagcaggcacttttggtggtctccagggagacagtgctcacgaaccggagaacccagaggatacctatgagagacgcatcatggtggataaggaggaagtgactctagtcgtttatgacatctgggaacagggggatgcaggagggtggctgcgggaccactgccttcagaccggggacgcctttctcatcgtcttctcagtcaccgaccgacggagtttctccaaagttccagagaccctacttcggctccgggctgggaggccgcaccacgacctacccgttatcctcgttggaaacaagagcgacttggcccgctcccgggaggtatcactggaggagggccgccacctggccgggacgctgagctgcaagcacatcgagacgtcggccgcactgcaccacaacacgagggagctcttcgagggcgcggtgcgccagatccggctgcggcggggccgaaaccacgccggaggccagaggcccgatccgggcagccccgagggccctgcgccacctgcacgccgcgagagcctcaccaagaaagccaagaggttcctcgccaacctggtgccgcgcaacgccaagttcttcaagcagcgctccaggtcgtgtcacgacctctcggtgctctgagccgcggtcgccatggccactgcggtcgccatggtcaccgcgccctccgctcgccccccctcgccccgccccgcccccgtccggcttccttggtggaggccgtctaggaaaccaaaaactcccaggatgccccggtgtgaccgccgggggcggcccggggccgctcggcggcacctccacacccgccccaacgcgttctctggagctttgggcctcagggcgcctagaaggcgaggacgcagacctgaaggcggccggtgagcggggcgggttctgctgggtcgggaagaaaaataattctgcaaggtattttgttttttattaattcgcgcttggccacctcatctgtaaagagattctaaaagcaagatctggaaaagtgcttcgtagactccttgacggagtttgcctcctttgtacgctgcgtgaacatgcctcacctttaagagagtcttaaaggtaaagacacgaaaacacttcctccagggaccttcccgaaaacgttctggctctcatctggtgcggcatgtgtccactttgcctttaaggagttcttaaaggcaagggcctggaagtgctgttcctgagatggattctcttgacttaccagtccaccacggcacttcccctttaaggttattaaaggtaaggggtggacagactttctgcattcagataatgagcagtggcaaccccttttggccagggccaggggggcaccagcaaggggccaccctttcccttttcaataaataatttttgtactgcctctgttca

SEQ ID NO: 7919 - protein, 340 aa, Homo sapiens; identical to SEQ ID NO: 1144

SEQ ID NO: 7920 - DNA, 1525 bp, Homo sapiens
gagcatgtctttggtgagtaggtgactaacatggcctgggtttctcatagttctctgattctgagtgtgcccggcgggccctggaacagttgaatgggtttgagcttgctggtcgacctatgagggttggccatgtgactgagcgactggatggtggcacagacatcacttttcctgatggggaccaggagctggatctgggatcagcaggtggacgttttcagctcatggcaaaactggcagaaggcgctggaatccaactgccaagcactgctgctgctgctgctgccgccgccgcccaggctgctgccttgcaactgaatggagcagttcccttgggggccctgaatccagcagctctgactgctctgagtccagccctgaaccttgcctcccagtgtttccagctctccagcctctttaccccccagaccatgtaaatcagtggcacagtatactgcctccttgtgcctctggatcctgccacttcacatctactcttccatggccccatttctccattttgtggaccaagccatcctgagggcatggacattgtctctgaggaaattggggccacccttaagataccaagaaaagctcctgcccatggtcccactggaaatggactctgctgagcaaagccaccagttgaagagaacagaatccacacctgcattgaatacctgtttctccatgtgtatcgtctctgagattaccttcttgccctttccaacaccttagtgattcctcaatttctcccccattgggaaggccatagggcatactgaaggaactgacctctctccttttcctgtacctttaacctttagtctgtcaaggaaaacccttaggacctctgaatcaagaggactgagtttgtgggtgaaccttgaaggtgctctttctgctacaagggccctgggagatagcatggacgtgcattgagaagccagcctcagaccttagcttgaagcagcttgaggccagacctactgtagcctcagcatcttgctaggaggcatggaagtgatctatcctgccaggaggcctcagagtgatctgtcctgccaggaggtgtgagagtgatctgtcctgtgaggcatttaggggctttcaggaatttagtaaaaggtggagtatgcctttccagtatcttccatcttcctttgtatacttgtccttcctcccatttcctccctttggcccgaggtaggaggatggagggaggctgctactctaccacttcctgtgtgcctctactgtggcctcaaccctggcaattatagctactcccatcccttacctgggcatgtgtgagcccttctcactggattttatacccttgtgtctgtgtacataaatatatatacatatatatatacataaaaactttgtacaaaaggcaagcctcctccttgtggcagctgttgcccatttgtgtgtggtctttgttgtgtgtctgacaacttctcattagcccaacttatgatgtttctagggatataaaacattagtaacatca

SEQ ID NO: 7921 - protein, 106 aa, Homo sapiens
MRVGHVTERLDGGTDITFPDGDQELDLGSAGGRFQLMAKLAEGAGIQLPSTAAAAAAAAAQAAALQLNGAVPLGALNPAALTALSPALNLASQCFQLSSLFTPQTM

SEQ ID NO: 7922 - DNA, 2303 bp, Homo sapiens
ggaagaggaggctctgtacctgcagtgctgcttttcttgcctagactctaggaactatccgagctccactccccacaacatactcaaaggaacggagagaaccgggacccccctgcggggacccggaactggaagaagaggagtcggagccataataaaagcagggatagaaagcgcagtcgtagtcgagatcgggatcggtatagacggagaaatagtcggagccgaagtccaggtcggcagtgtcgtcaccgtagccgtagctgggatcgtcgacatggtagtgagtcgcgaagtcgggaccatcgtcgtgaggatcgtgtgcattacaggagtcctccacttgccactggggagccagttgataatctgagtcctgaggagcgtgatgcccgcacagttttctgtatgcagttagctgcccgaattcggcctcgagatctggaggactttttctctgctgtaggcaaggttcgcgatgtacgtatcatctcagatcggaactcacgtcgttctaagggcattgcctacgtggaattctgtgaaatccagtctgtgccactggccattgggctgactgggcagcggttgctgggagtgcctatcattgtacaggcttcacaggcagagaaaaaccgactggcagccatggccaacaacctgcaaaagggcaatggtggaccaatgcgcctctatgtgggttccctgcacttcaatatcactgaagacatgctccggggcatctttgagccctttggtaaaattgataatattgtcctgatgaaggactcagatacaggccgctctaaaggttatggtttcatcacgttctctgattctgagtgtgcccggcgggccctggaacagttgaatgggtttgagcttgctggtcgacctatgagggttggccatgtgactgagcgactggatggtggcacagacatcacttttcctgatggggaccaggagctggatctgggatcagcaggtggacgttttcagctcatggcaaaactggcagaaggcgctggaatccaactgccaagcactgctgctgctgctgctgccgccgccgcccaggctgctgccttgcaactgaatggagcagttcccttgggggccctgaatccagcagctctgactgctctgagtccagccctgaaccttgcctcccagtgtttccagctctccagcctctttaccccccagaccatgtaaatcagtggcacagtatactgcctccttgtgcctctggatcctgccacttcacatctactcttccatggccccatttctccattttgtggaccaagccatcctgagggcatggacattgtctctgaggaaattggggccacccttaagataccaagaaaagctcctgcccatggtcccactggaaatggactctgctgagcaaagccaccagttgaagagaacagaatccacacctgcattgaatacctgtttctccatgtgtatcgtctctgagattaccttcttgccctttccaacaccttagtgattcctcaatttctcccccattgggaaggccatagggcatactgaaggaactgacctctctccttttcctgtacctttaacctttagtctgtcaaggaaaacccttaggacctctgaatcaagaggactgagtttgtgggtgaaccttgaaggtgctctttctgctacaagggccctgggagatagcatggacgtgcattgagaagccagcctcagaccttagcttgaagcagcttgaggccagacctactgtagcctcagcatcttgctaggaggcatggaagtgatctatcctgccaggaggcctcagagtgatctgtcctgccaggaggtgtgagagtgatctgtcctgtgaggcatttaggggctttcaggaatttagtaaaaggtggagtatgcctttccagtatcttccatcttcctttgtatacttgtccttcctcccatttcctccctttggcccgaggtaggaggatggagggaggctgctactctaccacttcctgtgtgcctctactgtggcctcaaccctggcaattatagctactcccatcccttacctgggcatgtgtgagcccttctcactggattttatacccttgtgtctgtgtacataaatatatatacatatatatatacataaaaactttgtacaaaaggcaagcctcctccttgtggcagctgttgcccatttgtgtgtggtctttgttgtgtgtctgacaacttctcattagcccaacttatgatgtttctagggatataaaacattagtaacatca

SEQ ID NO: 7923 - protein, 269 aa, Homo sapiens
MQLAARIRPRDLEDFFSAVGKVRDVRIISDRNSRRSKGIAYVEFCEIQSVPLAIGLTGQRLLGVPIIVQASQAEKNRLAAMANNLQKGNGGPMRLYVGSLHFNITEDMLRGIFEPFGKIDNIVLMKDSDTGRSKGYGFITFSDSECARRALEQLNGFELAGRPMRVGHVTERLDGGTDITFPDGDQELDLGSAGGRFQLMAKLAEGAGIQLPSTAAAAAAAAAQAAALQLNGAVPLGALNPAALTALSPALNLASQCFQLSSLFTPQTM

SEQ ID NO: 7924 - DNA, 2601 bp, Homo sapiens
gcatgcgcagattggggaaggttctggaagacggcagagctgccgccattttgcgggaagaggaggctctgtacctgcagtgctgcttttcttgcctagactctaggaactatccgagctccactccccacaacatactcaaaggaacggagagaaccgggacccccctgcggggacccggaactgatctgacaggatggcatctgatgactttgacatagtgattgaggccatgctggaagctccctataaaaaagaagaggatgagcaacaaaggaaagaagttaaaaaggattatcctagcaataccaccagcagcaccagcaacagtggcaatgagaccagtggaagcagcaccatcggggagacaagcaagaagaagaggagtcggagccataataaaagcagggatagaaagcgcagtcgtagtcgagatcgggatcggtatagacggagaaatagtcggagccgaagtccaggtcggcagtgtcgtcaccgtagccgtagctgggatcgtcgacatggtagtgagtcgcgaagtcgggaccatcgtcgtgaggatcgtgtgcattacaggagtcctccacttgccactggttataggtatggacacagtaagagtcctcatttcagagagaagagcccagtcagggagccagttgataatctgagtcctgaggagcgtgatgcccgcacagttttctgtatgcagttagctgcccgaattcggcctcgagatctggaggactttttctctgctgtaggcaaggttcgcgatgtacgtatcatctcagatcggaactcacgtcgttctaagggcattgcctacgtggaattctgtgaaatccagtctgtgccactggccattgggctgactgggcagcggttgctgggagtgcctatcattgtacaggcttcacaggcagagaaaaaccgactggcagccatggccaacaacctgcaaaagggcaatggtggaccaatgcgcctctatgtgggttccctgcacttcaatatcactgaagacatgctccggggcatctttgagccctttggtaaaattgataatattgtcctgatgaaggactcagatacaggccgctctaaaggttatggtttcatcacgttctctgattctgagtgtgcccggcgggccctggaacagttgaatgggtttgagcttgctggtcgacctatgagggttggccatgtgactgagcgactggatggtggcacagacatcacttttcctgatggggaccaggagctggatctgggatcagcaggtggacgttttcagctcatggcaaaactggcagaaggcgctggaatccaactgccaagcactgctgctgctgctgctgccgccgccgcccaggctgctgccttgcaactgaatggagcagttcccttgggggccctgaatccagcagctctgactgctctgagtccagccctgaaccttgcctcccagtgtttccagctctccagcctctttaccccccagaccatgtaaatcagtggcacagtatactgcctccttgtgcctctggatcctgccacttcacatctactcttccatggccccatttctccattttgtggaccaagccatcctgagggcatggacattgtctctgaggaaattggggccacccttaagataccaagaaaagctcctgcccatggtcccactggaaatggactctgctgagcaaagccaccagttgaagagaacagaatccacacctgcattgaatacctgtttctccatgtgtatcgtctctgagattaccttcttgccctttccaacaccttagtgattcctcaatttctcccccattgggaaggccatagggcatactgaaggaactgacctctctccttttcctgtacctttaacctttagtctgtcaaggaaaacccttaggacctctgaatcaagaggactgagtttgtgggtgaaccttgaaggtgctctttctgctacaagggccctgggagatagcatggacgtgcattgagaagccagcctcagaccttagcttgaagcagcttgaggccagacctactgtagcctcagcatcttgctaggaggcatggaagtgatctatcctgccaggaggcctcagagtgatctgtcctgccaggaggtgtgagagtgatctgtcctgtgaggcatttaggggctttcaggaatttagtaaaaggtggagtatgcctttccagtatcttccatcttcctttgtatacttgtccttcctcccatttcctccctttggcccgaggtaggaggatggagggaggctgctactctaccacttcctgtgtgcctctactgtggcctcaaccctggcaattatagctactcccatcccttacctgggcatgtgtgagcccttctcactggattttatacccttgtgtctgtgtacataaatatatatacatatatatatacataaaaactttgtacaaaaggcaagcctcctccttgtggcagctgttgcccatttgtgtgtggtctttgttgtgtgtctgacaacttctcattagcccaacttatgatgtttctagggatataaaacattagtaacatca

SEQ ID NO: 7925 - protein, 439 aa, Homo sapiens
MASDDFDIVIEAMLEAPYKKEEDEQQRKEVKKDYPSNTTSSTSNSGNETSGSSTIGETSKKKRSRSHNKSRDRKRSRSRDRDRYRRRNSRSRSPGRQCRHRSRSWDRRHGSESRSRDHRREDRVHYRSPPLATGYRYGHSKSPHFREKSPVREPVDNLSPEERDARTVFCMQLAARIRPRDLEDFFSAVGKVRDVRIISDRNSRRSKGIAYVEFCEIQSVPLAIGLTGQRLLGVPIIVQASQAEKNRLAAMANNLQKGNGGPMRLYVGSLHFNITEDMLRGIFEPFGKIDNIVLMKDSDTGRSKGYGFITFSDSECARRALEQLNGFELAGRPMRVGHVTERLDGGTDITFPDGDQELDLGSAGGRFQLMAKLAEGAGIQLPSTAAAAAAAAAQAAALQLNGAVPLGALNPAALTALSPALNLASQCFQLSSLFTPQTM

SEQ ID NO: 7926 - DNA, 2556 bp, Homo sapiens
ggcgcatgcgcagattggggaaggttctggaagacggcagagctgccgccattttgcgggaagaggaggctctgtacctgcagtgctgcttttcttgcctagactctaggaactatccgagctccactccccacaacatactcaaaggaacggagagaaccgggacccccctgcggggacccggaactgatctgacaggatggcatctgatgactttgacatagtgattgaggccatgctggaagctccctataaaaaagaagaggatgagcaacaaaggaaagaagttaaaaaggattatcctagcaataccaccagcagcaccagcaacagtggcaatgagaccagtggaagcagcaccatcggggagacaagcaatcgtagtcgagatcgggatcggtatagacggagaaatagtcggagccgaagtccaggtcggcagtgtcgtcaccgtagccgtagctgggatcgtcgacatggtagtgagtcgcgaagtcgggaccatcgtcgtgaggatcgtgtgcattacaggagtcctccacttgccactggttataggtatggacacagtaagagtcctcatttcagagagaagagcccagtcagggagccagttgataatctgagtcctgaggagcgtgatgcccgcacagttttctgtatgcagttagctgcccgaattcggcctcgagatctggaggactttttctctgctgtaggcaaggttcgcgatgtacgtatcatctcagatcggaactcacgtcgttctaagggcattgcctacgtggaattctgtgaaatccagtctgtgccactggccattgggctgactgggcagcggttgctgggagtgcctatcattgtacaggcttcacaggcagagaaaaaccgactggcagccatggccaacaacctgcaaaagggcaatggtggaccaatgcgcctctatgtgggttccctgcacttcaatatcactgaagacatgctccggggcatctttgagccctttggtaaaattgataatattgtcctgatgaaggactcagatacaggccgctctaaaggttatggtttcatcacgttctctgattctgagtgtgcccggcgggccctggaacagttgaatgggtttgagcttgctggtcgacctatgagggttggccatgtgactgagcgactggatggtggcacagacatcacttttcctgatggggaccaggagctggatctgggatcagcaggtggacgttttcagctcatggcaaaactggcagaaggcgctggaatccaactgccaagcactgctgctgctgctgctgccgccgccgcccaggctgctgccttgcaactgaatggagcagttcccttgggggccctgaatccagcagctctgactgctctgagtccagccctgaaccttgcctcccagtgtttccagctctccagcctctttaccccccagaccatgtaaatcagtggcacagtatactgcctccttgtgcctctggatcctgccacttcacatctactcttccatggccccatttctccattttgtggaccaagccatcctgagggcatggacattgtctctgaggaaattggggccacccttaagataccaagaaaagctcctgcccatggtcccactggaaatggactctgctgagcaaagccaccagttgaagagaacagaatccacacctgcattgaatacctgtttctccatgtgtatcgtctctgagattaccttcttgccctttccaacaccttagtgattcctcaatttctcccccattgggaaggccatagggcatactgaaggaactgacctctctccttttcctgtacctttaacctttagtctgtcaaggaaaacccttaggacctctgaatcaagaggactgagtttgtgggtgaaccttgaaggtgctctttctgctacaagggccctgggagatagcatggacgtgcattgagaagccagcctcagaccttagcttgaagcagcttgaggccagacctactgtagcctcagcatcttgctaggaggcatggaagtgatctatcctgccaggaggcctcagagtgatctgtcctgccaggaggtgtgagagtgatctgtcctgtgaggcatttaggggctttcaggaatttagtaaaaggtggagtatgcctttccagtatcttccatcttcctttgtatacttgtccttcctcccatttcctccctttggcccgaggtaggaggatggagggaggctgctactctaccacttcctgtgtgcctctactgtggcctcaaccctggcaattatagctactcccatcccttacctgggcatgtgtgagcccttctcactggattttatacccttgtgtctgtgtacataaatatatatacatatatatatacataaaaactttgtacaaaaggcaagcctcctccttgtggcagctgttgcccatttgtgtgtggtctttgttgtgtgtctgacaacttctcattagcccaacttatgatgtttctagggatataaaacattagtaacatca

SEQ ID NO: 7927 - protein, 423 aa, Homo sapiens; identical to SEQ ID NO: 1146

SEQ ID NO: 7928 - DNA, 2517 bp, Homo sapiens
aagccggggagtcttggcgcatgcgcagattggggaaggttctggaagacggcagagctgccgccattttgcgggaagaggaggctctgtacctgcagtgctgcttttcttgcctagactctaggaactatccgagctccactccccacaacatactcaaaggaacggagagaaccgggacccccctgcggggacccggaactgatctgacaggatggcatctgatgactttgacatagtgattgaggccatgctggaagctccctataaaaaagaagaggatgagcaacaaaggaaagaagttaaaaaggattatcctagcaataccaccagcagcaccagcaacagtggcaatgagaccagtggaagcagcaccatcggggagacaagcaatcgtagtcgagatcgggatcggtatagacggagaaatagtcggagccgaagtccaggtcggcagtgtcgtcaccgtagccgtagctgggatcgtcgacatggtagtgagtcgcgaagtcgggaccatcgtcgtgaggatcgtgtgcattacaggagtcctccacttgccactggggagccagttgataatctgagtcctgaggagcgtgatgcccgcacagttttctgtatgcagttagctgcccgaattcggcctcgagatctggaggactttttctctgctgtaggcaaggttcgcgatgtacgtatcatctcagatcggaactcacgtcgttctaagggcattgcctacgtggaattctgtgaaatccagtctgtgccactggccattgggctgactgggcagcggttgctgggagtgcctatcattgtacaggcttcacaggcagagaaaaaccgactggcagccatggccaacaacctgcaaaagggcaatggtggaccaatgcgcctctatgtgggttccctgcacttcaatatcactgaagacatgctccggggcatctttgagccctttggtaaaattgataatattgtcctgatgaaggactcagatacaggccgctctaaaggttatggtttcatcacgttctctgattctgagtgtgcccggcgggccctggaacagttgaatgggtttgagcttgctggtcgacctatgagggttggccatgtgactgagcgactggatggtggcacagacatcacttttcctgatggggaccaggagctggatctgggatcagcaggtggacgttttcagctcatggcaaaactggcagaaggcgctggaatccaactgccaagcactgctgctgctgctgctgccgccgccgcccaggctgctgccttgcaactgaatggagcagttcccttgggggccctgaatccagcagctctgactgctctgagtccagccctgaaccttgcctcccagtgtttccagctctccagcctctttaccccccagaccatgtaaatcagtggcacagtatactgcctccttgtgcctctggatcctgccacttcacatctactcttccatggccccatttctccattttgtggaccaagccatcctgagggcatggacattgtctctgaggaaattggggccacccttaagataccaagaaaagctcctgcccatggtcccactggaaatggactctgctgagcaaagccaccagttgaagagaacagaatccacacctgcattgaatacctgtttctccatgtgtatcgtctctgagattaccttcttgccctttccaacaccttagtgattcctcaatttctcccccattgggaaggccatagggcatactgaaggaactgacctctctccttttcctgtacctttaacctttagtctgtcaaggaaaacccttaggacctctgaatcaagaggactgagtttgtgggtgaaccttgaaggtgctctttctgctacaagggccctgggagatagcatggacgtgcattgagaagccagcctcagaccttagcttgaagcagcttgaggccagacctactgtagcctcagcatcttgctaggaggcatggaagtgatctatcctgccaggaggcctcagagtgatctgtcctgccaggaggtgtgagagtgatctgtcctgtgaggcatttaggggctttcaggaatttagtaaaaggtggagtatgcctttccagtatcttccatcttcctttgtatacttgtccttcctcccatttcctccctttggcccgaggtaggaggatggagggaggctgctactctaccacttcctgtgtgcctctactgtggcctcaaccctggcaattatagctactcccatcccttacctgggcatgtgtgagcccttctcactggattttatacccttgtgtctgtgtacataaatatatatacatatatatatacataaaaactttgtacaaaaggcaagcctcctccttgtggcagctgttgcccatttgtgtgtggtctttgttgtgtgtctgacaacttctcattagcccaacttatgatgtttctagggatataaaacattagtaacatca

SEQ ID NO: 7929 - protein, 405 aa, Homo sapiens
MASDDFDIVIEAMLEAPYKKEEDEQQRKEVKKDYPSNTTSSTSNSGNETSGSSTIGETSNRSRDRDRYRRRNSRSRSPGRQCRHRSRSWDRRHGSESRSRDHRREDRVHYRSPPLATGEPVDNLSPEERDARTVFCMQLAARIRPRDLEDFFSAVGKVRDVRIISDRNSRRSKGIAYVEFCEIQSVPLAIGLTGQRLLGVPIIVQASQAEKNRLAAMANNLQKGNGGPMRLYVGSLHFNITEDMLRGIFEPFGKIDNIVLMKDSDTGRSKGYGFITFSDSECARRALEQLNGFELAGRPMRVGHVTERLDGGTDITFPDGDQELDLGSAGGRFQLMAKLAEGAGIQLPSTAAAAAAAAAQAAALQLNGAVPLGALNPAALTALSPALNLASQCFQLSSLFTPQTM

SEQ ID NO: 7930 - DNA, 2490 bp, Homo sapiens
gcatgcgcagattggggaaggttctggaagacggcagagctgccgccattttgcgggaagaggaggctctgtacctgcagtgctgcttttcttgcctagactctaggaactatccgagctccactccccacaacatactcaaaggaacggagagaaccgggacccccctgcggggacccggaactgatctgacaggatggcatctgatgactttgacatagtgattgaggccatgctggaagctccctataaaaaagaagaggatgagcaacaaaggaaagaagttaaaaaggattatcctagcaataccaccagcagcaccagcaacagtggcaatgagaccagtggaagcagcaccatcggggagacaagcaagaagaagaggagtcggagccataataaaagcagggatagaaagcgcagtcgtagtcgagatcgggatcggtatagacggagaaatagtcggagccgaagtccaggtcggcagtgtcgtcaccgtagccgtagctgggatcgtcgacatggtagtgagtcgcgaagtcgggaccatcgtcgtgaggatcgtgtgcattacaggagtcctccacttgccactggttataggtatggacacagtaagagtcctcatttcagagagaagagcccagtcagggagccagttgataatctgagtcctgaggagcgtgatgcccgcacagttttctgtatgcagttagctgcccgaattcggcctcgagatctggaggactttttctctgctgtaggcaaggttcgcgatgtacgtatcatctcagatcggaactcacgtcgttctaagggcattgcctacgtggaattctgtgaaatccagtctgtgccactggccattgggctgactgggcagcggttgctgggagtgcctatcattgtacaggcttcacaggcagagaaaaaccgactggcagccatggccaacaacctgcaaaagggcaatggtggaccaatgcgcctctatgtgggttccctgcacttcaatatcactgaagacatgctccggggcatctttgagccctttggtaaaattgataatattgtcctgatgaaggactcagatacaggccgctctaaaggttatggtttcatcacgttctctgattctgagtgtgcccggcgggccctggaacagttgaatgggtttgagcttgctggtcgacctatgagggttggccatgtgactgagcgactggatggtggcacagacatcacttttcctgatggggaccaggagctggatctgggatcagcaggtggacgttttcagctcatggcaaaactggcagaaggcgctggaatccaactgccaagcactgctgctgctgctgctgccgccgccgcccaggctgctgccttgcaactgaatggagcagttcccttgggggccctgaatccagcagctctgactgctctgagtccagccctgaaccttgcctcccagtgtttccagctctccagcctctttaccccccagaccatgtaaatcagtggcacagtatactgcctccttgtgcctctggatcctgccacttcacatctactcttccatggccccatttctccattttgtggaccaagccatcctgagggcatggacattgtctctgaggaaattggggccacccttaagataccaagaaaagctcctgcccatggtcccactggaaatggactctgctgagcaaagccaccagttgaagagaacagaatccacacctgcattgaatacctgtttctccatgtgtatcgtctctgagattaccttcttgccctttccaacaccttagtgattcctcaatttctcccccattgggaaggccatagggcatactgaaggaactgacctctctccttttcctgtacctttaacctttagtctgtcaaggaaaacccttaggacctctgaatcaagaggactgagtttgtgggtgaaccttgaaggtgctctttctgctacaagggccctgggagatagcatggacgtgcattgagaagccagcctcagaccttagcttgaagcagcttgaggccagacctactgtagcctcagcatcttgctaggaggcatggaagtgatctatcctgccaggaggcctcagagtgatctgtcctgccaggaggtgtgagagtgatctgtcctgtgaggcatttaggggctttcaggaatttagtaaaaggtggagtatgcctttccagtatcttccatcttcctttgtatacttgtccttcctcccatttcctccctttggcccgaggtaggaggatggagggaggctgctactctaccacttcctgtgtgcctctactgtggcctcaaccctggcaattatagctactcccatcccttacctgggcatgtgtgagcccttctcactggattttatacccttgtgtctgtgtacataaatatatatacatatatatatacataaaaactttgtacaaaaggcaagcctc

SEQ ID NO: 7931 - protein, 439 aa, Homo sapiens; identical to SEQ ID NO: 7925

SEQ ID NO: 7932 - DNA, 4298 bp, Homo sapiens
gcatgcgcagattggggaaggttctggaagacggcagagctgccgccattttgcgggaagaggaggctctgtacctgcagtgctgcttttcttgcctagactctaggaactatccgagctccactccccacaacatactcaaaggaacggagagaaccgggacccccctgcggggacccggaactgatctgacaggatggcatctgatgactttgacatagtgattgaggccatgctggaagctccctataaaaaagaagaggatgagcaacaaaggaaagaagttaaaaaggattatcctagcaataccaccagcagcaccagcaacagtggcaatgagaccagtggaagcagcaccatcggggagacaagcaagaagaagaggagtcggagccataataaaagcagggatagaaagcgcagtcgtagtcgagatcgggatcggtatagacggagaaatagtcggagccgaagtccaggtcggcagtgtcgtcaccgtagccgtagctgggatcgtcgacatggtagtgagtcgcgaagtcgggaccatcgtcgtgaggatcgtgtgcattacaggagtcctccacttgccactggttataggtatggacacagtaagagtcctcatttcagagagaagagcccagtcagggagccagttgataatctgagtcctgaggagcgtgatgcccgcacagttttctgtatgcagttagctgcccgaattcggcctcgagatctggaggactttttctctgctgtaggcaaggttcgcgatgtacgtatcatctcagatcggaactcacgtcgttctaagggcattgcctacgtggaattctgtgaaatccagtctgtgccactggccattgggctgactgggcagcggttgctgggagtgcctatcattgtacaggcttcacaggcagagaaaaaccgactggcagccatggccaacaacctgcaaaagggcaatggtggaccaatgcgcctctatgtgggttccctgcacttcaatatcactgaagacatgctccggggcatctttgagccctttggtaaaattgataatattgtcctgatgaaggactcagatacaggccgctctaaaggttatggtttcatcacgcttcatcctcctcctttaggaactgtctaaatgacccataaaccctggtgcctgaagcttggactagccttctaccccttgagatgagtgcattgcttgagatcttggctttgctcctacactctgtcagtggccctggtatgggggtgttcaggagttcacccagcttccctggtgctgcaacttggctctttgggtaatagtaaccaggctgcagctaaaaggttgggggtgtgagggaggttaggtatgggcttttaaagacatgctttatagaattgatgtttctcataacagggatgggaataggaaattatacttccctctggtgctaccccatttgaagcaatttctgcaccgagaaggatcagttattaacgtagcactatggggagaatagtgaggccacctaattatgggcaagcttcaccttttcctgacattccaacaaaatggttgccaattcctataactggttcttccagccccatgtgactccaggctgagaactggctgccagccacaaagtctgatagaagcttgtattttctgggcttaaaccaggcagcatacactcccacagtgacccacagggcagagggcagtaggttgtattctgtcattggaattgctcacctcaaaaatatccagtaaaggcaagccatgtataacacctgcctaggaactgtcagtaccacatgccaggccctaaggcaggtaatgctgctagctagctaaacaagctagctgtggtgttgacaattctgtggtggcaagtaacttttgtaaccttttctcgctctctgtgtgactgagatatggaaaggcttctgtggggcatttttgcccttgcattgttgccttttgggtcaacaaccttgacacttaaacaaacagcagactgggaatcctctttgtaccagtgtgttgctgggtgctgctgataaaagggactagagagtaaaggccttctggtcagcaggtcacttagtcaacagctcttgtgtgtatgtgggggtgtgggttctgccttgctgtcagcactagggtgtgttccctcttaagcctggaattaggagttccagattcctagtacttaactaaaatttggccaggcgcggtggctcacacctgtaatcccagcagtttgggaggccaaggtgggtgaatcgcctgaggtcaggagttcgagaccagcctgaccaacgtggtgaaaccccatctctactaaaaaataaaaataaaaaaactagctgggcatggtggtgggtgcctgtaattccagctactcgggaggctgaggcaggagaattgcttgaacccaggagatggaggttgtagtgagctgacatggtgccactgcactctagcctcagtgacagagtgacagagtgggactccgtctcaaaaaaaaaaaaaaaaaaaaaaaaaaaagactaaaacttactaggatagagaactgaattaaaagcccaggagccttgttcttagcttgtcttccatttgatatacccatttgtgaaataacttgtcaggctaggtttcctacaataataaaattttgcattgttagattcttaatggagctgaaagattgaaaagtgactgccattgagtccattggaaaaggtccttttcagagaaccattttgaggtgatgggcctaggtcatattttctgggaaagaaaagtttgtacctcagtgagcatacaattttcctgggatagtaggactagggagtgttactgggtctttgagagcatgtctttggtgagtaggtgactaacatggcctgggtttctcatagttctctgattctgagtgtgcccggcgggccctggaacagttgaatgggtttgagcttgctggtcgacctatgagggttggccatgtgactgagcgactggatggtggcacagacatcacttttcctgatggggaccaggagctggatctgggatcagcaggtggacgttttcagctcatggcaaaactggcagaaggcgctggaatccaactgccaagcactgctgctgctgctgctgccgccgccgcccaggctgctgccttgcaactgaatggagcagttcccttgggggccctgaatccagcagctctgactgctctgagtccagccctgaaccttgcctcccagtgtttccagctctccagcctctttaccccccagaccatgtaaatcagtggcacagtatactgcctccttgtgcctctggatcctgccacttcacatctactcttccatggccccatttctccattttgtggaccaagccatcctgagggcatggacattgtctctgaggaaattggggccacccttaagataccaagaaaagctcctgcccatggtcccactggaaatggactctgctgagcaaagccaccagttgaagagaacagaatccacacctgcattgaatacctgtttctccatgtgtatcgtctctgagattaccttcttgccctttccaacaccttagtgattcctcaatttctcccccattgggaaggccatagggcatactgaaggaactgacctctctccttttcctgtacctttaacctttagtctgtcaaggaaaacccttaggacctctgaatcaagaggactgagtttgtgggtgaaccttgaaggtgctctttctgctacaagggccctgggagatagcatggacgtgcattgagaagccagcctcagaccttagcttgaagcagcttgaggccagacctactgtagcctcagcatcttgctaggaggcatggaagtgatctatcctgccaggaggcctcagagtgatctgtcctgccaggaggtgtgagagtgatctgtcctgtgaggcatttaggggctttcaggaatttagtaaaaggtggagtatgcctttccagtatcttccatcttcctttgtatacttgtccttcctcccatttcctccctttggcccgaggtaggaggatggagggaggctgctactctaccacttcctgtgtgcctctactgtggcctcaaccctggcaattatagctactcccatcccttacctgggcatgtgtgagcccttctcactggattttatacccttgtgtctgtgtacataaatatatatacatatatatatacataaaaactttgtacaaaaggcaagcctc

SEQ ID NO: 7933 - protein, 319 aa, Homo sapiens
MASDDFDIVIEAMLEAPYKKEEDEQQRKEVKKDYPSNTTSSTSNSGNETSGSSTIGETSKKKRSRSHNKSRDRKRSRSRDRDRYRRRNSRSRSPGRQCRHRSRSWDRRHGSESRSRDHRREDRVHYRSPPLATGYRYGHSKSPHFREKSPVREPVDNLSPEERDARTVFCMQLAARIRPRDLEDFFSAVGKVRDVRIISDRNSRRSKGIAYVEFCEIQSVPLAIGLTGQRLLGVPIIVQASQAEKNRLAAMANNLQKGNGGPMRLYVGSLHFNITEDMLRGIFEPFGKIDNIVLMKDSDTGRSKGYGFITLHPPPLGTV

SEQ ID NO: 7934 - DNA, 2445 bp, Homo sapiens
ggcgcatgcgcagattggggaaggttctggaagacggcagagctgccgccattttgcgggaagaggaggctctgtacctgcagtgctgcttttcttgcctagactctaggaactatccgagctccactccccacaacatactcaaaggaacggagagaaccgggacccccctgcggggacccggaactgatctgacaggatggcatctgatgactttgacatagtgattgaggccatgctggaagctccctataaaaaagaagaggatgagcaacaaaggaaagaagttaaaaaggattatcctagcaataccaccagcagcaccagcaacagtggcaatgagaccagtggaagcagcaccatcggggagacaagcaatcgtagtcgagatcgggatcggtatagacggagaaatagtcggagccgaagtccaggtcggcagtgtcgtcaccgtagccgtagctgggatcgtcgacatggtagtgagtcgcgaagtcgggaccatcgtcgtgaggatcgtgtgcattacaggagtcctccacttgccactggttataggtatggacacagtaagagtcctcatttcagagagaagagcccagtcagggagccagttgataatctgagtcctgaggagcgtgatgcccgcacagttttctgtatgcagttagctgcccgaattcggcctcgagatctggaggactttttctctgctgtaggcaaggttcgcgatgtacgtatcatctcagatcggaactcacgtcgttctaagggcattgcctacgtggaattctgtgaaatccagtctgtgccactggccattgggctgactgggcagcggttgctgggagtgcctatcattgtacaggcttcacaggcagagaaaaaccgactggcagccatggccaacaacctgcaaaagggcaatggtggaccaatgcgcctctatgtgggttccctgcacttcaatatcactgaagacatgctccggggcatctttgagccctttggtaaaattgataatattgtcctgatgaaggactcagatacaggccgctctaaaggttatggtttcatcacgttctctgattctgagtgtgcccggcgggccctggaacagttgaatgggtttgagcttgctggtcgacctatgagggttggccatgtgactgagcgactggatggtggcacagacatcacttttcctgatggggaccaggagctggatctgggatcagcaggtggacgttttcagctcatggcaaaactggcagaaggcgctggaatccaactgccaagcactgctgctgctgctgctgccgccgccgcccaggctgctgccttgcaactgaatggagcagttcccttgggggccctgaatccagcagctctgactgctctgagtccagccctgaaccttgcctcccagtgtttccagctctccagcctctttaccccccagaccatgtaaatcagtggcacagtatactgcctccttgtgcctctggatcctgccacttcacatctactcttccatggccccatttctccattttgtggaccaagccatcctgagggcatggacattgtctctgaggaaattggggccacccttaagataccaagaaaagctcctgcccatggtcccactggaaatggactctgctgagcaaagccaccagttgaagagaacagaatccacacctgcattgaatacctgtttctccatgtgtatcgtctctgagattaccttcttgccctttccaacaccttagtgattcctcaatttctcccccattgggaaggccatagggcatactgaaggaactgacctctctccttttcctgtacctttaacctttagtctgtcaaggaaaacccttaggacctctgaatcaagaggactgagtttgtgggtgaaccttgaaggtgctctttctgctacaagggccctgggagatagcatggacgtgcattgagaagccagcctcagaccttagcttgaagcagcttgaggccagacctactgtagcctcagcatcttgctaggaggcatggaagtgatctatcctgccaggaggcctcagagtgatctgtcctgccaggaggtgtgagagtgatctgtcctgtgaggcatttaggggctttcaggaatttagtaaaaggtggagtatgcctttccagtatcttccatcttcctttgtatacttgtccttcctcccatttcctccctttggcccgaggtaggaggatggagggaggctgctactctaccacttcctgtgtgcctctactgtggcctcaaccctggcaattatagctactcccatcccttacctgggcatgtgtgagcccttctcactggattttatacccttgtgtctgtgtacataaatatatatacatatatatatacataaaaactttgtacaaaaggcaagcctc

SEQ ID NO: 7935 - protein, 423 aa, Homo sapiens; identical to SEQ ID NO: 1146

SEQ ID NO: 7936 - DNA, 2406 bp, Homo sapiens
aagccggggagtcttggcgcatgcgcagattggggaaggttctggaagacggcagagctgccgccattttgcgggaagaggaggctctgtacctgcagtgctgcttttcttgcctagactctaggaactatccgagctccactccccacaacatactcaaaggaacggagagaaccgggacccccctgcggggacccggaactgatctgacaggatggcatctgatgactttgacatagtgattgaggccatgctggaagctccctataaaaaagaagaggatgagcaacaaaggaaagaagttaaaaaggattatcctagcaataccaccagcagcaccagcaacagtggcaatgagaccagtggaagcagcaccatcggggagacaagcaatcgtagtcgagatcgggatcggtatagacggagaaatagtcggagccgaagtccaggtcggcagtgtcgtcaccgtagccgtagctgggatcgtcgacatggtagtgagtcgcgaagtcgggaccatcgtcgtgaggatcgtgtgcattacaggagtcctccacttgccactggggagccagttgataatctgagtcctgaggagcgtgatgcccgcacagttttctgtatgcagttagctgcccgaattcggcctcgagatctggaggactttttctctgctgtaggcaaggttcgcgatgtacgtatcatctcagatcggaactcacgtcgttctaagggcattgcctacgtggaattctgtgaaatccagtctgtgccactggccattgggctgactgggcagcggttgctgggagtgcctatcattgtacaggcttcacaggcagagaaaaaccgactggcagccatggccaacaacctgcaaaagggcaatggtggaccaatgcgcctctatgtgggttccctgcacttcaatatcactgaagacatgctccggggcatctttgagccctttggtaaaattgataatattgtcctgatgaaggactcagatacaggccgctctaaaggttatggtttcatcacgttctctgattctgagtgtgcccggcgggccctggaacagttgaatgggtttgagcttgctggtcgacctatgagggttggccatgtgactgagcgactggatggtggcacagacatcacttttcctgatggggaccaggagctggatctgggatcagcaggtggacgttttcagctcatggcaaaactggcagaaggcgctggaatccaactgccaagcactgctgctgctgctgctgccgccgccgcccaggctgctgccttgcaactgaatggagcagttcccttgggggccctgaatccagcagctctgactgctctgagtccagccctgaaccttgcctcccagtgtttccagctctccagcctctttaccccccagaccatgtaaatcagtggcacagtatactgcctccttgtgcctctggatcctgccacttcacatctactcttccatggccccatttctccattttgtggaccaagccatcctgagggcatggacattgtctctgaggaaattggggccacccttaagataccaagaaaagctcctgcccatggtcccactggaaatggactctgctgagcaaagccaccagttgaagagaacagaatccacacctgcattgaatacctgtttctccatgtgtatcgtctctgagattaccttcttgccctttccaacaccttagtgattcctcaatttctcccccattgggaaggccatagggcatactgaaggaactgacctctctccttttcctgtacctttaacctttagtctgtcaaggaaaacccttaggacctctgaatcaagaggactgagtttgtgggtgaaccttgaaggtgctctttctgctacaagggccctgggagatagcatggacgtgcattgagaagccagcctcagaccttagcttgaagcagcttgaggccagacctactgtagcctcagcatcttgctaggaggcatggaagtgatctatcctgccaggaggcctcagagtgatctgtcctgccaggaggtgtgagagtgatctgtcctgtgaggcatttaggggctttcaggaatttagtaaaaggtggagtatgcctttccagtatcttccatcttcctttgtatacttgtccttcctcccatttcctccctttggcccgaggtaggaggatggagggaggctgctactctaccacttcctgtgtgcctctactgtggcctcaaccctggcaattatagctactcccatcccttacctgggcatgtgtgagcccttctcactggattttatacccttgtgtctgtgtacataaatatatatacatatatatatacataaaaactttgtacaaaaggcaagcctc

SEQ ID NO: 7937 - protein, 405 aa, Homo sapiens; identical to SEQ ID NO: 7929

SEQ ID NO: 7938 - DNA, 2201 bp, Homo sapiens
gcagattggggaaggttctggaagacggcagagctgccgccattttgcgggaagaggaggctctgtacctgcagtgctgcttttcttgcctagactctaggaactatccgagctccactccccacaacatactcaaaggaacggagagaaccgggacccccctgcggggacccggaactgatctgacaggatggcatctgatgactttgacatagtgattgaggccatgctggaagctccctataaaaaagaagaggatgagcaacaaaggaaagaagttaaaaaggattatcctagcaataccaccagcagcaccagcaacagtggcaatgagaccagtggaagcagcaccatcggggagacaagcaatcgtagtcgagatcgggatcggtatagacggagaaatagtcggagccgaagtccaggtcggcagtgtcgtcaccgtagccgtagctgggatcgtcgacatggtagtgagtcgcgaagtcgggaccatcgtcgtgaggatcgtgtgcattacaggagtcctccacttgccactgggtatcactttttgctaatagattcacttttgtataataatctggataaaacaacaaatgcactatgaaccctgcttgagggtgcttattataacacattgtgattggcaggatactcaggcacagaaagggttggtattcaaaatttactggtgtggtggctcatgcctgtaatcccagcactttgggagactgaggccagaagatcacttgggctcaggaattcaagaccagccaggacaacatggcgaaaccctggttctacaaaaaatgcaaaaatgagctagatatggtcatgtgtgtctgtaatcctagccacacaaggaggctgaggtgggaggattgcttgagcctgggaggcaaaggttgcagtgacccgagatggcgccactgcactccagcctgggtgacagcggaaaccctgtcttaaaaaaacaatgagatgaagtactggaatctggttttctcaccatggaagacccagcattggaccaatgagaataaggtttcaccttttgtttttctctattctttagttataggtatggacacagtaagagtcctcatttcagagagaagagcccagtcaggtgggttgataatgaacactgttttagggattgtgaggtatgaataaaaggttatttgagccaaattacaggaatgtgtaatacttgagggttagctggagaacaatgaccaggtattgggagggctggtctcaacacatttcactcttcagggagccagttgataatctgagtcctgaggagcgtgatgcccgcacagttttctgtatgcagttagctgcccgaattcggcctcgagatctggaggactttttctctgctgtaggcaaggtaaccctcccaccttagttttcttctgagtagcttagcttgtatctccctttatgcctaactcaggatttcttttgcgtcctggataggttcgcgatgtacgtatcatctcagatcggaactcacgtcgttctaagggcattgcctacgtggaattctgtgaaatccagtctgtgccactggccattgggctgactgggcagcggttgctgggagtgcctatcattgtacaggcttcacaggtgagcaggctgagaaacagacataagattttaaggggagagggaatgtgggacatgacccatcatttcctccttccccaggcagagaaaaaccgactggcagccatggccaacaacctgcaaaagggcaatggtggaccaatgcgcctctatgtgggttccctgcacttcaatatcactgaagacatgctccggggcatctttgagccctttggtaaagtgagtagaagtgagagaaacctctgaagggaattggaagaagtggggagggtgagtgtttgagtgtacttctctgttgtgcctggccgtgattaacctgctgcatacgtcatagtgggcatatgagtctatgctgtgaaagtttggctccatctctgttcatgtgcttggtggacaaataagttagacacaaatcaaataataggccaggttaagaaagattaaaaaatacaaaaattagccaatgtggtggtgcacgcctatagtcccaactagtcgagaggctgaggtgggagggtcacttgagcctgggaggtcaaggctgtagtgagcctcgg

SEQ ID NO: 7939 - protein, 139 aa, Homo sapiens
MASDDFDIVIEAMLEAPYKKEEDEQQRKEVKKDYPSNTTSSTSNSGNETSGSSTIGETSNRSRDRDRYRRRNSRSRSPGRQCRHRSRSWDRRHGSESRSRDHRREDRVHYRSPPLATGYHFLLIDSLLYNNLDKTTNAL

SEQ ID NO: 7940 - DNA, 906 bp, Homo sapiens
gcagattggggaaggttctggaagacggcagagctgccgccattttgcgggaagaggaggctctgtacctgcagtgctgcttttcttgcctagactctaggaactatccgagctccactccccacaacatactcaaaggaacggagagaaccgggacccccctgcggggacccggaactgatctgacaggatggcatctgatgactttgacatagtgattgaggccatgctggaagctccctataaaaaagaagagtcgtagtcgagatcgggatcggtatagacggagaaatagtcggagccgaagtccaggtcggcagtgtcgtcaccgtagccgtagctgggatcgtcgacatggtagtgagtcgcgaagtcgggaccatcgtcgtgaggatcgtgtgcattacaggagtcctccacttgccactggccattgggctgactgggcagcgccatggccaacaacctgcaaaagggcaatggtggaccaatgcgcctctatgtgggttccctgcacttcaatatcactgaagacatgctccggggcatctttgagccctttggtaaagtgagtagaagtgagagaaacctctgaagggaattggaagaagtggggagggtgagtgtttgagtgtacttctctgttgtgcctggccgtgattaacctgctgcatacgtcatagtgggcatatgagtctatgctgtgaaagtttggctccatctctgttcatgtgcttggtggacaaataagttagacacaaatcaaataataggccaggttaagaaagattaaaaaatacaaaaattagccaatgtggtggtgcacgcctatagtcccaactagtcgagaggctgaggtgggagggtcacttgagcctgggaggtcaaggctgtagtgagcctcgg

SEQ ID NO: 7941 - protein, 58 aa, Homo sapiens [sequence omitted]

SEQ ID NO: 7942 - DNA, 2088 bp, Homo sapiens
gcagattggggaaggttctggaagacggcagagctgccgccattttgcgggaagaggaggctctgtacctgcagtgctgcttttcttgcctagactctaggaactatccgagctccactccccacaacatactcaaaggaacggagagaaccgggacccccctgcggggacccggaactgatctgacaggatggcatctgatgactttgacatagtgattgaggccatgctggaagctccctataaaaaagaagagtcgtagtcgagatcgggatcggtatagacggagaaatagtcggagccgaagtccaggtcggcagtgtcgtcaccgtagccgtagctgggatcgtcgacatggtagtgagtcgcgaagtcgggaccatcgtcgtgaggatcgtgtgcattacaggagtcctccacttgccactgggtatcactttttgctaatagattcacttttgtataataatctggataaaacaacaaatgcactatgaaccctgcttgagggtgcttattataacacattgtgattggcaggatactcaggcacagaaagggttggtattcaaaatttactggtgtggtggctcatgcctgtaatcccagcactttgggagactgaggccagaagatcacttgggctcaggaattcaagaccagccaggacaacatggcgaaaccctggttctacaaaaaatgcaaaaatgagctagatatggtcatgtgtgtctgtaatcctagccacacaaggaggctgaggtgggaggattgcttgagcctgggaggcaaaggttgcagtgacccgagatggcgccactgcactccagcctgggtgacagcggaaaccctgtcttaaaaaaacaatgagatgaagtactggaatctggttttctcaccatggaagacccagcattggaccaatgagaataaggtttcaccttttgtttttctctattctttagttataggtatggacacagtaagagtcctcatttcagagagaagagcccagtcaggtgggttgataatgaacactgttttagggattgtgaggtatgaataaaaggttatttgagccaaattacaggaatgtgtaatacttgagggttagctggagaacaatgaccaggtattgggagggctggtctcaacacatttcactcttcagggagccagttgataatctgagtcctgaggagcgtgatgcccgcacagttttctgtatgcagttagctgcccgaattcggcctcgagatctggaggactttttctctgctgtaggcaaggtaaccctcccaccttagttttcttctgagtagcttagcttgtatctccctttatgcctaactcaggatttcttttgcgtcctggataggttcgcgatgtacgtatcatctcagatcggaactcacgtcgttctaagggcattgcctacgtggaattctgtgaaatccagtctgtgccactggccattgggctgactgggcagcggttgctgggagtgcctatcattgtacaggcttcacaggtgagcaggctgagaaacagacataagattttaaggggagagggaatgtgggacatgacccatcatttcctccttccccaggcagagaaaaaccgactggcagccatggccaacaacctgcaaaagggcaatggtggaccaatgcgcctctatgtgggttccctgcacttcaatatcactgaagacatgctccggggcatctttgagccctttggtaaagtgagtagaagtgagagaaacctctgaagggaattggaagaagtggggagggtgagtgtttgagtgtacttctctgttgtgcctggccgtgattaacctgctgcatacgtcatagtgggcatatgagtctatgctgtgaaagtttggctccatctctgttcatgtgcttggtggacaaataagttagacacaaatcaaataataggccaggttaagaaagattaaaaaatacaaaaattagccaatgtggtggtgcacgcctatagtcccaactagtcgagaggctgaggtgggagggtcacttgagcctgggaggtcaaggctgtagtgagcctcgg

SEQ ID NO: 7943 - protein, 66 aa, Homo sapiens [sequence omitted]

SEQ ID NO: 7944 - DNA, 2249 bp, Homo sapiens
gcagattggggaaggttctggaagacggcagagctgccgccattttgcgggaagaggaggctctgtacctgcagtgctgcttttcttgcctagactctaggaactatccgagctccactccccacaacatactcaaaggaacggagagaaccgggacccccctgcggggacccggaactgatctgacaggatggcatctgatgactttgacatagtgattgaggccatgctggaagctccctataaaaaagaagaggatgagcaacaaaggaaagaagttaaaaaggattatcctagcaataccaccagcagcaccagcaacagtggcaatgagaccagtggaagcagcaccatcggggagacaagcaagaagaagaggagtcggagccataataaaagcagggatagaaagcgcagtcgtagtcgagatcgggatcggtatagacggagaaatagtcggagccgaagtccaggtcggcagtgtcgtcaccgtagccgtagctgggatcgtcgacatggtagtgagtcgcgaagtcgggaccatcgtcgtgaggatcgtgtgcattacaggagtcctccacttgccactgggtatcactttttgctaatagattcacttttgtataataatctggataaaacaacaaatgcactatgaaccctgcttgagggtgcttattataacacattgtgattggcaggatactcaggcacagaaagggttggtattcaaaatttactggtgtggtggctcatgcctgtaatcccagcactttgggagactgaggccagaagatcacttgggctcaggaattcaagaccagccaggacaacatggcgaaaccctggttctacaaaaaatgcaaaaatgagctagatatggtcatgtgtgtctgtaatcctagccacacaaggaggctgaggtgggaggattgcttgagcctgggaggcaaaggttgcagtgacccgagatggcgccactgcactccagcctgggtgacagcggaaaccctgtcttaaaaaaacaatgagatgaagtactggaatctggttttctcaccatggaagacccagcattggaccaatgagaataaggtttcaccttttgtttttctctattctttagttataggtatggacacagtaagagtcctcatttcagagagaagagcccagtcaggtgggttgataatgaacactgttttagggattgtgaggtatgaataaaaggttatttgagccaaattacaggaatgtgtaatacttgagggttagctggagaacaatgaccaggtattgggagggctggtctcaacacatttcactcttcagggagccagttgataatctgagtcctgaggagcgtgatgcccgcacagttttctgtatgcagttagctgcccgaattcggcctcgagatctggaggactttttctctgctgtaggcaaggtaaccctcccaccttagttttcttctgagtagcttagcttgtatctccctttatgcctaactcaggatttcttttgcgtcctggataggttcgcgatgtacgtatcatctcagatcggaactcacgtcgttctaagggcattgcctacgtggaattctgtgaaatccagtctgtgccactggccattgggctgactgggcagcggttgctgggagtgcctatcattgtacaggcttcacaggtgagcaggctgagaaacagacataagattttaaggggagagggaatgtgggacatgacccatcatttcctccttccccaggcagagaaaaaccgactggcagccatggccaacaacctgcaaaagggcaatggtggaccaatgcgcctctatgtgggttccctgcacttcaatatcactgaagacatgctccggggcatctttgagccctttggtaaagtgagtagaagtgagagaaacctctgaagggaattggaagaagtggggagggtgagtgtttgagtgtacttctctgttgtgcctggccgtgattaacctgctgcatacgtcatagtgggcatatgagtctatgctgtgaaagtttggctccatctctgttcatgtgcttggtggacaaataagttagacacaaatcaaataataggccaggttaagaaagattaaaaaatacaaaaattagccaatgtggtggtgcacgcctatagtcccaactagtcgagaggctgaggtgggagggtcacttgagcctgggaggtcaaggctgtagtgagcctcgg

SEQ ID NO: 7945 - protein, 155 aa, Homo sapiens
MASDDFDIVIEAMLEAPYKKEEDEQQRKEVKKDYPSNTTSSTSNSGNETSGSSTIGETSKKKRSRSHNKSRDRKRSRSRDRDRYRRRNSRSRSPGRQCRHRSRSWDRRHGSESRSRDHRREDRVHYRSPPLATGYHFLLIDSLLYNNLDKTTNAL

SEQ ID NO: 7946 - DNA, 578 bp, Homo sapiens
gcagattggggaaggttctggaagacggcagagctgccgccattttgcgggaagaggaggctctgtacctgcagtgctgcttttcttgcctagactctaggaactatccgagctccactccccacaacatactcaaaggaacggagagaaccgggacccccctgcggggacccggaactgatctgacaggatggcatctgatgactttgacatagtgattgaggccatgctggaagctccctataaaaaagaagaggatgagcaacaaaggaaagaagttaaaaaggattatcctagcaataccaccagcagcaccagcaacagtggcaatgagaccagtggaagcagcaccatcggggagacaagcaacaataacgaaaccttctctttaagaatttacactcctgacctggcgcggtgctcacgcggggctcatgcatgtaatcccagcactttgggaggctgaggcaggtggatcacttgaggccaggggttcaagatgaacctggccaacatagcgaaaccttgtctctactaaaaatataaaaaattagctgggcatgatggtacatgcctgt

SEQ ID NO: 7947 - protein, 91 aa, Homo sapiens
MASDDFDIVIEAMLEAPYKKEEDEQQRKEVKKDYPSNTTSSTSNSGNETSGSSTIGETSNNNETFSLRIYTPDLARCSRGAHACNPSTLGG

SEQ ID NO: 7948 - DNA, 684 bp, Homo sapiens
gcagattggggaaggttctggaagacggcagagctgccgccattttgcgggaagaggaggctctgtacctgcagtgctgcttttcttgcctagactctaggaactatccgagctccactccccacaacatactcaaaggaacggagagaaccgggacccccctgcggggacccggaactgatctgacaggatggcatctgatgactttgacatagtgattgaggccatgctggaagctccctataaaaaagaagaggatgagcaacaaaggaaagaagttaaaaaggattatcctagcaataccaccagcagcaccagcaacagtggcaatgagaccagtggaagcagcaccatcggggagacaagcaagtgagtgtgggaggaagaaatgggttggcaacttggggaagggaaacagttttgtccattggaaaaataaccagaatagggagattgtttctgttaagactgctgactgttagtaatggctccacctaggtcatgagaataatggtgacttgatttaattatctagtcttcattttccagtgtagatttgtggattagtcctagcatcaatatacttcatttgaataaaataccaagaggggctgggcgtggtggctcacacctgtaatcccagcactttgggaggccgaggtgggtggatcacctgaggtcagg

SEQ ID NO: 7949 - protein, 60 aa, Homo sapiens
MASDDFDIVIEAMLEAPYKKEEDEQQRKEVKKDYPSNTTSSTSNSGNETSGSSTIGETSK

SEQ ID NO: 7950 - DNA, 2254 bp, Homo sapiens
agcaaccaccgagttcccattgattggctaacctcagagactccagaaaatggaagcgtcctttggtagccgcccatcactctctcattggttaaatgacttgcggagggcggggaaaacgggactgaaaacgggagtgaagaagccaccaaccccactcctggtgctcgcgtagactagaccagtgcgatgggcggagccaacgaggaggcacaatttacatccttggccgtccctactcggatttgctgaaggagtcacgtcggtcgttaaggttaagctttgtagagaacagcggcgtttgtttaacgtccggggatgctgaactcgaaatccccgttctgagccggctacctaaacaaccttcccgaccacctctcctgacctcggtgcttgggaccagggaaaagcagatcttgccacagacttgtcttggcccacactctgccctatcgtcatggcctgctcccacaggtcataacttccgttcaaatcagtacccccacatttcccactgcaagggtaaatttgaaagtttctcaggtgactccttggatgtagcagtactgagtcctctaaccggaaagaaggaactgatgtccaccctcactttccaggggcctccaggagcccctagacacttctgtggtctactgtagctaccaaaaatgtagctggttataacatggggagagccagagtcggaggacctgacttccaattctgacttggatactaatatcacatcattgtacccatttcaaactccccctctgtaaaatggaaaattggactagatgatctcttaggacttcaaactgtaaccctgtggttttattcaaaaaaaacaggtagcttcttgctggagattcctggatggattccagtcttcccaagaggtaacaaaggagaggtaaccagttgcccgtgcagtagctcaagaatacagaagagaaactggcttcactcactattccatctttttccaaggtggcaaactctatgcctcctccccagagaaaagcctaactgtaggttctaatggacaagagctcactgtagctggtcagaaaggcctatatccaggactacaatagtcattgctcagcttcctaagtagggaatacaactaggcccctttgggtcttggataggctaagaggacagatctgaacatgcctgggtctaagtgaggtgtgggaaaatagtggcagggggcagcatggtcgtgcagtaaagggctataactttatttgtatttcctcttacacaaaaccatcaaaacaagaacagaaaaaggctgaaaatccgttcaaaccccatgttctcagggatattccagggagttcttgaggctgagtgcgtagcttcaaatccagcactaattcctcaccccctggcctgaggtcttcatagattggtggcttgagccctgcaattaattataatcccttgcccaccttgatgtaaggcaggaaagcagattgaaatgctcctctctgatgggcaaggggaatcacagcccatagatgtactgcaccttctgtactacaggagcagaacctgaagctgcttccaaggctctggacacttggcacgcagggctagaggccaatggtatatgagcggcctgtggggttatgaatagcagaacagactggtgctgtcacagcccactcataccacaccttcttggaattgctgcatcgccagaaacgcacacagatggtttggccttcacgtaccgttatgggctgctgtaagaagaaagacaggaaggttcagggtgaagctatgaattatacatggcaatgtattaagcagaagaaaatagctgatgcaaatacagaaaaagaagaggactaaagagtaccacttctttccagagagagtggttctttacctcagggtcacggtccttctccctacaggctcggacctcattgtacagcttggaggaagagatgggagccagaaaggaagtgtactccccggggatgctcacaccatcatctgcacagcaggagagtcaaattagttccagagggagggaaatggtatgtctgtactaactgaaggatcagaaggatcaaacctcccatgtcaaaaccaaccaacgttggcatgggcatggaagaaagagacaaatgcatgttgtcacattactaagccagcctgcttccaactactgtcatggaggattccactactaggttaatttacagagtcacacagattaaaactgaaagaaccc

SEQ ID NO: 7951 - protein, 46 aa, Homo sapiens
MVWPSRTVMGCCKKKDRKVQGEAMNYTWQCIKQKKIADANTEKEED

SEQ ID NO: 7952 - DNA, 1946 bp, Homo sapiens
agcgcgaggagaaagatggcggcgatggcggtcgggggtgctggtgggagccgcgtgtccagcgggagggacctgaattgcgtccccgaaatagctgacacactaggggctgtggccaagcaggggtgagggccggacctccacgagcggaatgcggggtccgaactcggggacggagaagggcagactagtcatcccggagaagcaggggtttgatttcctctgcatgcctgtcttccatccgcgtttcaagagggagttcattcaggaacctgctaagaatcggcccggtccccagacacgatcagacctactgctgtcaggaagggactggaatacgctaattgtgggaaagctttctccatggattcgtccagactcaaaagtggagaagattcgcaggaactccgaggcgttggaggtgcagttcatcatcacaggcaccaaccaccactcagagaaggagttctgctcctacctccaatacctggaatacttaagccagaaccgtcctccacctaatgcctatgaactctttgccaagggctatgaagactatctgcagtccccgcttcagccactgatggacaatctggaatctcagacatatgaagtgtttgaaaaggaccccatcaaatactctcagtaccagcaggccatctataaatgtctgctagaccgagtaccagaagaggagaaggataccaatgtccaggtactgatggtgctgggagcaggacggggacccctggtgaacgcttccctgcgggcagccaagcaggccgaccggcggataaagctgtatgctgtggagaaaaacccaaatgccgtggtgacgctagagaactggcagtttgaagaatggggaagccaagtgaccgtagtctcatcagacatgagggaatgggtggctccagagaaagcagacatcattgtcagtgagcttctgggctcatttgctgacaatgaattgtcgcctgagtgcctggatggagcccagcacttcctaaaagatgatggtgtgagcatccccggggagtacacttcctttctggctcccatctcttcctccaagctgtacaatgaggtccgagcctgtagggagaaggaccgtgaccctgaggcccagtttgagatgccttatgtggtacggctgcacaacttccaccagctctctgcaccccagccctgtttcaccttcagccatcccaacagagatcctatgattgacaacaaccgctattgcaccttggaatttcctgtggaggtgaacacagtactacatggctttgccggctactttgagactgtgctttatcaggacatcactctgagtatccgtccagagactcactctcctgggatgttctcatggtttcccatcctcttccctattaagcagcccataacggtacgtgaaggccaaaccatctgtgtgcgtttctggcgatgcagcaattccaagaaggtgtggtatgagtgggctgtgacagcaccagtctgttctgctattcataaccccacaggccgctcatataccattggcctctagccctgcgtgccaagtgtccagagccttggaagcagcttcaggttctgctcctgtagtacagaaggtgcagtacatctatgggctgtgattccccttgcccatcagagaggagcatttcaatctgctttcctgccttacatcaaggtgggcaagggattataattaattgcagggctcaagccaccaatctatgaagacctcaggccagggggtgaggaattagtgctggatttgaagctacgcactcagcctcaagaactccctggaatatccctgagaacatggggtttgaacggattttcagcctttttctgttcttgttttgatggttttgtgtaagaggaaatacaaataaagttatagccctttactgcacgaccatgctgccccctgc

SEQ ID NO: 7953 - protein, 466 aa, Homo sapiens
MRGPNSGTEKGRLVIPEKQGFDFLCMPVFHPRFKREFIQEPAKNRPGPQTRSDLLLSGRDWNTLIVGKLSPWIRPDSKVEKIRRNSEALEVQFIITGTNHHSEKEFCSYLQYLEYLSQNRPPPNAYELFAKGYEDYLQSPLQPLMDNLESQTYEVFEKDPIKYSQYQQAIYKCLLDRVPEEEKDTNVQVLMVLGAGRGPLVNASLRAAKQADRRIKLYAVEKNPNAVVTLENWQFEEWGSQVTVVSSDMREWVAPEKADIIVSELLGSFADNELSPECLDGAQHFLKDDGVSIPGEYTSFLAPISSSKLYNEVRACREKDRDPEAQFEMPYVVRLHNFHQLSAPQPCFTFSHPNRDPMIDNNRYCTLEFPVEVNTVLHGFAGYFETVLYQDITLSIRPETHSPGMFSWFPILFPIKQPITVREGQTICVRFWRCSNSKKVWYEWAVTAPVCSAIHNPTGRSYTIGL

SEQ ID NO: 7954 - DNA, 2484 bp, Homo sapiens
gcgactcgtcccgccttctggggcactagtttgactttgtgattggctactagtatcaaggaatcccggcgtggacagcgcgaggagaaagatggcggcgatggcggtcgggggtgctggtgggagccgcgtgtccagcgggagggacctgaattgcgtccccgaaatagctgacacactaggggctgtggccaagcaggggtgagggccggacctccacgagcggaatgcggggtccgaactcggggacggagaagggcagactagtcatcccggagaagcaggggtttgatttcctctgcatgcctgtcttccatccgcgtttcaagagggagttcattcaggaacctgctaagaatcggcccggtccccagacacgatcagacctactgctgtcaggaagggactggaatacgctaattgtgggaaagctttctccatggattcgtccagactcaaaagtggagaagattcgcaggaactccgaggcggccatgttacaggagctgaattttggtgcatatttgggtcttccagctttcctgctgccccttaatcaggaagataacaccaacctggccagagttttgaccaaccacatccacactggccatcactcttccatgttctggatgcgggtacccttggtggcaccagaggacctgagagatgatataattgagaatgcaccaactacacacacagaggagtacagtggggaggagaaaacgtggatgtggtggcacaacttccggactttgtgtgactatagtaagaggattgcagtggctcttgaaattggggctgacctcccatctaatcatgtcattgatcgctggcttggggagcccatcaaagcagccattctccccactagcattttcctgaccaataagaagggatttcctgttctttctaagatgcaccagaggctcatcttccggctcctcaagttggaggtgcagttcatcatcacaggcaccaaccaccactcagagaaggagttctgctcctacctccaatacctggaatacttaagccagaaccgtcctccacctaatgcctatgaactctttgccaagggctatgaagactatctgcagtccccgcttcagccactgatggacaatctggaatctcagacatatgaagtgtttgaaaaggaccccatcaaatactctcagtaccagcaggccatctataaatgtctgctagaccgagtaccagaagaggagaaggataccaatgtccaggtactgatggtgctgggagcaggacggggacccctggtgaacgcttccctgcgggcagccaagcaggccgaccggcggataaagctgtatgctgtggagaaaaacccaaatgccgtggtgacgctagagaactggcagtttgaagaatggggaagccaagtgaccgtagtctcatcagacatgagggaatgggtggctccagagaaagcagacatcattgtcagtgagcttctgggctcatttgctgacaatgaattgtcgcctgagtgcctggatggagcccagcacttcctaaaagatgatggtgtgagcatccccggggagtacacttcctttctggctcccatctcttcctccaagctgtacaatgaggtccgagcctgtagggagaaggaccgtgaccctgaggcccagtttgagatgccttatgtggtacggctgcacaacttccaccagctctctgcaccccagccctgtttcaccttcagccatcccaacagagatcctatgattgacaacaaccgctattgcaccttggaatttcctgtggaggtgaacacagtactacatggctttgccggctactttgagactgtgctttatcaggacatcactctgagtatccgtccagagactcactctcctgggatgttctcatggtttcccatcctcttccctattaagcagcccataacggtacgtgaaggccaaaccatctgtgtgcgtttctggcgatgcagcaattccaagaaggtgtggtatgagtgggctgtgacagcaccagtctgttctgctattcataaccccacaggccgctcatataccattggcctctagccctgcgtgccaagtgtccagagccttggaagcagcttcaggttctgctcctgtagtacagaaggtgcagtacatctatgggctgtgattccccttgcccatcagagaggagcatttcaatctgctttcctgccttacatcaaggtgggcaagggattataattaattgcagggctcaagccaccaatctatgaagacctcaggccagggggtgaggaattagtgctggatttgaagctacgcactcagcctcaagaactccctggaatatccctgagaacatggggtttgaacggattttcagcctttttctgttcttgttttgatggttttgtgtaagaggaaatacaaataaagttatagccctttactgcacgaccatgctgccccctgc

SEQ ID NO: 7955 - protein, 620 aa, Homo sapiens; identical to SEQ ID NO: 1148

SEQ ID NO: 7956 - DNA, 2457 bp, Homo sapiens
aaaagccactccccatccctcctgttcgggagctgtggcagacgctctggttgttaaggcgactcgtcccgccttctggggcactagtttgactttgtgattggctactagtatcaaggaatcccggcgtggacagcgcgaggagaaagatggcggcgatggcggtcgggggtgctggtgggagccgcgtgtccagcgggagggacctgaattgcgtccccgaaatagctgacacactaggggctgtggccaagcaggggtttgatttcctctgcatgcctgtcttccatccgcgtttcaagagggagttcattcaggaacctgctaagaatcggcccggtccccagacacgatcagacctactgctgtcaggaagggactggaatacgctaattgtgggaaagctttctccatggattcgtccagactcaaaagtggagaagattcgcaggaactccgaggcggccatgttacaggagctgaattttggtgcatatttgggtcttccagctttcctgctgccccttaatcaggaagataacaccaacctggccagagttttgaccaaccacatccacactggccatcactcttccatgttctggatgcgggtacccttggtggcaccagaggacctgagagatgatataattgagaatgcaccaactacacacacagaggagtacagtggggaggagaaaacgtggatgtggtggcacaacttccggactttgtgtgactatagtaagaggattgcagtggctcttgaaattggggctgacctcccatctaatcatgtcattgatcgctggcttggggagcccatcaaagcagccattctccccactagcattttcctgaccaataagaagggatttcctgttctttctaagatgcaccagaggctcatcttccggctcctcaagttggaggtgcagttcatcatcacaggcaccaaccaccactcagagaaggagttctgctcctacctccaatacctggaatacttaagccagaaccgtcctccacctaatgcctatgaactctttgccaagggctatgaagactatctgcagtccccgcttcagccactgatggacaatctggaatctcagacatatgaagtgtttgaaaaggaccccatcaaatactctcagtaccagcaggccatctataaatgtctgctagaccgagtaccagaagaggagaaggataccaatgtccaggtactgatggtgctgggagcaggacggggacccctggtgaacgcttccctgcgggcagccaagcaggccgaccggcggataaagctgtatgctgtggagaaaaacccaaatgccgtggtgacgctagagaactggcagtttgaagaatggggaagccaagtgaccgtagtctcatcagacatgagggaatgggtggctccagagaaagcagacatcattgtcagtgagcttctgggctcatttgctgacaatgaattgtcgcctgagtgcctggatggagcccagcacttcctaaaagatgatggtgtgagcatccccggggagtacacttcctttctggctcccatctcttcctccaagctgtacaatgaggtccgagcctgtagggagaaggaccgtgaccctgaggcccagtttgagatgccttatgtggtacggctgcacaacttccaccagctctctgcaccccagccctgtttcaccttcagccatcccaacagagatcctatgattgacaacaaccgctattgcaccttggaatttcctgtggaggtgaacacagtactacatggctttgccggctactttgagactgtgctttatcaggacatcactctgagtatccgtccagagactcactctcctgggatgttctcatggtttcccatcctcttccctattaagcagcccataacggtacgtgaaggccaaaccatctgtgtgcgtttctggcgatgcagcaattccaagaaggtgtggtatgagtgggctgtgacagcaccagtctgttctgctattcataaccccacaggccgctcatataccattggcctctagccctgcgtgccaagtgtccagagccttggaagcagcttcaggttctgctcctgtagtacagaaggtgcagtacatctatgggctgtgattccccttgcccatcagagaggagcatttcaatctgctttcctgccttacatcaaggtgggcaagggattataattaattgcagggctcaagccaccaatctatgaagacctcaggccagggggtgaggaattagtgctggatttgaagctacgcactcagcctcaagaactccctggaatatccctgagaacatggggtttgaacggattttcagcctttttctgttcttgttttgatggttttgtgtaagaggaaatacaaataaagttatagccctttactgcacgaccatgctgccccctgc

SEQ ID NO: 7957 - protein, 637 aa, Homo sapiens; identical to SEQ ID NO: 1150

SEQ ID NO: 7958 - DNA, 1082 bp, Homo sapiens
tttcagttttaatctgtgtgactctgtaaattaacctagtagtggaatcctccatgacagtagttggaagcaggctggcttagtaatgtgacaacatgcatttgtctctttcttccatgcccatgccaacgttggttggttttgacatgggaggtttgatccttctgatccttcagttagtacagacataccatttccctccctctggaactaatttgactctcctgctgtgcagatgatggtgtgagcatccccggggagtacacttcctttctggctcccatctcttcctccaagctgtacaatgaggtccgagcctgtagggagaaggaccgtgaccctgaggtaaagaaccactctctctggaaagaagtggtactctttagtcctcttctttttctgtatttgcatcagctattttcttctgctggggatgaagaggtgaaggagaagttagggattggggaagcactaaagtaaaactttttttaatccttggggaagtagttctctcttgtgtgtcttccccaacactctctctctctttctgtctctgacaggcccagtttgagatgccttatgtggtacggctgcacaacttccaccagctctctgcaccccagccctgtttcaccttcagccatcccaacagagatcctatgattgacaacaaccgctattgcaccttggaatttcctgtggaggtgaacacagtactacatggctttgccggctactttgagactgtgctttatcaggacatcactctgagtgagtgtctatggcagtagatggcagagtatgagggtgtgcttcctgggcagcttatatgtacatgtgtcatttagatttatggggggcccagtgctcaatgaatggagatctttgtgtgattagagaagagaccctcttcagcataggcaaaagtcacagccatggagacctctgttttttcattattttgtccacacaggtatccgtccagagactcactctcctgggatgttctcatggtttcccatcctcttccctattaaggtaggaactgcttttaagactctctagttaagcagtaacctttg

SEQ ID NO: 7959 - protein, 72 aa, Homo sapiens
MPYVVRLHNFHQLSAPQPCFTFSHPNRDPMIDNNRYCTLEFPVEVNTVLHGFAGYFETVLYQDITLSECLWQ

SEQ ID NO: 7960 - DNA, 1138 bp, Homo sapiens
acagcgcgaggagaaagatggcggcgatggcggtcgggggtgctggtgggagccgcgtgtccagcgggagggacctgaattgcgtccccgaaatagctgacacactaggggctgtggccaagcaggggtgagggccggacctccacgagcggaatgcggggtccgaactcggggacggagaagggcagactagtcatcccggagaagcaggggtttgatttcctctgcatgcctgtcttccatccgcgtttcaagagggagttcattcaggaacctgctaagaatcggcccggtccccagacacgatcagacctactgctgtcaggaagggactggaatacgctaattgtgggaaagctttctccatggattcgtccagactcaaaagtggagaagattcgcaggaactccgaggcggccatgttacaggagctgaattttggtgcatatttgggtcttccagctttcctgctgccccttaatcaggaagataacaccaacctggccagagttttgaccaaccacatccacactggccatcactcttccatgttctggatgcgggtacccttggtggcaccagaggacctgagagatgatataattgagaatgcaccaactacacacacagaggagtacagtggggaggagaaaacgtggatgtggtatgtctccctttgctgctgtaccagggtgcaagggatagggtgaggggaagtacagggtgcaacctgtagggaggtctccttgagctgtggtgattggtcggccatatctagtttactgtacttttctgtatttgactgaacaggtggcacaacttccggactttgtgtgactatagtaagaggattgcagtgggtgagtccatgagaatcctgggatgggtgtggcttctcttacctcctgtgaataagaatcaggaatttcatatatagtatacaattttgctacttcccctctgtctcagactggctttctcttaaagaagtaaacagattttgcgcaaaggagcaaggaagggtttcttgcctggcagtggttgacagtttttcttttgcctcatgtagctcttgaaattggggctgacctcccatctaatcatgtcattgatcgctggcttggggagcccatcaaa

SEQ ID NO: 7961 - protein, 185 aa, Homo sapiens
MRGPNSGTEKGRLVIPEKQGFDFLCMPVFHPRFKREFIQEPAKNRPGPQTRSDLLLSGRDWNTLIVGKLSPWIRPDSKVEKIRRNSEAAMLQELNFGAYLGLPAFLLPLNQEDNTNLARVLTNHIHTGHHSSMFWMRVPLVAPEDLRDDIIENAPTTHTEEYSGEEKTWMWYVSLCCCTRVQGIG

SEQ ID NO: 7962 - DNA, 1185 bp, Homo sapiens
aaaagccactccccatccctcctgttcgggagctgtggcagacgctctggttgttaaggcgactcgtcccgccttctggggcactagtttgactttgtgattggctactagtatcaaggaatcccggcgtggacagcgcgaggagaaagatggcggcgatggcggtcgggggtgctggtgggagccgcgtgtccagcgggagggacctgaattgcgtccccgaaatagctgacacactaggggctgtggccaagcaggggtttgatttcctctgcatgcctgtcttccatccgcgtttcaagagggagttcattcaggaacctgctaagaatcggcccggtccccagacacgatcagacctactgctgtcaggaagggactggaatacgctaattgtgggaaagctttctccatggattcgtccagactcaaaagtggagaagattcgcaggaactccgaggcggccatgttacaggagctgaattttggtgcatatttgggtcttccagctttcctgctgccccttaatcaggaagataacaccaacctggccagagttttgaccaaccacatccacactggccatcactcttccatgttctggatgcgggtacccttggtggcaccagaggacctgagagatgatataattgagaatgcaccaactacacacacagaggagtacagtggggaggagaaaacgtggatgtggtatgtctccctttgctgctgtaccagggtgcaagggatagggtgaggggaagtacagggtgcaacctgtagggaggtctccttgagctgtggtgattggtcggccatatctagtttactgtacttttctgtatttgactgaacaggtggcacaacttccggactttgtgtgactatagtaagaggattgcagtgggtgagtccatgagaatcctgggatgggtgtggcttctcttacctcctgtgaataagaatcaggaatttcatatatagtatacaattttgctacttcccctctgtctcagactggctttctcttaaagaagtaaacagattttgcgcaaaggagcaaggaagggtttcttgcctggcagtggttgacagtttttcttttgcctcatgtagctcttgaaattggggctgacctcccatctaatcatgtcattgatcgctggcttggggagcccatcaaa

SEQ ID NO: 7963 - protein, 202 aa, Homo sapiens [sequence omitted]

SEQ ID NO: 7964 - DNA, 628 bp, Homo sapiens
aggaatcccggcgtggacagcgcgaggagaaagatggcggcgatggcggtcgggggtgctggtgggagccgcgtgtccagcgggagggacctgaattgcgtccccgaaatagctgacacactaggggctgtggccaagcaggggtttgatttcctctgcatgcctgtcttccatccgcgtttcaagagggagttcattcaggaacctgctaagaatcggcccggtccccagacacgatcagacctactgctgtcaggaaggggtagggaccatcccatatgccccttaattattagaggcaataacaacttctgctttatcggggccctcattctcctccttttctgacttggatatatttgttagtccctgggatatagataacttgttttctccttgcttctctattctgcatcaggctatcccatgtctatgtagaaaaaacctttgtctctcatttctactcttgattcccaaaactaaaaattgaacaagtaaagtgctgaaccttattcagtatttgtctttcttgggtgggggagtgcagactggaatacgctaattgtgggaaagctttctccatggattcgtccagactcaaaagtggagaagattcgcaggaactccg

SEQ ID NO: 7965 - protein, 104 aa, Homo sapiens
MAAMAVGGAGGSRVSSGRDLNCVPEIADTLGAVAKQGFDFLCMPVFHPRFKREFIQEPAKNRPGPQTRSDLLLSGRGRDHPICPLIIRGNNNFCFIGALILLLF

SEQ ID NO: 7966 - DNA, 577 bp, Homo sapiens
agcgcgaggagaaagatggcggcgatggcggtcgggggtgctggtgggagccgcgtgtccagcgggagggacctgaattgcgtccccgaaatagctgacacactaggggctgtggccaagcaggggtgagggccggacctccacgagcggaatgcggggtccgaactcggggacggagaagggcagactagtcatcccggagaagcaggggtttgatttcctctgcatgcctgtcttccatccgcgtttcaagagggagttcattcaggaacctgctaagaatcggcccggtccccagacacgatcagacctactgctgtcaggaaggggtagggaccatcccatatgccccttaattattagaggcaataacaacttctgctttatcggggccctcattctcctccttttctgacttggatatatttgttagtccctgggatatagataacttgttttctccttgcttctctattctgcatcaggctatcccatgtctatgtagaaaaaacctttgtctctcatttctactcttgattcccaaaactaaaaattgaacaagtaaagtgctgaacct

SEQ ID NO: 7967 - protein, 87 aa, Homo sapiens
MRGPNSGTEKGRLVIPEKQGFDFLCMPVFHPRFKREFIQEPAKNRPGPQTRSDLLLSGRGRDHPICPLIIRGNNNFCFIGALILLLF

SEQ ID NO: 7968 - DNA, 556 bp, Homo sapiens
atctgaagaacgccgttgagagactacaccgcccatgaaaccctgcagtataaccttgaagtaccatcacggagagaaacagtgccatctcagggccagtggcgcaatggataacgcgtctgactacggatcagaagattccaggagccaatgaccaataggccagagcactggagactttctggaagaaagaggtactgaagcatccaatatggaaatagtcaagatatagaaaatgcaagctcttgaaggattcaagatatagaaaggatctgagatatggaaagaactcaggatatagaaggatctgaaattttggagactaagatatgagaatatttaagacacaggtaggaaggacaccttcaaggaatttgctggctacccttatttttataatatgcttgctaacatcagcatgggagcatcttgagtttttagcctactacacaagcagatattgaaccaacattaacaggaattagtgtagtctgttttccaataagagagtgttcaaggatcttcatgtattccagtttcctcagaaacacatgct

SEQ ID NO: 7969 - protein, 39 aa, Homo sapiens
MKPCSITLKYHHGEKQCHLRASGAMDNASDYGSEDSRSQ

SEQ ID NO: 7970 - DNA, 1400 bp, Homo sapiens
gaaaccctgcagtataaccttgaagtaccatcacggagagaaacagtgccatctcagggccagtggcgcaatggataacgcgtctgactacggatcagaagattccaggagccaatgaccaataggccagagcactggagactttctggaagaaagaggtgagcagaaatccccggatgccatttgattttcttgggattctaatctgtggaaccaagaagtgaaagaaaacaaaaagatgaataaacagctggctgctccaaggacactaccttatgttcaaatttctgctgtccacaagctggaaaggaacctcaaggatgacttttacagagggcctataccacacatcctgggtcccaagctcttacacaagctttatggacaaacagatttacaagtgccaaaacatgtcacattctaagcacacatgtgtttccacttgctccaagctgtccaaaaggagcatcctaaaaagagaactttccaattcactgagtctaaacaagaggattctccaccaccaccaccattatgccaaagttaaaactgagctgcagcttcccagttatgagtgaactgggggaaaagggaaaaaaatcaaagtctactttttccccccaaataactcagctatcaaattccataatagtttttttgtgcttctttttttgtctaagatctgttggtagttttttttttttttatcattaactctagaatcatccttcaggaatgacaaatcattccacacttgaacaactggttttcacataacagcctaagaaaagagcacctggaggaaacagcgtgacaagaagactgacagtgaggtcagtggcaaaagagtaatgcaaaggtgtaatgtggctacaacgagaacgtgagctgtgggtgttttgccagaacatggagtgcgctgaaaggaatgacaccaacacaggggcagtaaagatgggcacagtttgacctcaggagacaaaaattttcccttgacattacttttcatgtttttgctctgcccctcctctctgcaaggtatcaaactccaaagggcaactgagcctcccaaagctgaacaggcattgaaggttattatgatttaacgcttcatgtttatagaacatttggtttactcgatcgttttatgagtaacatcaaagtaactactcatttgttttctaacatggtctagagggggacgcagctgaggaggcagaatgctgggacttaatttgcagctcggccggccgttgcttctgagaacttaaggaaaatgcttttttctgtgccaaacttttcccacctgcaaaactgagataacgattcctgccttggatgagacattaagaattaataacacaatcgacttgtcaacaaaagccactacttagttaagt

SEQ ID NO: 7971 - protein, 100 aa, Homo sapiens
MFKFLLSTSWKGTSRMTFTEGLYHTSWVPSSYTSFMDKQIYKCQNMSHSKHTCVSTCSKLSKRSILKRELSNSLSLNKRILHHHHHYAKVKTELQLPSYE

SEQ ID NO: 7972 - DNA, 570 bp, Homo sapiens
cagtggccagctcagttataggaaaggacacaagccacttgtgttcctggttcccttggtgtggtttgagagctacatttttctctaaaagcagagaagttgcggtgagccgagatcgcgccattgcactccagcctgcgcaacaagagcgaaactccatcttaaaaaacaaacaaacaaacaaaaacaactagagcacatgctttgtaaaaatactcagaacagaattatatacagtaaaaagtaaaagattgaaccatgcaccctcagacaccccccacacaaataccctgttactccaatctacctccccagagtaaccagagtgatttggtgtgtagatcactgtgtgtcagatctgtttctataaatatgcaaccatatgtacataaatattagctaatattagctgggcatggtggtgctctgatagccctagctactcaggaggctgagcctagtagttagaggctgcagtgaactatgattgtgccaaggtactccagcccaggtgacagagcaagacctttgtctctaaaaatcaaatcaataaagaaaaagttttaaaaa

SEQ ID NO: 7973 - protein, 46 aa, Homo sapiens
MHPQTPPTQIPCYSNLPPQSNQSDLVCRSLCVRSVSINMQPYVHKY

SEQ ID NO: 7974 - DNA, 1243 bp, Homo sapiens
tggcctcccaaagtgctaggattgcaggcgtaagccaccatgctcagcccagaatggggccatttttaatagattattagaagaaaacctgtcataaggcaggatttgtgggtctagatacaggataggggcactggaaggttgctttacagggattgtagcgattagggttttcctgtcagtcctctgcccctttgctcagatgctgacagtgaaaccgtgaaggcagcaaaggtgtggaaactcgcagaggtcctggtgggtgagcagcagcagtgccaggatgccaagagccagcagaaggagcagatgttgctgctggagaagaagagtgctgcttactcccaggtttatcagggcatgggacagcccctttcctttatcctgaccccaggagcacttttggggaagacaaagattcctgatctaccctcctttctactatctttatttatgccctcttcttcctccatcttgggctcaggtgcttctccgctgcctcactttgctgcagaggcttcttcaagaacaccggctgaagactcaatccgagctagaccgcatcaatgcccagtacctggaagtcaagtgcggtgctatgatccttaagctgaggatggaggagctaaagattttgtccgacacttacactgttgagaaagtggaagttcatcgtctgattagggaccgtttggagggagccattcacctacaggagcaggacatggagaactcaagacaggtcctgaactcctatgaggtccttggggaggagtttgacaggctggtgaaagagtacaccgtactcaagcaggcaacagagaacaagcggtgggccctccaggagttcagcaaggtctaccgttgagctctggcagggccaggagacatggcttctgcatagctgctgcctcctaatcttcctgctagtgggaccaccttcacctggggctgccttcagtacaagggagtgtggaaatgcttacgcttgaaacactgcagtcatttaggcactctcctggtttctctttattttttatgactgggcctcttctggaaaatctagcaaggagatttatataatttttatgcatagctgtgtgtcagtgtcagccctgtattgtatttgattatctcctgaataaagttatgatattatatcttaggattttagtcattttccttgggcaaagattgaaaaagaacattgaaggctatatgggtaaggagcggggaactgagt

SEQ ID NO: 7975 - protein, 89 aa, Homo sapiens [sequence omitted]

SEQ ID NO: 7976 - DNA, 1525 bp, Homo sapiens
gggcctttcagcttggtctttccgggcctcgcttcccccagcccctgcgcccggcccgaacgagaggttccggagccccggcgcgggcgggttctggggtgtagacgctgctggccagcccgccccagccgaggttctcggcaccgccttgagagcttcagctgccccagggtgtgcagattagaatcccaagaaaatcaaatggcatccggggatttctgctcacctggagaagggatggaaatacttcaacaaggcatggaaggaagttcgactgcataagacaacatggttgaggtctgagattttacacagagtcattcaagagttgcttgtggactactatgtgaagatacaagacacaaatgtaacttctgaggacaaaaagtttcatgagacccttgaacagcggctgcttgtaactgaactgatgcggctcttaggtcctagccaggagagggagatacctccactgctggggctggagaaagcggaccttctggaactcatgccactctcagaggattttgtgtggatgagggctcggctacagcaagaagtagaggagcagctcaaaaagaaatgtttcactctgctctgctactatgatcccaattcagatgctgacagtgaaaccgtgaaggcagcaaaggtgtggaaactcgcagaggtcctggtgggtgagcagcagcagtgccaggatgccaagagccagcagaaggagcagatgttgctgctggagaagaagagtgctgcttactcccaggtgcttctccgctgcctcactttgctgcagaggcttcttcaagaacaccggctgaagactcaatccgagctagaccgcatcaatgcccagtacctggaagtcaagtgcggtgctatgatccttaagctgaggatggaggagctaaagattttgtccgacacttacactgttgagaaagtggaagttcatcgtctgattagggaccgtttggagggagccattcacctacaggagcaggacatggagaactcaagacaggtcctgaactcctatgaggtccttggggaggagtttgacaggctggtgaaagagtacaccgtactcaagcaggcaacagagaacaagcggtgggccctccaggagttcagcaaggtctaccgttgagctctggcagggccaggagacatggcttctgcatagctgctgcctcctaatcttcctgctagtgggaccaccttcacctggggctgccttcagtacaagggagtgtggaaatgcttacgcttgaaacactgcagtcatttaggcactctcctggtttctctttattttttatgactgggcctcttctggaaaatctagcaaggagatttatataatttttatgcatagctgtgtgtcagtgtcagccctgtattgtatttgattatctcctgaataaagttatgatattatatcttaggattttagtcattttccttgggcaaagattgaaaaagaacattgaaggctatatgggtaaggagcggggaactgagt

SEQ ID NO: 7977 - protein, 239 aa, Homo sapiens
MRLLGPSQEREIPPLLGLEKADLLELMPLSEDFVWMRARLQQEVEEQLKKKCFTLLCYYDPNSDADSETVKAAKVWKLAEVLVGEQQQCQDAKSQQKEQMLLLEKKSAAYSQVLLRCLTLLQRLLQEHRLKTQSELDRINAQYLEVKCGAMILKLRMEELKILSDTYTVEKVEVHRLIRDRLEGAIHLQEQDMENSRQVLNSYEVLGEEFDRLVKEYTVLKQATENKRWALQEFSKVYR

SEQ ID NO: 7978 - DNA, 1538 bp, Homo sapiens
agtgcactttcggctccttccccttcccgggcctttcagcttggtctttccgggcctcgcttcccccagcccctgcgcccggcccgaacgagaggttccggagccccggcgcgggcgggttctggggtgtagacgctgctggccagcccgccccagccgaggttctcggcaccgccttgagagcttcagctgccccagggtgtgcaggtttgctttagagggtcggcgggcggagcttcggggaagaggagctctgggagagtcattccggccagtggccggagaccgtcgtcgctcttgggaatccttggccgcccagacagaagggaaattagaatcccaagaaaatcaaatggcatccggggatttctgctcacctggagaagggatggaaatacttcaacaagtgtgcagcaaacaacttcctccttgtaacctgagtaaagaggacctgttacagaacccatacttcagcaagcttctcctgaatctctcacagcatgtggatgagagtggcttaagcctcaccctagcaaaggagcaggctcaggcatggaaggaagttcgactgcataagacaacatggttgaggtctgagattttacacagagtcattcaagagttgcttgtggactactatgtgaagatacaagacacaaatgtaacttctgaggacaaaaaggattttgtgtggatgagggctcggctacagcaagaagtagaggagcagctcaaaaagaaatgtttcactctgctctgctactatgatcccaattcaggtgcttctccgctgcctcactttgctgcagaggcttcttcaagaacaccggctgaagactcaatccgagctagaccgcatcaatgcccagtacctggaagtcaagtgcggtgctatgatccttaagctgaggatggaggagctaaagattttgtccgacacttacactgttgagaaagtggaagttcatcgtctgattagggaccgtttggagggagccattcacctacaggagcaggacatggagaactcaagacaggtcctgaactcctatgaggtccttggggaggagtttgacaggctggtgaaagagtacaccgtactcaagcaggcaacagagaacaagcggtgggccctccaggagttcagcaaggtctaccgttgagctctggcagggccaggagacatggcttctgcatagctgctgcctcctaatcttcctgctagtgggaccaccttcacctggggctgccttcagtacaagggagtgtggaaatgcttacgcttgaaacactgcagtcatttaggcactctcctggtttctctttattttttatgactgggcctcttctggaaaatctagcaaggagatttatataatttttatgcatagctgtgtgtcagtgtcagccctgtattgtatttgattatctcctgaataaagttatgatattatatcttaggattttagtcattttccttgggcaaagattgaaaaagaacattgaaggctatatgggtaaggagcggggaactgagt

SEQ ID NO: 7979 - protein, 183 aa, Homo sapiens
MASGDFCSPGEGMEILQQVCSKQLPPCNLSKEDLLQNPYFSKLLLNLSQHVDESGLSLTLAKEQAQAWKEVRLHKTTWLRSEILHRVIQELLVDYYVKIQDTNVTSEDKKDFVWMRARLQQEVEEQLKKKCFTLLCYYDPNSGASPLPHFAAEASSRTPAEDSIRARPHQCPVPGSQVRCYDP

SEQ ID NO: 7980 - DNA, 1579 bp, Homo sapiens
tccttcgtcgcggcctctagtgcactttcggctccttccccttcccgggcctttcagcttggtctttccgggcctcgcttcccccagcccctgcgcccggcccgaacgagaggttccggagccccggcgcgggcgggttctggggtgtagacgctgctggccagcccgccccagccgaggttctcggcaccgccttgagagcttcagctgccccagggtgtgcagattagaatcccaagaaaatcaaatggcatccggggatttctgctcacctggagaagggatggaaatacttcaacaagtgtgcagcaaacaacttcctccttgtaacctgagtaaagaggacctgttacagaacccatacttcagcaagcttctcctgaatctctcacagcatgtggatgagagtggcttaagcctcaccctagcaaaggagcaggctcaggcatggaaggaagttcgactgcataagacaacatggttgaggtctgagattttacacagagtcattcaagagttgcttgtggactactatgtgaagatacaagacacaaatgtaacttctgaggacaaaaaggattttgtgtggatgagggctcggctacagcaagaagtagaggagcagctcaaaaagaaatgtttcactctgctctgctactatgatcccaattcagatgctgacagtgaaaccgtgaaggcagcaaaggtgtggaaactcgcagaggtcctggtgggtgagcagcagcagtgccaggatgccaagagccagcagaaggagcagatgttgctgctggagaagaagagtgctgcttactcccaggtgcttctccgctgcctcactttgctgcagaggcttcttcaagaacaccggctgaagactcaatccgagctagaccgcatcaatgcccagtacctggaagtcaagtgcggtgctatgatccttaagctgaggatggaggagctaaagattttgtccgacacttacactgttgagaaagtggaagttcatcgtctgattagggaccgtttggagggagccattcacctacaggagcaggacatggagaactcaagacaggtcctgaactcctatgaggtccttggggaggagtttgacaggctggtgaaagagtacaccgtactcaagcaggcaacagagaacaagcggtgggccctccaggagttcagcaaggtctaccgttgagctctggcagggccaggagacatggcttctgcatagctgctgcctcctaatcttcctgctagtgggaccaccttcacctggggctgccttcagtacaagggagtgtggaaatgcttacgcttgaaacactgcagtcatttaggcactctcctggtttctctttattttttatgactgggcctcttctggaaaatctagcaaggagatttatataatttttatgcatagctgtgtgtcagtgtcagccctgtattgtatttgattatctcctgaataaagttatgatattatatcttaggattttagtcattttccttgggcaaagattgaaaaagaacattgaaggctatatgggtaaggagcggggaactgagt

SEQ ID NO: 7981 - protein, 318 aa, Homo sapiens
MASGDFCSPGEGMEILQQVCSKQLPPCNLSKEDLLQNPYFSKLLLNLSQHVDESGLSLTLAKEQAQAWKEVRLHKTTWLRSEILHRVIQELLVDYYVKIQDTNVTSEDKKDFVWMRARLQQEVEEQLKKKCFTLLCYYDPNSDADSETVKAAKVWKLAEVLVGEQQQCQDAKSQQKEQMLLLEKKSAAYSQVLLRCLTLLQRLLQEHRLKTQSELDRINAQYLEVKCGAMILKLRMEELKILSDTYTVEKVEVHRLIRDRLEGAIHLQEQDMENSRQVLNSYEVLGEEFDRLVKEYTVLKQATENKRWALQEFSKVYR

SEQ ID NO: 7982 - DNA, 1888 bp, Homo sapiens
cacctccttcgtcgcggcctctagtgcactttcggctccttccccttcccgggcctttcagcttggtctttccgggcctcgcttcccccagcccctgcgcccggcccgaacgagaggttccggagccccggcgcgggcgggttctggggtgtagacgctgctggccagcccgccccagccgaggttctcggcaccgccttgagagcttcagctgccccagggtgtgcaggtttgctttagagggtcggcgggcggagcttcggggaagaggagctctgggagagtcattccggccagtggccggagaccgtcgtcgctcttgggaatccttggccgcccagacagaagggaagtaggcgccggagagcccgttctgcattttgattcatctcgggccctattagaatcccaagaaaatcaaatggcatccggggatttctgctcacctggagaagggatggaaatacttcaacaagtgtgcagcaaacaacttcctccttgtaacctgagtaaagaggacctgttacagaacccatacttcagcaagcttctcctgaatctctcacagcatgtggatgagagtggcttaagcctcaccctagcaaaggagcaggctcaggcatggaaggaagttcgactgcataagacaacatggttgaggtctgagattttacacagagtcattcaagagttgcttgtggactactatgtgaagatacaagacacaaatgtaacttctgaggacaaaaagtttcatgagacccttgaacagcggctgcttgtaactgaactgatgcggctcttaggtcctagccaggagagggagatacctccactgctggggctggagaaagcggaccttctggaactcatgccactctcagaggattttgtgtggatgagggctcggctacagcaagaagtagaggagcagctcaaaaagaaatgtttcactctgctctgctactatgatcccaattcagatgctgacagtgaaaccgtgaaggcagcaaaggtgtggaaactcgcagaggtcctggtgggtgagcagcagcagtgccaggatgccaagagccagcagaaggagcagatgttgctgctggagaagaagagtgctgcttactcccaggtgcttctccgctgcctcactttgctgcagaggcttcttcaagaacaccggctgaagactcaatccgagctagaccgcatcaatgcccagtacctggaagtcaagtgcggtgctatgatccttaagctgaggatggaggagctaaagattttgtccgacacttacactgttgagaaagtggaagttcatcgtctgattagggaccgtttggagggagccattcacctacaggagcaggacatggagaactcaagacaggtcctgaactcctatgaggtccttggggaggagtttgacaggctggtgaaagagtacaccgtactcaagcaggcaacagagaacaagcggtgggccctccaggagttcagcaaggtctaccgttgagctctggcagggccaggagacatggcttctgcatagctgctgcctcctaatcttcctgctagtgggaccaccttcacctggggctgccttcagtacaagggagtgtggaaatgcttacgcttgaaacactgcagtcatttaggcactctcctggtttctctttattttttatgactgggcctcttctggaaaatctagcaaggagatttatataatttttatgcatagctgtgtgtcagtgtcagccctgtattgtatttgattatctcctgaataaagttatgatattatatcttaggattttagtcattttccttgggcaaagattgaaaaagaacattgaaggctatatgggtaaggagcggggaactgagt

SEQ ID NO: 7983 - protein, 363 aa, Homo sapiens
MASGDFCSPGEGMEILQQVCSKQLPPCNLSKEDLLQNPYFSKLLLNLSQHVDESGLSLTLAKEQAQAWKEVRLHKTTWLRSEILHRVIQELLVDYYVKIQDTNVTSEDKKFHETLEQRLLVTELMRLLGPSQEREIPPLLGLEKADLLELMPLSEDFVWMRARLQQEVEEQLKKKCFTLLCYYDPNSDADSETVKAAKVWKLAEVLVGEQQQCQDAKSQQKEQMLLLEKKSAAYSQVLLRCLTLLQRLLQEHRLKTQSELDRINAQYLEVKCGAMILKLRMEELKILSDTYTVEKVEVHRLIRDRLEGAIHLQEQDMENSRQVLNSYEVLGEEFDRLVKEYTVLKQATENKRWALQEFSKVYR

SEQ ID NO: 7984 - DNA, 1753 bp, Homo sapiens
cacctccttcgtcgcggcctctagtgcactttcggctccttccccttcccgggcctttcagcttggtctttccgggcctcgcttcccccagcccctgcgcccggcccgaacgagaggttccggagccccggcgcgggcgggttctggggtgtagacgctgctggccagcccgccccagccgaggttctcggcaccgccttgagagcttcagctgccccagggtgtgcaggtttgctttagagggtcggcgggcggagcttcggggaagaggagctctgggagagtcattccggccagtggccggagaccgtcgtcgctcttgggaatccttggccgcccagacagaagggaagtaggcgccggagagcccgttctgcattttgattcatctcgggccctattagaatcccaagaaaatcaaatggcatccggggatttctgctcacctggagaagggatggaaatacttcaacaagtgtgcagcaaacaacttcctccttgtaacctgagtaaagaggacctgttacagaacccatacttcagcaagcttctcctgaatctctcacagcatgtggatgagagtggcttaagcctcaccctagcaaaggagcaggctcaggcatggaaggaagttcgactgcataagacaacatggttgaggtctgagattttacacagagtcattcaagagttgcttgtggactactatgtgaagatacaagacacaaatgtaacttctgaggacaaaaaggattttgtgtggatgagggctcggctacagcaagaagtagaggagcagctcaaaaagaaatgtttcactctgctctgctactatgatcccaattcagatgctgacagtgaaaccgtgaaggcagcaaaggtgtggaaactcgcagaggtcctggtgggtgagcagcagcagtgccaggatgccaagagccagcagaaggagcagatgttgctgctggagaagaagagtgctgcttactcccaggtgcttctccgctgcctcactttgctgcagaggcttcttcaagaacaccggctgaagactcaatccgagctagaccgcatcaatgcccagtacctggaagtcaagtgcggtgctatgatccttaagctgaggatggaggagctaaagattttgtccgacacttacactgttgagaaagtggaagttcatcgtctgattagggaccgtttggagggagccattcacctacaggagcaggacatggagaactcaagacaggtcctgaactcctatgaggtccttggggaggagtttgacaggctggtgaaagagtacaccgtactcaagcaggcaacagagaacaagcggtgggccctccaggagttcagcaaggtctaccgttgagctctggcagggccaggagacatggcttctgcatagctgctgcctcctaatcttcctgctagtgggaccaccttcacctggggctgccttcagtacaagggagtgtggaaatgcttacgcttgaaacactgcagtcatttaggcactctcctggtttctctttattttttatgactgggcctcttctggaaaatctagcaaggagatttatataatttttatgcatagctgtgtgtcagtgtcagccctgtattgtatttgattatctcctgaataaagttatgatattatatcttaggattttagtcattttccttgggcaaagattgaaaaagaacattgaaggctatatgggtaaggagcggggaactgagt

SEQ ID NO: 7985 - protein, 318 aa, Homo sapiens; identical to SEQ ID NO: 7981

SEQ ID NO: 7986 - DNA, 1719 bp, Homo sapiens
ccacctccttcgtcgcggcctctagtgcactttcggctccttccccttcccgggcctttcagcttggtctttccgggcctcgcttcccccagcccctgcgcccggcccgaacgagaggttccggagccccggcgcgggcgggttctggggtgtagacgctgctggccagcccgccccagccgaggttctcggcaccgccttgagagcttcagctgccccagggtgtgcagattagaatcccaagaaaatcaaatggcatccggggatttctgctcacctggagaagggatggaaatacttcaacaagtgtgcagcaaacaacttcctccttgtaacctgagtaaagaggacctgttacagaacccatacttcagcaagcttctcctgaatctctcacagcatgtggatgagagtggcttaagcctcaccctagcaaaggagcaggctcaggcatggaaggaagttcgactgcataagacaacatggttgaggtctgagattttacacagagtcattcaagagttgcttgtggactactatgtgaagatacaagacacaaatgtaacttctgaggacaaaaagtttcatgagacccttgaacagcggctgcttgtaactgaactgatgcggctcttaggtcctagccaggagagggagatacctccactgctggggctggagaaagcggaccttctggaactcatgccactctcagaggattttgtgtggatgagggctcggctacagcaagaagtagaggagcagctcaaaaagaaatgtttcactctgctctgctactatgatcccaattcagatgctgacagtgaaaccgtgaaggcagcaaaggtgtggaaactcgcagaggtcctggtgggtgagcagcagcagtgccaggatgccaagagccagcagaaggagcagatgttgctgctggagaagaagagtgctgcttactcccaggtgcttctccgctgcctcactttgctgcagaggcttcttcaagaacaccggctgaagactcaatccgagctagaccgcatcaatgcccagtacctggaagtcaagtgcggtgctatgatccttaagctgaggatggaggagctaaagattttgtccgacacttacactgttgagaaagtggaagttcatcgtctgattagggaccgtttggagggagccattcacctacaggagcaggacatggagaactcaagacaggtcctgaactcctatgaggtccttggggaggagtttgacaggctggtgaaagagtacaccgtactcaagcaggcaacagagaacaagcggtgggccctccaggagttcagcaaggtctaccgttgagctctggcagggccaggagacatggcttctgcatagctgctgcctcctaatcttcctgctagtgggaccaccttcacctggggctgccttcagtacaagggagtgtggaaatgcttacgcttgaaacactgcagtcatttaggcactctcctggtttctctttattttttatgactgggcctcttctggaaaatctagcaaggagatttatataatttttatgcatagctgtgtgtcagtgtcagccctgtattgtatttgattatctcctgaataaagttatgatattatatcttaggattttagtcattttccttgggcaaagattgaaaaagaacattgaaggctatatgggtaaggagcggggaactgagt

SEQ ID NO: 7987 - protein, 363 aa, Homo sapiens; identical to SEQ ID NO: 7983

SEQ ID NO: 7988 - DNA, 1514 bp, Homo sapiens
cctccacctccttcgtcgcggcctctagtgcactttcggctccttccccttcccgggcctttcagcttggtctttccgggcctcgcttcccccagcccctgcgcccggcccgaacgagaggttccggagccccggcgcgggcgggttctggggtgtagacgctgctggccagcccgccccagccgaggttctcggcaccgccttgagagcttcagctgccccagggtgtgcaggtttgctttagagggtcggcgggcggagcttcggggaagaggagctctgggagagtcattccggccagtggccggagaccgtcgtcgctcttgggaatccttggccgcccagacagaagggaagtaggcgccggagagcccgttctgcattttgattcatctcgggccctattagaatcccaagaaaatcaaatggcatccggggatttctgctcacctggagaagggatggaaatacttcaacaagtgtgcagcaaacaacttcctccttgtaacctgagtaaagaggacctgttacagaacccatacttcagcaagcttctcctgaatctctcacagcatgtggatgagagtggcttaagcctcaccctagcaaaggagcaggctcaggcatggaaggaagttcgactgcataagacaacatggttgaggtctgagattttacacagagtcattcaagagttgcttgtggactactatgtgaagatacaagacacaaatgtaacttctgaggacaaaaaggtgcttctccgctgcctcactttgctgcagaggcttcttcaagaacaccggctgaagactcaatccgagctagaccgcatcaatgcccagtacctggaagtcaagtgcggtgctatgatccttaagctgaggatggaggagctaaagattttgtccgacacttacactgttgagaaagtggaagttcatcgtctgattagggaccgtttggagggagccattcacctacaggagcaggacatggagaactcaagacaggtcctgaactcctatgaggtccttggggaggagtttgacaggctggtgaaagagtacaccgtactcaagcaggcaacagagaacaagcggtgggccctccaggagttcagcaaggtctaccgttgagctctggcagggccaggagacatggcttctgcatagctgctgcctcctaatcttcctgctagtgggaccaccttcacctggggctgccttcagtacaagggagtgtggaaatgcttacgcttgaaacactgcagtcatttaggcactctcctggtttctctttattttttatgactgggcctcttctggaaaatctagcaaggagatttatataatttttatgcatagctgtgtgtcagtgtcagccctgtattgtatttgattatctcctgaataaagttatgatattatatcttaggattttagtcattttccttgggcaaagattgaaaaagaacattgaaggctatatgggtaaggagcggggaactgagt

SEQ ID NO: 7989 - protein, 237 aa, Homo sapiens
MASGDFCSPGEGMEILQQVCSKQLPPCNLSKEDLLQNPYFSKLLLNLSQHVDESGLSLTLAKEQAQAWKEVRLHKTTWLRSEILHRVIQELLVDYYVKIQDTNVTSEDKKVLLRCLTLLQRLLQEHRLKTQSELDRINAQYLEVKCGAMILKLRMEELKILSDTYTVEKVEVHRLIRDRLEGAIHLQEQDMENSRQVLNSYEVLGEEFDRLVKEYTVLKQATENKRWALQEFSKVYR

SEQ ID NO: 7990 - DNA, 955 bp, Homo sapiens
gttaggagagaaagccagtcgcctgctggagaagttcggccgcagaaaggatgctgacagtgaaaccgtgaaggcagcaaaggtgtggaaactcgcagaggtcctggtgggtgagcagcagcagtgccaggatgccaagagccagcagaaggagcagatgttgctgctggagaagaagagtgctgcttactcccaggtgcttctccgctgcctcactttgctgcagaggcttcttcaagaacaccggctgaagactcaatccgagctagaccgcatcaatgcccagtacctggaagtcaagtgcggtgctatgatccttaagctgaggatggaggagctaaagattttgtccgacacttacactgttgagaaagtggaagttcatcgtctgattagggaccgtttggagggagccattcacctacaggagcaggacatggagaactcaagacaggtcctgaactcctatgaggtccttggggaggagtttgacaggctggtgaaagagtacaccgtactcaagcaggcaacagagaacaagcggtgggccctccaggagttcagcaaggtctaccgttgagctctggcagggccaggagacatggcttctgcatagctgctgcctcctaatcttcctgctagtgggaccaccttcacctggggctgccttcagtacaagggagtgtggaaatgcttacgcttgaaacactgcagtcatttaggcactctcctggtttctctttattttttatgactgggcctcttctggaaaatctagcaaggagatttatataatttttatgcatagctgtgtgtcagtgtcagccctgtattgtatttgattatctcctgaataaagttatgatattatatcttaggattttagtcattttccttgggcaaagattgaaaaagaacattgaaggctatatgggtaaggagcggggaactgagt

SEQ ID NO: 7991 - protein, 140 aa, Homo sapiens
MLLLEKKSAAYSQVLLRCLTLLQRLLQEHRLKTQSELDRINAQYLEVKCGAMILKLRMEELKILSDTYTVEKVEVHRLIRDRLEGAIHLQEQDMENSRQVLNSYEVLGEEFDRLVKEYTVLKQATENKRWALQEFSKVYR

SEQ ID NO: 7992 - DNA, 1164 bp, Homo sapiens
tggcctcccaaagtgctaggattgcaggcgtaagccaccatgctcagcccagaatggggccatttttaatagattattagaagaaaacctgtcataaggcaggatttgtgggtctagatacaggataggggcactggaaggttgctttacagggattgtagcgattagggttttcctgtcagtcctctgcccctttgctcagatgctgacagtgaaaccgtgaaggcagcaaaggtgtggaaactcgcagaggtcctggtgggtgagcagcagcagtgccaggatgccaagagccagcagaaggagcagatgttgctgctggagaagaagagtgctgcttactcccaggtttatcagggcatgggacagcccctttcctttatcctgaccccaggagcacttttggggaagacaaagattcctgatctaccctcctttctactatctttatttatgccctcttcttcctccatcttgggctcaggtgcttctccgctgcctcactttgctgcagaggcttcttcaagaacaccggctgaagactcaatccgagctagaccgcatcaatgcccagtacctggaagtcaagtgcggtgctatgatccttaagctgaggatggaggagctaaagattttgtccgacacttacactgttgagaaagtggaagttcatcgtctgattagggaccgtttggagggagccattcacctacaggagcaggacatggagaactcaagacaggtcctgaactcctatgaggtccttggggaggagtttgacaggctggtgaaagagtacaccgtactcaagcaggcaacagagaacaagcggtgggccctccaggagttcagcaaggtctaccgttgagctctggcagggccaggagacatggcttctgcatagctgctgcctcctaatcttcctgctagtgggaccaccttcacctggggctgccttcagtacaagggagtgtggaaatgcttacgcttgaaacactgcagtcatttaggcactctcctggtttctctttattttttatgactgggcctcttctggaaaatctagcaaggagatttatataatttttatgcatagctgtgtgtcagtgtcagccctgtattgtatttgattatctcctgaataaagttatgatattatatctt

SEQ ID NO: 7993 - protein, 89 aa, Homo sapiens [sequence omitted]

SEQ ID NO: 7994 - DNA, 1459 bp, Homo sapiens
agtgcactttcggctccttccccttcccgggcctttcagcttggtctttccgggcctcgcttcccccagcccctgcgcccggcccgaacgagaggttccggagccccggcgcgggcgggttctggggtgtagacgctgctggccagcccgccccagccgaggttctcggcaccgccttgagagcttcagctgccccagggtgtgcaggtttgctttagagggtcggcgggcggagcttcggggaagaggagctctgggagagtcattccggccagtggccggagaccgtcgtcgctcttgggaatccttggccgcccagacagaagggaaattagaatcccaagaaaatcaaatggcatccggggatttctgctcacctggagaagggatggaaatacttcaacaagtgtgcagcaaacaacttcctccttgtaacctgagtaaagaggacctgttacagaacccatacttcagcaagcttctcctgaatctctcacagcatgtggatgagagtggcttaagcctcaccctagcaaaggagcaggctcaggcatggaaggaagttcgactgcataagacaacatggttgaggtctgagattttacacagagtcattcaagagttgcttgtggactactatgtgaagatacaagacacaaatgtaacttctgaggacaaaaaggattttgtgtggatgagggctcggctacagcaagaagtagaggagcagctcaaaaagaaatgtttcactctgctctgctactatgatcccaattcaggtgcttctccgctgcctcactttgctgcagaggcttcttcaagaacaccggctgaagactcaatccgagctagaccgcatcaatgcccagtacctggaagtcaagtgcggtgctatgatccttaagctgaggatggaggagctaaagattttgtccgacacttacactgttgagaaagtggaagttcatcgtctgattagggaccgtttggagggagccattcacctacaggagcaggacatggagaactcaagacaggtcctgaactcctatgaggtccttggggaggagtttgacaggctggtgaaagagtacaccgtactcaagcaggcaacagagaacaagcggtgggccctccaggagttcagcaaggtctaccgttgagctctggcagggccaggagacatggcttctgcatagctgctgcctcctaatcttcctgctagtgggaccaccttcacctggggctgccttcagtacaagggagtgtggaaatgcttacgcttgaaacactgcagtcatttaggcactctcctggtttctctttattttttatgactgggcctcttctggaaaatctagcaaggagatttatataatttttatgcatagctgtgtgtcagtgtcagccctgtattgtatttgattatctcctgaataaagttatgatattatatctt

SEQ ID NO: 7995 - protein, 183 aa, Homo sapiens; identical to SEQ ID NO: 7979

SEQ ID NO: 7996 - DNA, 1500 bp, Homo sapiens
tccttcgtcgcggcctctagtgcactttcggctccttccccttcccgggcctttcagcttggtctttccgggcctcgcttcccccagcccctgcgcccggcccgaacgagaggttccggagccccggcgcgggcgggttctggggtgtagacgctgctggccagcccgccccagccgaggttctcggcaccgccttgagagcttcagctgccccagggtgtgcagattagaatcccaagaaaatcaaatggcatccggggatttctgctcacctggagaagggatggaaatacttcaacaagtgtgcagcaaacaacttcctccttgtaacctgagtaaagaggacctgttacagaacccatacttcagcaagcttctcctgaatctctcacagcatgtggatgagagtggcttaagcctcaccctagcaaaggagcaggctcaggcatggaaggaagttcgactgcataagacaacatggttgaggtctgagattttacacagagtcattcaagagttgcttgtggactactatgtgaagatacaagacacaaatgtaacttctgaggacaaaaaggattttgtgtggatgagggctcggctacagcaagaagtagaggagcagctcaaaaagaaatgtttcactctgctctgctactatgatcccaattcagatgctgacagtgaaaccgtgaaggcagcaaaggtgtggaaactcgcagaggtcctggtgggtgagcagcagcagtgccaggatgccaagagccagcagaaggagcagatgttgctgctggagaagaagagtgctgcttactcccaggtgcttctccgctgcctcactttgctgcagaggcttcttcaagaacaccggctgaagactcaatccgagctagaccgcatcaatgcccagtacctggaagtcaagtgcggtgctatgatccttaagctgaggatggaggagctaaagattttgtccgacacttacactgttgagaaagtggaagttcatcgtctgattagggaccgtttggagggagccattcacctacaggagcaggacatggagaactcaagacaggtcctgaactcctatgaggtccttggggaggagtttgacaggctggtgaaagagtacaccgtactcaagcaggcaacagagaacaagcggtgggccctccaggagttcagcaaggtctaccgttgagctctggcagggccaggagacatggcttctgcatagctgctgcctcctaatcttcctgctagtgggaccaccttcacctggggctgccttcagtacaagggagtgtggaaatgcttacgcttgaaacactgcagtcatttaggcactctcctggtttctctttattttttatgactgggcctcttctggaaaatctagcaaggagatttatataatttttatgcatagctgtgtgtcagtgtcagccctgtattgtatttgattatctcctgaataaagttatgatattatatctt

SEQ ID NO: 7997 - protein, 318 aa, Homo sapiens; identical to SEQ ID NO: 7981

SEQ ID NO: 7998 - DNA, 1674 bp, Homo sapiens
cacctccttcgtcgcggcctctagtgcactttcggctccttccccttcccgggcctttcagcttggtctttccgggcctcgcttcccccagcccctgcgcccggcccgaacgagaggttccggagccccggcgcgggcgggttctggggtgtagacgctgctggccagcccgccccagccgaggttctcggcaccgccttgagagcttcagctgccccagggtgtgcaggtttgctttagagggtcggcgggcggagcttcggggaagaggagctctgggagagtcattccggccagtggccggagaccgtcgtcgctcttgggaatccttggccgcccagacagaagggaagtaggcgccggagagcccgttctgcattttgattcatctcgggccctattagaatcccaagaaaatcaaatggcatccggggatttctgctcacctggagaagggatggaaatacttcaacaagtgtgcagcaaacaacttcctccttgtaacctgagtaaagaggacctgttacagaacccatacttcagcaagcttctcctgaatctctcacagcatgtggatgagagtggcttaagcctcaccctagcaaaggagcaggctcaggcatggaaggaagttcgactgcataagacaacatggttgaggtctgagattttacacagagtcattcaagagttgcttgtggactactatgtgaagatacaagacacaaatgtaacttctgaggacaaaaaggattttgtgtggatgagggctcggctacagcaagaagtagaggagcagctcaaaaagaaatgtttcactctgctctgctactatgatcccaattcagatgctgacagtgaaaccgtgaaggcagcaaaggtgtggaaactcgcagaggtcctggtgggtgagcagcagcagtgccaggatgccaagagccagcagaaggagcagatgttgctgctggagaagaagagtgctgcttactcccaggtgcttctccgctgcctcactttgctgcagaggcttcttcaagaacaccggctgaagactcaatccgagctagaccgcatcaatgcccagtacctggaagtcaagtgcggtgctatgatccttaagctgaggatggaggagctaaagattttgtccgacacttacactgttgagaaagtggaagttcatcgtctgattagggaccgtttggagggagccattcacctacaggagcaggacatggagaactcaagacaggtcctgaactcctatgaggtccttggggaggagtttgacaggctggtgaaagagtacaccgtactcaagcaggcaacagagaacaagcggtgggccctccaggagttcagcaaggtctaccgttgagctctggcagggccaggagacatggcttctgcatagctgctgcctcctaatcttcctgctagtgggaccaccttcacctggggctgccttcagtacaagggagtgtggaaatgcttacgcttgaaacactgcagtcatttaggcactctcctggtttctctttattttttatgactgggcctcttctggaaaatctagcaaggagatttatataatttttatgcatagctgtgtgtcagtgtcagccctgtattgtatttgattatctcctgaataaagttatgatattatatctt

SEQ ID NO: 7999 - protein, 318 aa, Homo sapiens; identical to SEQ ID NO: 7981

SEQ ID NO: 8000 - DNA, 1809 bp, Homo sapiens
cacctccttcgtcgcggcctctagtgcactttcggctccttccccttcccgggcctttcagcttggtctttccgggcctcgcttcccccagcccctgcgcccggcccgaacgagaggttccggagccccggcgcgggcgggttctggggtgtagacgctgctggccagcccgccccagccgaggttctcggcaccgccttgagagcttcagctgccccagggtgtgcaggtttgctttagagggtcggcgggcggagcttcggggaagaggagctctgggagagtcattccggccagtggccggagaccgtcgtcgctcttgggaatccttggccgcccagacagaagggaagtaggcgccggagagcccgttctgcattttgattcatctcgggccctattagaatcccaagaaaatcaaatggcatccggggatttctgctcacctggagaagggatggaaatacttcaacaagtgtgcagcaaacaacttcctccttgtaacctgagtaaagaggacctgttacagaacccatacttcagcaagcttctcctgaatctctcacagcatgtggatgagagtggcttaagcctcaccctagcaaaggagcaggctcaggcatggaaggaagttcgactgcataagacaacatggttgaggtctgagattttacacagagtcattcaagagttgcttgtggactactatgtgaagatacaagacacaaatgtaacttctgaggacaaaaagtttcatgagacccttgaacagcggctgcttgtaactgaactgatgcggctcttaggtcctagccaggagagggagatacctccactgctggggctggagaaagcggaccttctggaactcatgccactctcagaggattttgtgtggatgagggctcggctacagcaagaagtagaggagcagctcaaaaagaaatgtttcactctgctctgctactatgatcccaattcagatgctgacagtgaaaccgtgaaggcagcaaaggtgtggaaactcgcagaggtcctggtgggtgagcagcagcagtgccaggatgccaagagccagcagaaggagcagatgttgctgctggagaagaagagtgctgcttactcccaggtgcttctccgctgcctcactttgctgcagaggcttcttcaagaacaccggctgaagactcaatccgagctagaccgcatcaatgcccagtacctggaagtcaagtgcggtgctatgatccttaagctgaggatggaggagctaaagattttgtccgacacttacactgttgagaaagtggaagttcatcgtctgattagggaccgtttggagggagccattcacctacaggagcaggacatggagaactcaagacaggtcctgaactcctatgaggtccttggggaggagtttgacaggctggtgaaagagtacaccgtactcaagcaggcaacagagaacaagcggtgggccctccaggagttcagcaaggtctaccgttgagctctggcagggccaggagacatggcttctgcatagctgctgcctcctaatcttcctgctagtgggaccaccttcacctggggctgccttcagtacaagggagtgtggaaatgcttacgcttgaaacactgcagtcatttaggcactctcctggtttctctttattttttatgactgggcctcttctggaaaatctagcaaggagatttatataatttttatgcatagctgtgtgtcagtgtcagccctgtattgtatttgattatctcctgaataaagttatgatattatatctt

SEQ ID NO: 8001 - protein, 363 aa, Homo sapiens; identical to SEQ ID NO: 7983

SEQ ID NO: 8002 - DNA, 1640 bp, Homo sapiens
ccacctccttcgtcgcggcctctagtgcactttcggctccttccccttcccgggcctttcagcttggtctttccgggcctcgcttcccccagcccctgcgcccggcccgaacgagaggttccggagccccggcgcgggcgggttctggggtgtagacgctgctggccagcccgccccagccgaggttctcggcaccgccttgagagcttcagctgccccagggtgtgcagattagaatcccaagaaaatcaaatggcatccggggatttctgctcacctggagaagggatggaaatacttcaacaagtgtgcagcaaacaacttcctccttgtaacctgagtaaagaggacctgttacagaacccatacttcagcaagcttctcctgaatctctcacagcatgtggatgagagtggcttaagcctcaccctagcaaaggagcaggctcaggcatggaaggaagttcgactgcataagacaacatggttgaggtctgagattttacacagagtcattcaagagttgcttgtggactactatgtgaagatacaagacacaaatgtaacttctgaggacaaaaagtttcatgagacccttgaacagcggctgcttgtaactgaactgatgcggctcttaggtcctagccaggagagggagatacctccactgctggggctggagaaagcggaccttctggaactcatgccactctcagaggattttgtgtggatgagggctcggctacagcaagaagtagaggagcagctcaaaaagaaatgtttcactctgctctgctactatgatcccaattcagatgctgacagtgaaaccgtgaaggcagcaaaggtgtggaaactcgcagaggtcctggtgggtgagcagcagcagtgccaggatgccaagagccagcagaaggagcagatgttgctgctggagaagaagagtgctgcttactcccaggtgcttctccgctgcctcactttgctgcagaggcttcttcaagaacaccggctgaagactcaatccgagctagaccgcatcaatgcccagtacctggaagtcaagtgcggtgctatgatccttaagctgaggatggaggagctaaagattttgtccgacacttacactgttgagaaagtggaagttcatcgtctgattagggaccgtttggagggagccattcacctacaggagcaggacatggagaactcaagacaggtcctgaactcctatgaggtccttggggaggagtttgacaggctggtgaaagagtacaccgtactcaagcaggcaacagagaacaagcggtgggccctccaggagttcagcaaggtctaccgttgagctctggcagggccaggagacatggcttctgcatagctgctgcctcctaatcttcctgctagtgggaccaccttcacctggggctgccttcagtacaagggagtgtggaaatgcttacgcttgaaacactgcagtcatttaggcactctcctggtttctctttattttttatgactgggcctcttctggaaaatctagcaaggagatttatataatttttatgcatagctgtgtgtcagtgtcagccctgtattgtatttgattatctcctgaataaagttatgatattatatctt

SEQ ID NO: 8003 - protein, 363 aa, Homo sapiens; identical to SEQ ID NO: 7983

SEQ ID NO: 8004 - DNA, 1435 bp, Homo sapiens
cctccacctccttcgtcgcggcctctagtgcactttcggctccttccccttcccgggcctttcagcttggtctttccgggcctcgcttcccccagcccctgcgcccggcccgaacgagaggttccggagccccggcgcgggcgggttctggggtgtagacgctgctggccagcccgccccagccgaggttctcggcaccgccttgagagcttcagctgccccagggtgtgcaggtttgctttagagggtcggcgggcggagcttcggggaagaggagctctgggagagtcattccggccagtggccggagaccgtcgtcgctcttgggaatccttggccgcccagacagaagggaagtaggcgccggagagcccgttctgcattttgattcatctcgggccctattagaatcccaagaaaatcaaatggcatccggggatttctgctcacctggagaagggatggaaatacttcaacaagtgtgcagcaaacaacttcctccttgtaacctgagtaaagaggacctgttacagaacccatacttcagcaagcttctcctgaatctctcacagcatgtggatgagagtggcttaagcctcaccctagcaaaggagcaggctcaggcatggaaggaagttcgactgcataagacaacatggttgaggtctgagattttacacagagtcattcaagagttgcttgtggactactatgtgaagatacaagacacaaatgtaacttctgaggacaaaaaggtgcttctccgctgcctcactttgctgcagaggcttcttcaagaacaccggctgaagactcaatccgagctagaccgcatcaatgcccagtacctggaagtcaagtgcggtgctatgatccttaagctgaggatggaggagctaaagattttgtccgacacttacactgttgagaaagtggaagttcatcgtctgattagggaccgtttggagggagccattcacctacaggagcaggacatggagaactcaagacaggtcctgaactcctatgaggtccttggggaggagtttgacaggctggtgaaagagtacaccgtactcaagcaggcaacagagaacaagcggtgggccctccaggagttcagcaaggtctaccgttgagctctggcagggccaggagacatggcttctgcatagctgctgcctcctaatcttcctgctagtgggaccaccttcacctggggctgccttcagtacaagggagtgtggaaatgcttacgcttgaaacactgcagtcatttaggcactctcctggtttctctttattttttatgactgggcctcttctggaaaatctagcaaggagatttatataatttttatgcatagctgtgtgtcagtgtcagccctgtattgtatttgattatctcctgaataaagttatgatattatatctt

SEQ ID NO: 8005 - protein, 237 aa, Homo sapiens; identical to SEQ ID NO: 7989

SEQ ID NO: 8006 - DNA, 876 bp, Homo sapiens
gttaggagagaaagccagtcgcctgctggagaagttcggccgcagaaaggatgctgacagtgaaaccgtgaaggcagcaaaggtgtggaaactcgcagaggtcctggtgggtgagcagcagcagtgccaggatgccaagagccagcagaaggagcagatgttgctgctggagaagaagagtgctgcttactcccaggtgcttctccgctgcctcactttgctgcagaggcttcttcaagaacaccggctgaagactcaatccgagctagaccgcatcaatgcccagtacctggaagtcaagtgcggtgctatgatccttaagctgaggatggaggagctaaagattttgtccgacacttacactgttgagaaagtggaagttcatcgtctgattagggaccgtttggagggagccattcacctacaggagcaggacatggagaactcaagacaggtcctgaactcctatgaggtccttggggaggagtttgacaggctggtgaaagagtacaccgtactcaagcaggcaacagagaacaagcggtgggccctccaggagttcagcaaggtctaccgttgagctctggcagggccaggagacatggcttctgcatagctgctgcctcctaatcttcctgctagtgggaccaccttcacctggggctgccttcagtacaagggagtgtggaaatgcttacgcttgaaacactgcagtcatttaggcactctcctggtttctctttattttttatgactgggcctcttctggaaaatctagcaaggagatttatataatttttatgcatagctgtgtgtcagtgtcagccctgtattgtatttgattatctcctgaataaagttatgatattatatctt

SEQ ID NO: 8007 - protein, 140 aa, Homo sapiens; identical to SEQ ID NO: 7991

SEQ ID NO: 8008 - DNA, 657 bp, Homo sapiens
tagatacaggataggggcactggaaggttgctttacagggattgtagcgattagggttttcctgtcagtcctctgcccctttgctcagatgctgacagtgaaaccgtgaaggcagcaaaggtgtggaaactcgcagaggtcctggtgggtgagcagcagcagtgccaggatgccaagagccagcagaaggagcagatgttgctgctggagaagaagagtgctgcttactcccaggtgcttctccgctgcctcactttgctgcagaggcttcttcaagaacaccggctgaagactcaatccgagctagaccgcatcaatgcccagtacctggaagtcaagtgcggtgctatgatccttaagctgaggtgagctgtgacccctgtggatcttaagggattctgtctcacgttatcagccctctatcccttaccctaatctctttcctctcccttatcctagcgccttgtgggtatccagtaaatgtcacatagcagtattagcttttggattacccaaaagctttcaacatccttgagacttttcttttacagtcttctgaaataggcactttactgtgagatcaattgctcgggaattcagagtgaccttgtttatcctatcagtgcttagcccacaccttgaccgtcggcaggtact

SEQ ID NO: 8009 - protein, 57 aa, Homo sapiens
MLLLEKKSAAYSQVLLRCLTLLQRLLQEHRLKTQSELDRINAQYLEVKCGAMILKLR

SEQ ID NO: 8010 - DNA, 1138 bp, Homo sapiens
agtgcactttcggctccttccccttcccgggcctttcagcttggtctttccgggcctcgcttcccccagcccctgcgcccggcccgaacgagaggttccggagccccggcgcgggcgggttctggggtgtagacgctgctggccagcccgccccagccgaggttctcggcaccgccttgagagcttcagctgccccagggtgtgcaggtttgctttagagggtcggcgggcggagcttcggggaagaggagctctgggagagtcattccggccagtggccggagaccgtcgtcgctcttgggaatccttggccgcccagacagaagggaagtaggcgccggagagcccgttctgcattttgattcatctcgggccctattagaatcccaagaaaatcaaatggcatccggggatttctgctcacctggagaagggatggaaatacttcaacaagtcctctgcccctttgctcagatgctgacagtgaaaccgtgaaggcagcaaaggtgtggaaactcgcagaggtcctggtgggtgagcagcagcagtgccaggatgccaagagccagcagaaggagcagatgttgctgctggagaagaagagtgctgcttactcccaggtttatcagggcatgggacagcccctttcctttatcctgaccccaggagcacttttggggaagacaaagattcctgatctaccctcctttctactatctttatttatgccctcttcttcctccatcttgggctcaggtgcttctccgctgcctcactttgctgcagaggcttcttcaagaacaccggctgaagactcaatccgagctagaccgcatcaatgcccagtacctggaagtcaagtgcggtgctatgatccttaagctgaggtgagctgtgacccctgtggatcttaagggattctgtctcacgttatcagccctctatcccttaccctaatctctttcctctcccttatcctagcgccttgtgggtatccagtaaatgtcacatagcagtattagcttttggattacccaaaagctttcaacatccttgagacttttcttttacagtcttctgaaataggcactttactgtgagatcaattgctcgggaattcagagtgaccttgtttatc

SEQ ID NO: 8011 - protein, 31 aa, Homo sapiens
MASGDFCSPGEGMEILQQVLCPFAQMLTVKP

SEQ ID NO: 8012 - DNA, 876 bp, Homo sapiens
agtgcactttcggctccttccccttcccgggcctttcagcttggtctttccgggcctcgcttcccccagcccctgcgcccggcccgaacgagaggttccggagccccggcgcgggcgggttctggggtgtagacgctgctggccagcccgccccagccgaggttctcggcaccgccttgagagcttcagctgccccagggtgtgcaggtttgctttagagggtcggcgggcggagcttcggggaagaggagctctgggagagtcattccggccagtggccggagaccgtcgtcgctcttgggaatccttggccgcccagacagaagggaaattagaatcccaagaaaatcaaatggcatccggggatttctgctcacctggagaagggatggaaatacttcaacaagtgtgcagcaaacaacttcctccttgtaacctgagtaaagaggacctgttacagaacccatacttcagcaagcttctcctgaatctctcacagcatgtggatgagagtggcttaagcctcaccctagcaaaggagcaggctcaggcatggaaggaagttcgactgcataagacaacatggttgaggtctgagattttacacagagtcattcaagagttgcttgtggactactatgtgaagatacaagacacaaatgtaacttctgaggacaaaaagtttcatgagacccttgaacagcggctgcttgtaactgaactgatgcggctcttaggtcctagccaggagagggagatacctccactgctggggctggagaaagcggaccttctggaactcatgccactctcagaggttggcggggagatattggaaccaaataaatgaaatggtttaatttctcccatatcttt

SEQ ID NO: 8013 - protein, 165 aa, Homo sapiens
MASGDFCSPGEGMEILQQVCSKQLPPCNLSKEDLLQNPYFSKLLLNLSQHVDESGLSLTLAKEQAQAWKEVRLHKTTWLRSEILHRVIQELLVDYYVKIQDTNVTSEDKKFHETLEQRLLVTELMRLLGPSQEREIPPLLGLEKADLLELMPLSEVGGEILEPNK

SEQ ID NO: 8014 - DNA, 563 bp, Homo sapiens
cagcttggtctttccgggcctcgcttcccccagcccctgcgcccggcccgaacgagaggttccggagccccggcgcgggcgggttctggggtgtagacgctgctggccagcccgccccagccgaggttctcggcaccgccttgagagcttcagctgccccagggtgtgcagattagaatcccaagaaaatcaaatggcatccggggatttctgctcacctggagaagggatggaaatacttcaacaaggcatggaaggaagttcgactgcataagacaacatggttgaggtctgagattttacacagagtcattcaagagttgcttgtggactactatgtgaagatacaagacacaaatgtaacttctgaggacaaaaagtttcatgagacccttgaacagcggctgcttgtaactgaactgatgcggctcttaggtcctagccaggagagggagatacctccactgctggggctggagaaagcggaccttctggaactcatgccactctcagaggttggcggggagatattggaaccaaataaatgaaatggtttaatttct

SEQ ID NO: 8015 - protein, 41 aa, Homo sapiens [sequence omitted]

SEQ ID NO: 8016 - DNA, 537 bp, Homo sapiens
ctgtaatcccagcactttgggaggctgaggcgggcggatcacgatcacttgagcccaggagttcgagaccagcctgggccacatggcgagacgatccccatctctacaaaaaaaaaatacaaaaagaaaatatgcaatactaagtaaactgtgccaagtatatcacatcttttacattagataaggtgatagcctggagtgataggaaaggaatctccgttaggtgtgctgagagatggggagtttcgccttttccttcagtaccagctacagaattctattaatatgcatagaggaatggtgtggtccagtgaagaaattttatattcttggtcagctcatcagctgccacctttcatgcttaatattgaactgctgtcattttctgaagcttttaaaaatcatttatgcttcctcagctctgaagcacagcaaagttaaatatcaggcataatgtccatagcaaacggcacttggaacaaaatagcaagtatgctttggtgactcagagctgatcggaaatctactgaaattttg

SEQ ID NO: 8017 - protein, 72 aa, Homo sapiens
MGSFAFSFSTSYRILLICIEEWCGPVKKFYILGQLISCHLSCLILNCCHFLKLLKIIYASSALKHSKVKYQA

SEQ ID NO: 8018 - DNA, 2605 bp, Homo sapiens
gcatcttaaaactacaggtgattgcagagagactctgggggcatttgtatgatcttcccaccccatccctttcttccagttattaggagtcaggtgttgagcagggcagactcctaagataccctcagtgtccaaggtgcctaggctgaggtgaactaggtgccttcttccctaggactgccggatgcagctgagtgatgaggaaggctgctgctgtttccctctggatgggcacttgctctgccatggttgccacatgcagcggctcaatgcccgacaaccccctgccaactatatctgagctgcaatcactgctgctgctgtcaccctgcagacaaactgctgtggccagtgggcccctctgaggccagccaaggcaaagaatgcactctgcaggcctggcagaagagtcctctggggaggaccccaagggccggagacccaaagatcatgatattccaaatggattgtggaagagaaaccttatatttaccagggtgggggcgactggcctttttcccatgtgtgcagtctgagcttaggcacacacaggagggttccaggactttctgaacatctgattctgtatcttcagtatatatattttgtttgttttagagatgggatctcaccatgttgcccaggctagtcttgaactcctgggctcgaatgatcctcccaccttggcctcccaaagtgctgggattataggcgtaagccactgtgtctggcctagtgtatgattatgcatgagtcacgcaatgttctggtcctggattccaggagtagaggacctagctttaaatcaattagtttcagctaaactgactagaaccaaatcaaagtgtaattctccctccagctcccccaaaccccagagttttggggttgtggttgatgcagtgtgggatgtccctgagaggtagcaagtctagggtggtgagttcctgctaggcaaccaaatttaagctcctcactttttgtgacacatggtgtcagatatggggtcccgcacctatatctggatgaagaggtagaaactctggacctcattaatgagttatttcttggccttcttctaaggactaggagagctccttatctgtctgagaatggggaccagctctgagtggggttgctgcctgtattccctgtttctcaggaacttacatgggtctggggaggctaggtaggtgattgtacgtggttgctcttctccttggctgggggaggtaatgagcagatctctgtgggtgtggagcttgttggggggatgtctaggaagcttcagcttagccacattcccaagtttaggtgcactgagccatatagcccagtgtatgcatgtgtgggtgtgttcatgcacacacacactctctctcttgtctctctgtctctctctcactctttcttactctcttctcaggtcacttgtacacttggtttcctagtagaagctcacttgccacctctcagaggggtcccggattgcatccatcacaatcccaaaactagagttggggggaactggagggagcaaaacactgatttgatactagtcagtttgcttgaaactagttcacctaaagctagatctcttaaaaccaatttactgaaaacttgtttgcttaaagttaatgacttaatgactaatttgccaaaagctcaattcctattttggtgtgtttatatccatttaggtgtcctattcttttttgtcatgctttggatatttcaaggatttatatctattcatccaagagtacttctgagctattatcagcaacataaatttatcaaatttgcagcactttgtaaatgatgagattgcttcctacctttatggatgtctttttctatgttatctaccattcaaaaacttttttaaaaagtttaaagtttctagcaataaatacaattggtacagacattttgtgtatcatttttttgtttcttaatccaatattcctttacaaattaaatgccttgaaaaatataatggagttcaatgtgattttgatgctttggtctaacttctacattcctactgttaaaaaggccagtatatcttaaacaaatgaataggcatgaggcatattcagttgacttacaatgaaaagttatacagacaacagtaataactaaaagggtgaatctgctaaatccttttgaaatgctgcagatttgataaatatttattttagactaattggttttaggtgaattggttttaggcaaattaatttagtaatctttgatctttagtcttcattttctgtcactcagtgagtttcttactggaaatgatgactcctgacaacagaatttccacatttgggggctattctaaggtgactatgccagccaacctgggaaatacataaaagagatctctgagtgagagggaaagaggtcagatttatacaactgagcgccagaggggaaaatgcaccttgttggagtgagaaatgttctgaaactgaattacttcttgtacagctgagatagcttcttctgaactattattaaataagtgaatacaaaggccctatgatgggaaatccagacaagcttgtgtaactttacatccatcccctcagggata

SEQ ID NO: 8019 - protein, 182 aa, Homo sapiens [sequence omitted]

SEQ ID NO: 8020 - DNA, 3324 bp, Homo sapiens
taactccagtcctgacctccatggagtctgtccctggaaggagacaggcatttgagagcaggatagatatgctcaggcaaagaggcttctaggttgaagggtcccagagggaaaggcctgttaacaatgtggttctctctatgcaaatcatatagcaccttattaagagctcacgtattccagcacgtagttggctttactctcccaggtggcttcctatgcactggagaggaaggcagtttgtttaggggaggggccctagaaaactgttaaggaggcaggagctggaggagcagcaagcagaggagaggggaagttggctggaatgaagccaaagcaaattggaattgcatcagatggaatttttgtgcggggaaggacagacagcagttaggaggaaaagcacaaagtccaggtttaaatatattatgcagcagcggggagcagtgaccccagaagtcttgcacctgggctgtgggataggttccagccccttctctattgtttctagggcgaactttgcgttgcaaggctttctacagtgtcaatggctctgtgtactgtgaggaagattatctgttttcagggtttcaggaggcagctgagaaatgctgtgtctgtggtcacttgattttggagaagatcctacaagcaatggggaagtcctatcatccaggctgtttccgatgcattgtttgcaacaagtgcctggatggcatccccttcacagtggacttctccaaccaagtatactgtgtcaccgactaccacaaaaattatgctcctaagtgtgcagcctgtggccaacccatcctcccctctgagggctgtgaggacatcgtgagggtgatatccatggaccgggattatcactttgagtgctaccactgtgaggactgccggatgcagctgagtgatgaggaaggctgctgctgtttccctctggatgggcacttgctctgccatggttgccacatgcagcggctcaatgcccgacaaccccctgccaactatatctgagctgcaatcactgctgctgctgtcaccctgcagacaaactgctgtggccagtgggcccctctgaggccagccaaggcaaagaatgcactctgcaggcctggcagaagagtcctctggggaggaccccaagggccggagacccaaagatcatgatattccaaatggattgtggaagagaaaccttatatttaccagggtgggggcgactggcctttttcccatgtgtgcagtctgagcttaggcacacacaggagggttccaggactttctgaacatctgattctgtatcttcagtatatatattttgtttgttttagagatgggatctcaccatgttgcccaggctagtcttgaactcctgggctcgaatgatcctcccaccttggcctcccaaagtgctgggattataggcgtaagccactgtgtctggcctagtgtatgattatgcatgagtcacgcaatgttctggtcctggattccaggagtagaggacctagctttaaatcaattagtttcagctaaactgactagaaccaaatcaaagtgtaattctccctccagctcccccaaaccccagagttttggggttgtggttgatgcagtgtgggatgtccctgagaggtagcaagtctagggtggtgagttcctgctaggcaaccaaatttaagctcctcactttttgtgacacatggtgtcagatatggggtcccgcacctatatctggatgaagaggtagaaactctggacctcattaatgagttatttcttggccttcttctaaggactaggagagctccttatctgtctgagaatggggaccagctctgagtggggttgctgcctgtattccctgtttctcaggaacttacatgggtctggggaggctaggtaggtgattgtacgtggttgctcttctccttggctgggggaggtaatgagcagatctctgtgggtgtggagcttgttggggggatgtctaggaagcttcagcttagccacattcccaagtttaggtgcactgagccatatagcccagtgtatgcatgtgtgggtgtgttcatgcacacacacactctctctcttgtctctctgtctctctctcactctttcttactctcttctcaggtcacttgtacacttggtttcctagtagaagctcacttgccacctctcagaggggtcccggattgcatccatcacaatcccaaaactagagttggggggaactggagggagcaaaacactgatttgatactagtcagtttgcttgaaactagttcacctaaagctagatctcttaaaaccaatttactgaaaacttgtttgcttaaagttaatgacttaatgactaatttgccaaaagctcaattcctattttggtgtgtttatatccatttaggtgtcctattcttttttgtcatgctttggatatttcaaggatttatatctattcatccaagagtacttctgagctattatcagcaacataaatttatcaaatttgcagcactttgtaaatgatgagattgcttcctacctttatggatgtctttttctatgttatctaccattcaaaaacttttttaaaaagtttaaagtttctagcaataaatacaattggtacagacattttgtgtatcatttttttgtttcttaatccaatattcctttacaaattaaatgccttgaaaaatataatggagttcaatgtgattttgatgctttggtctaacttctacattcctactgttaaaaaggccagtatatcttaaacaaatgaataggcatgaggcatattcagttgacttacaatgaaaagttatacagacaacagtaataactaaaagggtgaatctgctaaatccttttgaaatgctgcagatttgataaatatttattttagactaattggttttaggtgaattggttttaggcaaattaatttagtaatctttgatctttagtcttcattttctgtcactcagtgagtttcttactggaaatgatgactcctgacaacagaatttccacatttgggggctattctaaggtgactatgccagccaacctgggaaatacataaaagagatctctgagtgagagggaaagaggtcagatttatacaactgagcgccagaggggaaaatgcaccttgttggagtgagaaatgttctgaaactgaattacttcttgtacagctgagatagcttcttctgaactattattaaataagtgaatacaaaggccctatgatgggaaatccagacaagcttgtgtaactttacatccatcccctcagggata

SEQ ID NO: 8021 - protein, 121 aa, Homo sapiens; identical to SEQ ID NO: 1156

SEQ ID NO: 8022 - DNA, 3420 bp, Homo sapiens
tccggccaggcagacaaaagtttgggagagaagttcggtctgtggctagcgtgagagctaggggggcgggggccggggagagtggggcagtcgggcgagtcgacgcgtgaacagatagacctgcggactggacagccgcggccagagaccctgctagccccgctcagccccagatgcgcggggggacgcagcccctcccgctgggggatgctgtgggattcctggcgcagggcatccaggccgcccgctaagcccctgtgcctcccctgtgcccctggggaaccagagtccggctgcagggaaagagaaccggccgccgagacgccgcagggtgccaggcggggagggggcgagaggccccaggcccgagggcatggagcggttaggagagaaagccagtcgcctgctggagaagttcggccgcagaaagggtgaatctagccggtctgggtctgacgggacccccgggccgggcaaggggcgcctaagtgggttggggggacctaggaagtcagggccccgaggagctactgggggacctggggatgagccgttggagccggcccgggagcaaggttccctggacgctgagcgaaatcagcgcggctcctttgaggcgccgcgctacgaaggctcttttcccgcggggccgccgcccacccgggccttgcctctacctcagtcgttgccccccgattttcggctggagcccacggccccggccctcagcccccgctctagcttcgccagtagctcggccagcgacgcgagcaagccgtccagcccccggggcagcctgctgctggacggggcgggggctggcggagctggaggtagccggccctgcagcaatcgcaccagcggcatcagcatgggctacgaccagcgccacgggagccccttgccagcggggccgtgcctgtttggcccacccctggccggagcaccggcaggctattctcccggaggggtcccgtccgcctacccggagctccacgccgccctggaccgattgtacgctcagcggcccgcggggttcggctgccaggaaagccgccactcgtatcccccggccctgggcagccctggagctctagccggggccggagtgggagcggcggggcccttggagagacggggggcgcaacccggacgacactctgtgaccggctacggggactgcgccgtgggcgcccggtaccaggacgagctaacagctttgcttcgcctgacggtgggcaccggtgggcgagaagccggagcccgcggagaaccctcggggattgagccgtcgggtctggaggagccaccaggtcctttcgttccggaggccgcccgggcccggatgcgggagccagaggccagggaggactacttcggcacctgtatcaagtgcaacaaaggcatctatgggcagagcaatgcctgccaggccctggacagcctctaccacacccagtgctttgtttgctgctcttgtgggcgaactttgcgttgcaaggctttctacagtgtcaatggctctgtgtactgtgaggaagattatctgttttcagggtttcaggaggcagctgagaaatgctgtgtctgtggtcacttgattttggagaagatcctacaagcaatggggaagtcctatcatccaggctgtttccgatgcattgtttgcaacaagtgcctggatggcatccccttcacagtggacttctccaaccaagtatactgtgtcaccgactaccacaaaaattatgctcctaagtgtgcagcctgtggccaacccatcctcccctctgagggctgtgaggacatcgtgagggtgatatccatggaccgggattatcactttgagtgctaccactgtgaggactgccggatgcagctgagtgatgaggaaggctgctgctgtttccctctggatgggcacttgctctgccatggttgccacatgcagcggctcaatgcccgacaaccccctgccaactatatctgagctgcaatcactgctgctgctgtcaccctgcagacaaactgctgtggccagtgggcccctctgaggccagccaaggcaaagaatgcactctgcaggcctggcagaagagtcctctggggaggaccccaagggccggagacccaaagatcatgatattccaaatggattgtggaagagaaaccttatatttaccagggtgggggcgactggcctttttcccatgtgtgcagtctgagcttaggcacacacaggagggttccaggactttctgaacatctgattctgtatcttcagtatatatatagtgtatgattatgcatgagtcacgcaatgttctggtcctggattccaggagtagaggacctagctttaaatcaattagtttcagtttgcttgaaactagttcacctaaagctagatctcttaaaaccaatttactgaaaacttgtttgcttaaagttaatgacttaatgactaatttgccaaaagctcaattcctattttggtgtgtttatatccatttaggtgtcctattcttttttgtcatgctttggatatttcaaggatttatatctattcatccaagagtacttctgagctattatcagcaacataaatttatcaaatttgcagcactttgtaaatgatgagattgcttcctacctttatggatgtctttttctatgttatctaccattcaaaaacttttttaaaaagtttaaagtttctagcaataaatacaattggtacagacattttgtgtatcatttttttgtttcttaatccaatattcctttacaaattaaatgccttgaaaaatataatggagttcaatgtgattttgatgctttggtctaacttctacattcctactgttaaaaaggccagtatatcttaaacaaatgaataggcatgaggcatattcagttgacttacaatgaaaagttatacagacaacagtaataactaaaagggtgaatctgctaaatccttttgaaatgctgcagatttgataaatatttattttagactaattggttttaggtgaattggttttaggcaaattaatttagtaatctttgatctttagtcttcattttctgtcactcagtgagtttcttactggaaatgatgactcctgacaacagaatttccacatttgggggctattctaaggtgactatgccagccaacctgggaaatacataaaagagatctctgagtgagagggaaagaggtcagatttatacaactgagcgccagaggggaaaatgcaccttgttggagtgagaaatgttctgaaactgaattacttcttgtacagctgagatagcttcttctgaactattattaaataagtgaatacaaaggccctatgatgggaaatccagacaagcttgtgtaactttacatccatcccctcagggata

SEQ ID NO: 8023 - protein, 538 aa, Homo sapiens; identical to SEQ ID NO: 1154

SEQ ID NO: 8024 - DNA, 4297 bp, Homo sapiens
agatccggccaggcagacaaaagtttgggagagaagttcggtctgtggctagcgtgagagctaggggggcgggggccggggagagtggggcagtcgggcgagtcgacgcgtgaacagatagacctgcggactggacagccgcggccagagaccctgctagccccgctcagccccagatgcgcggggggacgcagcccctcccgctgggggatgctgtgggattcctggcgcagggcatccaggccgcccgctaagcccctgtgcctcccctgtgcccctggggaaccagagtccggctgcagggaaagagaaccggccgccgagacgccgcagggtgccaggcggggagggggcgagaggccccaggcccgagggcatggagcggttaggagagaaagccagtcgcctgctggagaagttcggccgcagaaagggtgaatctagccggtctgggtctgacgggacccccgggccgggcaaggggcgcctaagtgggttggggggacctaggaagtcagggccccgaggagctactgggggacctggggatgagccgttggagccggcccgggagcaaggttccctggacgctgagcgaaatcagcgcggctcctttgaggcgccgcgctacgaaggctcttttcccgcggggccgccgcccacccgggccttgcctctacctcagtcgttgccccccgattttcggctggagcccacggccccggccctcagcccccgctctagcttcgccagtagctcggccagcgacgcgagcaagccgtccagcccccggggcagcctgctgctggacggggcgggggctggcggagctggaggtagccggccctgcagcaatcgcaccagcggcatcagcatgggctacgaccagcgccacgggagccccttgccagcggggccgtgcctgtttggcccacccctggccggagcaccggcaggctattctcccggaggggtcccgtccgcctacccggagctccacgccgccctggaccgattgtacgctcagcggcccgcggggttcggctgccaggaaagccgccactcgtatcccccggccctgggcagccctggagctctagccggggccggagtgggagcggcggggcccttggagagacggggggcgcaacccggacgacactctgtgaccggctacggggactgcgccgtgggcgcccggtaccaggacgagctaacagctttgcttcgcctgacggtgggcaccggtgggcgagaagccggagcccgcggagaaccctcggggattgagccgtcgggtctggaggagccaccaggtcctttcgttccggaggccgcccgggcccggatgcgggagccagaggccagggaggactacttcggcacctgtatcaagtgcaacaaaggcatctatgggcagagcaatgcctgccaggccctggacagcctctaccacacccagtgctttgtttgctgctcttgtgggcgaactttgcgttgcaaggctttctacagtgtcaatggctctgtgtactgtgaggaagattatctgttttcagggtttcaggaggcagctgagaaatgctgtgtctgtggtcacttgattttggagaagatcctacaagcaatggggaagtcctatcatccaggctgtttccgatgcattgtttgcaacaagtgcctggatggcatccccttcacagtggacttctccaaccaagtatactgtgtcaccgactaccacaaaaattatgctcctaagtgtgcagcctgtggccaacccatcctcccctctgagggctgtgaggacatcgtgagggtgatatccatggaccgggattatcactttgagtgctaccactgtgaggactgccggatgcagctgagtgatgaggaaggctgctgctgtttccctctggatgggcacttgctctgccatggttgccacatgcagcggctcaatgcccgacaaccccctgccaactatatctgagctgcaatcactgctgctgctgtcaccctgcagacaaactgctgtggccagtgggcccctctgaggccagccaaggcaaagaatgcactctgcaggcctggcagaagagtcctctggggaggaccccaagggccggagacccaaagatcatgatattccaaatggattgtggaagagaaaccttatatttaccagggtgggggcgactggcctttttcccatgtgtgcagtctgagcttaggcacacacaggagggttccaggactttctgaacatctgattctgtatcttcagtatatatattttgtttgttttagagatgggatctcaccatgttgcccaggctagtcttgaactcctgggctcgaatgatcctcccaccttggcctcccaaagtgctgggattataggcgtaagccactgtgtctggcctagtgtatgattatgcatgagtcacgcaatgttctggtcctggattccaggagtagaggacctagctttaaatcaattagtttcagctaaactgactagaaccaaatcaaagtgtaattctccctccagctcccccaaaccccagagttttggggttgtggttgatgcagtgtgggatgtccctgagaggtagcaagtctagggtggtgagttcctgctaggcaaccaaatttaagctcctcactttttgtgacacatggtgtcagatatggggtcccgcacctatatctggatgaagaggtagaaactctggacctcattaatgagttatttcttggccttcttctaaggactaggagagctccttatctgtctgagaatggggaccagctctgagtggggttgctgcctgtattccctgtttctcaggaacttacatgggtctggggaggctaggtaggtgattgtacgtggttgctcttctccttggctgggggaggtaatgagcagatctctgtgggtgtggagcttgttggggggatgtctaggaagcttcagcttagccacattcccaagtttaggtgcactgagccatatagcccagtgtatgcatgtgtgggtgtgttcatgcacacacacactctctctcttgtctctctgtctctctctcactctttcttactctcttctcaggtcacttgtacacttggtttcctagtagaagctcacttgccacctctcagaggggtcccggattgcatccatcacaatcccaaaactagagttggggggaactggagggagcaaaacactgatttgatactagtcagtttgcttgaaactagttcacctaaagctagatctcttaaaaccaatttactgaaaacttgtttgcttaaagttaatgacttaatgactaatttgccaaaagctcaattcctattttggtgtgtttatatccatttaggtgtcctattcttttttgtcatgctttggatatttcaaggatttatatctattcatccaagagtacttctgagctattatcagcaacataaatttatcaaatttgcagcactttgtaaatgatgagattgcttcctacctttatggatgtctttttctatgttatctaccattcaaaaacttttttaaaaagtttaaagtttctagcaataaatacaattggtacagacattttgtgtatcatttttttgtttcttaatccaatattcctttacaaattaaatgccttgaaaaatataatggagttcaatgtgattttgatgctttggtctaacttctacattcctactgttaaaaaggccagtatatcttaaacaaatgaataggcatgaggcatattcagttgacttacaatgaaaagttatacagacaacagtaataactaaaagggtgaatctgctaaatccttttgaaatgctgcagatttgataaatatttattttagactaattggttttaggtgaattggttttaggcaaattaatttagtaatctttgatctttagtcttcattttctgtcactcagtgagtttcttactggaaatgatgactcctgacaacagaatttccacatttgggggctattctaaggtgactatgccagccaacctgggaaatacataaaagagatctctgagtgagagggaaagaggtcagatttatacaactgagcgccagaggggaaaatgcaccttgttggagtgagaaatgttctgaaactgaattacttcttgtacagctgagatagcttcttctgaactattattaaataagtgaatacaaaggccctatgatgggaaatccagacaagcttgtgtaactttacatccatcccctcagggata

SEQ ID NO: 8025 - protein, 538 aa, Homo sapiens; identical to SEQ ID NO: 1154

SEQ ID NO: 8026 - DNA, 3287 bp, Homo sapiens
taactccagtcctgacctccatggagtctgtccctggaaggagacaggcatttgagagcaggatagatatgctcaggcaaagaggcttctaggttgaagggtcccagagggaaaggcctgttaacaatgtggttctctctatgcaaatcatatagcaccttattaagagctcacgtattccagcacgtagttggctttactctcccaggtggcttcctatgcactggagaggaaggcagtttgtttaggggaggggccctagaaaactgttaaggaggcaggagctggaggagcagcaagcagaggagaggggaagttggctggaatgaagccaaagcaaattggaattgcatcagatggaatttttgtgcggggaaggacagacagcagttaggaggaaaagcacaaagtccaggtttaaatatattatgcagcagcggggagcagtgaccccagaagtcttgcacctgggctgtgggataggttccagccccttctctattgtttctagggcgaactttgcgttgcaaggctttctacagtgtcaatggctctgtgtactgtgaggaagattatctgttttcagggtttcaggaggcagctgagaaatgctgtgtctgtggtcacttgattttggagaagatcctacaagcaatggggaagtcctatcatccaggctgtttccgatgcattgtttgcaacaagtgcctggatggcatccccttcacagtggacttctccaaccaagtatactgtgtcaccgactaccacaaaaattatgctcctaagtgtgcagcctgtggccaacccatcctcccctctgagggctgtgaggacatcgtgagggtgatatccatggaccgggattatcactttgagtgctaccactgtgaggactgccggatgcagctgagtgatgaggaaggctgctgctgtttccctctggatgggcacttgctctgccatggttgccacatgcagcggctcaatgcccgacaaccccctgccaactatatctgagctgcaatcactgctgctgctgtcaccctgcagacaaactgctgtggccagtgggcccctctgaggccagccaaggcaaagaatgcactctgcaggcctggcagaagagtcctctggggaggaccccaagggccggagacccaaagatcatgatattccaaatggattgtggaagagaaaccttatatttaccagggtgggggcgactggcctttttcccatgtgtgcagtctgagcttaggcacacacaggagggttccaggactttctgaacatctgattctgtatcttcagtatatatattttgtttgttttagagatgggatctcaccatgttgcccaggctagtcttgaactcctgggctcgaatgatcctcccaccttggcctcccaaagtgctgggattataggcgtaagccactgtgtctggcctagtgtatgattatgcatgagtcacgcaatgttctggtcctggattccaggagtagaggacctagctttaaatcaattagtttcagctaaactgactagaaccaaatcaaagtgtaattctccctccagctcccccaaaccccagagttttggggttgtggttgatgcagtgtgggatgtccctgagaggtagcaagtctagggtggtgagttcctgctaggcaaccaaatttaagctcctcactttttgtgacacatggtgtcagatatggggtcccgcacctatatctggatgaagaggtagaaactctggacctcattaatgagttatttcttggccttcttctaaggactaggagagctccttatctgtctgagaatggggaccagctctgagtggggttgctgcctgtattccctgtttctcaggaacttacatgggtctggggaggctaggtaggtgattgtacgtggttgctcttctccttggctgggggaggtaatgagcagatctctgtgggtgtggagcttgttggggggatgtctaggaagcttcagcttagccacattcccaagtttaggtgcactgagccatatagcccagtgtatgcatgtgtgggtgtgttcatgcacacacacactctctctcttgtctctctgtctctctctcactctttcttactctcttctcaggtcacttgtacacttggtttcctagtagaagctcacttgccacctctcagaggggtcccggattgcatccatcacaatcccaaaactagagttggggggaactggagggagcaaaacactgatttgatactagtcagtttgcttgaaactagttcacctaaagctagatctcttaaaaccaatttactgaaaacttgtttgcttaaagttaatgacttaatgactaatttgccaaaagctcaattcctattttggtgtgtttatatccatttaggtgtcctattcttttttgtcatgctttggatatttcaaggatttatatctattcatccaagagtacttctgagctattatcagcaacataaatttatcaaatttgcagcactttgtaaatgatgagattgcttcctacctttatggatgtctttttctatgttatctaccattcaaaaacttttttaaaaagtttaaagtttctagcaataaatacaattggtacagacattttgtgtatcatttttttgtttcttaatccaatattcctttacaaattaaatgccttgaaaaatataatggagttcaatgtgattttgatgctttggtctaacttctacattcctactgttaaaaaggccagtatatcttaaacaaatgaataggcatgaggcatattcagttgacttacaatgaaaagttatacagacaacagtaataactaaaagggtgaatctgctaaatccttttgaaatgctgcagatttgataaatatttattttagactaattggttttaggtgaattggttttaggcaaattaatttagtaatctttgatctttagtcttcattttctgtcactcagtgagtttcttactggaaatgatgactcctgacaacagaatttccacatttgggggctattctaaggtgactatgccagccaacctgggaaatacataaaagagatctctgagtgagagggaaagaggtcagatttatacaactgagcgccagaggggaaaatgcaccttgttggagtgagaaatgttctgaaactgaattacttcttgtacagctgagatagcttcttctgaactattattaaataagtgaatacaaaggccctatgatgggaaatccagac

SEQ ID NO: 8027 - protein, 121 aa, Homo sapiens; identical to SEQ ID NO: 1156

SEQ ID NO: 8028 - DNA, 3383 bp, Homo sapiens
tccggccaggcagacaaaagtttgggagagaagttcggtctgtggctagcgtgagagctaggggggcgggggccggggagagtggggcagtcgggcgagtcgacgcgtgaacagatagacctgcggactggacagccgcggccagagaccctgctagccccgctcagccccagatgcgcggggggacgcagcccctcccgctgggggatgctgtgggattcctggcgcagggcatccaggccgcccgctaagcccctgtgcctcccctgtgcccctggggaaccagagtccggctgcagggaaagagaaccggccgccgagacgccgcagggtgccaggcggggagggggcgagaggccccaggcccgagggcatggagcggttaggagagaaagccagtcgcctgctggagaagttcggccgcagaaagggtgaatctagccggtctgggtctgacgggacccccgggccgggcaaggggcgcctaagtgggttggggggacctaggaagtcagggccccgaggagctactgggggacctggggatgagccgttggagccggcccgggagcaaggttccctggacgctgagcgaaatcagcgcggctcctttgaggcgccgcgctacgaaggctcttttcccgcggggccgccgcccacccgggccttgcctctacctcagtcgttgccccccgattttcggctggagcccacggccccggccctcagcccccgctctagcttcgccagtagctcggccagcgacgcgagcaagccgtccagcccccggggcagcctgctgctggacggggcgggggctggcggagctggaggtagccggccctgcagcaatcgcaccagcggcatcagcatgggctacgaccagcgccacgggagccccttgccagcggggccgtgcctgtttggcccacccctggccggagcaccggcaggctattctcccggaggggtcccgtccgcctacccggagctccacgccgccctggaccgattgtacgctcagcggcccgcggggttcggctgccaggaaagccgccactcgtatcccccggccctgggcagccctggagctctagccggggccggagtgggagcggcggggcccttggagagacggggggcgcaacccggacgacactctgtgaccggctacggggactgcgccgtgggcgcccggtaccaggacgagctaacagctttgcttcgcctgacggtgggcaccggtgggcgagaagccggagcccgcggagaaccctcggggattgagccgtcgggtctggaggagccaccaggtcctttcgttccggaggccgcccgggcccggatgcgggagccagaggccagggaggactacttcggcacctgtatcaagtgcaacaaaggcatctatgggcagagcaatgcctgccaggccctggacagcctctaccacacccagtgctttgtttgctgctcttgtgggcgaactttgcgttgcaaggctttctacagtgtcaatggctctgtgtactgtgaggaagattatctgttttcagggtttcaggaggcagctgagaaatgctgtgtctgtggtcacttgattttggagaagatcctacaagcaatggggaagtcctatcatccaggctgtttccgatgcattgtttgcaacaagtgcctggatggcatccccttcacagtggacttctccaaccaagtatactgtgtcaccgactaccacaaaaattatgctcctaagtgtgcagcctgtggccaacccatcctcccctctgagggctgtgaggacatcgtgagggtgatatccatggaccgggattatcactttgagtgctaccactgtgaggactgccggatgcagctgagtgatgaggaaggctgctgctgtttccctctggatgggcacttgctctgccatggttgccacatgcagcggctcaatgcccgacaaccccctgccaactatatctgagctgcaatcactgctgctgctgtcaccctgcagacaaactgctgtggccagtgggcccctctgaggccagccaaggcaaagaatgcactctgcaggcctggcagaagagtcctctggggaggaccccaagggccggagacccaaagatcatgatattccaaatggattgtggaagagaaaccttatatttaccagggtgggggcgactggcctttttcccatgtgtgcagtctgagcttaggcacacacaggagggttccaggactttctgaacatctgattctgtatcttcagtatatatatagtgtatgattatgcatgagtcacgcaatgttctggtcctggattccaggagtagaggacctagctttaaatcaattagtttcagtttgcttgaaactagttcacctaaagctagatctcttaaaaccaatttactgaaaacttgtttgcttaaagttaatgacttaatgactaatttgccaaaagctcaattcctattttggtgtgtttatatccatttaggtgtcctattcttttttgtcatgctttggatatttcaaggatttatatctattcatccaagagtacttctgagctattatcagcaacataaatttatcaaatttgcagcactttgtaaatgatgagattgcttcctacctttatggatgtctttttctatgttatctaccattcaaaaacttttttaaaaagtttaaagtttctagcaataaatacaattggtacagacattttgtgtatcatttttttgtttcttaatccaatattcctttacaaattaaatgccttgaaaaatataatggagttcaatgtgattttgatgctttggtctaacttctacattcctactgttaaaaaggccagtatatcttaaacaaatgaataggcatgaggcatattcagttgacttacaatgaaaagttatacagacaacagtaataactaaaagggtgaatctgctaaatccttttgaaatgctgcagatttgataaatatttattttagactaattggttttaggtgaattggttttaggcaaattaatttagtaatctttgatctttagtcttcattttctgtcactcagtgagtttcttactggaaatgatgactcctgacaacagaatttccacatttgggggctattctaaggtgactatgccagccaacctgggaaatacataaaagagatctctgagtgagagggaaagaggtcagatttatacaactgagcgccagaggggaaaatgcaccttgttggagtgagaaatgttctgaaactgaattacttcttgtacagctgagatagcttcttctgaactattattaaataagtgaatacaaaggccctatgatgggaaatccagac

SEQ ID NO: 8029 - protein, 538 aa, Homo sapiens; identical to SEQ ID NO: 1154

SEQ ID NO: 8030 - DNA, 4260 bp, Homo sapiens
agatccggccaggcagacaaaagtttgggagagaagttcggtctgtggctagcgtgagagctaggggggcgggggccggggagagtggggcagtcgggcgagtcgacgcgtgaacagatagacctgcggactggacagccgcggccagagaccctgctagccccgctcagccccagatgcgcggggggacgcagcccctcccgctgggggatgctgtgggattcctggcgcagggcatccaggccgcccgctaagcccctgtgcctcccctgtgcccctggggaaccagagtccggctgcagggaaagagaaccggccgccgagacgccgcagggtgccaggcggggagggggcgagaggccccaggcccgagggcatggagcggttaggagagaaagccagtcgcctgctggagaagttcggccgcagaaagggtgaatctagccggtctgggtctgacgggacccccgggccgggcaaggggcgcctaagtgggttggggggacctaggaagtcagggccccgaggagctactgggggacctggggatgagccgttggagccggcccgggagcaaggttccctggacgctgagcgaaatcagcgcggctcctttgaggcgccgcgctacgaaggctcttttcccgcggggccgccgcccacccgggccttgcctctacctcagtcgttgccccccgattttcggctggagcccacggccccggccctcagcccccgctctagcttcgccagtagctcggccagcgacgcgagcaagccgtccagcccccggggcagcctgctgctggacggggcgggggctggcggagctggaggtagccggccctgcagcaatcgcaccagcggcatcagcatgggctacgaccagcgccacgggagccccttgccagcggggccgtgcctgtttggcccacccctggccggagcaccggcaggctattctcccggaggggtcccgtccgcctacccggagctccacgccgccctggaccgattgtacgctcagcggcccgcggggttcggctgccaggaaagccgccactcgtatcccccggccctgggcagccctggagctctagccggggccggagtgggagcggcggggcccttggagagacggggggcgcaacccggacgacactctgtgaccggctacggggactgcgccgtgggcgcccggtaccaggacgagctaacagctttgcttcgcctgacggtgggcaccggtgggcgagaagccggagcccgcggagaaccctcggggattgagccgtcgggtctggaggagccaccaggtcctttcgttccggaggccgcccgggcccggatgcgggagccagaggccagggaggactacttcggcacctgtatcaagtgcaacaaaggcatctatgggcagagcaatgcctgccaggccctggacagcctctaccacacccagtgctttgtttgctgctcttgtgggcgaactttgcgttgcaaggctttctacagtgtcaatggctctgtgtactgtgaggaagattatctgttttcagggtttcaggaggcagctgagaaatgctgtgtctgtggtcacttgattttggagaagatcctacaagcaatggggaagtcctatcatccaggctgtttccgatgcattgtttgcaacaagtgcctggatggcatccccttcacagtggacttctccaaccaagtatactgtgtcaccgactaccacaaaaattatgctcctaagtgtgcagcctgtggccaacccatcctcccctctgagggctgtgaggacatcgtgagggtgatatccatggaccgggattatcactttgagtgctaccactgtgaggactgccggatgcagctgagtgatgaggaaggctgctgctgtttccctctggatgggcacttgctctgccatggttgccacatgcagcggctcaatgcccgacaaccccctgccaactatatctgagctgcaatcactgctgctgctgtcaccctgcagacaaactgctgtggccagtgggcccctctgaggccagccaaggcaaagaatgcactctgcaggcctggcagaagagtcctctggggaggaccccaagggccggagacccaaagatcatgatattccaaatggattgtggaagagaaaccttatatttaccagggtgggggcgactggcctttttcccatgtgtgcagtctgagcttaggcacacacaggagggttccaggactttctgaacatctgattctgtatcttcagtatatatattttgtttgttttagagatgggatctcaccatgttgcccaggctagtcttgaactcctgggctcgaatgatcctcccaccttggcctcccaaagtgctgggattataggcgtaagccactgtgtctggcctagtgtatgattatgcatgagtcacgcaatgttctggtcctggattccaggagtagaggacctagctttaaatcaattagtttcagctaaactgactagaaccaaatcaaagtgtaattctccctccagctcccccaaaccccagagttttggggttgtggttgatgcagtgtgggatgtccctgagaggtagcaagtctagggtggtgagttcctgctaggcaaccaaatttaagctcctcactttttgtgacacatggtgtcagatatggggtcccgcacctatatctggatgaagaggtagaaactctggacctcattaatgagttatttcttggccttcttctaaggactaggagagctccttatctgtctgagaatggggaccagctctgagtggggttgctgcctgtattccctgtttctcaggaacttacatgggtctggggaggctaggtaggtgattgtacgtggttgctcttctccttggctgggggaggtaatgagcagatctctgtgggtgtggagcttgttggggggatgtctaggaagcttcagcttagccacattcccaagtttaggtgcactgagccatatagcccagtgtatgcatgtgtgggtgtgttcatgcacacacacactctctctcttgtctctctgtctctctctcactctttcttactctcttctcaggtcacttgtacacttggtttcctagtagaagctcacttgccacctctcagaggggtcccggattgcatccatcacaatcccaaaactagagttggggggaactggagggagcaaaacactgatttgatactagtcagtttgcttgaaactagttcacctaaagctagatctcttaaaaccaatttactgaaaacttgtttgcttaaagttaatgacttaatgactaatttgccaaaagctcaattcctattttggtgtgtttatatccatttaggtgtcctattcttttttgtcatgctttggatatttcaaggatttatatctattcatccaagagtacttctgagctattatcagcaacataaatttatcaaatttgcagcactttgtaaatgatgagattgcttcctacctttatggatgtctttttctatgttatctaccattcaaaaacttttttaaaaagtttaaagtttctagcaataaatacaattggtacagacattttgtgtatcatttttttgtttcttaatccaatattcctttacaaattaaatgccttgaaaaatataatggagttcaatgtgattttgatgctttggtctaacttctacattcctactgttaaaaaggccagtatatcttaaacaaatgaataggcatgaggcatattcagttgacttacaatgaaaagttatacagacaacagtaataactaaaagggtgaatctgctaaatccttttgaaatgctgcagatttgataaatatttattttagactaattggttttaggtgaattggttttaggcaaattaatttagtaatctttgatctttagtcttcattttctgtcactcagtgagtttcttactggaaatgatgactcctgacaacagaatttccacatttgggggctattctaaggtgactatgccagccaacctgggaaatacataaaagagatctctgagtgagagggaaagaggtcagatttatacaactgagcgccagaggggaaaatgcaccttgttggagtgagaaatgttctgaaactgaattacttcttgtacagctgagatagcttcttctgaactattattaaataagtgaatacaaaggccctatgatgggaaatccagac

SEQ ID NO: 8031 - protein, 538 aa, Homo sapiens; identical to SEQ ID NO: 1154

SEQ ID NO: 8032 - DNA, 2648 bp, Homo sapiens
taactccagtcctgacctccatggagtctgtccctggaaggagacaggcatttgagagcaggatagatatgctcaggcaaagaggcttctaggttgaagggtcccagagggaaaggcctgttaacaatgtggttctctctatgcaaatcatatagcaccttattaagagctcacgtattccagcacgtagttggctttactctcccaggtggcttcctatgcactggagaggaaggcagtttgtttaggggaggggccctagaaaactgttaaggaggcaggagctggaggagcagcaagcagaggagaggggaagttggctggaatgaagccaaagcaaattggaattgcatcagatggaatttttgtgcggggaaggacagacagcagttaggaggaaaagcacaaagtccaggtttaaatatattatgcagcagcggggagcagtgaccccagaagtcttgcacctgggctgtgggataggttccagccccttctctattgtttctagggcgaactttgcgttgcaaggctttctacagtgtcaatggctctgtgtactgtgaggaagattatctgttttcagggtttcaggaggcagctgagaaatgctgtgtctgtggtcacttgattttggagaagatcctacaagcaatggggaagtcctatcatccaggctgtttccgatgcattgtttgcaacaagtgcctggatggcatccccttcacagtggacttctccaaccaagtatactgtgtcaccgactaccacaaaaattatgctcctaagtgtgcagcctgtggccaacccatcctcccctctgagggctgtgaggacatcgtgagggtgatatccatggaccgggattatcactttgagtgctaccactgtgaggactgccggatgcagctgagtgatgaggaaggctgctgctgtttccctctggatgggcacttgctctgccatggttgccacatgcagcggctcaatgcccgacaaccccctgccaactatatctgagctgcaatcactgctgctgctgtcaccctgcagacaaactgctgtggccagtgggcccctctgaggccagccaaggcaaagaatgcactctgcaggcctggcagaagagtcctctggggaggaccccaagggccggagacccaaagatcatgatattccaaatggattgtggaagagaaaccttatatttaccagggtgggggcgactggcctttttcccatgtgtgcagtctgagcttaggcacacacaggagggttccaggactttctgaacatctgattctgtatcttcagtatatatattttgtttgttttagagatgggatctcaccatgttgcccaggctagtcttgaactcctgggctcgaatgatcctcccaccttggcctcccaaagtgctgggattataggcgtaagccactgtgtctggcctagtgtatgattatgcatgagtcacgcaatgttctggtcctggattccaggagtagaggacctagctttaaatcaattagtttcagctaaactgactagaaccaaatcaaagtgtaattctccctccagctcccccaaaccccagagttttggggttgtggttgatgcagtgtgggatgtccctgagaggtagcaagtctagggtggtgagttcctgctaggcaaccaaatttaagctcctcactttttgtgacacatggtgtcagatatggggtcccgcacctatatctggatgaagaggtagaaactctggacctcattaatgagttatttcttggccttcttctaaggactaggagagctccttatctgtctgagaatggggaccagctctgagtggggttgctgcctgtattccctgtttctcaggaacttacatgggtctggggaggctaggtaggtgattgtacgtggttgctcttctccttggctgggggaggtaatgagcagatctctgtgggtgtggagcttgttggggggatgtctaggaagcttcagcttagccacattcccaagtttaggtgcactgagccatatagcccagtgtatgcatgtgtgggtgtgttcatgcacacacacactctctctcttgtctctctgtctctctctcactctttcttactctcttctcaggtcacttgtacacttggtttcctagtagaagctcacttgccacctctcagaggggtcccggattgcatccatcacaatcccaaaactagagttggggggaactggagggagcaaaacactgatttgatactagtcagtttgcttgaaactagttcacctaaagctagatctcttaaaaccaatttactgaaaacttgtttgcttaaagttaatgacttaatgactaatttgccaaaagctcaattcctattttggtgtgtttatatccatttaggtgtcctattcttttttgtcatgctttggatatttcaaggatttatatctattcatccaagagtacttctgagctattatcagcaacataaatttatcaaatttgcagcactttgtaaatgatgagattgcttcctacctttatggatgtctttttctatgttatctaccattcaaaaacttttttaaaaagtttaaagtttctagcaataaatacaattggtacagac

SEQ ID NO: 8033 - protein, 121 aa, Homo sapiens; identical to SEQ ID NO: 1156

SEQ ID NO: 8034 - DNA, 3621 bp, Homo sapiens
agatccggccaggcagacaaaagtttgggagagaagttcggtctgtggctagcgtgagagctaggggggcgggggccggggagagtggggcagtcgggcgagtcgacgcgtgaacagatagacctgcggactggacagccgcggccagagaccctgctagccccgctcagccccagatgcgcggggggacgcagcccctcccgctgggggatgctgtgggattcctggcgcagggcatccaggccgcccgctaagcccctgtgcctcccctgtgcccctggggaaccagagtccggctgcagggaaagagaaccggccgccgagacgccgcagggtgccaggcggggagggggcgagaggccccaggcccgagggcatggagcggttaggagagaaagccagtcgcctgctggagaagttcggccgcagaaagggtgaatctagccggtctgggtctgacgggacccccgggccgggcaaggggcgcctaagtgggttggggggacctaggaagtcagggccccgaggagctactgggggacctggggatgagccgttggagccggcccgggagcaaggttccctggacgctgagcgaaatcagcgcggctcctttgaggcgccgcgctacgaaggctcttttcccgcggggccgccgcccacccgggccttgcctctacctcagtcgttgccccccgattttcggctggagcccacggccccggccctcagcccccgctctagcttcgccagtagctcggccagcgacgcgagcaagccgtccagcccccggggcagcctgctgctggacggggcgggggctggcggagctggaggtagccggccctgcagcaatcgcaccagcggcatcagcatgggctacgaccagcgccacgggagccccttgccagcggggccgtgcctgtttggcccacccctggccggagcaccggcaggctattctcccggaggggtcccgtccgcctacccggagctccacgccgccctggaccgattgtacgctcagcggcccgcggggttcggctgccaggaaagccgccactcgtatcccccggccctgggcagccctggagctctagccggggccggagtgggagcggcggggcccttggagagacggggggcgcaacccggacgacactctgtgaccggctacggggactgcgccgtgggcgcccggtaccaggacgagctaacagctttgcttcgcctgacggtgggcaccggtgggcgagaagccggagcccgcggagaaccctcggggattgagccgtcgggtctggaggagccaccaggtcctttcgttccggaggccgcccgggcccggatgcgggagccagaggccagggaggactacttcggcacctgtatcaagtgcaacaaaggcatctatgggcagagcaatgcctgccaggccctggacagcctctaccacacccagtgctttgtttgctgctcttgtgggcgaactttgcgttgcaaggctttctacagtgtcaatggctctgtgtactgtgaggaagattatctgttttcagggtttcaggaggcagctgagaaatgctgtgtctgtggtcacttgattttggagaagatcctacaagcaatggggaagtcctatcatccaggctgtttccgatgcattgtttgcaacaagtgcctggatggcatccccttcacagtggacttctccaaccaagtatactgtgtcaccgactaccacaaaaattatgctcctaagtgtgcagcctgtggccaacccatcctcccctctgagggctgtgaggacatcgtgagggtgatatccatggaccgggattatcactttgagtgctaccactgtgaggactgccggatgcagctgagtgatgaggaaggctgctgctgtttccctctggatgggcacttgctctgccatggttgccacatgcagcggctcaatgcccgacaaccccctgccaactatatctgagctgcaatcactgctgctgctgtcaccctgcagacaaactgctgtggccagtgggcccctctgaggccagccaaggcaaagaatgcactctgcaggcctggcagaagagtcctctggggaggaccccaagggccggagacccaaagatcatgatattccaaatggattgtggaagagaaaccttatatttaccagggtgggggcgactggcctttttcccatgtgtgcagtctgagcttaggcacacacaggagggttccaggactttctgaacatctgattctgtatcttcagtatatatattttgtttgttttagagatgggatctcaccatgttgcccaggctagtcttgaactcctgggctcgaatgatcctcccaccttggcctcccaaagtgctgggattataggcgtaagccactgtgtctggcctagtgtatgattatgcatgagtcacgcaatgttctggtcctggattccaggagtagaggacctagctttaaatcaattagtttcagctaaactgactagaaccaaatcaaagtgtaattctccctccagctcccccaaaccccagagttttggggttgtggttgatgcagtgtgggatgtccctgagaggtagcaagtctagggtggtgagttcctgctaggcaaccaaatttaagctcctcactttttgtgacacatggtgtcagatatggggtcccgcacctatatctggatgaagaggtagaaactctggacctcattaatgagttatttcttggccttcttctaaggactaggagagctccttatctgtctgagaatggggaccagctctgagtggggttgctgcctgtattccctgtttctcaggaacttacatgggtctggggaggctaggtaggtgattgtacgtggttgctcttctccttggctgggggaggtaatgagcagatctctgtgggtgtggagcttgttggggggatgtctaggaagcttcagcttagccacattcccaagtttaggtgcactgagccatatagcccagtgtatgcatgtgtgggtgtgttcatgcacacacacactctctctcttgtctctctgtctctctctcactctttcttactctcttctcaggtcacttgtacacttggtttcctagtagaagctcacttgccacctctcagaggggtcccggattgcatccatcacaatcccaaaactagagttggggggaactggagggagcaaaacactgatttgatactagtcagtttgcttgaaactagttcacctaaagctagatctcttaaaaccaatttactgaaaacttgtttgcttaaagttaatgacttaatgactaatttgccaaaagctcaattcctattttggtgtgtttatatccatttaggtgtcctattcttttttgtcatgctttggatatttcaaggatttatatctattcatccaagagtacttctgagctattatcagcaacataaatttatcaaatttgcagcactttgtaaatgatgagattgcttcctacctttatggatgtctttttctatgttatctaccattcaaaaacttttttaaaaagtttaaagtttctagcaataaatacaattggtacagac

SEQ ID NO: 8035 - protein, 538 aa, Homo sapiens; identical to SEQ ID NO: 1154

SEQ ID NO: 8036 - DNA, 2743 bp, Homo sapiens
tccggccaggcagacaaaagtttgggagagaagttcggtctgtggctagcgtgagagctaggggggcgggggccggggagagtggggcagtcgggcgagtcgacgcgtgaacagatagacctgcggactggacagccgcggccagagaccctgctagccccgctcagccccagatgcgcggggggacgcagcccctcccgctgggggatgctgtgggattcctggcgcagggcatccaggccgcccgctaagcccctgtgcctcccctgtgcccctggggaaccagagtccggctgcagggaaagagaaccggccgccgagacgccgcagggtgccaggcggggagggggcgagaggccccaggcccgagggcatggagcggttaggagagaaagccagtcgcctgctggagaagttcggccgcagaaagggtgaatctagccggtctgggtctgacgggacccccgggccgggcaaggggcgcctaagtgggttggggggacctaggaagtcagggccccgaggagctactgggggacctggggatgagccgttggagccggcccgggagcaaggttccctggacgctgagcgaaatcagcgcggctcctttgaggcgccgcgctacgaaggctcttttcccgcggggccgccgcccacccgggccttgcctctacctcagtcgttgccccccgattttcggctggagcccacggccccggccctcagcccccgctctagcttcgccagtagctcggccagcgacgcgagcaagccgtccagcccccggggcagcctgctgctggacggggcgggggctggcggagctggaggtagccggccctgcagcaatcgcaccagcggcatcagcatgggctacgaccagcgccacgggagccccttgccagcggggccgtgcctgtttggcccacccctggccggagcaccggcaggctattctcccggaggggtcccgtccgcctacccggagctccacgccgccctggaccgattgtacgctcagcggcccgcggggttcggctgccaggaaagccgccactcgtatcccccggccctgggcagccctggagctctagccggggccggagtgggagcggcggggcccttggagagacggggggcgcaacccggacgacactctgtgaccggctacggggactgcgccgtgggcgcccggtaccaggacgagctaacagctttgcttcgcctgacggtgggcaccggtgggcgagaagccggagcccgcggagaaccctcggggattgagccgtcgggtctggaggagccaccaggtcctttcgttccggaggccgcccgggcccggatgcgggagccagaggccagggaggactacttcggcacctgtatcaagtgcaacaaaggcatctatgggcagagcaatgcctgccaggccctggacagcctctaccacacccagtgctttgtttgctgctcttgtgggcgaactttgcgttgcaaggctttctacagtgtcaatggctctgtgtactgtgaggaagattatctgttttcagggtttcaggaggcagctgagaaatgctgtgtctgtggtcacttgattttggagaagatcctacaagcaatggggaagtcctatcatccaggctgtttccgatgcattgtttgcaacaagtgcctggatggcatccccttcacagtggacttctccaaccaagtatactgtgtcaccgactaccacaaaaattatgctcctaagtgtgcagcctgtggccaacccatcctcccctctgagggctgtgaggacatcgtgagggtgatatccatggaccgggattatcactttgagtgctaccactgtgaggactgccggatgcagctgagtgatgaggaaggctgctgctgtttccctctggatgggcacttgctctgccatggttgccacatgcagcggctcaatgcccgacaaccccctgccaactatatctgagctgcaatcactgctgctgctgtcaccctgcagacaaactgctgtggccagtgggcccctctgaggccagccaaggcaaagaatgcactctgcaggcctggcagaagagtcctctggggaggaccccaagggccggagacccaaagatcatgatattccaaatggattgtggaagagaaaccttatatttaccagggtgggggcgactggcctttttcccatgtgtgcagtctgagcttaggcacacacaggagggttccaggactttctgaacatctgattctgtatcttcagtatatatatagtgtatgattatgcatgagtcacgcaatgttctggtcctggattccaggagtagaggacctagctttaaatcaattagtttcagtttgcttgaaactagttcacctaaagctagatctcttaaaaccaatttactgaaaacttgtttgcttaaagttaatgacttaatgactaatttgccaaaagctcaattcctattttggtgtgtttatatccatttaggtgtcctattcttttttgtcatgctttggatatttcaaggatttatatctattcatccaagagtacttctgagctattatcagcaacataaatttatcaaatttgcagcactttgtaaatgatgagattgcttcctacctttatggatgtctttttctatgttatctaccattcaaaaacttttttaaaaagtttaaagtttctagcaataaatacaattggtacaga

SEQ ID NO: 8037 - protein, 538 aa, Homo sapiens; identical to SEQ ID NO: 1154

SEQ ID NO: 8038 - DNA, 1323 bp, Homo sapiens
ctcagttttcttttctgtaaaaacaaaagataggattaaatcagtgattctcaatcatggtagcctagcagatcagctgggaagaactaaaaaacaaaacaaaacaaaaaacagtgtttggatcccatcaccacagattgtgataataggcctggaggagggccaaagcattgatgttttttaaaagctgcctaggtgatcctgatatgcagccagagtgaaacactgctggcctgaatgctctctcaggcacttttcagggtctccgcctccattttacgacttcttcaccgacattacatagcattgttctgggagtatagcagcgggttggatgaggttaatgggagtaataaggagcataatgggcagctggagagctgggactggagggagactgattctcttgctaccccatgagccagatcctacaagcaatggggaagtcctatcatccaggctgtttccgatgcattgtttgcaacaagtgcctggatggcatccccttcacagtggacttctccaaccaagtatactgtgtcaccgactaccacaaaaattatgctcctaagtgtgcagcctgtggccaacccatcctcccctctgaggtcagtatgtctgggttctccttcagggcagccagtgccactgcctttggggaggggatagggacatgctgcctggcctcctgccagaagtggtagtgccaaggaatgtactctgtgaagattcccgtgtgactctgcctcttggggtcaccaccctgaccctaatatccgggcctggacatgtctgaaagcctaactgggcccaggctccatctcttctatcccagtccagaggaggagactttctttgaggtcgaggtcaccagactgcagatgtaggggctggaaaaaggtgggaagaatcctcagcactggtaggaaggggtcagaaatgatttaagctgagtgtaggggatgtgcctatggagagaaaccaaaagccagtgaggaccagatcttattggatccccttgttcccagcctagcctactttatttaggcctcctgtccccttcccttccctttgcttcctgcacaactgagagacgcaggtaaggccagggctgttgtacagagggagtgtgctccatgggtgcagcccagtgaaggagatgagagttctggtaggatttgcagaagcatcttaaaactacaggtgattgcagagagactctgggggcatttgtatgatcttcccatggggtgggaagggttgtatatgagggaaaggtggaggtgaggcaacatgctgctctcatctccatgggggtctgca

SEQ ID NO: 8039 - protein, 95 aa, Homo sapiens
MSQILQAMGKSYHPGCFRCIVCNKCLDGIPFTVDFSNQVYCVTDYHKNYAPKCAACGQPILPSEVSMSGFSFRAASATAFGEGIGTCCLASCQKW

SEQ ID NO: 8040 - DNA, 751 bp, Homo sapiens
ccgccactcgtatcccccggccctgggcagccctggagctctagccggggccggagtgggagcggcggggcccttggagagacggggggcgcaacccggacgacactctgtgaccggctacggggactgcgccgtgggcgcccggtaccaggacgagctaacagctttgcttcgcctgacggtgggcaccggtgggcgagaagccggagcccgcggagaaccctcggggattgagccgtcgggtctggaggagccaccaggtcctttcgttccggaggccgcccgggcccggatgcgggagccagaggccagggaggactacttcggaatcatgctcacatggtcccctctgcacggagccctctgccaagccagatccttttctccatccttggaagtctgcagtggagagaaatcattctataactgaacagctcgtttgactgatgggaaactgaagtcccagagacgatttctgggcctagcctgctttctctagaaagtattttcaagtctgctgctgagcacctgtggactggcatctttgaccgttcatcctacacactgcaacagagatcataccttgcctgtgtagtcttttctccccaacagaaactaagcatctgaatgccagggaccatatcttcgactttctccaggtttccttaggtagtggtgctgtgttaagcacaaaacagatgctcagaaaatatctgttgagtaattaaataaacaagaatggatctgctca

SEQ ID NO: 8041 - protein, 45 aa, Homo sapiens
MREPEAREDYFGIMLTWSPLHGALCQARSFSPSLEVCSGEKSFYN

SEQ ID NO: 8042 - DNA, 1021 bp, Homo sapiens
agggatagctggtgtgcgtgcagcggaaggcgctaactgccctggatgtggagacccgcggactggacgtgagaggcgggcaggggcagttggggcagctgcccctacaacactgaagaattggaataggaaagagtgtgggggtaggggacggggactctttgtctgcagttggaatgcgcggaggggcatggtggaatgtgtcgcgtcccgggaccggacgacaggaggcatgttctgcgctagcaccgtgactttgttcccagcgtggggactgtgggagagatggagagagactggtacagaaatggtgagacaaggagagagccataaagaggaagacagagagaaagaagacaaatgcataaagaggttcagagacgtgtgactgtggagatcgaaggcctggttttagggctagcgaacaccttctccctttggttttggtccacagaagactggtgatacagactccttatcagtgtaattgtggggactggtcaccagctcttgcttgagcttttccagaagaaacttcactactgaaatattccaagaggacttgatgctgccacaaagagaagagaatgaataaagttgtcggctttgtaagagccagacaaacagagatacccagcactaatcaactttgtggcaaatccctccacagcctaagaaggatccctagcagcaatcctcaagagcctcagcagattggagagatgcctctttgattctgtcccagagctaaagattggaataactgtccctccccctctaaacccacagtctgccacaagaacattttaaaccttcctccatgatgggcagcagaactccctgactagtcctccagatccttctcaagcacagaatagagagagcatgatggtgagtgaggatactgtccttcctgcaggtcttcagttccaccacactctcctaagggaaggaagaagccaggcctcaatgctgtacctctctctggaggcagcaggcacaagtggaatggaagtgatgg

SEQ ID NO: 8043 - protein, 65 aa, Homo sapiens
MVECVASRDRTTGGMFCASTVTLFPAWGLWERWRETGTEMVRQGESHKEEDREKEDKCIKRFRDV

SEQ ID NO: 8044 - DNA, 1496 bp, Homo sapiens
gtgtcgcgtcccgggaccggacgacaggaggcatgttctgcgctagcaccgtgactttgttcccagcgtggggactgtgggagagatggagagagactggtacagaaatggtgagacaaggagagagccataaagaggaagacagagagaaagaagacaaatgcataaagaggttcagagacgtgtgactgtggagatcgaaggcctggttttagggctagcgaacaccttctccctttggttttggtccacagaagactggtgatacagagcatcctcgccaggagaggcagagtccatggagcagccgagacagctgtggaagagaaggtgccatgcggagctactgagagagagggaagggcaccccatcactacacacagcaaaaaatgaccttctgccaaagaagctgatggttcaggaagaaaatagagctgactatccctgaaggaaaaggaaacgtggtactgttttgctttatcacaaatacaaacaaaaggtttaaagatggaaagaaaagaacagaaaggaaaaagagtgaaaagccaggaaaagcacctaggaggaatagccctctgctgccatactcacaggattgagcaggggggccgcctcgctggcagccagcgtgcaccctgggagccgcatgtccctctgagttgctgggaagcccaaaggcccaggccccactgaggctgctcccagctgccgcagctcctcaatcaccacctgcacgccgctgcccacgctgtcacactcctcttccacggcagacagagccttaaaggcttccccgggactttccttgagaggcccaggctcctcaggtggggaactatgtgcccggctttccccatcttcatcagggatggacactttcccttgcctcaggtcacccacttcctcctggagacgttttaacaactcattgttggccctggcaagacccagagcagcttcagccaaacccactgccttatcgacccgctggtagataacatgcaggagctgctctgagctctgaacagccaagccatgtccagtcactgtgatgggggtgctgggaggaggattcccaccctgggagcctgtgttgcctccattagtctcactcttacaggcgcagcagcagcatctggcctcgctgccactgggaggggagaagagaatggtggcactgaaggacatggcggatggggcagtaacaaccacgcttacactgctgggccgctccaacaggtaggaagcatcaacttctctggactcactttcctttctcaatgaggatggtcagaggagcccaggccccaagctgtagggtctgtgaaagaagagtaaacaagccatgaagaagcacacagtccatggcggcctctcctcggcctgcagaagggagacaggtgccttctatttgcagatcctgtgctctcctagcacatcacaaatcaaggccttcctgatgaacggtttcagacggtagagagcattccttctg

SEQ ID NO: 8045 - protein, 51 aa, Homo sapiens
MFCASTVTLFPAWGLWERWRETGTEMVRQGESHKEEDREKEDKCIKRFRDV

SEQ ID NO: 8046 - DNA, 452 bp, Homo sapiens
gaacaccttctccctttggttttggtccacagaagactggtgatacagattgcattgtctccctgacctcatctcccctgagaatcagcctctgtttccctggtcaaggccacggcttttctctgatcctgaggagagtttcctaccagagtggaagcagggaggactgaaagcactaggaacagaggggagctatcggattgcatctagaacctgctgtgagcaacatcttcagaattaaccataatgtgttccctcctttcctgtgtccagatgaggaaggagaactttgattcttccttccaattacatccaaaatatccacacaactactaatatttggaagctttgatcctttggggtgaggatgcgagaggaaatcttatgaaatgttgggaggccattaaaggaggcccatgcaagagttggtggtagcaatgggcacaactggg

SEQ ID NO: 8047 - protein, 65 aa, Homo sapiens [sequence omitted]

SEQ ID NO: 8048 - DNA, 2341 bp, Homo sapiens
gcacacacacgaatacaaagagccatacgaccttcggtttcaggtttagctgtgcctcccagtgactataatgacaaggaagctgtaaatgtatttgagttaagcttttgcgagaagcaaagtgacagcatagctgttcaaacattcctgttgaattttggatccacccttaaggagcttgagaaatgaagataaggggccccacgggtgatttctctgggctcctggctggaagattcaggacagctagtttccattacagaggctcatggcccagaccctacagcttggggcctgggctcctctgaccatcctcattgagaaaggaaagtgagtccagagaagttgatgcttcctacctgttggagcggcccagcagtgtaagcgtggttgttactgccccatccgccatgtccttcagtgccaccattctcttctcccctcccagtggcagcgaggccagatgctgctgctgcgcctgtaagagtgagactaatggaggcaacacaggctcccagggtgggaatcctcctcccagcacccccatcacagtgactggacatggcttggctgttcagagctcagagcagctcctgcatgttatctaccagcgggtcgataaggcagtgggtttggctgaagctgctctgggtcttgccagggccaacaatgagttgttaaaacgtctccaggaggaagtgggtgacctgaggcaagggaaagtgtccatccctgatgaagatggggaaagccgggcacatagttccccacctgaggagcctgggcctctcaaggaaagtcccggggaagcctttaaggctctgtctgccgtggaagaggagtgtgacagcgtgggcagcggcgtgcaggtggtgattgaggagctgcggcagctgggagcagcctcagtggggcctgggcctttgggcttcccagcaactcagagggacatgcggctcccagggtgcacgctggctgccagcgaggcggcccccctgctcaatcctctggtggatgattacgtggcctctgagggtgcagtacagcgagttctggtccctgcttatgccaagcaactctcaccagccacacaactggcaatccagcgggcaaccccagagacaggaccagaaaatggaaccaagctgccaccaccccgccctgaggacatgctcaatgccgctgctgcgctggacagtgccttggaagagtcaggccctgggagcactggggagctgagacactctctagggctgaccgtttccccatgcaggaccagaggaagtgggcagaagaactccaggcgcaagcgggatcttgtactctctaaactggtccacaatgtgcataaccacatcaccaatgacaagagattcaatgggtctgaaagcatcaagtcctcttggaatatttcagtagtgaagtttcttctggaaaagctcaagcaagagctggtgaccagtccccacaattacactgataaggagctaaaaggagcctgtgtggcctacttccttactaagaggcgtgagtaccgcaactccctgaacccctttaaaggcctgaaggaaaaagaggagaagaaacttcgaagtcgccgatatcggctttttgccaaccgatccagtatcatgaggcattttggacctgaggaccaacgtctgtggaatgatgtgacagaggaactgatgtcagatgaagaggacagtcttaacgagccaggtgtgtgggtggcccgccctccccgtttccgggcccagcgcctcacagagctctgctaccacctggatgctaactctaagcatggcaccaaagccaaccgtgtgtatgggcctccctcagacagactgccttctgctgaagcccagctccttccaccagaactttacaatcctaatttccaagaagaggaagatgagggaggggatgagaatgcacctggctccccatcttttgaccaaccccacaaaacctgctgtcctgacttgaactcattcattgaaatcaaggtggaaaaggatgaataaaatctacagccaagaataactctggcttccgccatgccccatgtctcagaaataggtggccatggggcttcacaaaataatgagatgctctgtgcagtctgagaaagcaaatttgcctcttttcttaacacagtctctactggggaagcagaacactggtgggataaaaacttatctagaaggggagaaactccctccactgtgaacagtaagccagaatatgcttattcctcagcataaacagtatctcggagaagcctgggatgagaaaatgaggaggatgggtccaagaaacatgaggccttcttgacata

SEQ ID NO: 8049 - protein, 538 aa, Homo sapiens
MSFSATILFSPPSGSEARCCCCACKSETNGGNTGSQGGNPPPSTPITVTGHGLAVQSSEQLLHVIYQRVDKAVGLAEAALGLARANNELLKRLQEEVGDLRQGKVSIPDEDGESRAHSSPPEEPGPLKESPGEAFKALSAVEEECDSVGSGVQVVIEELRQLGAASVGPGPLGFPATQRDMRLPGCTLAASEAAPLLNPLVDDYVASEGAVQRVLVPAYAKQLSPATQLAIQRATPETGPENGTKLPPPRPEDMLNAAAALDSALEESGPGSTGELRHSLGLTVSPCRTRGSGQKNSRRKRDLVLSKLVHNVHNHITNDKRFNGSESIKSSWNISVVKFLLEKLKQELVTSPHNYTDKELKGACVAYFLTKRREYRNSLNPFKGLKEKEEKKLRSRRYRLFANRSSIMRHFGPEDQRLWNDVTEELMSDEEDSLNEPGVWVARPPRFRAQRLTELCYHLDANSKHGTKANRVYGPPSDRLPSAEAQLLPPELYNPNFQEEEDEGGDENAPGSPSFDQPHKTCCPDLNSFIEIKVEKDE

SEQ ID NO: 8050 - DNA, 2180 bp, Homo sapiens
gcacacacacgaatacaaagagccatacgaccttcggtttcaggtttagctgtgcctcccagtgactataatgacaaggaagctgtaaatgtatttgagttaagcttttgcgagaaaccctacagcttggggcctgggctcctctgaccatcctcattgagaaaggaaagtgagtccagagaagttgatgcttcctacctgttggagcggcccagcagtgtaagcgtggttgttactgccccatccgccatgtccttcagtgccaccattctcttctcccctcccagtggcagcgaggccagatgctgctgctgcgcctgtaagagtgagactaatggaggcaacacaggctcccagggtgggaatcctcctcccagcacccccatcacagtgactggacatggcttggctgttcagagctcagagcagctcctgcatgttatctaccagcgggtcgataaggcagtgggtttggctgaagctgctctgggtcttgccagggccaacaatgagttgttaaaacgtctccaggaggaagtgggtgacctgaggcaagggaaagtgtccatccctgatgaagatggggaaagccgggcacatagttccccacctgaggagcctgggcctctcaaggaaagtcccggggaagcctttaaggctctgtctgccgtggaagaggagtgtgacagcgtgggcagcggcgtgcaggtggtgattgaggagctgcggcagctgggagcagcctcagtggggcctgggcctttgggcttcccagcaactcagagggacatgcggctcccagggtgcacgctggctgccagcgaggcggcccccctgctcaatcctctggtggatgattacgtggcctctgagggtgcagtacagcgagttctggtccctgcttatgccaagcaactctcaccagccacacaactggcaatccagcgggcaaccccagagacaggaccagaaaatggaaccaagctgccaccaccccgccctgaggacatgctcaatgccgctgctgcgctggacagtgccttggaagagtcaggccctgggagcactggggagctgagacactctctagggctgaccgtttccccatgcaggaccagaggaagtgggcagaagaactccaggcgcaagcgggatcttgtactctctaaactggtccacaatgtgcataaccacatcaccaatgacaagagattcaatgggtctgaaagcatcaagtcctcttggaatatttcagtagtgaagtttcttctggaaaagctcaagcaagagctggtgaccagtccccacaattacactgataaggagctaaaaggagcctgtgtggcctacttccttactaagaggcgtgagtaccgcaactccctgaacccctttaaaggcctgaaggaaaaagaggagaagaaacttcgaagtcgccgatatcggctttttgccaaccgatccagtatcatgaggcattttggacctgaggaccaacgtctgtggaatgatgtgacagaggaactgatgtcagatgaagaggacagtcttaacgagccaggtgtgtgggtggcccgccctccccgtttccgggcccagcgcctcacagagctctgctaccacctggatgctaactctaagcatggcaccaaagccaaccgtgtgtatgggcctccctcagacagactgccttctgctgaagcccagctccttccaccagaactttacaatcctaatttccaagaagaggaagatgagggaggggatgagaatgcacctggctccccatcttttgaccaaccccacaaaacctgctgtcctgacttgaactcattcattgaaatcaaggtggaaaaggatgaataaaatctacagccaagaataactctggcttccgccatgccccatgtctcagaaataggtggccatggggcttcacaaaataatgagatgctctgtgcagtctgagaaagcaaatttgcctcttttcttaacacagtctctactggggaagcagaacactggtgggataaaaacttatctagaaggggagaaactccctccactgtgaacagtaagccagaatatgcttattcctcagcataaacagtatctcggagaagcctgggatgagaaaatgaggaggatgggtccaagaaacatgaggccttcttgacata

SEQ ID NO: 8051 - protein, 538 aa, Homo sapiens; identical to SEQ ID NO: 8049

SEQ ID NO: 8052 - DNA, 2361 bp, Homo sapiens
gagtcctcctttttgcacacacacgaatacaaagagccatacgaccttcggatgccggaaggtccttctgaatcccttccctgttccttaggttgcactagtcgggggttccatgctggggggcagaaggaatgctctctaccgtctgaaaccgttcatcaggaaggccttgatttgtgatgtgctaggagagcacaggatctgcaaatagaaggcacctgtctcccttctgcaggccgaggagaggccgccatggactgtgtgcttcttcatggcttgtttactcttctttcacagaccctacagcttggggcctgggctcctctgaccatcctcattgagaaaggaaagtgagtccagagaagttgatgcttcctacctgttggagcggcccagcagtgtaagcgtggttgttactgccccatccgccatgtccttcagtgccaccattctcttctcccctcccagtggcagcgaggccagatgctgctgctgcgcctgtaagagtgagactaatggaggcaacacaggctcccagggtgggaatcctcctcccagcacccccatcacagtgactggacatggcttggctgttcagagctcagagcagctcctgcatgttatctaccagcgggtcgataaggcagtgggtttggctgaagctgctctgggtcttgccagggccaacaatgagttgttaaaacgtctccaggaggaagtgggtgacctgaggcaagggaaagtgtccatccctgatgaagatggggaaagccgggcacatagttccccacctgaggagcctgggcctctcaaggaaagtcccggggaagcctttaaggctctgtctgccgtggaagaggagtgtgacagcgtgggcagcggcgtgcaggtggtgattgaggagctgcggcagctgggagcagcctcagtggggcctgggcctttgggcttcccagcaactcagagggacatgcggctcccagggtgcacgctggctgccagcgaggcggcccccctgctcaatcctctggtggatgattacgtggcctctgagggtgcagtacagcgagttctggtccctgcttatgccaagcaactctcaccagccacacaactggcaatccagcgggcaaccccagagacaggaccagaaaatggaaccaagctgccaccaccccgccctgaggacatgctcaatgccgctgctgcgctggacagtgccttggaagagtcaggccctgggagcactggggagctgagacactctctagggctgaccgtttccccatgcaggaccagaggaagtgggcagaagaactccaggcgcaagcgggatcttgtactctctaaactggtccacaatgtgcataaccacatcaccaatgacaagagattcaatgggtctgaaagcatcaagtcctcttggaatatttcagtagtgaagtttcttctggaaaagctcaagcaagagctggtgaccagtccccacaattacactgataaggagctaaaaggagcctgtgtggcctacttccttactaagaggcgtgagtaccgcaactccctgaacccctttaaaggcctgaaggaaaaagaggagaagaaacttcgaagtcgccgatatcggctttttgccaaccgatccagtatcatgaggcattttggacctgaggaccaacgtctgtggaatgatgtgacagaggaactgatgtcagatgaagaggacagtcttaacgagccaggtgtgtgggtggcccgccctccccgtttccgggcccagcgcctcacagagctctgctaccacctggatgctaactctaagcatggcaccaaagccaaccgtgtgtatgggcctccctcagacagactgccttctgctgaagcccagctccttccaccagaactttacaatcctaatttccaagaagaggaagatgagggaggggatgagaatgcacctggctccccatcttttgaccaaccccacaaaacctgctgtcctgacttgaactcattcattgaaatcaaggtggaaaaggatgaataaaatctacagccaagaataactctggcttccgccatgccccatgtctcagaaataggtggccatggggcttcacaaaataatgagatgctctgtgcagtctgagaaagcaaatttgcctcttttcttaacacagtctctactggggaagcagaacactggtgggataaaaacttatctagaaggggagaaactccctccactgtgaacagtaagccagaatatgcttattcctcagcataaacagtatctcggagaagcctgggatgagaaaatgaggaggatgggtccaagaaacatgaggccttcttgacata

SEQ ID NO: 8053 - protein, 538 aa, Homo sapiens; identical to SEQ ID NO: 8049

SEQ ID NO: 8054 - DNA, 2214 bp, Homo sapiens
cggctcgggctccgcgagtcctcctttttgcacacacacgaatacaaagagccatacgaccttcgggtatcctttttccattttttttcctccttaatcttgtgtgtgttttcaaattttttaaaaatagagatctgtagcagtgttgggaccctacagcttggggcctgggctcctctgaccatcctcattgagaaaggaaagtgagtccagagaagttgatgcttcctacctgttggagcggcccagcagtgtaagcgtggttgttactgccccatccgccatgtccttcagtgccaccattctcttctcccctcccagtggcagcgaggccagatgctgctgctgcgcctgtaagagtgagactaatggaggcaacacaggctcccagggtgggaatcctcctcccagcacccccatcacagtgactggacatggcttggctgttcagagctcagagcagctcctgcatgttatctaccagcgggtcgataaggcagtgggtttggctgaagctgctctgggtcttgccagggccaacaatgagttgttaaaacgtctccaggaggaagtgggtgacctgaggcaagggaaagtgtccatccctgatgaagatggggaaagccgggcacatagttccccacctgaggagcctgggcctctcaaggaaagtcccggggaagcctttaaggctctgtctgccgtggaagaggagtgtgacagcgtgggcagcggcgtgcaggtggtgattgaggagctgcggcagctgggagcagcctcagtggggcctgggcctttgggcttcccagcaactcagagggacatgcggctcccagggtgcacgctggctgccagcgaggcggcccccctgctcaatcctctggtggatgattacgtggcctctgagggtgcagtacagcgagttctggtccctgcttatgccaagcaactctcaccagccacacaactggcaatccagcgggcaaccccagagacaggaccagaaaatggaaccaagctgccaccaccccgccctgaggacatgctcaatgccgctgctgcgctggacagtgccttggaagagtcaggccctgggagcactggggagctgagacactctctagggctgaccgtttccccatgcaggaccagaggaagtgggcagaagaactccaggcgcaagcgggatcttgtactctctaaactggtccacaatgtgcataaccacatcaccaatgacaagagattcaatgggtctgaaagcatcaagtcctcttggaatatttcagtagtgaagtttcttctggaaaagctcaagcaagagctggtgaccagtccccacaattacactgataaggagctaaaaggagcctgtgtggcctacttccttactaagaggcgtgagtaccgcaactccctgaacccctttaaaggcctgaaggaaaaagaggagaagaaacttcgaagtcgccgatatcggctttttgccaaccgatccagtatcatgaggcattttggacctgaggaccaacgtctgtggaatgatgtgacagaggaactgatgtcagatgaagaggacagtcttaacgagccaggtgtgtgggtggcccgccctccccgtttccgggcccagcgcctcacagagctctgctaccacctggatgctaactctaagcatggcaccaaagccaaccgtgtgtatgggcctccctcagacagactgccttctgctgaagcccagctccttccaccagaactttacaatcctaatttccaagaagaggaagatgagggaggggatgagaatgcacctggctccccatcttttgaccaaccccacaaaacctgctgtcctgacttgaactcattcattgaaatcaaggtggaaaaggatgaataaaatctacagccaagaataactctggcttccgccatgccccatgtctcagaaataggtggccatggggcttcacaaaataatgagatgctctgtgcagtctgagaaagcaaatttgcctcttttcttaacacagtctctactggggaagcagaacactggtgggataaaaacttatctagaaggggagaaactccctccactgtgaacagtaagccagaatatgcttattcctcagcataaacagtatctcggagaagcctgggatgagaaaatgaggaggatgggtccaagaaacatgaggccttcttgacata

SEQ ID NO: 8055 - protein, 538 aa, Homo sapiens; identical to SEQ ID NO: 8049

SEQ ID NO: 8056 - DNA, 2165 bp, Homo sapiens
atccgggagggcgtccggggaggggcggggcttgccggctcgggctccgcgagtcctcctttttgcacacacacgaatacaaagagccatacgaccttcggaccctacagcttggggcctgggctcctctgaccatcctcattgagaaaggaaagtgagtccagagaagttgatgcttcctacctgttggagcggcccagcagtgtaagcgtggttgttactgccccatccgccatgtccttcagtgccaccattctcttctcccctcccagtggcagcgaggccagatgctgctgctgcgcctgtaagagtgagactaatggaggcaacacaggctcccagggtgggaatcctcctcccagcacccccatcacagtgactggacatggcttggctgttcagagctcagagcagctcctgcatgttatctaccagcgggtcgataaggcagtgggtttggctgaagctgctctgggtcttgccagggccaacaatgagttgttaaaacgtctccaggaggaagtgggtgacctgaggcaagggaaagtgtccatccctgatgaagatggggaaagccgggcacatagttccccacctgaggagcctgggcctctcaaggaaagtcccggggaagcctttaaggctctgtctgccgtggaagaggagtgtgacagcgtgggcagcggcgtgcaggtggtgattgaggagctgcggcagctgggagcagcctcagtggggcctgggcctttgggcttcccagcaactcagagggacatgcggctcccagggtgcacgctggctgccagcgaggcggcccccctgctcaatcctctggtggatgattacgtggcctctgagggtgcagtacagcgagttctggtccctgcttatgccaagcaactctcaccagccacacaactggcaatccagcgggcaaccccagagacaggaccagaaaatggaaccaagctgccaccaccccgccctgaggacatgctcaatgccgctgctgcgctggacagtgccttggaagagtcaggccctgggagcactggggagctgagacactctctagggctgaccgtttccccatgcaggaccagaggaagtgggcagaagaactccaggcgcaagcgggatcttgtactctctaaactggtccacaatgtgcataaccacatcaccaatgacaagagattcaatgggtctgaaagcatcaagtcctcttggaatatttcagtagtgaagtttcttctggaaaagctcaagcaagagctggtgaccagtccccacaattacactgataaggagctaaaaggagcctgtgtggcctacttccttactaagaggcgtgagtaccgcaactccctgaacccctttaaaggcctgaaggaaaaagaggagaagaaacttcgaagtcgccgatatcggctttttgccaaccgatccagtatcatgaggcattttggacctgaggaccaacgtctgtggaatgatgtgacagaggaactgatgtcagatgaagaggacagtcttaacgagccaggtgtgtgggtggcccgccctccccgtttccgggcccagcgcctcacagagctctgctaccacctggatgctaactctaagcatggcaccaaagccaaccgtgtgtatgggcctccctcagacagactgccttctgctgaagcccagctccttccaccagaactttacaatcctaatttccaagaagaggaagatgagggaggggatgagaatgcacctggctccccatcttttgaccaaccccacaaaacctgctgtcctgacttgaactcattcattgaaatcaaggtggaaaaggatgaataaaatctacagccaagaataactctggcttccgccatgccccatgtctcagaaataggtggccatggggcttcacaaaataatgagatgctctgtgcagtctgagaaagcaaatttgcctcttttcttaacacagtctctactggggaagcagaacactggtgggataaaaacttatctagaaggggagaaactccctccactgtgaacagtaagccagaatatgcttattcctcagcataaacagtatctcggagaagcctgggatgagaaaatgaggaggatgggtccaagaaacatgaggccttcttgacata

SEQ ID NO: 8057 - protein, 538 aa, Homo sapiens; identical to SEQ ID NO: 8049

SEQ ID NO: 8058 - DNA, 802 bp, Homo sapiens
ctttccagatgccggaaggtccttctgaatcccttccctgttccttaggttgcactagtcgggggttccatgctggggggcagaaggaatgctctctaccgtctgaaaccgttcatcaggaaggccttgatttgtgatgtgctaggagagcacaggatctgcaaatagaaggcacctgtctcccttctgcaggccgaggagaggccgccatggactgtgtgcttcttcatggcttgtttactcttctttcacagaccctacagcttggggcctgggctcctctgaccatcctcattgagaaaggaaagtgagtccagagaagttgatgcttcctacctgttggagcggcccagcagtgtaagcgtggttgttactgccccatccgccatgtccttcagtgccaccattctcttctcccctcccagtggcagcgaggccagatgctgctgctgcgcctgtaagagtgagactaatggaggcaacacaggctcccagggtgggaatcctcctcccagcacccccatcacagtgactggacatggcttggctgttcagagctcagagcagctcctgcatgttatctaccagcgggtcgataaggcagtgggtttggctgaagctgctctgggtcttgccagggccaacaatgagttgttaaaacgtctccaggaggaagtgggtgacctgaggcaagggaaagtgtccatccttttgaccaaccccacaaaacctgctgtcctgacttgaactcattcattgaaatcaaggtggaaaaggatgaataaaatctacagccaagaat

SEQ ID NO: 8059 - protein, 119 aa, Homo sapiens
MSFSATILFSPPSGSEARCCCCACKSETNGGNTGSQGGNPPPSTPITVTGHGLAVQSSEQLLHVIYQRVDKAVGLAEAALGLARANNELLKRLQEEVGDLRQGKVSILLTNPTKPAVLT

SEQ ID NO: 8060 - DNA, 2064 bp, Homo sapiens
gagtcctcctttttgcacacacacgaatacaaagagccatacgaccttcggatgccggaaggtccttctgaatcccttccctgttccttaggttgcactagtcgggggttccatgctggggggcagaaggaatgctctctaccgtctgaaaccgttcatcaggaaggccttgatttgtgatgtgctaggagagcacaggatctgcaaatagaaggcacctgtctcccttctgcaggccgaggagaggccgccatggactgtgtgcttcttcatggcttgtttactcttctttcacagaccctacagcttggggcctgggctcctctgaccatcctcattgagaaaggaaagtgagtccagagaagttgatgcttcctacctgttggagcggcccagcagtgtaagcgtggttgttactgccccatccgccatgtccttcagtgccaccattctcttctcccctcccagtggcagcgaggccagatgctgctgctgcgcctgtaagagtgagactaatggaggcaacacaggctcccagggtgggaatcctcctcccagcacccccatcacagtgactggacatggcttggctgttcagagctcagagcagctcctgcatgttatctaccagcgggtcgataaggcagtgggtttggctgaagctgctctgggtcttgccagggccaacaatgagttgttaaaacgtctccaggaggaagtgggtgacctgaggcaagggaaagtgtccatccctgatgaagatggggaaagccgggcacatagttccccacctgaggagcctgggcctctcaaggaaagtcccggggaagcctttaaggctctgtctgccgtggaagaggagtgtgacagcgtgggcagcggcgtgcaggtggtgattgaggagctgcggcagctgggagcagcctcagtggggcctgggcctttgggcttcccagcaactcagagggacatgcggctcccagggtgcacgctggctgccagcgaggcggcccccctgctcaatcctctggtggatgattacgtggcctctgagggtgcagtacagcgagttctggtccctgcttatgccaagcaactctcaccagccacacaactggcaatccagcgggcaaccccagagacaggaccagaaaatggaaccaagctgccaccaccccgccctgaggacatgctcaatgccgctgctgcgctggacagtgccttggaagagtcaggccctgggagcactggggagctgagacactctctagggctgaccgtttccccatgcaggaccagaggaagtgggcagaagaactccaggcgcaagcgggatcttgtactctctaaactggtccacaatgtgcataaccacatcaccaatgacaagagattcaatgggtctgaaagcatcaagtcctcttggaatatttcagtagtgaagtttcttctggaaaagctcaagcaagagctggtgaccagtccccacaattacactgataaggagctaaaaggagcctgtgtggcctacttccttactaagaggcgtgagtaccgcaactccctgaacccctttaaaggcctgaaggaaaaagaggagaagaaacttcgaagtcgccgatatcggctttttgccaaccgatccagtatcatgaggcattttggacctgaggaccaacgtctgtggaatgatgtgacagaggaactgatgtcagatgaagaggacagtcttaacgagccaggtgtgtgggtggcccgccctccccgtttccgggcccagcgcctcacagagctctgctaccacctggatgctaactctaagcatggcaccaaagccaaccgtgtgtatgggcctccctcagacagactgccttctgctgaagcccagctccttccaccagaactttacaatcctaatttccaagaagaggaagatgagggaggggatgagaatgcacctggctccccatcttttgaccaaccccacaaaacctgctgtcctgacttgaactcattcattgaaatcaaggtggaaaaggatgaataaaatctacagccaagaat

SEQ ID NO: 8061 - protein, 538 aa, Homo sapiens; identical to SEQ ID NO: 8049

SEQ ID NO: 8062 - DNA, 644 bp, Homo sapiens
ccaacactaactcctcccaaatatctcccactggaaaaagacaactccaatcgcttctgtgtctccccgctccctccaccaaataaaacctaccccttcttgggcgtggtggctcacacctgtaatcccaacattctgggaggcctcctgctgaggcaggaggattgatgccaccccacccagttaatttttgttatttttgtttgtttttggtaaagattgggtttcgccatgttgcccatgctagtctcgaactcctggactgaaataatcctcctgccctggcttcccaaagtgctaggattacagggatgagccacgttacctggctctacaagtactttttcagcagaagctttcataatacttcagggttagctacaaataacaaaagagagcaaggaaagagaaagcctgggaaataatatttagggaccaaggggcaggcctggcttctgaacataacacctcctcataacaccttagattcctcctcctcgtaacaccttaggtgcaagacctgcataaacagaatgcatgatgctgttctagccctttccttctctcattttcgtttcagactgagagggaaataaacaggcaatttgagataattctatgaatatattgaaggtgagaatagc

SEQ ID NO: 8063 - protein, 32 aa, Homo sapiens
MPPHPVNFCYFCLFLVKIGFRHVAHASLELLD

SEQ ID NO: 8064 - DNA, 1202 bp, Homo sapiens
gcacacacacgaatacaaagagccatacgaccttcgggtatcctttttccattttttttcctccttaatcttgtgtgtgttttcaaattttttaaaaatagagatctgtagcagtgttgggaatgtcttactaccctatcagttaatcctatacattgctcaaggctcaactggaagcttttcttcttttcaggtttagctgtgcctcccagtgactataatgacaaggaagctgtaaatgtatttgagttaagcttttgcgagaagttgcactagtcgggggttccatgctggggggcagaaggaatgctctctaccgtctgaaaccgttcatcaggaaggccttgatttgtgatgtgctaggagagcacaggatctgcaaatagaaggcacctgtctcccttctgcaggccgaggagaggccgccatggactgtgtgcttcttcatggcttgtttactcttctttcacagaccctacagcttggggcctgggctcctctgaccatcctcattgagaaaggaaagtgagtccagagaagttgatgcttcctacctgttggagcggcccagcagtgtaagcgtggttgttactgccccatccgccatgtccttcagtgccaccattctcttctcccctcccagtggcagcgaggccagatgctgctgctgcgcctgtaagagtgagactaatggaggcaacacaggctcccagggtgggaatcctcctcccagcacccccatcacagtgactggacatggcttggctgttcagagctcagagcagctcctgcatgttatctaccagcgggtcgataaggcagtgggtttggctgaagctgctctgggtcttgccagggccaacaatgagttgttaaaacgtctccaggaggaagtgggtgacctgaggcaagggaaagtgtccatccctgatgaagatggggaaagccgggcacatagttccccacctgaggagcctgggcctctcaaggaaagtcccggggaagcctttaaggctctgtctgccgtggaagaggagtgtgacagcgtgggcagcggcgtgcaggtggtgattgaggagctgcggcagctgggagcagcctcagtggggcctgggcctttgggcttcccagcaactcagagggacatgcggctcccagggtgcacgctggctgccagcgaggcggcccccctgctcaatcct

SEQ ID NO: 8065 - protein, 198 aa, Homo sapiens
MSFSATILFSPPSGSEARCCCCACKSETNGGNTGSQGGNPPPSTPITVTGHGLAVQSSEQLLHVIYQRVDKAVGLAEAALGLARANNELLKRLQEEVGDLRQGKVSIPDEDGESRAHSSPPEEPGPLKESPGEAFKALSAVEEECDSVGSGVQVVIEELRQLGAASVGPGPLGFPATQRDMRLPGCTLAASEAAPLLN

SEQ ID NO: 8066 - DNA, 1057 bp, Homo sapiens
gcacacacacgaatacaaagagccatacgaccttcgggtatcctttttccattttttttcctccttaatcttgtgtgtgttttcaaattttttaaaaatagagatctgtagcagtgttggggttgcactagtcgggggttccatgctggggggcagaaggaatgctctctaccgtctgaaaccgttcatcaggaaggccttgatttgtgatgtgctaggagagcacaggatctgcaaatagaaggcacctgtctcccttctgcaggccgaggagaggccgccatggactgtgtgcttcttcatggcttgtttactcttctttcacagaccctacagcttggggcctgggctcctctgaccatcctcattgagaaaggaaagtgagtccagagaagttgatgcttcctacctgttggagcggcccagcagtgtaagcgtggttgttactgccccatccgccatgtccttcagtgccaccattctcttctcccctcccagtggcagcgaggccagatgctgctgctgcgcctgtaagagtgagactaatggaggcaacacaggctcccagggtgggaatcctcctcccagcacccccatcacagtgactggacatggcttggctgttcagagctcagagcagctcctgcatgttatctaccagcgggtcgataaggcagtgggtttggctgaagctgctctgggtcttgccagggccaacaatgagttgttaaaacgtctccaggaggaagtgggtgacctgaggcaagggaaagtgtccatccctgatgaagatggggaaagccgggcacatagttccccacctgaggagcctgggcctctcaaggaaagtcccggggaagcctttaaggctctgtctgccgtggaagaggagtgtgacagcgtgggcagcggcgtgcaggtggtgattgaggagctgcggcagctgggagcagcctcagtggggcctgggcctttgggcttcccagcaactcagagggacatgcggctcccagggtgcacgctggctgccagcgaggcggcccccctgctcaatcct

SEQ ID NO: 8067 - protein, 198 aa, Homo sapiens; identical to SEQ ID NO: 8065

SEQ ID NO: 8068 - DNA, 973 bp, Homo sapiens
gcacacacacgaatacaaagagccatacgaccttcgggttgcactagtcgggggttccatgctggggggcagaaggaatgctctctaccgtctgaaaccgttcatcaggaaggccttgatttgtgatgtgctaggagagcacaggatctgcaaatagaaggcacctgtctcccttctgcaggccgaggagaggccgccatggactgtgtgcttcttcatggcttgtttactcttctttcacagaccctacagcttggggcctgggctcctctgaccatcctcattgagaaaggaaagtgagtccagagaagttgatgcttcctacctgttggagcggcccagcagtgtaagcgtggttgttactgccccatccgccatgtccttcagtgccaccattctcttctcccctcccagtggcagcgaggccagatgctgctgctgcgcctgtaagagtgagactaatggaggcaacacaggctcccagggtgggaatcctcctcccagcacccccatcacagtgactggacatggcttggctgttcagagctcagagcagctcctgcatgttatctaccagcgggtcgataaggcagtgggtttggctgaagctgctctgggtcttgccagggccaacaatgagttgttaaaacgtctccaggaggaagtgggtgacctgaggcaagggaaagtgtccatccctgatgaagatggggaaagccgggcacatagttccccacctgaggagcctgggcctctcaaggaaagtcccggggaagcctttaaggctctgtctgccgtggaagaggagtgtgacagcgtgggcagcggcgtgcaggtggtgattgaggagctgcggcagctgggagcagcctcagtggggcctgggcctttgggcttcccagcaactcagagggacatgcggctcccagggtgcacgctggctgccagcgaggcggcccccctgctcaatcct

SEQ ID NO: 8069 - protein, 198 aa, Homo sapiens; identical to SEQ ID NO: 8065

SEQ ID NO: 8070 - DNA, 569 bp, Homo sapiens
aatttaacaaagtgtccggaggtcgctcactggattgttatgctggtgactgggccttgtttcactgagaaaaaaagatgggaaagggtgacaggacggtgagaaagcaacacaggctcccagggtgggaatcctcctcccagcacccccatcacagtgactggacatggcttggctgttcagagctcagagcagctcctgcatgttatctaccagcgggtcgataaggcagtgggtttggctgaagctgctctgggtcttgccagggccaacaatgagttgttaaaacgtctccaggaggaagtgggtgacctgaggcaagggaaagtgtccatccctgatgaagatggggaaagccgggcacatagttccccacctgaggagcctgggcctctcaaggaaagtcccggggaagcctttaaggctctgtctgccgtggaagaggagtgtgacagcgtgggcagcggcgtgcaggtggtgattgaggagctgcggcagctgggagcagcctcagtggggcctgggcctttgggcttcccagcaactcagagggacatgcggctcccagg

SEQ ID NO: 8071 - protein, 49 aa, Homo sapiens [sequence omitted]

SEQ ID NO: 8072 - DNA, 956 bp, Homo sapiens
agtcacgcccttctcaaagatggccgacctcacttcccttacgcaacatggacgttttcagtcacttcctgtgattttgaggttattctgatccaggactacttgcatgaccaaagccaagatggcaggtacgtccttttagaatttaaggttagtgaagccatctatttccccgacccccttcagtgaaaatggtctttcgcatctggcccttctttttggaggcgtgcttgccagcagtcaaaatggctccattccggaatagatttaataggaagtgaagctgtgacggcgaggcgttgcccggcctatctttgctaggcgttctcagaattagttctttctgcccacactagacatggcgcttgccagcgtgttggagagaccgctaccggtgaaccagcgcgggtttttcggacttgggggtcgtgcagatctgctggatctaggtccagggagtctcagtgatggtctgagcctggccgcgccaggctggggtgtcccagaagagccaggaatcgaaatgcttcatggaacaaccaccctggccttcaagttccgccatggagtcatagttgcagctgactccagggctacagcgggtgcttacattgcctcccagacggtgaagaaggtgatagagatcaacccatacctgctaggcaccatggctgggggcgcagcggattgcagcttctgggaacggctgttggctcggcaatgtcgaatctatgagcttcgaaataaggaacgcatctctgtagcagctgcctccaaactgcttgccaacatggtgtatcagtacaaaggcatggggctgtccatgggcaccatgatctgtggctgggataagagaggccctggttgaaagaagctcaaaggcaagaatgttacttttgaattcccaaagtttcaattgtaaacaaaaatgactaaataaaatatcattcacagtt

SEQ ID NO: 8073 - protein, 169 aa, Homo sapiens
MALASVLERPLPVNQRGFFGLGGRADLLDLGPGSLSDGLSLAAPGWGVPEEPGIEMLHGTTTLAFKFRHGVIVAADSRATAGAYIASQTVKKVIEINPYLLGTMAGGAADCSFWERLLARQCRIYELRNKERISVAAASKLLANMVYQYKGMGLSMGTMICGWDKRGPG

SEQ ID NO: 8074 - DNA, 2536 bp, Homo sapiens
gaccgctctttccgggtttgcgagcggaagtggacgaatttgaatcctgtgggccgttgaatgtggctgctcgcggtcggcgtgccccgacgtacagcgggccgggaaaagtggcactgaggctctggaacttctgcccagctctccttgtaaaatgaatgaaagtaaacctggtgactcacagaaccttgcttgtgttttctgtcgaaaacatgatgactgtcctaataaatacggagaaaagaaaactaaggagaaatggaatctcactgtacattactactgtttgttgatgtcaagtggaatttggcagagaggcaaagaagaagaaggagtttatggttttctaatagaagatatcaggaaggaagtgaatagagcttctaaactgaaatgctgtgtttgcaagaaaaatggtgcttcaattggatgtgttgcaccccgatgtaaacgaagttatcatttcccatgtggacttcagagagaatgtattttccagtttactggcaattttgcgtcattttgttgggaccatcgacctgttcaaataattacatctaataattatagagagtccttaccatgcaccatttgcttggaatttattgagcctattccaagttataacatattacgaagtccttgttgtaagaacgcttggtttcatagagactgtttacaggttcaagcaataaatgcgggagtgtttttctttaggtgtacaatatgcaataatagtgacatctttcagaaagagatgttgagaatgggaattcatattcctgaaaaagatgcttcctgggaattagaggaaaacgcttatcaagagcttctgcagcactatgagcgttgtgatgttcgaagatgtcgttgcaaagaagggcgagactataatgcacctgatagcaaatgggaaataaagcgctgtcagtgttgtggttccagtggcacacatttagcctgctcctcattacggtcatgggagcaaaattgggagtgtttggaatgtaggggtattatctacaattcaggagagttccaaaaagccaaaaaacatgtattacccaattctaataatgtggggattacagattgtttgttggaagagtcatcacctaaattacccagacagtcacctggatcccagagtaaagatctactgaggcaaggcagcaaatttagaagaaatgtatcaacactattaatagagttaggattccaaattaaaaaaaaaactaaaagattgtatatcaacaaagccaatatctggaatagtgccttagatgcattcagaaatcgaaactttaatccttcatatgcaattgaagtagcatatgttattgaaaatgataattttggaagtgagcatcctggatcaaagcaagaatttctgagtctcttaatgcaacatcttgagaactcatcattgtttgaagggtccttgtcaaagaacttgtctctaaattctcaagctctgaaagagaatctttactatgaagctggcaaaatgcttgccatttctttagttcacggtggtccttcacctggtttcttttctaaaaccttgtttaactgccttgtttatggaccagaaaatacccagccaattttagatgatgtttcagactttgatgtggcacagattataatcaggataaatactgcaacaactgtagctgacttaaagtcaataataaatgaatgctataactaccttgagttaattggatgtctcagacttataacgacattaagtgataaatatatgttagtaaaagacatacttggctaccatgtaattcagagagtccacacaccctttgaaagttttaagcagggtctgaaaacccttggtgttttggagaaaattcaggcttatccagaagcattttgtagcatcctgtgtcataaacctgagagtctttctgcaaaaatccttagtgagctttttacagtacacacattacctgatgtgaaagctttggggttttggaacagttacttacaggctgttgaagatggtaaatctacaacaacaatggaagacattcttatttttgcaactggttgcagttccattcctccagctggatttaaacccactccttcaattgagtgtctgcatgtggattttcctgttggaaacaagtgtaataactgtttagcaattcccatcaccaatacatataaagagtttcaagaaaatatggacttcaccataagaaacactctaagactagaaaaggaagaaagttctcattacattggacattaaaatgtttccttgaacaaagagaagcttctttaaaagctgctattgataactctcttttatttcactaaccttttcatcatcactttgaacaaactagttagcttcttgacctaataaaatttatgatatgaatataaaggaatattatagccacttaggctaaaaaaaggttttttttgttaaagcatactagtcaaaattggtgataatttctcattttcttgatatagatacttcataaacctcaatataaatactctc

SEQ ID NO: 8075 - protein, 706 aa, Homo sapiens; identical to SEQ ID NO: 1160

SEQ ID NO: 8076 - DNA, 2603 bp, Homo sapiens
gaccgctctttccgggtttgcgagcggaagtggacgaatttgaatcctgtgggccgttgaatgtggctgctcgcggtcggcgtgccccgacgtacagcgggccgggaaaagtggcactgaggctctggaacttctgcccagctctccttgtaaaatgaatgaaagtaaacctggtgactcacagaaccttgcttgtgttttctgtcgaaaacatgatgactgtcctaataaatacggagaaaagaaaactaaggagaaatggaatctcactgtacattactactgtttgttgatgtcaagtggaatttggcagagaggcaaagaagaagaaggagtttatggttttctaatagaagatatcaggaaggaagtgaatagagcttctaaactgaaatgctgtgtttgcaagaaaaatggtgcttcaattggatgtgttgcaccccgatgtaaacgaagttatcatttcccatgtggacttcagagagaatgtattttccagtttactggcaattttgcgtcattttgttgggaccatcgacctgttcaaataattacatctaataattatagagagtccttaccatgcaccatttgcttggaatttattgagcctattccaagttataacatattacgaagtccttgttgtaagaacgcttggtttcatagagactgtttacaggttcaagcaataaatgcgggagtgtttttctttaggtgtacaatatgcaataatagtgacatctttcagaaagagatgttgagaatgggaattcatattcctgaaaaagatgcttcctgggaattagaggaaaacgcttatcaagagcttctgcagcactatgagcgttgtgatgttcgaagatgtcgttgcaaagaagggcgagactataatgcacctgatagcaaatgggaaataaagcgctgtcagtgttgtggttccagtggcacacatttagcctgctcctcattacggtcatgggagcaaaattgggagtgtttggaatgtaggggtattatctacaattcaggagagttccaaaaagccaaaaaacatgtattacccaattctaataatgtggggattacagattgtttgttggaagagtcatcacctaaattacccagacagtcacctggatcccagagtaaagatctactgaggcaaggcagcaaatttagaagaaatgtatcaacactattaatagagttaggattccaaattaaaaaaaaaactaaaagattgtatatcaacaaagccaatatctggaatagtgccttagatgcattcagaaatcgaaactttaatccttcatatgcaattgaagtagcatatgttattgaaaatgataattttggaagtgagcatcctggatcaaagcaagaatttctgagtctcttaatgcaacatcttgagaactcatcattgtttgaagggtccttgtcaaagaacttgtctctaaattctcaagctctgaaagagaatctttactatgaagctggcaaaatgcttgccatttctttagttcacggtggtccttcacctggtttcttttctaaaaccttgtttaactgccttgtttatggaccagaaaatacccagccaattttagatgatgtttcagactttgatgtggcacagattataatcaggataaatactgcaacaactgtagctgacttaaagtcaataataaatgaatgctataactaccttgagttaattggatgtctcagacttataacgacattaagtgataaatatatgttagtaaaagacatacttggctaccatgtaattcagagagtccacacaccctttgaaagttttaagcagggtctgaaaacccttggtgttttggagaaaattcaggcttatccagaagcattttgtagcatcctgtgtcataaacctgagagtctttctgcaaaaatccttagtgagctttttacagtacacacattacctgatgtgaaagctttggggttttggaacagttacttacaggctgttgaagatggtaaatctacaacaacaatggaagacattcttatttttgcaactggttgcagttccattcctccagctggatttaaacccactccttcaattgagtgtctgcatgtggattttcctgttggaaacaagtgtaataactgtttagcaattcccatcaccaatacatataaagagtttcaagaaaatatggacttcaccataagaaacactctaagactagaaaaggaagaaagttctcattacattggacattaaaatgtttccttgaacaaagagaagcttctttaaaagctgctattgataactctcttttatttcactaaccttttcatcatcactttgaacaaactagttagcttcttgacctaataaaatttatgatatgaatataaaggaatattatagccacttaggctaaaaaaaggttttttttgttaaagcatactagtcaaaattggtgataatttctcattttcttgatatagatacttcataaacctcaatataaatactctcaaaatggttgtatggattttatttaggtatggtagcatggttaataaaagtaaaaactgttttactc

SEQ ID NO: 8077 - protein, 706 aa, Homo sapiens; identical to SEQ ID NO: 1160

SEQ ID NO: 8078 - DNA, 5800 bp, Homo sapiens
gaccgctctttccgggtttgcgagcggaagtggacgaatttgaatcctgtgggccgttgaatgtggctgctcgcggtcggcgtgccccgacgtacagcgggccgggaaaagtggcactgaggctctggaacttctgcccagctctccttgtaaaatgaatgaaagtaaacctggtgactcacagaaccttgcttgtgttttctgtcgaaaacatgatgactgtcctaataaatacggagaaaagaaaactaaggagaaatggaatctcactgtacattactactgtttgttgatgtcaagtggaatttggcagagaggcaaagaagaagaaggagtttatggttttctaatagaagatatcaggaaggaagtgaatagagcttctaaactgaaatgctgtgtttgcaagaaaaatggtgcttcaattggatgtgttgcaccccgatgtaaacgaagttatcatttcccatgtggacttcagagagaatgtattttccagtttactggcaattttgcgtcattttgttgggaccatcgacctgttcaaataattacatctaataattatagagagtccttaccatgcaccatttgcttggaatttattgagcctattccaagttataacatattacgaagtccttgttgtaagaacgcttggtttcatagagactgtttacaggttcaagcaataaatgcgggagtgtttttctttaggtgtacaatatgcaataatagtgacatctttcagaaagagatgttgagaatgggaattcatattcctgaaaaagatgcttcctgggaattagaggaaaacgcttatcaagagcttctgcagcactatgagcgttgtgatgttcgaagatgtcgttgcaaagaagggcgagactataatgcacctgatagcaaatgggaaataaagcgctgtcagtgttgtggttccagtggcacacatttagcctgctcctcattacggtcatgggagcaaaattgggagtgtttggaatgtaggggtattatctacaattcaggagagttccaaaaagccaaaaaacatgtattacccaattctaataatgtggggattacagattgtttgttggaagagtcatcacctaaattacccagacagtcacctggatcccagagtaaagatctactgaggcaaggcagcaaatttagaagaaatgtatcaacactattaatagagttaggattccaaattaaaaaaaaaactaaaagattgtatatcaacaaagccaatatctggaatagtgccttagatgcattcagaaatcgaaactttaatccttcatatgcaattgaagtagcatatgttattgaaaatgataattttggaagtgagcatcctggatcaaagcaagaatttctgagtctcttaatgcaacatcttgagaactcatcattgtttgaagggtccttgtcaaagaacttgtctctaaattctcaagctctgaaagagaatctttactatgaagctggcaaaatgcttgccatttctttagttcacggtggtccttcacctggtttcttttctaaaaccttgtttaactgccttgtttatggaccagaaaatacccagccaattttagatgatgtttcagactttgatgtggcacagattataatcaggataaatactgcaacaactgtagctgacttaaagtcaataataaatgaatgctataactaccttgagttaattggatgtctcagacttataacgacattaagtgataaatatatgttagtaaaagacatacttggctaccatgtaattcagagagtccacacaccctttgaaagttttaagcagggtctgaaaacccttggtgttttggagaaaattcaggcttatccagaagcattttgtagcatcctgtgtcataaacctgagagtctttctgcaaaaatccttagtgagctttttacagtacacacattacctgatgtgaaagctttggggttttggaacagttacttacaggctgttgaagatggtaaatctacaacaacaatggaagacattcttatttttgcaactggttgcagttccattcctccagctggatttaaacccactccttcaattgagtgtctgcatgtggattttcctgttggaaacaagtgtaataactgtttagcaattcccatcaccaatacatataaagagtttcaagaaaatatggacttcaccataagaaacactctaagactagaaaaggaagaaagttctcattacattggacattaaaatgtttccttgaacaaagagaagcttctttaaaagctgctattgataactctcttttatttcactaaccttttcatcatcactttgaacaaactagttagcttcttgacctaataaaatttatgatatgaatataaaggaatattatagccacttaggctaaaaaaaggttttttttgttaaagcatactagtcaaaattggtgataatttctcattttcttgatatagatacttcataaacctcaatataaatactctcaaaatggttgtatggattttatttaggtatggtagcatggttaataaaagtaaaaactgttttactcacattttttgtaaattaggattacatatagaatgccacaatttctctaggtttattcaattttcaaattattcctcattttattttaaagcattaaatagaaaagctaattggttaaattttgttatataaatcagagtcatatattctgggatttgtgttactatgcatacttttctaggatgtcaccaaattagttgtttaaaatgtttttagattactgatttatattaagatgacccacactgcaattagattatgcctagtgggaagtattatataaaaagcagaattaagctgggcacatgtgcttgtaatctcagttataagggaggctgaggtgggagaatcgagatactcagccagcctggcaatgtagcaaagactccatctcaaaaaaaaaaacagaattgcacaaattttctggaatctatggacattccatgagcttaaacacttttgaggtggataacatttagttgaaaatacctaagaaagtgtgtcttctttaaagccttggctttaatcatgggaaattgttgttgttgttgttgttgtttgtatcctatgtttggtattctgtatgtctgatccataatcattttagatatttgaatgatctctgtggattggtaggtttggccatttgaccattatttattatcaagttggttgtatgctaaggtaagttgacgccatagcattatacagttatcttcattgctcttgaatgatatctgttatataagcaatgtataaataaagtaaaaaggatagaatgaaaaacccattctaatgtcaccactcagagataagtaccgtatttctgtgtatccttctataaactctttacttctgtttcctttattttttaactttaataatgctactaaaagacaatacctaaaagtaactgtactaacaaagtgctaacaatgtgaaaatatatagtcccatagtcatgtccccatatttatactcccacagaagaaaaaattggaaaacaaagtctgatgtccttaatctattaacatatttaaatgatataatggttcagttttccatgaaagtaaatcattatgggaagtaaaatgttttaaccatatttttcttaatacacaaagcaggtgtcagctgttgtattctcacccttcttaagaaaaatcattacattattgatattttttaagtaacagaatagatttgaaagagataatatatctcttaataccaaaggaaaactaaaacataattctagtgtacttttctttgttccctcatgtctttttcaatctgtacactaacatacctagcaaatttgttttactttaacttgaaatatttaagaacattaaacaagacatttctttggctttggttgaatttttttgtctcaccaatagtaattgaaagatcaattatcaaagagtttgaatagctaatataaaccccaaagtcaccatacagtttttattccaaatatgttgataaaaagatatttgtttctttatccaccttatttttattacagctaaaaaccaatacaaaccaataaaacctagttaaagctattttctggtttttagttgcaattaatttcccctagggtagaaattaaagctgattaagtcacacacacatactttgttggggtgggggtggcaggtggagaggcagtgtacttgggttagctacaattaaaaacagtatttcaattcctcatttgacttattttatatatagacagggccttagtgataagatggtgtaaataatttaggatattcatgttttaaagtgaagcataaatatttattttgcaaaatgttttctagtttgaaggatgttccattattaccatttttagattaatctgtatggtcaaggaatatcagagaaacctgtaggttatttattttctgcagtgtcattttgtcaaatggttggtattataattgttcttttcttattaattttataaccagtgcataattcttacattagattttaaaaaagaattatgctataaatctttataaatgtgtacatatatttcttaaatattgcaattgcctaaatgttgtatattttaaggctgttttctcttgctcttaatgttgaggaaaactataaattgatctataatgcatctactgttaatggttttggttagtttgatattcattgtttttaaacactttccaatatggaaactttaacaccttttatacaattctctactattcaagatattctttaaaatatctcaccagaaacttacaattttatactttgtaatttttagtttctgtaatttgaggaagtgactttttttgtttgggttaagtaaaaagcctttgattgattaccagcatgagaattcaccttggtttctattttatgcatttgtaaatttttcccctaattatatggaagctattggaacttttgtattcagtgctaaatactaagtcaaggggagtatattaggtaagttttttcagtgactgtgcctttagcattcagtcattataagaaaatgatcagaacaaaatcattacattataaacatgtaattcttttatatagtgattatcatgtactgcattgttactttaaaataagctattaaactagtttttatggttcaagtaatgcaatacaaagtttcatgcttcaagtaatgcaatacaaaacataacccatttaatgatgaattacttgaatgtatattatctgtggtttaggaaaatttggattgtcttgaagagactcagttttcaagttctgattttgaccattatctcttctaattcataaacatatcccagtacctacactatgccaggtattatgctaggtgatcgtttatatgtcagcctatttcccccccttttaaagactgccagattaaccaaaaagcgtgacatttataacaatgttttataaataaataaatgtgtttatgccactaaaggtaaactgcctatttaaactaagtaattttttgggatttaataagattaagattctgacgaaactgaaagatacaagattcctttactctccacatttgagagatcctataagcaagcagttagtgtctgacacccaggaacctatagaaatgagggaatctgtgttaaaactatgtatcctctaatgtaaaatagcttaccagaataaattatttaagcc

SEQ ID NO: 8079 - protein, 706 aa, Homo sapiens; identical to SEQ ID NO: 1160

SEQ ID NO: 8080 - DNA, 1350 bp, Homo sapiens
ggaagtggacgaatttgaatcctgtgggccgttgaatgtggctgctcgcggtcggcgtgccccgacgtacagcgggccgggaaaagtggcactgaggctctggaacttctgcccagctctccttgtaaaatgaatgaaagtaaacctggtgactcacagaaccttgcttgtgttttctgtcgaaaacatgatgactgtcctaataaatacggagaaaagaaaactaaggagaaatggaatctcactgtacattactactgtttgttgatgtcaagtggaatttggcagagaggcaaagaagaagaaggagtttatggttttctaatagaagatatcaggaaggaagtgaatagagcttctaaactgtctggaaattaaggaggatggaaaaataagcagctttattcaagaaggtctacaagggaagcacataagaaacatttattcttttagttgaggcaaagaagtggaggcaattatttttgaagatatcaagaaggtaggagagttaatggtaaaaacagaggttctagggcacaaggaagaaccgtgggagaaaggtgagcatgaatctaaggactacgtgagatgttaaacgtgagatattagtatcataattcctaaacttcctggtgatagtgagcttgtggtaaaaggtggtctctaaaggtccccttatggtttggaactacagattgaatatcccttatccaaaatgcttggaaccagaattttagatttgaaatttttttcagatttaggaatatttgcttaccagttgagcacctctaatctgaaaatccaaaacccaaaatgttccaatgagcatttcctttgagcatcatgttggcactcagaaagtttcctattttgaagcattttggattttagatttttggattaagggatattcaacctgtacttattttcttaaaacatccgaatcctctccaagtatattgtgaacccttgaaaagaagagtctcatttgtgaactcaaactagaattccttgttgtcagttcattgggagagtttcgggttggcaggtattctccagtgacctaggtggtgctcaaaggggtcagcagtaactctgtaatccctgaatcagtgaccattttaattgccgtcttaagggttccaaggtgttttaggtactgttctgtattttgctaatgattgattcatttaataatttttctatttatgtaccactgttacatttcagttagcggcactggtagtatattcatttcctagggctgccatagcaaattggctgcttaaaacaaatttattctctcaccattctggaggccagaattgtaaatcaaagtgtcaaaagggt

SEQ ID NO: 8081 - protein, 82 aa, Homo sapiens
MNESKPGDSQNLACVFCRKHDDCPNKYGEKKTKEKWNLTVHYYCLLMSSGIWQRGKEEEGVYGFLIEDIRKEVNRASKLSGN

SEQ ID NO: 8082 - DNA, 680 bp, Homo sapiens
aagcacatctacaatcaaggagaggggcaggctttaccttttgaaggaagaagtatgaaagtgtatcactgactgatcaagtagagctaaaaaacattcccttcaatttaaaaaatgttcccgactcttaacaccccagttgagaactactgatcttagatgtattaaagtaaaatgaatgaaagtaaacctggtgactcacagaaccttgcttgtgttttctgtcgaaaacatgatgactgtcctaataaatacggagaaaagaaaactaaggagaaatggaatctcactgtacattactactgtttgttgatgtcaagtggaatttggcagagaggcaaagaagaagaaggagtttatggttttctaatagaagatatcaggaaggaagtgaatagagcttctaaactgtctggaaattaaggaggatggaaaaataagcagctttattcaagaaggtctacaagggaagcacataagaaacatttattcttttagttgaggcaaagaagtggaggcaattatttttgaagatatcaagaaggtaggagagttaatggtaaaaacagaggttctagggcacaaggaagaaccgtgggagaaagacctcagttatttgatttaaggactaccctaaatccaggatgatctcaagatccttaacttaattacatctgcaa

SEQ ID NO: 8083 - protein, 82 aa, Homo sapiens; identical to SEQ ID NO: 8081

SEQ ID NO: 8084 - DNA, 587 bp, Homo sapiens
aaatgctgtgtttgcaagaaaaatggtgcttcaattggatgtgttgcaccccgatgtaaacgaagttatcatttcccatgtggacttcagagagaatgtattttccagtttactggcaattttgcgtcattttgttgggaccatcgacctgttcaaataattacatctaataattatagagagtccttaccatgcaccatttgcttggaatttattgagcctattccaagttataacatattacgaagtccttgttgtaagaacgcttggtttcatagagactgtttacaggttcaagcaataaatgcgggagtgtttttctttaggtgtacaatatgcaataatagtgacatctttcagaaagagatgttgagaatgggaattcatattcctgaaaagccaggcatggtggctcacgcctgtaatccctcccctcactttgggaggccgaggcgggcagatcacccaaggtcaggagttcaagaccagccttgccaacatggcgaaaccctgtctctactaaaaaatacaaaaaccagccgggcatggtggcaggcccctgtaatcccagctacttgggaggctga

SEQ ID NO: 8085 - protein, 72 aa, Homo sapiens
MLRMGIHIPEKPGMVAHACNPSPHFGRPRRADHPRSGVQDQPCQHGETLSLLKNTKTSRAWWQAPVIPATWE

SEQ ID NO: 8086 - DNA, 3226 bp, Homo sapiens
gatagtattttgagcagaatagtcatgaaaaacttaggagatttcagcagagattttgaatgaatgaaaagaagtcatgtaaatctctaagaatgttttaggaaaaggaaattgcaagtaaattttctgttaatggattgtttcctatttttaactttctccatctgtacctttaagagctaacctgtatgaaagtgtcttgcacataaatggccaagtatttctttgtttatgctgttcactaaaatattcttgataaaattctgtccatcttttaattctcagctgttactctttttcatgaattctcaggtcatctttcttgcctatctagtactaggtaacttttctctttttttttcttttctttttaagagataaggtctcagtctgtcacccaggctggagtacattggtgtgatcatagctcactgaacctccaactcctgggctcaaaatccttctacctcatcttccagagtagctaggactacaggtgtataccacccacaccaggccttttttttttttctttagaggggggctagctgtgttgcccaggatgttcttgaacttctggcctcaagcaggcctcccacctcagcctccctagtagctagtcttacctagtgctatataatttttcaatgtcagttatttccttttttataaatagtttcacgtagtaaagtggcattatactctggatttcttgaaggcagaaatagacaaatttgttgaactggatgatcagacatttattctagaagaatatttcttggtttacttttactgcacccatatgtactaagaaatttgagtataaattaacaagtatcatttgaaatgtgcatgtcactcaaaagtaaatgagtaaagtggctgtattttctccttcattacagataaatactgcaacaactgtagctgacttaaagtcaataataaatgaatgctataactaccttgagttaattggatgtctcagacttataacgacattaagtgataaatatatgttagtaaaagacatacttggctaccatgtaattcagagagtccacacaccctttgaaagttttaagcagggtctgaaaacccttggtgttttggagaaaattcaggcttatccagaagcattttgtagcatcctgtgtcataaacctgagagtctttctgcaaaaatccttagtgagctttttacagtacacacattacctgatgtgaaagctttggggttttggaacagttacttacaggctgttgaagatggtaaatctacaacaacaatggaagacattcttatttttgcaactggttgcagttccattcctccagctggatttaaacccactccttcaattgagtgtctgcatgtggattttcctgttggaaacaagtgtaataactgtttagcaattcccatcaccaatacatataaagagtttcaagaaaatatggacttcaccataagaaacactctaagactagaaaaggaagaaagttctcattacattggacattaaaatgtttccttgaacaaagagaagcttctttaaaagctgctattgataactctcttttatttcactaaccttttcatcatcactttgaacaaactagttagcttcttgacctaataaaatttatgatatgaatataaaggaatattatagccacttaggctaaaaaaaggttttttttgttaaagcatactagtcaaaattggtgataatttctcattttcttgatatagatacttcataaacctcaatataaatactctcaaaatggttgtatggattttatttaggtatggtagcatggttaataaaagtaaaaactgttttactcacattttttgtaaattaggattacatatagaatgccacaatttctctaggtttattcaattttcaaattattcctcattttattttaaagcattaaatagaaaagctaattggttaaattttgttatataaatcagagtcatatattctgggatttgtgttactatgcatacttttctaggatgtcaccaaattagttgtttaaaatgtttttagattactgatttatattaagatgacccacactgcaattagattatgcctagtgggaagtattatataaaaagcagaattaagctgggcacatgtgcttgtaatctcagttataagggaggctgaggtgggagaatcgagatactcagccagcctggcaatgtagcaaagactccatctcaaaaaaaaaaacagaattgcacaaattttctggaatctatggacattccatgagcttaaacacttttgaggtggataacatttagttgaaaatacctaagaaagtgtgtcttctttaaagccttggctttaatcatgggaaattgttgttgttgttgttgttgtttgtatcctatgtttggtattctgtatgtctgatccataatcattttagatatttgaatgatctctgtggattggtaggtttggccatttgaccattatttattatcaagttggttgtatgctaaggtaagttgacgccatagcattatacagttatcttcattgctcttgaatgatatctgttatataagcaatgtataaataaagtaaaaaggatagaatgaaaaacccattctaatgtcaccactcagagataagtaccgtatttctgtgtatccttctataaactctttacttctgtttcctttattttttaactttaataatgctactaaaagacaatacctaaaagtaactgtactaacaaagtgctaacaatgtgaaaatatatagtcccatagtcatgtccccatatttatactcccacagaagaaaaaattggaaaacaaagtctgatgtccttaatctattaacatatttaaatgatataatggttcagttttccatgaaagtaaatcattatgggaagtaaaatgttttaaccatatttttcttaatacacaaagcaggtgtcagctgttgtattctcacccttcttaagaaaaatcattacattattgatattttttaagtaacagaatagatttgaaagagataatatatctcttaataccaaaggaaaactaaaacataattctagtgtacttttctttgttccctcatgtctttttcaatctgtacactaacatacctagcaaatttgttttactttaacttgaaatatttaagaacattaaacaagacatttctttggc

SEQ ID NO: 8087 - protein, 218 aa, Homo sapiens
MSKVAVFSPSLQINTATTVADLKSIINECYNYLELIGCLRLITTLSDKYMLVKDILGYHVIQRVHTPFESFKQGLKTLGVLEKIQAYPEAFCSILCHKPESLSAKILSELFTVHTLPDVKALGFWNSYLQAVEDGKSTTTMEDILIFATGCSSIPPAGFKPTPSIECLHVDFPVGNKCNNCLAIPITNTYKEFQENMDFTIRNTLRLEKEESSHYIGH

SEQ ID NO: 8088 - DNA, 521 bp, Homo sapiens
cttttactcttttattggtaaattttttcagatggtaaatctacaacaacaatggaagacattcttatttttgcaactggttgcagttccattcctccagctggatttaaacccactccttcaattgagtgtctgcatgtggattttccttaatctatgctttcagccagacagtacacaggcaacagcatcagtatattgaggccattgcaagttcttcctgaacatttcccgcgatttcatcttagtgtgtcacctcaatatgaaaattctggcattgtgtttatgactccaaagtacatctcaacagattcatcaggattaaatgaggttgcagtgagccgagatcacgccattgcactccagcctgggcaacaagagcaaaactccatctgtacttctcagataagtcttttttagagacaagtctatgttacccaggctgctgttgaactcctgggctcaagtgatcctcatgcctcaacttcctgaatagctgggattacaggtgcatgccacag

SEQ ID NO: 8089 - protein, 87 aa, Homo sapiens [sequence omitted]

SEQ ID NO: 8090 - DNA, 2159 bp, Homo sapiens
cgggctttgcttccggggcggtaagggcagccacgtcatccccccgctccgctccccagccgggcagtggctcgtgggagccaagatggcggcggcggcggcagcgacagcagcagcagcagccagtattcgggaaaggcagacaggtactcatttatgacagatttggccaagatataatctctcctctgctatctgtgaaggagctaagagacatgggaatcactctgcatctgcttttacactctgatcgagatcctattccagatgttcctgcagtatactttgtaatgccaactgaagaaaatattgacagaatgtgccaggatcttcgaaatcaactatatgaatcatattatttaaattttatttctgctatttcaagaagtaaactggaagatattgcaaatgcagcgttagcagctagtgcagtaacacaagtagccaaggtttttgaccaatatctcaattttattactttggaagatgatatgtttgtattatgtaatcaaaataaggagcttgtttcatatcgtgccattaacaggccagatatcacagacacggaaatggaaactgttatggacactatagttgacagcctcttctgcttttttgttactctgggtgctgttcctataatcagatgttcaagaggaacagcagcagaaatggtagcagtgaaactagacaagaaacttcgagaaaatctaagagatgcaagaaacagtctttttacaggtgatacacttggagctggccaattcagcttccagaggcccttattagtccttgttgacagaaacatagatttggcaactcctttacatcatacttggacatatcaagcattggtgcacgatgtactggatttccatttaaacagggttaatttggaagaatcttcaggagtggaaaactctccagctggtgctagaccaaagagaaaaaacaagaagtcttatgatttaactccggttgataaattttggcaaaaacataaaggaagtccattcccagaagttgcagaatcagttcagcaagaactagaatcttacagagcacaggaagatgaggtcaaacgacttaaaagcattatgggactagaaggggaagatgaaggagccataagtatgctttctgacaataccgctaagctaacatcagctgttagttctttgccagaactccttgagaaaaaaagacttattgatctccatacaaatgttgccactgctgttttagaacatataaaggcaagaaaattggatgtatattttgaatatgaagaaaaaataatgagcaaaactactctggataaatctcttctagatataatatcagaccctgatgcaggaactccagaagataaaatgaggttgtttcttatctattatataagcacacagcaagcaccttctgaggctgatttggagcaatataaaaaagctttaactgatgcaggatgcaaccttaatcctttacaatatatcaaacagtggaaggcttttaccaagatggcctcagctccggccagctatggcagcactaccactaaaccaatgggtcttttatcacgagtcatgaatacaggatcacagtttgtgatggaaggagtgaagaacctggttttgaaacagcaaaatctacctgttactcgtattttggacaatcttatggagatgaagtcaaaccccgaaactgatgactatagatattttgatcccaaaatgctgcggggcaatgacagctcagttcccagaaataaaaatccattccaagaggccattgtttttgtggtgggaggaggcaactacattgaatatcagaatcttgttgactacataaaggggaaacaaggcaaacacattttatatggctgcagtgagctttttaatgctacacagttcataaaacagttgtcacaacttggacaaaagtaacacagaagaaccttactatgataatctacttggaatgtggataaatgtaaaaagaagaaaagttagaagagcaatatgtttccttctctgtaacagtgtcctaacagtgaaaatcagagttatttgttaatttttaaggaaattatatacttaatatgtattgattaaaagaaacatttcagaaataaaatttcaacattgttcattttctctgat

SEQ ID NO: 8091 - protein, 575 aa, Homo sapiens; identical to SEQ ID NO: 1164

SEQ ID NO: 8092 - DNA, 2059 bp, Homo sapiens
gctttgcttccggggcggtaagggcagccacgtcatccccccgctccgctccccagccgggcagtggctcgtgggagccaagatggcggcggcggcggcagcgacagcagcagcagcagccagtattcgggaaaggcagacagtggctttgaagcgtatgttgaatttcaatgtgcctcatattaaaaacagcacaggagaaccagtatggaaggtactcatttatgacagatttggccaagatataatctctcctctgctatctgtgaaggagctaagagacatgggaatcactctgcatctgcttttacactctgatcgagatcctattccagatgttcctgcagtatactttgtaatgccaactgaagaaaatattgacagaatgtgccaggatcttcgaaatcaactatatgaatcatattatttaaattttatttctgctatttcaagaagtaaactggaagatattgcaaatgcagcgttagcagctagtgcagtaacacaagtagccaaggtttttgaccaatatctcaattttattactttggaagatgatatgtttgtattatgtaatcaaaataaggagcttgtttcatatcgtgccattaacaggccagatatcacagacacggaaatggaaactgttatggacactatagttgacagcctcttctgcttttttgttactctgggtgctgttcctataatcagatgttcaagaggaacagcagcagaaatggtagcagtgaaactagacaagaaacttcgagaaaatctaagagatgcaagaaacagtctttttacaggtgatacacttggagctggccaattcagcttccagaggcccttattagtccttgttgacagaaacatagatttggcaactcctttacatcatacttggacatatcaagcattggtgcacgatgtactggatttccatttaaacagggttaatttggaagaatcttcaggagtggaaaactctccagctggtgctagaccaaagagaaaaaacaagaagtcttatgatttaactccggttgataaattttggcaaaaacataaaggaagtccattcccagaagttgcagaatcagttcagcaagaactagaatcttacagagcacaggaagatgaggtcaaacgacttaaaagcattatgggactagaaggggaagatgaaggagccataagtatgctttctgacaataccgctaagctaacatcagctgttagttctttgccagaactccttgagaaaaaaagacttattgatctccatacaaatgttgccactgctgttttagaacatataaaggcaagaaaattggatgtatattttgaatatgaagaaaaaataatgagcaaaactactctggataaatctcttctagatataatatcagaccctgatgcaggaactccagaagataaaatgaggttgtttcttatctattatataagcacacagcaagcaccttctgaggctgatttggagcaatataaaaaagctttaactgatgcaggatgcaaccttaatcctttacaatatatcaaacagtggaaggcttttaccaagatggcctcagctccggccagctatggcagcactaccactaaaccaatgggtcttttatcacgagtcatgaatacaggatcacagtttgtgatggaaggagtgaagaacctggttttgaaacagcaaaatctacctgttactcgtattttggacaatcttatggagatgaagtcaaaccccgaaactgatgactatagatattttgatcccaaaatgctgcggggcaatgacagctcagttcccagaaataaaaatccattccaagaggccattgtttttgtggtgggaggaggcaactacattgaatatcagaatcttgttgactacataaaggggaaacaaggcaaacacattttatatggctgcagtgagctttttaatgctacacagttcataaaacagttgtcacaacttggacaaaagtaacacagaagaaccttactatgataatctacttggaatgtggataaatgt

SEQ ID NO: 8093 - protein, 642 aa, Homo sapiens; identical to SEQ ID NO: 1162

SEQ ID NO: 8094 - DNA, 2227 bp, Homo sapiens
gctttgcttccggggcggtaagggcagccacgtcatccccccgctccgctccccagccgggcagtggctcgtgggagccaagatggcggcggcggcggcagcgacagcagcagcagcagccagtattcgggaaaggcagacagtggctttgaagcgtatgttgaatttcaatgtgcctcatattaaaaacagcacaggagaaccagtatggaaggtactcatttatgacagatttggccaagatataatctctcctctgctatctgtgaaggagctaagagacatgggaatcactctgcatctgcttttacactctgatcgagatcctattccagatgttcctgcagtatactttgtaatgccaactgaagaaaatattgacagaatgtgccaggatcttcgaaatcaactatatgaatcatattatttaaattttatttctgctatttcaagaagtaaactggaagatattgcaaatgcagcgttagcagctagtgcagtaacacaagtagccaaggtttttgaccaatatctcaattttattactttggaagatgatatgtttgtattatgtaatcaaaataaggagcttgtttcatatcgtgccattaacaggccagatatcacagacacggaaatggaaactgttatggacactatagttgacagcctcttctgcttttttgttactctgggtgctgttcctataatcagatgttcaagaggaacagcagcagaaatggtagcagtgaaactagacaagaaacttcgagaaaatctaagagatgcaagaaacagtctttttacaggtgatacacttggagctggccaattcagcttccagaggcccttattagtccttgttgacagaaacatagatttggcaactcctttacatcatacttggacatatcaagcattggtgcacgatgtactggatttccatttaaacagggttaatttggaagaatcttcaggagtggaaaactctccagctggtgctagaccaaagagaaaaaacaagaagtcttatgatttaactccggttgataaattttggcaaaaacataaaggaagtccattcccagaagttgcagaatcagttcagcaagaactagaatcttacagagcacaggaagatgaggtcaaacgacttaaaagcattatgggactagaaggggaagatgaaggagccataagtatgctttctgacaataccgctaagctaacatcagctgttagttctttgccagaactccttgagaaaaaaagacttattgatctccatacaaatgttgccactgctgttttagaacatataaaggcaagaaaattggatgtatattttgaatatgaagaaaaaataatgagcaaaactactctggataaatctcttctagatataatatcagaccctgatgcaggaactccagaagataaaatgaggttgtttcttatctattatataagcacacagcaagcaccttctgaggctgatttggagcaatataaaaaagctttaactgatgcaggatgcaaccttaatcctttacaatatatcaaacagtggaaggcttttaccaagatggcctcagctccggccagctatggcagcactaccactaaaccaatgggtcttttatcacgagtcatgaatacaggatcacagtttgtgatggaaggagtgaagaacctggttttgaaacagcaaaatctacctgttactcgtattttggacaatcttatggagatgaagtcaaaccccgaaactgatgactatagatattttgatcccaaaatgctgcggggcaatgacagctcagttcccagaaataaaaatccattccaagaggccattgtttttgtggtgggaggaggcaactacattgaatatcagaatcttgttgactacataaaggggaaacaaggcaaacacattttatatggctgcagtgagctttttaatgctacacagttcataaaacagttgtcacaacttggacaaaagtaacacagaagaaccttactatgataatctacttggaatgtggataaatgtaaaaagaagaaaagttagaagagcaatatgtttccttctctgtaacagtgtcctaacagtgaaaatcagagttatttgttaatttttaaggaaattatatacttaatatgtattgattaaaagaaacatttcagaaataaaatttcaacattgttcattttctctgat

SEQ ID NO: 8095 - protein, 642 aa, Homo sapiens; identical to SEQ ID NO: 1162

SEQ ID NO: 8096 - DNA, 419 bp, Homo sapiens
gctccccagccgggcagtggctcgtgggagccaagatggcggcggcggcggcagcgacagcagcagcagcagccagtattcgggaaaggcagacagtggctttgaagcgtatgttgaatttcaatgtgcctcatattaaaaacagcacaggagaaccagtatggaaggtactcatttatgacagatttggccaagatataatctctcctctgctatctgtgaaggagctaagagacatgggaatcactctgcatctgcttttacactctgatcgagatcctattccagatgttcctgcagtatactttgtaatgccaactgaagaaattaaattttatttctgctatttcaagaagtaaactggaagatattgcaaatgcagcgttagcagctagtgcagtaacacaagtagccaaggt

SEQ ID NO: 8097 - protein, 107 aa, Homo sapiens
MAAAAAATAAAAASIRERQTVALKRMLNFNVPHIKNSTGEPVWKVLIYDRFGQDIISPLLSVKELRDMGITLHLLLHSDRDPIPDVPAVYFVMPTEEIKFYFCYFKK

SEQ ID NO: 8098 - DNA, 515 bp, Homo sapiens
cagtggctttgaagcgtatgttgaatttcaatgtgcctcatattaaaaacagcacaggagaaccagtatggaaggtactcatttatgacagatttggccaagatataatctctcctctgctatctgtgaaggagctaagagacatgggaatcactctgcatctgtgagtttttacatatttctaatagtggtattcatttaaagaacatttatagagaaaaatagtgttaggttacagtatttatgtagtattgaacattttttccctgtatcttctttattcaaccccttatttctgggatttaaaaaaatcctcagtctgaggctttataatttcagaatttaaattttctgccttgtggcttttccttagatttggtttaccctctatgtaaaggaaaagaactagtaatcttaaggtctcttccagctctaaaagtgttttgttcctttaatttaaatacacagattctccttgacctacaatggggttacatacttataaacccatcata

SEQ ID NO: 8099 - protein, 49 aa, Homo sapiens
MLNFNVPHIKNSTGEPVWKVLIYDRFGQDIISPLLSVKELRDMGITLHL

SEQ ID NO: 8100 - DNA, 448 bp, Homo sapiens
ttctgtttagtgaaaacaaaggtgtcttttatcacgagtcatgaatacaggatcacagtttgtgatggaaggagtgaagaacctggttttgaaacagcaaaatctacctgttactcgtattttggacaatcttatggagatgaagtcaaaccccgaaactgatgactatagatattttgatcccaaaatgctgcggggcaatgacagctcagttcccagaaataaaaatccattccaagaggccattgtttttgtggtgggaggaggcaactacattgaatatcagaatcttgttgactacataaaggggaaacaaggcaaacacattttatatggctgcagtgagctttttaatgctacacagttcataaaacagttgtcacaacttggacaaaagtaacacagaagaaccttactatgataatctacttggaatgtggataaatgt

SEQ ID NO: 8101 - protein, 119 aa, Homo sapiens
MNTGSQFVMEGVKNLVLKQQNLPVTRILDNLMEMKSNPETDDYRYFDPKMLRGNDSSVPRNKNPFQEAIVFVVGGGNYIEYQNLVDYIKGKQGKHILYGCSELFNATQFIKQLSQLGQK

SEQ ID NO: 8102 - DNA, 1118 bp, Homo sapiens
acaaaaaatacctttttattagaaatgaacgaactcttacatcatttaatctcatacgttttcacgaactttaaaagttactttatttttaaagagaacttttataatccacagagaggaaatgaaaaaaatacagtgggattctggccaggcatggtggctcacgcctgtaatcccagcagtttgggaagctgatcacctaaggtcaggagtttgagaccagcctggccaacatggcgaaaccctgtctctactaaaaatataaaaattagccgggcgtggtggcaagagcctgtattcccagctacttgggaggctgaggcaggaggatcacttgaacccaggaggcagaggctgcagtgagctgagattgcgccactgcactccagcctgggcgacagcgagtctccatgtcaaaaaaaaaaaaaaaacgggattcttgtttgatcaaaacaaaagcttgcagttactagtattaaaagcaaacacccaacaaagtaaaaagcccaaacatgtatttgtactaaaacctgaatacacctatacatttaaagaagcattttacttagaattatattttcctgtggaaacttgagtagtgccaagagtatttacatctttgacatcacctttaccattcacagactacttaatcttagaatgtgtttaattgaaaggtaagcatacttaactgtagaatgatcaggttgttttaatagagaagaactttggtttaatattctaatatttaacaaaatacttttccacagaatctacctgttactcgtattttggacaatcttatggagatgaagtcaaaccccgaaactgatgactatagatattttgatcccaaaatgctgcggggcaatgacagctcagttcccagaaataaaaatccattccaagaggccattgtttttgtggtgggaggaggcaactacattgaatatcagaatcttgttgactacataaaggggaaacaaggcaaacacattttatatggctgcagtgagctttttaatgctacacagttcataaaacagttgtcacaacttggacaaaagtaacacagaagaaccttactatgataatctacttggaatgtggataaatgt

SEQ ID NO: 8103 - protein, 88 aa, Homo sapiens
MEMKSNPETDDYRYFDPKMLRGNDSSVPRNKNPFQEAIVFVVGGGNYIEYQNLVDYIKGKQGKHILYGCSELFNATQFIKQLSQLGQK

SEQ ID NO: 8104 - DNA, 1286 bp, Homo sapiens
acaaaaaatacctttttattagaaatgaacgaactcttacatcatttaatctcatacgttttcacgaactttaaaagttactttatttttaaagagaacttttataatccacagagaggaaatgaaaaaaatacagtgggattctggccaggcatggtggctcacgcctgtaatcccagcagtttgggaagctgatcacctaaggtcaggagtttgagaccagcctggccaacatggcgaaaccctgtctctactaaaaatataaaaattagccgggcgtggtggcaagagcctgtattcccagctacttgggaggctgaggcaggaggatcacttgaacccaggaggcagaggctgcagtgagctgagattgcgccactgcactccagcctgggcgacagcgagtctccatgtcaaaaaaaaaaaaaaaacgggattcttgtttgatcaaaacaaaagcttgcagttactagtattaaaagcaaacacccaacaaagtaaaaagcccaaacatgtatttgtactaaaacctgaatacacctatacatttaaagaagcattttacttagaattatattttcctgtggaaacttgagtagtgccaagagtatttacatctttgacatcacctttaccattcacagactacttaatcttagaatgtgtttaattgaaaggtaagcatacttaactgtagaatgatcaggttgttttaatagagaagaactttggtttaatattctaatatttaacaaaatacttttccacagaatctacctgttactcgtattttggacaatcttatggagatgaagtcaaaccccgaaactgatgactatagatattttgatcccaaaatgctgcggggcaatgacagctcagttcccagaaataaaaatccattccaagaggccattgtttttgtggtgggaggaggcaactacattgaatatcagaatcttgttgactacataaaggggaaacaaggcaaacacattttatatggctgcagtgagctttttaatgctacacagttcataaaacagttgtcacaacttggacaaaagtaacacagaagaaccttactatgataatctacttggaatgtggataaatgtaaaaagaagaaaagttagaagagcaatatgtttccttctctgtaacagtgtcctaacagtgaaaatcagagttatttgttaatttttaaggaaattatatacttaatatgtattgattaaaagaaacatttcagaaataaaatttcaacattgttcattttctctgat

SEQ ID NO: 8105 - protein, 88 aa, Homo sapiens; identical to SEQ ID NO: 8103

SEQ ID NO: 8106 - DNA, 591 bp, Homo sapiens
ttaatgaaacccagttcactacctggctcagcaaaattaaaggacccacccctctaagaaggtgaaggaggtagaattgtaaatacttacctaatagtgcatgtgtgtgtatttcccatacctattttattcataataaaagccatgggtgaaattttcattacggtttttctttattacagctcagttcccagaaataaaaatccattccaagaggccattgtttttgtggtgggaggaggcaactacattgaatatcagaatcttgttgactacataaaggggaaacaaggcaaacacattttatatggctgcagtgagctttttaatgctacacagttcataaaacagttgtcacaacttggacaaaagtaacacagaagaaccttactatgataatctacttggaatgtggataaatgtaaaaagaagaaaagttagaagagcaatatgtttccttctctgtaacagtgtcctaacagtgaaaatcagagttatttgttaatttttaaggaaattatatacttaatatgtattgattaaaagaaacatttcagaaataaaatttcaacattgttcattttctctgat

SEQ ID NO: 8107 - protein, 76 aa, Homo sapiens
MGEIFITVFLYYSSVPRNKNPFQEAIVFVVGGGNYIEYQNLVDYIKGKQGKHILYGCSELFNATQFIKQLSQLGQK

SEQ ID NO: 8108 - DNA, 443 bp, Homo sapiens
tattttattcataataaaagccatgggtgaaattttcattacggtttttctttattacagctcagttcccagaaataaaaatccattccaagaggccattgtttttgtggtgggaggaggcaactacattgaatatcagaatcttgttgactacataaaggtacattttatttagcctttttattctgttgttagatggtttcataggtagaacactagcatactctgatggctatcctgatccttctataacttcttttctaaaaggtagttttaaaatcatgcatatatgatttttaaatgtttattgttttcctattcctgtcacattcatttctggcctaaaattgtacttaatctagaaaacaatgtatcttattgatataatgcactttgcagctacctgtcttaatataacctcaaatgcttagagacctcttccc

SEQ ID NO: 8109 - protein, 50 aa, Homo sapiens
MGEIFITVFLYYSSVPRNKNPFQEAIVFVVGGGNYIEYQNLVDYIKVHFI

SEQ ID NO: 8110 - DNA, 1126 bp, Homo sapiens
agccacaagaatcccaattatatgacccatataccatctcattttgaaaaaaatatgagttgtggcttttgttttatttattctcagagatggccatctaggacatgtattcagccaacaatatttgctcagcttatacatcacagagttgtgttacaaagccatcattcctctgtcctttgatgaatcctcaaattactttgttctagaataaacttttttatattacaaaagaaatctcatgaatttaccttcaggttcacgatacatacaagaaattagcaaatcgctaatagagaagttttggctgttgtgattgggttccaacattgtaactgtgacttttattcctgatgttgacaatgtggaatgagatgtattaacttataaatactgtgttgctcaagtgagactaaaagcacaatccatgccacctgcaccatagcccactttcagcataaagaaactcgaatgtattcttcaagtagtacacatcctacattggaagaatgttgttctaagattttataggtaactgttgctcctgtgaaatttgacagtgagattccttctatttttagtgtaataggaaatggcaccaatagtatgccatagtatatattttgggggacaaaaatactatgctcatttcaccactttattcctctttatttcatgcaattttaggtagatgtgtatactaaaatccaacagtatcccaaagaaagactgttaagaataacaaaaaaactagcatattaatctcttttcttgggaatattgaatatatttcttgttacttgtatctaagttctgactctgatttttacaggggaaacaaggcaaacacattttatatggctgcagtgagctttttaatgctacacagttcataaaacagttgtcacaacttggacaaaagtaacacagaagaaccttactatgataatctacttggaatgtggataaatgtaaaaagaagaaaagttagaagagcaatatgtttccttctctgtaacagtgtcctaacagtgaaaatcagagttatttgttaatttttaaggaaattatatacttaatatgtattgattaaaagaaacatttcagaaataaaatttcaacattg

SEQ ID NO: 8111 - protein, 53 aa, Homo sapiens
MTHIPSHFEKNMSCGFCFIYSQRWPSRTCIQPTIFAQLIHHRVVLQSHHSSVL

SEQ ID NO: 8112 - DNA, 430 bp, Homo sapiens
gtcctgtccagacctccatggtttcccccacttctagctctaagccactagcgccgggtattgttacagttctttccccagcaatcgtttttcccataccaggtccgtacctgttttaattgcctcctgttcactctgtcgttgaggaagtgattcttgacctaggtttatggaaacggccaaacacctgacacccaacactggacagatcgtgtttttggtgtcatatctaagaaattgaggaaccatcagaggggatcattaaaagccaaagaaaaggctttcagttctggaaggatgggcaaactcctactggaaacattattacttatcaaggttttcttagtcgtccatgaaaacaccttatcttggtatagctggatggctttggtttcggctggttcaggtgagtaagtggttttctttctct

SEQ ID NO: 8113 - protein, 38 aa, Homo sapiens
MGKLLLETLLLIKVFLVVHENTLSWYSWMALVSAGSGE

SEQ ID NO: 8114 - DNA, 1793 bp, Homo sapiens
attgtcctagatggcctgctggggaaatggattatgtaattatgaagagctgagatttaacacttatgccagtaatgatttattagatcacttctaaaagccctctctccatctccaagccagcaagtgatacagctaacctggtaactccaaactggatgagctcattccttgagactggaattacaaaattggaacagctcactaataattgaagatgatttgggaaaaccattatccttcctcaggttttacaaggtttttatgactcatttataaggtcctacagctaaaaaaaatcatgctgtatttcagagaagtttaacttgaaaatatttttttcactaattaaaaattcccattataccttatagttgcaattgtatccttattgctgaaagatatccatactacctaccacttctttaaaatttaaaaaattctataaataaaaaatataacaattgcaaatatgtaaataacttccaacataaaacaaaatttatagtaattataagaagttcttttatactaaaaattaagttgtaattatgatagaaataatctgtaaaaggtatttttagcaaaatttattaatacgggtagcaataataatacccaattatatatgcatattgtttgtattttagaacctgtgacaaatgaaaatggttttcctagataagaacgaaactgtgttgggtggctaacaagattgaaactcatctgactttgagaaataaatcaatttggtttgtttatttacaatcgttatttttccttttaccaatacctaagttatttcactgtaaaactttcatagaagaatttcaggaaaggcttgtatttacgtgttatagatgaggtacaccacagtgatttagattaacattctcaaaattctattctctctagggtaaaattaaactgcgggacatagcgcagaagacttgtcacaatttaggaccaacctaccaagacttcttgatctctttccacttcttgcccctcactgtgtttgatttctgccttccagtctgaacttctcactatattccagaaaaggcctgttaaagagatctggtagtcaaaagcaacctcttttttgcttgtgctctctgttatacataagaaaccagtcctgctgcagctccatatttgcattactaatttaatcagttagcgggacacatgctctttataacccaaaaaattgaagcatgaaatttgggagtcatacccatcacccaaatgtggcataacaatgttcttcttccccgcaaagcagtgtccttccccaaagaaattctggggattggcattttcttcatccactcctacaataaatggatgcaagactaaatgaacaaagaaaagccacggggaagataacaatgttatgtcataattcaggatcatctttttctgttttttccccaagccttctggtgaaatttctttcttatttcactcccagtgagtaacacaagagaaaaataaacaacaaaagccagtcaataattataaagtgaatcttaccagtatagagttataagccttgtttttacttcactgataatgttgtcgtgaacactgtttgaataatgaagactaaaggaatgatggcatgcactgtgagttcttgatgtggttgaagcaaaattcccaacaaacagacattttgctatttcattagtgtttatggctgataaataccttgtatgtttgctatactattgtgttagtaacataattttatttttatgtaacactaacaataaatagataaaagc

SEQ ID NO: 8115 - protein, 45 aa, Homo sapiens
MDARLNEQRKATGKITMLCHNSGSSFSVFSPSLLVKFLSYFTPSE

SEQ ID NO: 8116 - DNA, 693 bp, Homo sapiens
agccggaagtgggcagagtttgcacggaggcggagctttattggcaaacctgattggctttttgaggcagaggaagctcacctatggctactgccactacaggtccacagggagtaatgcccggctaccactgatgttcattaagacccaagggttcttcagtcggcttgtggtagatgctgcctggcctgggactcacccttcaggacagtgggctcccttctggcccaaggcaggtccagaattactgtccaggagccaaggctttgaatcagggacctcaagagcccgcttgatgttctaccccactatggctgcgcctgtacctaaggtgcaaaagtcccctttacttttccctctacttttctccagcataaggagtctctccccatagccaccatggctggaaatgtgctgagtctcatttgaagccagctagtctcagagtctcacagaaggcccactgcatacctaggtatcgctggtatcgctggctatttggagcttaagagctcttcaatcctctgacatcttgattgcagcctttgagagaccctgggccagaggatccagctattgccatgcttaaatttccaacccaaatgtaactgtgagataaatgttgttttaagccactaatttttttaattactgtattaattttaacagataatacaataagagttttaaaat

SEQ ID NO: 8117 - protein, 86 aa, Homo sapiens
MFIKTQGFFSRLVVDAAWPGTHPSGQWAPFWPKAGPELLSRSQGFESGTSRARLMFYPTMAAPVPKVQKSPLLFPLLFSSIRSLSP

SEQ ID NO: 8118 - DNA, 1467 bp, Homo sapiens
ctccgtaataagaagcgacgtgtcccactgtcctggctccgtgggtccagtgagattgggcctgggcgctggagctgctgtggctcccgccgcggcggctgccatggaggccatgccagagcccagaactcacgccgggggaggccgagacagccggcggtactcatagatgaggcagcggcggcggcggcggcggcggcagcccgggctctccatgagcaggcggcggcggcgacgggtgcggcggcaccggcagttttcggtccccagggaggatgaagacactgtttgaagagatcaaagcatcaattaaaaataactataaccaagatcgatcattttgtaggcctgttcttccttgggggggtgtttttactatcaaagctggccgcaaagcagtatcctgtacaccactctatgttgaaataagactgaaaaatacctgcaccatagatggattcttgatgttattatatgtcattcttaatgaaaatgaaaacttccctagggaactctctcttcattttggtagagagtttgtagactgttttctttacttaatggacacctacagttttacaactgtgaagctactttggatttgggacaagatggaaaaacagcaatacaaatctgaagtccataaagcttcattaataattgatttgtttgggaatgagcatgataattttacaaaaaatcttgaaaatctcatgtctaccattcaagagagttactgttccaactggcgatgcccaactcgagtgcaggaggatcagcagcgcacaattaatataaatcctccccaagaaattccacatggaaacttgataagactggctgtgaatgagttattctgttccaagattgaactgtgtgaagagcatgggtgtggtggcttaagagaattttcccaacgaattttctgccatggggcacccccttttgttgtcttaaatatgcaacattggaaatctgaagatctggcgtatgtaccctattacttggatttgtctgatcacaagtatttgttggaaggtgccacattatttaacaaagaggaacatcattattctgcagctttccagattggtggacattggatgcactatgatgggctcagaaatgtgaatttaattttgttaaataaacccccagagtttctcctcttgtcatcattggtttatattcgagcaacagagaaataaatatagattgatgctaaaagttgttttccctcctgcccatgctctcccagatgaagggcttttattttgtgtatacttggtatccaagaaaatagttcaactatactagtttcagaagtgtattttcagtgtttaaccccaggtaaatgttttatatagaggatctgtgcaaaaatgtttgtaatttttttatatttcctgagttatttttatatgagcatattttatgttggaataaaatatatcttgtggcctttgt

SEQ ID NO: 8119 - protein, 310 aa, Homo sapiens; identical to SEQ ID NO: 1168

SEQ ID NO: 8120 - DNA, 2915 bp, Homo sapiens
ctccgtaataagaagcgacgtgtcccactgtcctggctccgtgggtccagtgagattgggcctgggcgctggagctgctgtggctcccgccgcggcggctgccatggaggccatgccagagcccagaactcacgccgggggaggccgagacagccggcggtactcatagatgaggcagcggcggcggcggcggcggcggcagcccgggctctccatgagcaggcggcggcggcgacgggtgcggcggcaccggcagttttcggtccccagggaggatgaagacactgtttgaagagatcaaagcatcaattaaaaataactataaccaagatcgatcattttgtaggcctgttcttccttgggggggtgtttttactatcaaagctggccgcaaagcagtatcctgtacaccactctatgttgaaataagactgaaaaatacctgcaccatagatggattcttgatgttattatatgtcattcttaatgaaaatgaaaacttccctagggaactctctcttcattttggtagagagtttgtagactgttttctttacttaatggacacctacagttttacaactgtgaagctactttggatttgggacaagatggaaaaacagcaatacaaatctgaagtccataaagcttcattaataattgatttgtttgggaatgagcatgataattttacaaaaaatcttgaaaatctcatgtctaccattcaagagagttactgttccaactggcgatgcccaactcgagtgcaggaggatcagcagcgcacaattaatataaatcctccccaagaaattccacatggaaacttgataagactggctgtgaatgagttattctgttccaagattgaactgtgtgaagagcatgggtgtggtggcttaagagaattttcccaacgaattttctgccatggggcacccccttttgttgtcttaaatatgcaacattggaaatctgaagatctggcgtatgtaccctattacttggatttgtctgatcacaagtatttgttggaaggtgccacattatttaacaaagaggaacatcattattctgcagctttccagattggtggacattggatgcactatgatgggctcagaaatgtgaatttaattttgttaaataaacccccagagtttctcctcttgtcatcattggtttatattcgagcaacagagaaataaatatagattgatgctaaaagttgttttccctcctgcccatgctctcccagatgaagggcttttattttgtgtatacttggtatccaagaaaatagttcaactatactagtttcagaagtgtattttcagtgtttaaccccaggtaaatgttttatatagaggatctgtgcaaaaatgtttgtaatttttttatatttcctgagttatttttatatgagcatattttatgttggaataaaatatatcttgtggcctttgtattttttatttatatgtacctcaaagatttttacaattctgtctttgaattcaagaaatactttgtcatctgaattctaaatttttctttttggatattcgagtaaaacctaggtaaaagtattttaagtttatataatttaacagttcaaaatatatctgactgtatttctttgccctacctcactataatccaaagtgcactatttgatctagtatggatttgaatgtacaatttatcgatggcttagtttattagttcgatttgcctagtatccctgcagcaattttttaaaatgtctgagaaatttttcagagcttaaactatttctttataatggcaaattacttttaactacttcctaaagtattataaacctgccagtggattttaagtgatagctaagcttccaagcttaattcacgttattacaaataaattatataactatcttaaatgtttatcttataattaaatgtaatttgaaatgctctaatgtattttgcagataaaacaactataaacaatattaggcaactggatgtttactagtgtcggactagcaatagaaatgcactttaaatatatatttaaggggaaatgcgtgcctggaaatacttcttttcctagtgaagttttatattgacacagagaaaagaatacttaaaattttgagtgatgtctactggcttccttgtaagtagtgattgatagcatgcggctttgacttgcaatacaaatcattacgattttatagttatcagaacattacgtttctttataaagaccctaaggtcactcttctttttgcaacttaagggaaaaaatattctcaagggaaaatactttttgaaatttatcaccattttagtgtttacatttcaataaatagttcacttcaggtttgggattgagattagttgcaatatatttagaagctcctacatgacagcacagatcactgccatctgctgaactgctaaagtgcttggtgccatgttgagaaaacttacccaagaatggataaatatgggtgaaacattactgagaatgcctcacgttagcaaatactatgaaaattcttgtttatatatcaaactgatttattttacaaaaaaaaaaaattcaccccaagatttatttagtttcccaagtgtatctgattaggatttaatttagagtaaacttttctggggacacctgattgcatgaactgaagtatacaataacacaaatattacagtaaacataaatggtgtcattaacaaaattattcctaatgcagatttattctttcaggaaatgcactttatttggaatactagtttatcatgaaacaatgacttacctacctcacagggttgttgtgaggattaagatgtttgttaaaatcttgactaccttgaacatgctaataaaaaaacatttttctacctcttttatttgca

SEQ ID NO: 8121 - protein, 310 aa, Homo sapiens; identical to SEQ ID NO: 1168

SEQ ID NO: 8122 - DNA, 360 bp, Homo sapiens
cagatctcctccgggagtggtgggcagctactgtgaaaggcctggttcaaaaacctcacagcggttgttttcagagttgtccctcctgtgtactctcaaagccccagaatgaagcaaagcatcctcccttttcaaactggcactcttccccaaccttgaggaccactaggcactttgtttttaaagccacagttacttttatggagaagtattgttatgaaaaaagggaggcatctgaggagtggaaacagagaaatgagtgactgagatcagtgtcttattttgaccatcttttccaagtgctgcatcctcccaaacacaacatgaactcaacacttaataaagctgcagtcctacgtg

SEQ ID NO: 8123 - protein, 36 aa, Homo sapiens
RSPPGVVGSYCERPGSKTSQRLFSELSLLCTLKAPE

SEQ ID NO: 8124 - DNA, 2175 bp, Homo sapiens
attttaggcgaactgagaattttgtgtgcattttctcctcataagtgatacttaaacggacacagtggaagagctggagtgtctagtgtgagcctgaatgctttggagtgtggaagagatattttttttttttgaaggaataatactattacttttgaatgactcgtgcgaaaagtctaagttatcatttgaagacccaaatttatgcacttcaaatgcaagtattcctaccctgctctgtaccagatggaccacacatccccgacctacatgcttgctaacttaacccacttgcattctgaacaacttctgcagggcttgaatcttcttcgccaacatcacgaactctgtgacatcattcttcgagtaggtgatgttaaaattcatgctcacaaagtggtacttgccagcgtcagcccgtatttcaaagctatgttcactggaaacctttctgaaaaagagaacagtgaggttgagtttcaatgcattgatgaaactgctctccaggccattgtggagtatgcctatacagggactgtttttatttctcaggacacagttgaatctctcctgccagcagcaaacctactccagataaaacttgtcctgaaagaatgttgtgcatttcttgaaagccaacttgatcctggtaattgtattggaatttctcgttttgcagaaacatatggttgccgtgacctttatttggcagccactaaatacatatgccagaattttgaagctgtttgccagactgaagagttttttgagcttacacatgctgacttggatgaaattgtttccaatgactgtttgaatgtagctaccgaagagactgttttttatgcattagagtcttggatcaagtatgatgtacaagaacgccagaaatacttagcacagttactaaacagtgtacgattaccattgttgagtgttaagtttctcactagactatatgaagcaaatcatcttattcgtgatgatcgcacttgtaaacatcttttgaatgaagccctaaagtaccactttatgcctgaacatagactctctcatcagacagtcttgatgacacgacctcgctgtgctcccaaagtactttgtgcagtaggagggaaatctggactctttgcctgtttggatagtgtggagatgtactttcctcagaatgactcttggattggtttggcacccctaaacattcctcgctatgaatttggaatatgcgttttagaccaaaaagtatatgttataggtggtattgcaactaatgtgcgtcctggcgtcactatcagaaaacatgaaaattcagtggaatgctggaatcctgatacaaatacttggacttctctagagagaatgaatgaaagccgaagtactcttggagtagtagtacttgcaggagaactttatgccttaggtggttatgatggacaatcttatttacaatctgtagagaagtacattcccaaaataagaaaatggcaacctgtggcaccaatgacgacaacaagaagttgttttgctgcagcggtattggatggaatgatatatgccattggtgggtatggtcctgcccacatgaacagtgtggagcgttatgatccaagtaaggactcctgggagatggttgcatccatggcagataaaaggattcactttggcgtgggtgtcatgctaggctttatttttgtggtgggtggacataatggagtctcacatttgtccagcattgaaagatacgatcctcatcaaaatcagtggactgtgtgtagaccaatgaaagaacctagaacaggagttggtgctgctgtaatcgataactacctttatgtcgtcggtggtcactcagggtcttcctatctgaatacagtgcagaaatatgatcctatctcagatacgtggctggattcagctggcatgatatactgtcgctgcaactttgggttaactgcactttgacaaatgtgaactctcggaaatagtatggtggtgaaacttgtactgcatgaacatccggatggcccagttttctgaaacccacaagctgcattgctttctttttaacttgaagtagcatgaaggctcaaaagttttgttgggtacttttaattgagaagtagttttggttgctcttgattacacagtaaatcaataatcaaaaagaaaaaagag

SEQ ID NO: 8125 - protein, 585 aa, Homo sapiens
MHFKCKYSYPALYQMDHTSPTYMLANLTHLHSEQLLQGLNLLRQHHELCDIILRVGDVKIHAHKVVLASVSPYFKAMFTGNLSEKENSEVEFQCIDETALQAIVEYAYTGTVFISQDTVESLLPAANLLQIKLVLKECCAFLESQLDPGNCIGISRFAETYGCRDLYLAATKYICQNFEAVCQTEEFFELTHADLDEIVSNDCLNVATEETVFYALESWIKYDVQERQKYLAQLLNSVRLPLLSVKFLTRLYEANHLIRDDRTCKHLLNEALKYHFMPEHRLSHQTVLMTRPRCAPKVLCAVGGKSGLFACLDSVEMYFPQNDSWIGLAPLNIPRYEFGICVLDQKVYVIGGIATNVRPGVTIRKHENSVECWNPDTNTWTSLERMNESRSTLGVVVLAGELYALGGYDGQSYLQSVEKYIPKIRKWQPVAPMTTTRSCFAAAVLDGMIYAIGGYGPAHMNSVERYDPSKDSWEMVASMADKRIHFGVGVMLGFIFVVGGHNGVSHLSSIERYDPHQNQWTVCRPMKEPRTGVGAAVIDNYLYVVGGHSGSSYLNTVQKYDPISDTWLDSAGMIYCRCNFGLTAL

SEQ ID NO: 8126 - DNA, 2050 bp, Homo sapiens
gctctgggcggaagttgcccgccccacccgtaagagttagggtttgaccggagctagtgaggatccagcccaggctccagttgtccgcggttcctcctcctgtcgctgcccgtgtgattactgagactcagatggaccacacatccccgacctacatgcttgctaacttaacccacttgcattctgaacaacttctgcagggcttgaatcttcttcgccaacatcacgaactctgtgacatcattcttcgagtaggtgatgttaaaattcatgctcacaaagtggtacttgccagcgtcagcccgtatttcaaagctatgttcactggaaacctttctgaaaaagagaacagtgaggttgagtttcaatgcattgatgaaactgctctccaggccattgtggagtatgcctatacagggactgtttttatttctcaggacacagttgaatctctcctgccagcagcaaacctactccagataaaacttgtcctgaaagaatgttgtgcatttcttgaaagccaacttgatcctggtaattgtattggaatttctcgttttgcagaaacatatggttgccgtgacctttatttggcagccactaaatacatatgccagaattttgaagctgtttgccagactgaagagttttttgagcttacacatgctgacttggatgaaattgtttccaatgactgtttgaatgtagctaccgaagagactgttttttatgcattagagtcttggatcaagtatgatgtacaagaacgccagaaatacttagcacagttactaaacagtgtacgattaccattgttgagtgttaagtttctcactagactatatgaagcaaatcatcttattcgtgatgatcgcacttgtaaacatcttttgaatgaagccctaaagtaccactttatgcctgaacatagactctctcatcagacagtcttgatgacacgacctcgctgtgctcccaaagtactttgtgcagtaggagggaaatctggactctttgcctgtttggatagtgtggagatgtactttcctcagaatgactcttggattggtttggcacccctaaacattcctcgctatgaatttggaatatgcgttttagaccaaaaagtatatgttataggtggtattgcaactaatgtgcgtcctggcgtcactatcagaaaacatgaaaattcagtggaatgctggaatcctgatacaaatacttggacttctctagagagaatgaatgaaagccgaagtactcttggagtagtagtacttgcaggagaactttatgccttaggtggttatgatggacaatcttatttacaatctgtagagaagtacattcccaaaataagaaaatggcaacctgtggcaccaatgacgacaacaagaagttgttttgctgcagcggtattggatggaatgatatatgccattggtgggtatggtcctgcccacatgaacagtgtggagcgttatgatccaagtaaggactcctgggagatggttgcatccatggcagataaaaggattcactttggcgtgggtgtcatgctaggctttatttttgtggtgggtggacataatggagtctcacatttgtccagcattgaaagatacgatcctcatcaaaatcagtggactgtgtgtagaccaatgaaagaacctagaacaggagttggtgctgctgtaatcgataactacctttatgtcgtcggtggtcactcagggtcttcctatctgaatacagtgcagaaatatgatcctatctcagatacgtggctggattcagctggcatgatatactgtcgctgcaactttgggttaactgcactttgacaaatgtgaactctcggaaatagtatggtggtgaaacttgtactgcatgaacatccggatggcccagttttctgaaacccacaagctgcattgctttctttttaacttgaagtagcatgaaggctcaaaagttttgttgggtacttttaattgagaagtagttttggttgctcttgattacacagtaaatcaataatcaaaaa

SEQ ID NO: 8127 - protein, 571 aa, Homo sapiens; identical to SEQ ID NO: 1172

SEQ ID NO: 8128 - DNA, 1224 bp, Homo sapiens
acttttaatttttaaaattttattatgatagattctatgataaaagattactatgtcaaaagatatgaacaggtcttattattcttcaataatttgttatttttaatagttgagaaaataagaggcaactgctcaaaaatttttacactataaatacatattcgaaaatttttgtcataatatttactaatataatttactttatgccagtaaccagtgcatttcagaataagagttaaacaatcaattcgtgtagctaacataactaatgttctatgtgtagcccagtctcaacaatactagtttcaggttacagttaaaatgtattatgaggctgggtgcagtggcttttgcctgtaatcccagcatttgggagcacagcgaggtcgtgtcatcaagactgtctgatgagagagtctatgttcaggcataaagtggtactttagggcttcattcaaaagatgtttacaagtgcgatcatcacgaataagatgatttgcttcatatagtctagtgagaaacttaacactcaacaatggtaatcgtacactgtttagtaactgtgctaagtatttctggcgttcttgtacatcatacttgatccaagactctaatgcataaaaaacagtctcttcggtagctacattcaaacagtcattggaaacaatttcatccaagtcagcatgtgtaagctcaaaaaactcttcagtctggcaaacagcttcaaaattctggcatatgtatttagtggctgccaaataaaggtcacggcaaccatatgtttctgcaaaacgagaaattccaatacaattaccaggatcaagttggctttcaagaaatgcacaacattctttcaggacaagttttatctggagtaggtttgctgctggcaggagagattcaactgtgtcctgagaaataaaaacagtccctgtataggcatactccacaatggcctggagagcagtttcatcaatgcattgaaactcaacctcactgttctctttttcagaaaggtttccagtgaacatagctttgaaatacgggctgacgctggcaagtaccactttgtgagcatgaattttaacatcacctactcgaagaatgatgtcacagagttcgtgatgttggcgaagaagattcaagccctgcagaagttgttcagaatgcaagtgggttaagttagcaagcatgtaggtcggggatgtgtggtccatctacaga

SEQ ID NO: 8129 - protein, 34 aa, Homo sapiens [sequence omitted]

SEQ ID NO: 8130 - DNA, 489 bp, Homo sapiens
aaagattactatgtcaaaagatatgaacaggtcttattattcttcaataatttgttatttttaatagttgagaaaataagaggcaactgctcaaaaatttttacactataaatacatattcgaaaatttttgtcataatatttactaatataatttactttatgccagtaaccagtgcatttcagaataagagttaaacaatcaattcgtgtagctaacataactaatgttctatgtgtagcccagtctcaacaatactagtttcaggttacagttaaaatgtattatgaggctgggtgcagtggcttttgcctgtaatcccagcattttttaaagatgcagaatttatcagttgccattgatgaaacgtcaagtttcctaacattggaaagggaaaagcaatctaccaaatttttggaaatggtcagaaatccacagtattaaaaaatatgtattaaacacaaaagttttcatgaagcaatcctatct

SEQ ID NO: 8131 - protein, 35 aa, Homo sapiens
MQNLSVAIDETSSFLTLEREKQSTKFLEMVRNPQY

SEQ ID NO: 8132 - DNA, 2117 bp, Homo sapiens
acgtggtgcccttggttacgcccggtggcagctgctgaagctgttcttttgcctcttctgcagcttggggcttggagaggatctggaagtctgggctccatcgagccctttggagacggcaatggtttcttccaaccaccaccacctgacaaccctgcatggcggctgccccctccgcgctgcttctgctgccgccctttccagtcctctctacctatcggctccagagccgcagtcgtccttccgccccagagaccgatgatagtcgagttgggggcattatgagaggagagaaaaactactacttccgtggagctgcgggggaccacggttcctgccccactacaacttcgcctctggcctcggccctcttgatgccctcggaggcagtctcaagcagctggtctgagtctggaggcggtttgtcagggggagatgaagaggacactcggctccttcaactcctccgcactgcccgggatccttctgaggccttccaggctttgcaagctgctttgccgcggcggggcggtcgacttggcttcccccgacgcaaggaagctttgtatcgggcactgggccgagtgcttgtggaaggaggtagtgatgagaagcggctctgcttgcaacttctctcggacgttctccggggtcagggggaggcaggccagcttgaagaggcctttagcttagcacttttgcctcaactagttgtctcgttacgggaagagaatccagccctgcggaaagatgcgctgcagatccttcatatatgtctgaaacgtagtcctggagaggtgctgagaacgcttatacaacaaggactggaaagtaccgatgcccgacttagagcttccacagcactactgcttcccatcttgcttactactgaggacttgttgcttggtctggatctcaccgaggtgataatatccctagcccgaaagcttggtgatcaggagacagaagaagaatctgagacagctttctccgcacttcaacaaattggggagcgacttggccaagacaggtttcaatcttacatttctcgtctgccctctgccctgaggagacactacaatcgccgcctggagtcccagtttggaagtcaggttccttattatttggaacttgaagcctctggatttcctgaagatccccttccctgtgcagtgactctttccaacagcaatcttaaatttgggattattcctcaggagctgcattcacgattattggatcaggaagactataagaaccggacccaggccgtcgaagaactaaagcaggtgctgggaaaatttaaccctagttctactcctcattctagtcttgttggcttcattagtttgctatataatttgttagacgattctaacttcaaagtggtgcatggcacacttgaagtcctgcatttactggttattcgccttggagagcaggtacagcagttcttgggaccagttatagcagcttctgtcaaagtgctggcggacaacaagttggtgatcaaacaagaatacatgaaaatcttcctcaagctaatgaaggaagtaggacctcagcaggtgctttgtttactcctggaacatctcaaacataagcattccagagtgagagaggaggtggtgaacatttgcatctgctccctgctgacctatcctagtgaggattttgacttgcccaaactgtcctttgatcttgccccagctcttgtagatagcaaacgcagggtacgccaagcagctttagaagcttttgccgtattggcatcatcaatgggctcaggtaaaaccagcatcctttttaaagctgtggatacagttgaactgcaagataatggagatggagtgatgaatgctgtgcaggccagattggctaggaaaaccttaccaaggctcacagagcagggatttgtggaatatgcagtactgatgccatcttctgccgggggtaggtcaaaccatttggcacatggagcagatacggactggcttttggctggtaacagaactcagagtgcacactgtcactgtggtgaccacgtgagggatagcatgcacatttatggatcttacagcccaactatctgtacccgaagggtattaagtgcagga

SEQ ID NO: 8133 - protein, 652 aa, Homo sapiens
MAAAPSALLLLPPFPVLSTYRLQSRSRPSAPETDDSRVGGIMRGEKNYYFRGAAGDHGSCPTTTSPLASALLMPSEAVSSSWSESGGGLSGGDEEDTRLLQLLRTARDPSEAFQALQAALPRRGGRLGFPRRKEALYRALGRVLVEGGSDEKRLCLQLLSDVLRGQGEAGQLEEAFSLALLPQLVVSLREENPALRKDALQILHICLKRSPGEVLRTLIQQGLESTDARLRASTALLLPILLTTEDLLLGLDLTEVIISLARKLGDQETEEESETAFSALQQIGERLGQDRFQSYISRLPSALRRHYNRRLESQFGSQVPYYLELEASGFPEDPLPCAVTLSNSNLKFGIIPQELHSRLLDQEDYKNRTQAVEELKQVLGKFNPSSTPHSSLVGFISLLYNLLDDSNFKVVHGTLEVLHLLVIRLGEQVQQFLGPVIAASVKVLADNKLVIKQEYMKIFLKLMKEVGPQQVLCLLLEHLKHKHSRVREEVVNICICSLLTYPSEDFDLPKLSFDLAPALVDSKRRVRQAALEAFAVLASSMGSGKTSILFKAVDTVELQDNGDGVMNAVQARLARKTLPRLTEQGFVEYAVLMPSSAGGRSNHLAHGADTDWLLAGNRTQSAHCHCGDHVRDSMHIYGSYSPTICTRRVLSA

SEQ ID NO: 8134 - DNA, 6249 bp, Homo sapiens
cgcccggtggcagctgtggggtctagggctcagacgggggccattttgccagaggctgcctcccggagttgggggcggcctggcggcaggctgaagctgttcttttgcctcttctgcagcttggggcttggagaggatctggaagtctgggctccatcgagccctttggagacggcaatggtttcttccaaccaccaccacctgacaaccctgcatggcggctgccccctccgcgctgcttctgctgccgccctttccagtcctctctacctatcggctccagagccgcagtcgtccttccgccccagagaccgatgatagtcgagttgggggcattatgagaggagagaaaaactactacttccgtggagctgcgggggaccacggttcctgccccactacaacttcgcctctggcctcggccctcttgatgccctcggaggcagtctcaagcagctggtctgagtctggaggcggtttgtcagggggagatgaagaggacactcggctccttcaactcctccgcactgcccgggatccttctgaggccttccaggctttgcaagctgctttgccgcggcggggcggtcgacttggcttcccccgacgcaaggaagctttgtatcgggcactgggccgagtgcttgtggaaggaggtagtgatgagaagcggctctgcttgcaacttctctcggacgttctccggggtcagggggaggcaggccagcttgaagaggcctttagcttagcacttttgcctcaactagttgtctcgttacgggaagagaatccagccctgcggaaagatgcgctgcagatccttcatatatgtctgaaacgtagtcctggagaggtgctgagaacgcttatacaacaaggactggaaagtaccgatgcccgacttagagcttccacagcactactgcttcccatcttgcttactactgaggacttgttgcttggtctggatctcaccgaggtgataatatccctagcccgaaagcttggtgatcaggagacagaagaagaatctgagacagctttctccgcacttcaacaaattggggagcgacttggccaagacaggtttcaatcttacatttctcgtctgccctctgccctgaggagacactacaatcgccgcctggagtcccagtttggaagtcaggttccttattatttggaacttgaagcctctggatttcctgaagatccccttccctgtgcagtgactctttccaacagcaatcttaaatttgggattattcctcaggagctgcattcacgattattggatcaggaagactataagaaccggacccaggccgtcgaagaactaaagcaggtgctgggaaaatttaaccctagttctactcctcattctagtcttgttggcttcattagtttgctatataatttgttagacgattctaacttcaaagtggtgcatggcacacttgaagtcctgcatttactggttattcgccttggagagcaggtacagcagttcttgggaccagttatagcagcttctgtcaaagtgctggcggacaacaagttggtgatcaaacaagaatacatgaaaatcttcctcaagctaatgaaggaagtaggacctcagcaggtgctttgtttactcctggaacatctcaaacataagcattccagagtgagagaggaggtggtgaacatttgcatctgctccctgctgacctatcctagtgaggattttgacttgcccaaactgtcctttgatcttgccccagctcttgtagatagcaaacgcagggtacgccaagcagctttagaagcttttgccgtattggcatcatcaatgggctcaggtaaaaccagcatcctttttaaagctgtggatacagttgaactgcaagataatggagatggagtgatgaatgctgtgcaggccagattggctaggaaaaccttaccaaggctcacagagcagggatttgtggaatatgcagtactgatgccatcttctgccgggggtaggtcaaaccatttggcacatggagcagatacggactggcttttggctggtaacagaactcagagtgcacactgtcactgtggtgaccacgtgagggatagcatgcacatttatggatcttacagcccaactatctgtacccgaagggtattaagtgcaggaaaaggaaaaaataaattaccatgggaaaatgagcaacctggaatcatgggagaaaaccagacctccacttccaaggatatagagcagttttcaacatatgatttcatcccatctgcaaaattaaagctttctcaaggaatgccagtcaatgatgatttatgttttagcagaaaaagagtatcaagaaacttatttcagaatagtcgggattttaacccagattgtcttcctttatgtgctgctggtactactgggactcatcaaacaaatctttctgggaaatgtgcacaacttggattttcacaaatatgtggtaaaactggcagtgtgggttctgacttacaattcctagggacaactagcagtcatcaagaaaaagtgtatgctagcctcaattttggcagtaagacacagcaaacatttggtagtcaaacagagtgtacttcctcaaatggtcaaaatccaagtccaggagcttacatccttccatcctatcctgtctcatcacctcgaactagtccaaagcatacatctcctcttattatatctccaaagaagtctcaagataattctgttaatttctcaaattcctggcctcttaaaagcttcgaaggactatcaaagccaagtccacagaagaagcttgtcagccaaaaatcgtctgatcctacgggtagaaatcatggagaaaattctcaagaaaaacctccagttcagcttacacctgccttggtgagatcgccatcttcccgacgaggtctaaatgggacaaagcctgttcctcccataccaaggggaataagccttttgcctgataaagctgatttaagcacagtgggacacaaaaagaaagagcctgatgatatttggaagtgtgaaaaagatagtcttccaattgatctttcagaattaaatttcaaggataaagatttggatcaagaagagatgcatagctctcttaggtcccttcgtaatagtgcagctaagaaaagagcaaaactgagtggcagtacttcagatcttgaaagccctgattctgcaatgaagctcgacttgacgatggactccccgtctctgtcttcctcaccaaacatcaattcttacagtgaaagtggagtttacagccaagaatcattgacttcttctctgtctacaactccccaggggaagagaataatgtcagacatatttccaacatttgggtcaaaaccttgtccaacaagactttcttctgcaaagaaaaaaatttctcatattgctgaacaaagccccagtgcagggtcatcatcaaatccacagcaaatttccagttttgacttcacaaccacaaaggctttatcagaagactcagtagtagttgttggaaaaggcgtatttggaagtttaagttcagcaccagcaacctgcagccaatcagtgatatcttctgtggaaaatggggatacattttcaattaaacaaagtattgaaccaccatcagggatttatggaagatcagtccagcaaaatatttcatcatatcttgatgttgagaatgaaaaagatgctaaagtttctatttctaaatctacttataacaagatgagacaaaagagaaaagaagagaaagaactgtttcacaataaagattgtgaaaagaaggaaaaaaattcctgggaacgaatgagacatacaggaactgagaaaatggcatctgaaagtgaaacacctactggagctatttcacagtataaagaaaggatgccttctgtcactcatagtccagaaataatggatctgtcagaactacgaccattctctaaaccagaaatagcactgacagaagccctgaggcttttggctgatgaggattgggagaagaaaattgagggactgaattttattagatgcttagctgcttttcattctgagatactgaacacaaagttgcatgaaacaaattttgcagttgttcaagaggtgaaaaatttacgttctggagtttctcgtgctgctgtggtctgtttaagtgatcttttcacttatttgaaaaagagcatggatcaagagctagataccacagtaaaagttttgttgcacaaggctggtgaatcaaatacatttataagagaagatgttgacaaagcattgagagctatggttaataatgtaactcctgcacgtgcagttgtttctcttatcaatggtggacaaaggtattatggtcgaaagatgctgttcttcatgatgtgtcatcctaactttgaaaaaatgcttgaaaagtatgtcccatctaaagatttgccatatattaaggactctgttagaaacttacagcaaaagggtttgggggagataccattagatactccttcagcaaaaggaagacgatctcatactggcagtgttggaaatacaagatcatcatctgtttctagagatgctttcaattcagctgaaagagctgtaactgaagttcgtgaagtcaccagaaaatcagtccctcgtaattccttagaaagtgctgagtaccttaaactcataactggcttattaaatgcaaaagactttcgtgatcgtattaatgggattaagcagcttttatcagatacagaaaataatcaagaccttgttgttggaaacattgtgaagatttttgatgcttttaaatctcgacttcatgattctaatagtaaagtaaatctggtggctctggaaacaatgcacaaaatgattcctctacttagagaccacttatctcctataatcaacatgctaattccagcaatagtggataacaatctgaattccaagaatccaggcatctatgcggctgctacaaatgttgttcaggcactgagtcagcatgtagacaattacttacttctacagccattttgcacaaaagctcagtttttaaatggaaaagcaaaacaggacatgacggaaaagcttgctgatattgttacggaactttatcaaaggaagccgcatgccacagagcagaaagtgttggttgttttatggcatctcttaggaaatatgacaaatagtggctctctgcctggagctggaggaaatatacgaacagccacagctaaattatcaaaagcactctttgcacagatgggtcagaatctgttaaatcaggctgcatctcaaccaccacatatcaaaaagagtttggaggaattactcgatatgacaattttaaatgaattatgaatcttcgataaaatactgtatgatgaacaaaagtgtttacatgatgacaaatggaactttctaaaagttatgttatcagtgcctgcacttcacatccagcaaattaagtcaatggctatttttatttgcagcctatgagtacacatctgtcctatatcaaccttaccacttatattcatcacataaaaacctaaaatattcatgaataattcatgaaatctgagtcacatgggatgaattcaattttaatatttttgagaaaagtcctgctcatttgcactattctatagaaactacaatttgttgccctatatgtaaaattagaattgtaattaaaaatacacattttattatgtaatcatgttctggtatgtctcatttctcagccttattttataacgtggaagtcattgaactatgttatcagaaactaagtttgtatattatttgtgaaaaacatgtatttctgaatcagtccgctaatatgattgtgcagtattagcttgcttttgctgctgtgttaatgtcatatatttgcttaccttttgggttcaattatctacataattgtgaaatttaacaagttataataaagcatgacaaccaaagttttagaaaacattaaacattttaaatgcacgtttaaaaaacgtgttgaatgtaacccccctatttttgtgtgcaaacactaaattttattgctttatgttttgacctttataaaggtgttattctgctgcccagttttgtaattctcaaaaatagtgccaggtcttctatagcttttttcagaattcatgggcttacaagtactgtatgcatctttaaaaagaaaaggaatgttataaaataaaaggatttatttctttaga

SEQ ID NO: 8135 - protein, 1720 aa, Homo sapiens; identical to SEQ ID NO: 1174

SEQ ID NO: 8136 - DNA, 6234 bp, Homo sapiens
ggtggcagctgtggggtctagggctcagacgggggccattttgccagaggctgcctcccggagttgggggcggcctggcggcaggctgaagctgttcttttgcctcttctgcagcttggggcttggagaggatctggaagtctgggctccatcgagccctttggagacggcaatggtttcttccaaccaccaccacctgacaaccctgcatggcggctgccccctccgcgctgcttctgctgccgccctttccagtcctctctacctatcggctccagagccgcagtcgtccttccgccccagagaccgatgatagtcgagttgggggcattatgagaggagagaaaaactactacttccgtggagctgcgggggaccacggttcctgccccactacaacttcgcctctggcctcggccctcttgatgccctcggaggcagtctcaagcagctggtctgagtctggaggcggtttgtcagggggagatgaagaggacactcggctccttcaactcctccgcactgcccgggatccttctgaggccttccaggctttgcaagctgctttgccgcggcggggcggtcgacttggcttcccccgacgcaaggaagctttgtatcgggcactgggccgagtgcttgtggaaggaggtagtgatgagaagcggctctgcttgcaacttctctcggacgttctccggggtcagggggaggcaggccagcttgaagaggcctttagcttagcacttttgcctcaactagttgtctcgttacgggaagagaatccagccctgcggaaagatgcgctgcagatccttcatatatgtctgaaacgtagtcctggagaggtgctgagaacgcttatacaacaaggactggaaagtaccgatgcccgacttagagcttccacagcactactgcttcccatcttgcttactactgaggacttgttgcttggtctggatctcaccgaggtgataatatccctagcccgaaagcttggtgatcaggagacagaagaagaatctgagacagctttctccgcacttcaacaaattggggagcgacttggccaagacaggtttcaatcttacatttctcgtctgccctctgccctgaggagacactacaatcgccgcctggagtcccagtttggaagtcaggttccttattatttggaacttgaagcctctggatttcctgaagatccccttccctgtgcagtgactctttccaacagcaatcttaaatttgggattattcctcaggagctgcattcacgattattggatcaggaagactataagaaccggacccaggccgtcgaagaactaaagcaggtgctgggaaaatttaaccctagttctactcctcattctagtcttgttggcttcattagtttgctatataatttgttagacgattctaacttcaaagtggtgcatggcacacttgaagtcctgcatttactggttattcgccttggagagcaggtacagcagttcttgggaccagttatagcagcttctgtcaaagtgctggcggacaacaagttggtgatcaaacaagaatacatgaaaatcttcctcaagctaatgaaggaagtaggacctcagcaggtgctttgtttactcctggaacatctcaaacataagcattccagagtgagagaggaggtggtgaacatttgcatctgctccctgctgacctatcctagtgaggattttgacttgcccaaactgtcctttgatcttgccccagctcttgtagatagcaaacgcagggtacgccaagcagctttagaagcttttgccgtattggcatcatcaatgggctcaggtaaaaccagcatcctttttaaagctgtggatacagttgaactgcaagataatggagatggagtgatgaatgctgtgcaggccagattggctaggaaaaccttaccaaggctcacagagcagggatttgtggaatatgcagtactgatgccatcttctgccgggggtaggtcaaaccatttggcacatggagcagatacggactggcttttggctggtaacagaactcagagtgcacactgtcactgtggtgaccacgtgagggatagcatgcacatttatggatcttacagcccaactatctgtacccgaagggtattaagtgcaggaaaaggaaaaaataaattaccatgggaaaatgagcaacctggaatcatgggagaaaaccagacctccacttccaaggatatagagcagttttcaacatatgatttcatcccatctgcaaaattaaagctttctcaaggaatgccagtcaatgatgatttatgttttagcagaaaaagagtatcaagaaacttatttcagaatagtcgggattttaacccagattgtcttcctttatgtgctgctggtactactgggactcatcaaacaaatctttctgggaaatgtgcacaacttggattttcacaaatatgtggtaaaactggcagtgtgggttctgacttacaattcctagggacaactagcagtcatcaagaaaaagtgtatgctagcctcaattttggcagtaagacacagcaaacatttggtagtcaaacagagtgtacttcctcaaatggtcaaaatccaagtccaggagcttacatccttccatcctatcctgtctcatcacctcgaactagtccaaagcatacatctcctcttattatatctccaaagaagtctcaagataattctgttaatttctcaaattcctggcctcttaaaagcttcgaaggactatcaaagccaagtccacagaagaagcttgtcagccaaaaatcgtctgatcctacgggtagaaatcatggagaaaattctcaagaaaaacctccagttcagcttacacctgccttggtgagatcgccatcttcccgacgaggtctaaatgggacaaagcctgttcctcccataccaaggggaataagccttttgcctgataaagctgatttaagcacagtgggacacaaaaagaaagagcctgatgatatttggaagtgtgaaaaagatagtcttccaattgatctttcagaattaaatttcaaggataaagatttggatcaagaagaggtcagacatatttccaacatttgggtcaaaaccttgtccaacaagactttcttctgcaaagaaaaaaatttctcatattgctgaacaaagccccagtgcaggtgttccctcggaagttaggaattccctttctctccatattgctgcgtgggcatggaggactagggtcatcatcaaatccacagcaaatttccagttttgacttcacaaccacaaaggctttatcagaagactcagtagtagttgttggaaaaggcgtatttggaagtttaagttcagcaccagcaacctgcagccaatcagtgatatcttctgtggaaaatggggatacattttcaattaaacaaagtattgaaccaccatcagggatttatggaagatcagtccagcaaaatatttcatcatatcttgatgttgagaatgaaaaagatgctaaagtttctatttctaaatctacttataacaagatgagacaaaagagaaaagaagagaaagaactgtttcacaataaagattgtgaaaagaaggaaaaaaattcctgggaacgaatgagacatacaggaactgagaaaatggcatctgaaagtgaaacacctactggagctatttcacagtataaagaaaggatgccttctgtcactcatagtccagaaataatggatctgtcagaactacgaccattctctaaaccagaaatagcactgacagaagccctgaggcttttggctgatgaggattgggagaagaaaattgagggactgaattttattagatgcttagctgcttttcattctgagatactgaacacaaagttgcatgaaacaaattttgcagttgttcaagaggtgaaaaatttacgttctggagtttctcgtgctgctgtggtctgtttaagtgatcttttcacttatttgaaaaagagcatggatcaagagctagataccacagtaaaagttttgttgcacaaggctggtgaatcaaatacatttataagagaagatgttgacaaagcattgagagctatggttaataatgtaactcctgcacgtgcagttgtttctcttatcaatggtggacaaagccatttacacattgctgtaagaaggtgtacagcccagcatttatcagatgtattggaatttatggaaccagaacgtattttatctgcagcaaaggatatggctgaacgcatattaccagctgctgctaagtttgctcaagacagttcacaagaaaccaggtattatggtcgaaagatgctgttcttcatgatgtgtcatcctaactttgaaaaaatgcttgaaaagtatgtcccatctaaagatttgccatatattaaggactctgttagaaacttacagcaaaagggtttgggggagataccattagatactccttcagcaaaaggaagacgatctcatactggcagtgttggaaatacaagatcatcatctgtttctagagatgctttcaattcagctgaaagagctgtaactgaagttcgtgaagtcaccagaaaatcagtccctcgtaattccttagaaagtgctgagtaccttaaactcataactggcttattaaatgcaaaagactttcgtgatcgtattaatgggattaagcagcttttatcagatacagaaaataatcaagaccttgttgttggaaacattgtgaagatttttgatgcttttaaatctcgacttcatgattctaatagtaaagtaaatctggtggctctggaaacaatgcacaaaatgattcctctacttagagaccacttatctcctataatcaacatgctaattccagcaatagtggataacaatctgaattccaagaatccaggcatctatgcggctgctacaaatgttgttcaggcactgagtcagcatgtagacaattacttacttctacagccattttgcacaaaagctcagtttttaaatggaaaagcaaaacaggacatgacggaaaagcttgctgatattgttacggaactttatcaaaggaagccgcatgccacagagcagaaagtgttggttgttttatggcatctcttaggaaatatgacaaatagtggctctctgcctggagctggaggaaatatacgaacagccacagctaaattatcaaaagcactctttgcacagatgggtcagaatctgttaaatcaggctgcatctcaaccaccacatatcaaaaagagtttggaggaattactcgatatgacaattttaaatgaattatgaatcttcgataaaatactgtatgatgaacaaaagtgtttacatgatgacaaatggaactttctaaaagttatgttatcagtgcctgcacttcacatccagcaaattaagtcaatggctatttttatttgcagcctatgagtacacatctgtcctatatcaaccttaccacttatattcatcacataaaaacctaaaatattcatgaataattcatgaaatctgagtcacatgggatgaattcaattttaatatttttgagaaaagtcctgctcatttgcactattctatagaaactacaatttgttgccctatatgtaaaattagaattgtaattaaaaatacacattttattatgtaatcatgttctggtatgtctcatttctcagccttattttataacgtggaagtcattgaactatgttatcagaaactaagtttgtatattatttgtgaaaaacatgtatttctgaatcagtccgctaatatgattgtgcagtattagcttgcttttgctgctgtgttaatgtcatatatttgcttaccttttgggttcaattatctacataattgtgaaatttaacaagttataataaagcatgacaaccaaagttttagaaaacattaaacattttaaatgcacgtttaaaaaacgtgttgaatgtaacccccctatttttgtgtgcaaacactaaattttattgctttatgttttgacctttataaaggtgttattctgctgcccagttttgtaattctcaaaaatagtgccaggtcttctatagcttttttcagaattcatgggcttacaagtactgtatgcatctttaaaaagaaaaggaatgttataaaataaaaggatttatttctttaga

SEQ ID NO: 8137 - protein, 995 aa, Homo sapiens
MAAAPSALLLLPPFPVLSTYRLQSRSRPSAPETDDSRVGGIMRGEKNYYFRGAAGDHGSCPTTTSPLASALLMPSEAVSSSWSESGGGLSGGDEEDTRLLQLLRTARDPSEAFQALQAALPRRGGRLGFPRRKEALYRALGRVLVEGGSDEKRLCLQLLSDVLRGQGEAGQLEEAFSLALLPQLVVSLREENPALRKDALQILHICLKRSPGEVLRTLIQQGLESTDARLRASTALLLPILLTTEDLLLGLDLTEVIISLARKLGDQETEEESETAFSALQQIGERLGQDRFQSYISRLPSALRRHYNRRLESQFGSQVPYYLELEASGFPEDPLPCAVTLSNSNLKFGIIPQELHSRLLDQEDYKNRTQAVEELKQVLGKFNPSSTPHSSLVGFISLLYNLLDDSNFKVVHGTLEVLHLLVIRLGEQVQQFLGPVIAASVKVLADNKLVIKQEYMKIFLKLMKEVGPQQVLCLLLEHLKHKHSRVREEVVNICICSLLTYPSEDFDLPKLSFDLAPALVDSKRRVRQAALEAFAVLASSMGSGKTSILFKAVDTVELQDNGDGVMNAVQARLARKTLPRLTEQGFVEYAVLMPSSAGGRSNHLAHGADTDWLLAGNRTQSAHCHCGDHVRDSMHIYGSYSPTICTRRVLSAGKGKNKLPWENEQPGIMGENQTSTSKDIEQFSTYDFIPSAKLKLSQGMPVNDDLCFSRKRVSRNLFQNSRDFNPDCLPLCAAGTTGTHQTNLSGKCAQLGFSQICGKTGSVGSDLQFLGTTSSHQEKVYASLNFGSKTQQTFGSQTECTSSNGQNPSPGAYILPSYPVSSPRTSPKHTSPLIISPKKSQDNSVNFSNSWPLKSFEGLSKPSPQKKLVSQKSSDPTGRNHGENSQEKPPVQLTPALVRSPSSRRGLNGTKPVPPIPRGISLLPDKADLSTVGHKKKEPDDIWKCEKDSLPIDLSELNFKDKDLDQEEVRHISNIWVKTLSNKTFFCKEKNFSYC

SEQ ID NO: 8138 - DNA, 5064 bp, Homo sapiens
gtggcagctgtggggtctagggctcagacgggggccattttgccagaggctgcctcccggagttgggggcggcctggcggcaggctgaagctgttcttttgcctcttctgcagcttggggcttggagaggatctggaagtctgggctccatcgagccctttggagacggcaatggtttcttccaaccaccaccacctgacaaccctgcatggcggctgccccctccgcgctgcttctgctgccgccctttccagtcctctctacctatcggctccagagccgcagtcgtccttccgccccagagaccgatgatagtcgagttgggggcattatgagaggagagaaaaactactacttccgtggagctgcgggggaccacggttcctgccccactacaacttcgcctctggcctcggccctcttgatgccctcggaggcagtctcaagcagctggtctgagtctggaggcggtttgtcagggggagatgaagaggacactcggctccttcaactcctccgcactgcccgggatccttctgaggccttccaggctttgcaagctgctttgccgcggcggggcggtcgacttggcttcccccgacgcaaggaagctttgtatcgggcactgggccgagtgcttgtggaaggaggtagtgatgagaagcggctctgcttgcaacttctctcggacgttctccggggtcagggggaggcaggccagcttgaagaggcctttagcttagcacttttgcctcaactagttgtctcgttacgggaagagaatccagccctgcggaaagatgcgctgcagatccttcatatatgtctgaaacgtagtcctggagaggtgctgagaacgcttatacaacaaggactggaaagtaccgatgcccgacttagagcttccacagcactactgcttcccatcttgcttactactgaggacttgttgcttggtctggatctcaccgaggtgataatatccctagcccgaaagcttggtgatcaggagacagaagaagaatctgagacagctttctccgcacttcaacaaattggggagcgacttggccaagacaggtttcaatcttacatttctcgtctgccctctgccctgaggagacactacaatcgccgcctggagtcccagtttggaagtcaggttccttattatttggaacttgaagcctctggatttcctgaagatccccttccctgtgcagtgactctttccaacagcaatcttaaatttgggattattcctcaggagctgcattcacgattattggatcaggaagactataagaaccggacccaggccgtcgaagaactaaagcaggtgctgggaaaatttaaccctagttctactcctcattctagtcttgttggcttcattagtttgctatataatttgttagacgattctaacttcaaagtggtgcatggcacacttgaagtcctgcatttactggttattcgccttggagagcaggtacagcagttcttgggaccagttatagcagcttctgtcaaagtgctggcggacaacaagttggtgatcaaacaagaatacatgaaaatcttcctcaagctaatgaaggaagtaggacctcagcaggtgctttgtttactcctggaacatctcaaacataagcattccagagtgagagaggaggtggtgaacatttgcatctgctccctgctgacctatcctagtgaggattttgacttgcccaaactgtcctttgatcttgccccagctcttgtagatagcaaacgcagggtacgccaagcagctttagaagcttttgccgtattggcatcatcaatgggctcaggtaaaaccagcatcctttttaaagctgtggatacagttgaactgcaagataatggagatggagtgatgaatgctgtgcaggccagattggctaggaaaaccttaccaaggctcacagagcagggatttgtggaatatgcagtactgatgccatcttctgccgggggtaggtcaaaccatttggcacatggagcagatacggactggcttttggctggtaacagaactcagagtgcacactgtcactgtggtgaccacgtgagggatagcatgcacatttatggatcttacagcccaactatctgtacccgaagggtattaagtgcaggaaaaggaaaaaataaattaccatgggaaaatgagcaacctggaatcatgggagaaaaccagacctccacttccaaggatatagagcagttttcaacatatgatttcatcccatctgcaaaattaaagctttctcaaggaatgccagtcaatgatgatttatgttttagcagaaaaagagtatcaagaaacttatttcagaatagtcgggattttaacccagattgtcttcctttatgtgctgctggtactactgggactcatcaaacaaatctttctgggaaatgtgcacaacttggattttcacaaatatgtggtaaaactggcagtgtgggttctgacttacaattcctagggacaactagcagtcatcaagaaaaagtgtatgctagcctcaattttggcagtaagacacagcaaacatttggtagtcaaacagagtgtacttcctcaaatggtcaaaatccaagtccaggagcttacatccttccatcctatcctgtctcatcacctcgaactagtccaaagcatacatctcctcttattatatctccaaagaagtctcaagataattctgttaatttctcaaattcctggcctcttaaaagcttcgaaggactatcaaagccaagtccacagaagaagcttgtcagccaaaaatcgtctgatcctacgggtagaaatcatggagaaaattctcaagaaaaacctccagttcagcttacacctgccttggtgagatcgccatcttcccgacgaggtctaaatgggacaaagcctgttcctcccataccaaggggaataagccttttgcctgataaagctgatttaagcacagtgggacacaaaaagaaagagcctgatgatatttggaagtgtgaaaaagatagtcttccaattgatctttcagaattaaatttcaaggataaagatttggatcaagaagaggttagaaccaaatatttttaatgacttaaaaatatttgcaattttctataatatagttgctatttaaggaaaaatcaagttctttttatcctataatatcttatttctaaaaatatgttcattatagaaaatgtggaaaataccatgaattagtaggaagggaatttatcacgccagttcccactaccagaataatttactgttaacactctactgtattttcttcaagtattttttctatgcatacattattcctttttaaattaaaagtatgaataataatatagcaatacactcatgtactgacccttccagtgaacagtttgtcatatttgtttcctatatttaaataaatgaaacatagcatagttctctccccagttcaacatctcttccttcttcaccagaggcaatcactattaccatttatatatgtcttatgtatttttgtactttttatattaatattatttttgtgtatttacttacggtgtgtttataccattgattttggcttatgatcagtcttttgcaattgcatacagtgaactgcaatgaacatatttgaacctgtcctttgtgtttctgtgcaagcttacttatctttatgaaattgagatcatattgtacactcatctttgaatcctagatcactttgtgctataaaaatgttaccagtatgataactgtacataattattatatcagacaaggaatgcggttgctgtattactttggtttcagagtactatttccatagatgcctcctttttatcatttcagtttgcttcaagtcaggttaaaaaaaaagttttatattacatatataaatgcaaatacttaattatgatattttatggtcttagtctgtttttaaggtataagcatcaatcatgtaatgataatttgctcaataaaatagagttaatattactgtatattcatttttaacatatgtctttatgttaaacacatgtaaaactaacctataaagtaccaaagttggttgttaatgatttaaagtaatcaccccaacttctgcttgtgaaatctttccttttttttttttcccaactcatttgtattttactagtgctaggaagggaattcatttgaagggaagaaacatatagaaaagacattttcctacataacttataaatttcacctgatcctacataattttgctttgtttttataataacttaaatatagttctttttttagtgggtaattgaaaggtgagtttctgttatataattattagtaaatacaggaggataccattgcttttagatattcaacttttcacgcttttaatagagaagtggccctagtattaaatcaactagtagagttgttgaaaattacttatcctcccttatagttgctaatatgacacttcctatttattattttgaatgggtcactgtttatattctttggtgtgagttgacttttgacaaaagcataagttttcatgtgcttaatgtgcttaataatgtatcaaacactttcattttcattagttcatttaatctttacagtaactccctgagttaagaagcaagtcaacatctattatgttttttgtttgtgtgtgtgtttgtttttacagaagaggctcagtgatgttatgtgtcttgctcagggtcagaaagtatgtggtaggactaggattcaagcactgttcacctaactttatgttcattaagtttttcactgtactacactgccctaaatccattaaagggttttttgttgttgttgagtttgccttccaactatgaagacttaagaaatttatggatgtttgctttaactgaaaacagatactttcattaaatgattaatcttatgaatcaaatgtaaacaaaacagtttatgtatgtttctattttccttaatttgttcaaagttttgttgctagtcttaatatattttgccataac

SEQ ID NO: 8139 - protein, 974 aa, Homo sapiens
MAAAPSALLLLPPFPVLSTYRLQSRSRPSAPETDDSRVGGIMRGEKNYYFRGAAGDHGSCPTTTSPLASALLMPSEAVSSSWSESGGGLSGGDEEDTRLLQLLRTARDPSEAFQALQAALPRRGGRLGFPRRKEALYRALGRVLVEGGSDEKRLCLQLLSDVLRGQGEAGQLEEAFSLALLPQLVVSLREENPALRKDALQILHICLKRSPGEVLRTLIQQGLESTDARLRASTALLLPILLTTEDLLLGLDLTEVIISLARKLGDQETEEESETAFSALQQIGERLGQDRFQSYISRLPSALRRHYNRRLESQFGSQVPYYLELEASGFPEDPLPCAVTLSNSNLKFGIIPQELHSRLLDQEDYKNRTQAVEELKQVLGKFNPSSTPHSSLVGFISLLYNLLDDSNFKVVHGTLEVLHLLVIRLGEQVQQFLGPVIAASVKVLADNKLVIKQEYMKIFLKLMKEVGPQQVLCLLLEHLKHKHSRVREEVVNICICSLLTYPSEDFDLPKLSFDLAPALVDSKRRVRQAALEAFAVLASSMGSGKTSILFKAVDTVELQDNGDGVMNAVQARLARKTLPRLTEQGFVEYAVLMPSSAGGRSNHLAHGADTDWLLAGNRTQSAHCHCGDHVRDSMHIYGSYSPTICTRRVLSAGKGKNKLPWENEQPGIMGENQTSTSKDIEQFSTYDFIPSAKLKLSQGMPVNDDLCFSRKRVSRNLFQNSRDFNPDCLPLCAAGTTGTHQTNLSGKCAQLGFSQICGKTGSVGSDLQFLGTTSSHQEKVYASLNFGSKTQQTFGSQTECTSSNGQNPSPGAYILPSYPVSSPRTSPKHTSPLIISPKKSQDNSVNFSNSWPLKSFEGLSKPSPQKKLVSQKSSDPTGRNHGENSQEKPPVQLTPALVRSPSSRRGLNGTKPVPPIPRGISLLPDKADLSTVGHKKKEPDDIWKCEKDSLPIDLSELNFKDKDLDQEEVRTKYF

SEQ ID NO: 8140 - DNA, 6397 bp, Homo sapiens
agctgtggggtctagggctcagacgggggccattttgccagaggctgcctcccggagttgggggcggcctggcggcaggctgaagctgttcttttgcctcttctgcagcttggggcttggagaggatctggaagtctgggctccatcgagccctttggagacggcaatggtttcttccaaccaccaccacctgacaaccctgcatggcggctgccccctccgcgctgcttctgctgccgccctttccagtcctctctacctatcggctccagagccgcagtcgtccttccgccccagagaccgatgatagtcgagttgggggcattatgagaggagagaaaaactactacttccgtggagctgcgggggaccacggttcctgccccactacaacttcgcctctggcctcggccctcttgatgccctcggaggcagtctcaagcagctggtctgagtctggaggcggtttgtcagggggagatgaagaggacactcggctccttcaactcctccgcactgcccgggatccttctgaggccttccaggctttgcaagctgctttgccgcggcggggcggtcgacttggcttcccccgacgcaaggaagctttgtatcgggcactgggccgagtgcttgtggaaggaggtagtgatgagaagcggctctgcttgcaacttctctcggacgttctccggggtcagggggaggcaggccagcttgaagaggcctttagcttagcacttttgcctcaactagttgtctcgttacgggaagagaatccagccctgcggaaagatgcgctgcagatccttcatatatgtctgaaacgtagtcctggagaggtgctgagaacgcttatacaacaaggactggaaagtaccgatgcccgacttagagcttccacagcactactgcttcccatcttgcttactactgaggacttgttgcttggtctggatctcaccgaggtgataatatccctagcccgaaagcttggtgatcaggagacagaagaagaatctgagacagctttctccgcacttcaacaaattggggagcgacttggccaagacaggtttcaatcttacatttctcgtctgccctctgccctgaggagacactacaatcgccgcctggagtcccagtttggaagtcaggttccttattatttggaacttgaagcctctggatttcctgaagatccccttccctgtgcagtgactctttccaacagcaatcttaaatttgggattattcctcaggagctgcattcacgattattggatcaggaagactataagaaccggacccaggccgtcgaagaactaaagcaggtgctgggaaaatttaaccctagttctactcctcattctagtcttgttggcttcattagtttgctatataatttgttagacgattctaacttcaaagtggtgcatggcacacttgaagtcctgcatttactggttattcgccttggagagcaggtacagcagttcttgggaccagttatagcagcttctgtcaaagtgctggcggacaacaagttggtgatcaaacaagaatacatgaaaatcttcctcaagctaatgaaggaagtaggacctcagcaggtgctttgtttactcctggaacatctcaaacataagcattccagagtgagagaggaggtggtgaacatttgcatctgctccctgctgacctatcctagtgaggattttgacttgcccaaactgtcctttgatcttgccccagctcttgtagatagcaaacgcagggtacgccaagcagctttagaagcttttgccgtattggcatcatcaatgggctcaggtaaaaccagcatcctttttaaagctgtggatacagttgaactgcaagataatggagatggagtgatgaatgctgtgcaggccagattggctaggaaaaccttaccaaggctcacagagcagggatttgtggaatatgcagtactgatgccatcttctgccgggggtaggtcaaaccatttggcacatggagcagatacggactggcttttggctggtaacagaactcagagtgcacactgtcactgtggtgaccacgtgagggatagcatgcacatttatggatcttacagcccaactatctgtacccgaagggtattaagtgcaggaaaaggaaaaaataaattaccatgggaaaatgagcaacctggaatcatgggagaaaaccagacctccacttccaaggatatagagcagttttcaacatatgatttcatcccatctgcaaaattaaagctttctcaaggaatgccagtcaatgatgatttatgttttagcagaaaaagagtatcaagaaacttatttcagaatagtcgggattttaacccagattgtcttcctttatgtgctgctggtactactgggactcatcaaacaaatctttctgggaaatgtgcacaacttggattttcacaaatatgtggtaaaactggcagtgtgggttctgacttacaattcctagggacaactagcagtcatcaagaaaaagtgtatgctagcctcaattttggcagtaagacacagcaaacatttggtagtcaaacagagtgtacttcctcaaatggtcaaaatccaagtccaggagcttacatccttccatcctatcctgtctcatcacctcgaactagtccaaagcatacatctcctcttattatatctccaaagaagtctcaagataattctgttaatttctcaaattcctggcctcttaaaagcttcgaaggactatcaaagccaagtccacagaagaagcttgtcagccaaaaatcgtctgatcctacgggtagaaatcatggagaaaattctcaagaaaaacctccagttcagcttacacctgccttggtgagatcgccatcttcccgacgaggtctaaatgggacaaagcctgttcctcccataccaaggggaataagccttttgcctgataaagctgatttaagcacagtgggacacaaaaagaaagagcctgatgatatttggaagtgtgaaaaagatagtcttccaattgatctttcagaattaaatttcaaggataaagatttggatcaagaagagatgcatagctctcttaggtcccttcgtaatagtgcagctaagaaaagagcaaaactgagtggcagtacttcagatcttgaaagccctgattctgcaatgaagctcgacttgacgatggactccccgtctctgtcttcctcaccaaacatcaattcttacagtgaaagtggagtttacagccaagaatcattgacttcttctctgtctacaactccccaggggaagagaataatgtcagacatatttccaacatttgggtcaaaaccttgtccaacaagactttcttctgcaaagaaaaaaatttctcatattgctgaacaaagccccagtgcagggtcatcatcaaatccacagcaaatttccagttttgacttcacaaccacaaaggctttatcagaagactcagtagtagttgttggaaaaggcgtatttggaagtttaagttcagcaccagcaacctgcagccaatcagtgatatcttctgtggaaaatggggatacattttcaattaaacaaagtattgaaccaccatcagggatttatggaagatcagtccagcaaaatatttcatcatatcttgatgttgagaatgaaaaagatgctaaagtttctatttctaaatctacttataacaagatgagacaaaagagaaaagaagagaaagaactgtttcacaataaagattgtgaaaagaaggaaaaaaattcctgggaacgaatgagacatacaggaactgagaaaatggcatctgaaagtgaaacacctactggagctatttcacagtataaagaaaggatgccttctgtcactcatagtccagaaataatggatctgtcagaactacgaccattctctaaaccagaaatagcactgacagaagccctgaggcttttggctgatgaggattgggagaagaaaattgagggactgaattttattagatgcttagctgcttttcattctgagatactgaacacaaagttgcatgaaacaaattttgcagttgttcaagaggtgaaaaatttacgttctggagtttctcgtgctgctgtggtctgtttaagtgatcttttcacttatttgaaaaagagcatggatcaagagctagataccacagtaaaagttttgttgcacaaggctggtgaatcaaatacatttataagagaagatgttgacaaagcattgagagctatggttaataatgtaactcctgcacgtgcagttgtttctcttatcaatggtggacaaagccatttacacattgctgtaagaaggtgtacagcccagcatttatcagatgtattggaatttatggaaccagaacgtattttatctgcagcaaaggatatggctgaacgcatattaccagctgctgctaagtttgctcaagacagttcacaagaaaccaggtattatggtcgaaagatgctgttcttcatgatgtgtcatcctaactttgaaaaaatgcttgaaaagtatgtcccatctaaagatttgccatatattaaggactctgttagaaacttacagcaaaagggtttgggggagataccattagatactccttcagcaaaaggaagacgatctcatactggcagtgttggaaatacaagatcatcatctgtttctagagatgctttcaattcagctgaaagagctgtaactgaagttcgtgaagtcaccagaaaatcagtccctcgtaattccttagaaagtgctgagtaccttaaactcataactggcttattaaatgcaaaagactttcgtgatcgtattaatgggattaagcagcttttatcagatacagaaaataatcaagaccttgttgttggaaacattgtgaagatttttgatgcttttaaatctcgacttcatgattctaatagtaaagtaaatctggtggctctggaaacaatgcacaaaatgattcctctacttagagaccacttatctcctataatcaacatgctaattccagcaatagtggataacaatctgaattccaagaatccaggcatctatgcggctgctacaaatgttgttcaggcactgagtcagcatgtagacaattacttacttctacagccattttgcacaaaagctcagtttttaaatggaaaagcaaaacaggacatgacggaaaagcttgctgatattgttacggaactttatcaaaggaagccgcatgccacagagcagaaagtgttggttgttttatggcatctcttaggaaatatgacaaatagtggctctctgcctggagctggaggaaatatacgaacagccacagctaaattatcaaaagcactctttgcacagatgggtcagaatctgttaaatcaggctgcatctcaaccaccacatatcaaaaagagtttggaggaattactcgatatgacaattttaaatgaattatgaatcttcgataaaatactgtatgatgaacaaaagtgtttacatgatgacaaatggaactttctaaaagttatgttatcagtgcctgcacttcacatccagcaaattaagtcaatggctatttttatttgcagcctatgagtacacatctgtcctatatcaaccttaccacttatattcatcacataaaaacctaaaatattcatgaataattcatgaaatctgagtcacatgggatgaattcaattttaatatttttgagaaaagtcctgctcatttgcactattctatagaaactacaatttgttgccctatatgtaaaattagaattgtaattaaaaatacacattttattatgtaatcatgttctggtatgtctcatttctcagccttattttataacgtggaagtcattgaactatgttatcagaaactaagtttgtatattatttgtgaaaaacatgtatttctgaatcagtccgctaatatgattgtgcagtattagcttgcttttgctgctgtgttaatgtcatatatttgcttaccttttgggttcaattatctacataattgtgaaatttaacaagttataataaagcatgacaaccaaagttttagaaaacattaaacattttaaatgcacgtttaaaaaacgtgttgaatgtaacccccctatttttgtgtgcaaacactaaattttattgctttatgttttgacctttataaaggtgttattctgctgcccagttttgtaattctcaaaaatagtgccaggtcttctatagcttttttcagaattcatgggcttacaagtactgtatgcatctttaaaaagaaaaggaatgttataaaataaaaggatttatttctttaga

SEQ ID NO: 8141 - protein, 1773 aa, Homo sapiens
MAAAPSALLLLPPFPVLSTYRLQSRSRPSAPETDDSRVGGIMRGEKNYYFRGAAGDHGSCPTTTSPLASALLMPSEAVSSSWSESGGGLSGGDEEDTRLLQLLRTARDPSEAFQALQAALPRRGGRLGFPRRKEALYRALGRVLVEGGSDEKRLCLQLLSDVLRGQGEAGQLEEAFSLALLPQLVVSLREENPALRKDALQILHICLKRSPGEVLRTLIQQGLESTDARLRASTALLLPILLTTEDLLLGLDLTEVIISLARKLGDQETEEESETAFSALQQIGERLGQDRFQSYISRLPSALRRHYNRRLESQFGSQVPYYLELEASGFPEDPLPCAVTLSNSNLKFGIIPQELHSRLLDQEDYKNRTQAVEELKQVLGKFNPSSTPHSSLVGFISLLYNLLDDSNFKVVHGTLEVLHLLVIRLGEQVQQFLGPVIAASVKVLADNKLVIKQEYMKIFLKLMKEVGPQQVLCLLLEHLKHKHSRVREEVVNICICSLLTYPSEDFDLPKLSFDLAPALVDSKRRVRQAALEAFAVLASSMGSGKTSILFKAVDTVELQDNGDGVMNAVQARLARKTLPRLTEQGFVEYAVLMPSSAGGRSNHLAHGADTDWLLAGNRTQSAHCHCGDHVRDSMHIYGSYSPTICTRRVLSAGKGKNKLPWENEQPGIMGENQTSTSKDIEQFSTYDFIPSAKLKLSQGMPVNDDLCFSRKRVSRNLFQNSRDFNPDCLPLCAAGTTGTHQTNLSGKCAQLGFSQICGKTGSVGSDLQFLGTTSSHQEKVYASLNFGSKTQQTFGSQTECTSSNGQNPSPGAYILPSYPVSSPRTSPKHTSPLIISPKKSQDNSVNFSNSWPLKSFEGLSKPSPQKKLVSQKSSDPTGRNHGENSQEKPPVQLTPALVRSPSSRRGLNGTKPVPPIPRGISLLPDKADLSTVGHKKKEPDDIWKCEKDSLPIDLSELNFKDKDLDQEEMHSSLRSLRNSAAKKRAKLSGSTSDLESPDSAMKLDLTMDSPSLSSSPNINSYSESGVYSQESLTSSLSTTPQGKRIMSDIFPTFGSKPCPTRLSSAKKKISHIAEQSPSAGSSSNPQQISSFDFTTTKALSEDSVVVVGKGVFGSLSSAPATCSQSVISSVENGDTFSIKQSIEPPSGIYGRSVQQNISSYLDVENEKDAKVSISKSTYNKMRQKRKEEKELFHNKDCEKKEKNSWERMRHTGTEKMASESETPTGAISQYKERMPSVTHSPEIMDLSELRPFSKPEIALTEALRLLADEDWEKKIEGLNFIRCLAAFHSEILNTKLHETNFAVVQEVKNLRSGVSRAAVVCLSDLFTYLKKSMDQELDTTVKVLLHKAGESNTFIREDVDKALRAMVNNVTPARAVVSLINGGQSHLHIAVRRCTAQHLSDVLEFMEPERILSAAKDMAERILPAAAKFAQDSSQETRYYGRKMLFFMMCHPNFEKMLEKYVPSKDLPYIKDSVRNLQQKGLGEIPLDTPSAKGRRSHTGSVGNTRSSSVSRDAFNSAERAVTEVREVTRKSVPRNSLESAEYLKLITGLLNAKDFRDRINGIKQLLSDTENNQDLVVGNIVKIFDAFKSRLHDSNSKVNLVALETMHKMIPLLRDHLSPIINMLIPAIVDNNLNSKNPGIYAAATNVVQALSQHVDNYLLLQPFCTKAQFLNGKAKQDMTEKLADIVTELYQRKPHATEQKVLVVLWHLLGNMTNSGSLPGAGGNIRTATAKLSKALFAQMGQNLLNQAASQPPHIKKSLEELLDMTILNEL

SEQ ID NO: 8142 - DNA, 1988 bp, Homo sapiens
agacgggggccattttgccagaggctgcctcccggagttgggggcggcctggcggcaggctgaagctgttctttttcctctctacctatcggctccagagccgcagtcgtccttccgccccagagaccgatgatagtcgagttgggggcattatgagaggagagaaaaactactacttccgtggagctgcgggggaccacggttcctgccccactacaacttcgcctctggcctcggccctcttgatgccctcggaggcagtctcaagcagctggtctgagtctggaggcggtttgtcagggggagatgaagaggacactcggctccttcaactcctccgcactgcccgggatccttctgaggccttccaggctttgcaagctgctttgccgcggcggggcggtcgacttggcttcccccgacgcaaggaagctttgtatcgggcactgggccgagtgcttgtggaaggaggtagtgatgagaagcggctctgcttgcaacttctctcggacgttctccggggtcagggggaggcaggccagcttgaagaggcctttagcttagcacttttgcctcaactagttgtctcgttacgggaagagaatccagccctgcggaaagatgcgctgcagatccttcatatatgtctgaaacgtagtcctggagaggtgctgagaacgcttatacaacaaggactggaaagtaccgatgcccgacttagagcttccacagcactactgcttcccatcttgcttactactgaggacttgttgcttggtctggatctcaccgaggtgataatatccctagcccgaaagcttggtgatcaggagacagaagaagaatctgagacagctttctccgcacttcaacaaattggggagcgacttggccaagacaggtttcaatcttacatttctcgtctgccctctgccctgaggagacactacaatcgccgcctggagtcccagtttggaagtcaggttccttattatttggaacttgaagcctctggatttcctgaagatccccttccctgtgcagtgactctttccaacagcaatcttaaatttgggattattcctcaggagctgcattcacgattattggatcaggaagactataagaaccggacccaggccgtcgaagaactaaagcaggtgctgggaaaatttaaccctagttctactcctcattctagtcttgttggcttcattagtttgctatataatttgttagacgattctaacttcaaagtggtgcatggcacacttgaagtcctgcatttactggttattcgccttggagagcaggtacagcagttcttgggaccagttatagcagcttctgtcaaagtgctggcggacaacaagttggtgatcaaacaagaatacatgaaaatcttcctcaagctaatgaaggaagtaggacctcagcaggtgctttgtttactcctggaacatctcaaacataagcattccagagtgagagaggaggtggtgaacatttgcatctgctccctgctgacctatcctagtgaggattttgacttgcccaaactgtcctttgatcttgccccagctcttgtagatagcaaacgcagggtacgccaagcagctttagaagcttttgccgtattggcatcatcaatgggctcaggtaaaaccagcatcctttttaaagctgtggatacagttgaactgcaagataatggagatggagtgatgaatgctgtgcaggccagattggctaggaaaaccttaccaaggctcacagagcagggatttgtggaatatgcagtactgatgccatcttctgccgggggtaggtcaaaccatttggcacatggagcagatacggactggcttttggctggtaacagaactcagagtgcacactgtcactgtggtgaccacgtgagggatagcatgcacatttatggatcttacagcccaactatctgtacccgaagggtattaagtgcagga

SEQ ID NO: 8143 - protein, 611 aa, Homo sapiens
MRGEKNYYFRGAAGDHGSCPTTTSPLASALLMPSEAVSSSWSESGGGLSGGDEEDTRLLQLLRTARDPSEAFQALQAALPRRGGRLGFPRRKEALYRALGRVLVEGGSDEKRLCLQLLSDVLRGQGEAGQLEEAFSLALLPQLVVSLREENPALRKDALQILHICLKRSPGEVLRTLIQQGLESTDARLRASTALLLPILLTTEDLLLGLDLTEVIISLARKLGDQETEEESETAFSALQQIGERLGQDRFQSYISRLPSALRRHYNRRLESQFGSQVPYYLELEASGFPEDPLPCAVTLSNSNLKFGIIPQELHSRLLDQEDYKNRTQAVEELKQVLGKFNPSSTPHSSLVGFISLLYNLLDDSNFKVVHGTLEVLHLLVIRLGEQVQQFLGPVIAASVKVLADNKLVIKQEYMKIFLKLMKEVGPQQVLCLLLEHLKHKHSRVREEVVNICICSLLTYPSEDFDLPKLSFDLAPALVDSKRRVRQAALEAFAVLASSMGSGKTSILFKAVDTVELQDNGDGVMNAVQARLARKTLPRLTEQGFVEYAVLMPSSAGGRSNHLAHGADTDWLLAGNRTQSAHCHCGDHVRDSMHIYGSYSPTICTRRVLSA

SEQ ID NO: 8144 - DNA, 681 bp, Homo sapiens
aaaattttttccctagtgttccagagagctaccaaagtgctttctgtgaggaagtcccatggtctggtttatatcttaacagcatcaatggctgttatatgagatggagtaataatgcaagcatggaaaccggtgatgaaactacaatagccatgtgggagataattacggcatgaactagagggatggcagcagagactgcagtagccaactgtcctttgtaatctgctccaccttttttggagggcacagtggaatttgggaggagaggagaaaactaactatacctcgtattttgctccaatgagttcaactgtatccacagctttaaaaaggatgctggttttacctgagcccattgatgatgccaatacggcaaaagcttctaaagctgcttggcgtaccctgcgtttgctatctacaagagctggggcaagatcaaaggacagtttgggcaagtcaaaatcctcactaggataggtcagcagggagcagatgcaaatgttcaccacctcctctctcactctggaatgcttatgtttgagatgttccaggagtaaacaaagcacctgctgaggtcctacttccttcattagcttgaggaagattttcatgtattcttgtttgatcaccaacttgttgtccgccagcactttgacagaagctgctataactggtccc

SEQ ID NO: 8145 - protein, 58 aa, Homo sapiens
MSSTVSTALKRMLVLPEPIDDANTAKASKAAWRTLRLLSTRAGARSKDSLGKSKSSLG

SEQ ID NO: 8146 - DNA, 619 bp, Homo sapiens
gtctgtatatatatatttacccttttccttctcctaattctagtgcctgactgagggctattagttctgccagctgagcactagttcctggagtgaaggaattactttcaagtattccattatcactgaccactgcataccccacttttcgaagtcctttttctacaaaggaacttccatcagagaatcgcttgaacccaggaggtggaggtagcagtgagccaagatcacaccactgcattccagcctgggcgacagagcgagactccatctcaaaaaaaaaaaaaaaaggaaaggaaggtttaagtgcctagtccattctagtattgcagttacaaacatttataatgacttaatgaacgtgtgaataaattgtaaattctttgtatgaaataaattttcagttttaaaagactatgttacaatatcctaagatactacataataagcaaatatgtttaagtatttgttttgttttttgggggatttacagggtcatcatcaaatccacagcaaatttccagttttgacttcacaaccacaaaggctttatcagaagactcagtagtagttgttggaaaaggcgtatttggaagtttaagttcagcaccagcaacct

SEQ ID NO: 8147 - protein, 37 aa, Homo sapiens
MFKYLFCFLGDLQGHHQIHSKFPVLTSQPQRLYQKTQ

SEQ ID NO: 8148 - DNA, 1349 bp, Homo sapiens
gtgaaggaattactttcaagtattccattatcactgaccatgcattccagcctgggcgacagagcgagactccatctcaaaaaaaaaaaaaaaaggaaaggaaggtttaagtgcctagtccattctagtattgcagttacaaacatttataatgacttaatgaacgtgtgaataaattgtaaattctttgtatgaaataaattttcagttttaaaagactatgttacaatatcctaagatactacataataagcaaatatgtttaagtatttgttttgttttttgggggatttacagggtcatcatcaaatccacagcaaatttccagttttgacttcacaaccacaaaggctttatcagaagactcagtagtagttgttggaaaaggtatttcaaagttatttcgcttcttaattatatgtattcatcatatagaagcaaagcctatcaataaggaatagaaaagaatgtgattcaagtgttgagtggaacttctttttaaaaatgtattacattatcttcattaaaataattagaagtgaatacttaccttcacatttctatcttctaatgaaactatagtaaattcatgtcattaattttcagagagatgtattatgtgacagctgcagtttaggtacttctaagactattttaggatagcttacttagttttagcatagtttaaattcaagtagcccttatttatcagcgtaataatcaatataaattaatataattatctcccatacaagatctagacaagtgaaaattaaactcctgttatatattttaagggggctaagggaccttgaacaaaattattgcaagtatcctttaaagctattttctattttaattgaaaactagaatgtggtaatatacattgagggtatgcatcttatttttgttcaatataatgaaatagaataaacgttttgaaaaatttgtcctaacttctttgcttgatagtctcattaggttattttaaaaccctcctcagattggctacagcttactcttgtaaacttattttctgttattcctttatttgcccggccaagctcatttattcgctccacataaatgctttagaaactttcaactctgcatgtaaacatccccatctcatagatttccccctctccttctttactttatacagatccttcctgtcttcaaatcccagctcaaatccttgctccttgaaaccatcttaaacacccagctctgccaggtgcagtggctcactcctgtaatcccattctttgggaggcccaggcgggcagatcacttgaactcaagagttcaagaccagcctggacaacatggcaaaaccccatctctac

SEQ ID NO: 8149 - protein, 43 aa, Homo sapiens
MHSSLGDRARLHLKKKKKRKGRFKCLVHSSIAVTNIYNDLMNV

SEQ ID NO: 8150 - DNA, 844 bp, Homo sapiens
tactttataaaagtatcagtctgcaacatagtggaagttttgttgttttttgttggtttttttttgagatggagttttgctctgtcgcccaggctggagttgcagtgagccgagattgcgccattgcactccagcctgggtgacagagcgagactctgtctcaaaaaaaaaaaaaagaaagaaaaatacaggaataatgcataacaatatattatcctacaaaacatgagatatctgcagtgtgaaaactacacaaatttctgatgcttttactggaaaaacaattttatgaagtttaagaacagtcagagaaaaacaacacaataattaagatgtggatgatataatggctgtggtggtgacagaaattttcaatgtagtcagatgcttatgttaaatttctagtccccgtcattgtttgtccttaagcaagttacttaatttctgttagtctctgtttccttgtctataaaattaggaagggtggactaggtgaccagtaatgtcccatataaaatctaaaatttttatagtaatgatatatggccgggtgtggtggctcacacctgtaatcccagcactttgggaggtggaggcaggtagatcacctgaggtcaggagtttgagaccagcctgcgaacatggttaaaaccccgcctctactcaaaatataaaaattagccaggcatggtggcacatgcctgtaatcccagctacccaggaggctgaagcaggagaatcacaccaacctgggaggcagaggttgcagtgagctgagattgtgccactgcactccagactgagaaacagagcgagactccatctcaaaaaaaaaaaaaaaagg

SEQ ID NO: 8151 - protein, 48 aa, Homo sapiens
MSHIKSKIFIVMIYGRVWWLTPVIPALWEVEAGRSPEVRSLRPACEHG

SEQ ID NO: 8152 - DNA, 1340 bp, Homo sapiens
tctcgacttcatgattctaatagtaaagtaaatctggtggctctggaaacaatgcacaaaatgattcctctacttagagaccacttatctcctataatcaacatgctaattccagcaatagtggataacaatctgaattccaagaatccaggcatctatgcggctgctacaaatgttgttcaggcactgagtcagcatgtagatattgttacggaactttatcaaaggaagccgcatgccacagagcagaaagtgttggttgttttatggcatctcttaggaaatatgacaaatagtggctctctgcctggagctggaggaaatatacgaacagccacagctaaattatcaaaagcactctttgcacagatgggtcagaatctgttaaatcaggctgcatctcaaccaccacatatcaaaaagagtttggaggaattactcgatatgacaattttaaatgaattatgaatcttcgataaaatactgtatgatgaacaaaagtgtttacatgatgacaaatggaactttctaaaagttatgttatcagtgcctgcacttcacatccagcaaattaagtcaatggctatttttatttgcagcctatgagtacacatctgtcctatatcaaccttaccacttatattcatcacataaaaacctaaaatattcatgaataattcatgaaatctgagtcacatgggatgaattcaattttaatatttttgagaaaagtcctgctcatttgcactattctatagaaactacaatttgttgccctatatgtaaaattagaattgtaattaaaaatacacattttattatgtaatcatgttctggtatgtctcatttctcagccttattttataacgtggaagtcattgaactatgttatcagaaactaagtttgtatattatttgtgaaaaacatgtatttctgaatcagtccgctaatatgattgtgcagtattagcttgcttttgctgctgtgttaatgtcatatatttgcttaccttttgggttcaattatctacataattgtgaaatttaacaagttataataaagcatgacaaccaaagttttagaaaacattaaacattttaaatgcacgtttaaaaaacgtgttgaatgtaacccccctatttttgtgtgcaaacactaaattttattgctttatgttttgacctttataaaggtgttattctgctgcccagttttgtaattctcaaaaatagtgccaggtcttctatagcttttttcagaattcatgggcttacaagtactgtatgcatctttaaaaagaaaaggaatgttataaaataaaaggatttatttctttaga

SEQ ID NO: 8153 - protein, 138 aa, Homo sapiens
MHKMIPLLRDHLSPIINMLIPAIVDNNLNSKNPGIYAAATNVVQALSQHVDIVTELYQRKPHATEQKVLVVLWHLLGNMTNSGSLPGAGGNIRTATAKLSKALFAQMGQNLLNQAASQPPHIKKSLEELLDMTILNEL

SEQ ID NO: 8154 - DNA, 849 bp, Homo sapiens
gagggcggggaccgctgcgcctacctgcctttccctccatagggacttcccaaaggaaaggagggcgtttaggggctttcacacgcctgatcttaaacacagcgccctgacccctccccaccaaaaacggcaaaatgtcatttttgggggcaaatctaaggttttccctacaattgttcaagctttcacactaaaacatttacctaaaaacgggcagaaattcagccttaaacccacaaatctcacgatggtatagaccctgggcccactcaggtttcctgaaaactaaacagttctggagttaggggtttggagaacgggctattgttaaagaaaaaagtatttagtgacacttgttaaagcacaaaaagagggctttattcaggaccatcgcaacaggtatagggaccactgactgcaatggagacttgcagtagggaaagagatattgggctcaactcctcatacagcatgggcaagtggagatttatagccaaggagcggtgacaggccaagataatgaggcatcacctgggggatggtggagactgaagaacctgatcagatattgaggatgatcagctatcaaggatgggggtttattgctaatctgacttagcaaagttctttgcttaaactggattttacaaagaaagtgtacagaagagcctagcagaagattcagaaacctgactaaagttggccaagcaaaaaaaaaaatctttgtatctgaagggatatgttatcctctggacaaattgagggggactgtgcgttaacaatcttagcagtcctcttcagttgtaccaccatctccactttaataaaaaaaaattttctttcaaatct

SEQ ID NO: 8155 - protein, 35 aa, Homo sapiens
MLSSGQIEGDCALTILAVLFSCTTISTLIKKNFLS

SEQ ID NO: 8156 - DNA, 441 bp, Homo sapiens
gagggcggggaccgctgcgcctacctgcctttccctccatagggacttcccaaaggaaaggagggcgtttaggggctttcacacgcctgatcttaaacacagcgccctgacccctccccaccaaaaacggcaaaatgtcatttttgggggcaaatctaaggttttccctacaattgttcaagctttcacactaaaacatttacctaaaaacgggcagaaattcagccttaaacccacaaatctcacgatggtatagaccctgggcccactcaggtttcctgaaaactaaacagttctggagttaggggtttggagaacgggctatatctgaagggatatgttatcctctggacaaattgagggggactgtgcgttaacaatcttagcagtcctcttcagttgtaccaccatctccactttaataaaaaaaaattttctttc

SEQ ID NO: 8157 - protein, 33 aa, Homo sapiens
MLSSGQIEGDCALTILAVLFSCTTISTLIKKNF

SEQ ID NO: 8158 - DNA, 3198 bp, Homo sapiens
gacgcatgcgcatcgtgccctggaccaggcggccgtggcgcgggtggcggctgctgtgctggctgtggggacggaggcggtgaagtgccatcttcggctaggtcgtcacaggctccggctcatggcatcaagtggcatccatcataagatcgttaactgaagacaatatgcaaaattctcacatggatgaatacagaaattctagtaatggcagcacaggcaacagttcagaggtagtggtagaacatcctactgatttcagtactgagattatgaacgttacagaaatggaacagtcacctgatgactctcccaatgtgaatgcatctacagaagaaactgaaatggcaagtgctgtggaccttccagtgacgctgacagaaacagaagcaaatttccctccagaatatgaaaaattttggaaaactgtagaaaataatcctcaggattttacaggctgggtatatttgcttcaatatgtagaacaggagaatcacttgatggctgccaggaaggcatttgacagatttttcatacactatccgtattgctatggttactggaaaaagtatgcagaccttgaaaagcggcacgacaacattaaaccatcagatgaggtgcgttaaacctctacagtttgtcaagctttgcagtgcaagcctctgtattacactgcagcttaacaagtagggcagggcttttctctcacttacatttatttctcattttccaaacaatatagttggtttgctagtcacatttgctacgtcttattgcatttttggtcagacgctgtcattgatgctctaatgggtctgtgccctatggtctgtaacccaaagcctgcccacacaacccggtcagaatgcagggactgctgcgctttgaagatcaagactctgcacgtggggatcagaacattgccatgttctatccaacctccacccaaatggtttatcggcgggggcttcaggcaatacctcttagtgttgacctttggatacattatataaacttcttaaaagaaacattggaccctggtgatcctgagacaaacaatacaataagaggaacttttgagcatgctgttctagctgcaggaacagatttccgttctgacagactgtgggaaatgtatataaactgggaaaatgagcagggaaacctgagagaagttacagctatatatgatcgtattcttggtattccaacacagctgtatagtcatcattttcagagatttaaagaacatgtacagaataatttgcctagagatcttttaactggtgaacagtttattcagttgcgaagggaattagcttctgtaaatggtcatagtggtgatgatggtcctcctggtgatgatctaccatcgggaattgaagacataaccgatcctgcaaagctaattacagaaatagaaaacatgagacatagaatcattgagattcatcaagaaatgtttaattataatgagcatgaagttagtaaaaggtggacatttgaagaaggtattaaaagaccttactttcatgtgaaacctttggaaaaggcacaactaaaaaactggaaagaatacttagaatttgaaattgaaaatgggactcatgaacgagttgtggttctctttgaaagatgtgtcatatcatgtgccctctatgaggagttttggattaagtatgccaagtacatggaaaaccatagcattgaaggagtgaggcatgtcttcagcagagcttgtactatacatctcccaaagaaacccatggtgcatatgctttgggcagcttttgaggaacagcagggtaatattaatgaagccaggaatatcttgaaaacatttgaagaatgtgttctaggattggcaatggttcgtttacgaagagtaagtttagaacgacggcatggaaatctggaagaagctgaacatttgcttcaggatgccattaagaatgccaaatcaaataatgaatcttcattttatgctgtcaaactagcccggcatcttttcaaaatacagaaaaaccttccaaaatcaagaaaggtgcttttggaagcaatcgaaagagacaaagagaacacaaagttatacctcaatttacttgaaatggaatatagtggtgacctcaaacaaaatgaagaaaatatcctaaattgttttgacaaagctgtacatggttcattacctattaaaatgagaattacattttctcagagaaaagtggaatttcttgaagattttggttccgatgttaataagcttctgaatgcttatgatgaacatcaaacactcctgaaagaacaggattctttaaaaaggaaagcagaaaatggatcagaagaaccagaggaaaagaaagcacatacagaagatacaacttcatcatctacacagatgattgatggtgatttacaggcaaaccaagctgtatataattatagtgcgtggtatcaatacaattatcagaatccttggaattatggacaatattatcctccccctccaacctgatgggaaaaatgtaaatttcaaatgcagtgtgtgaaaagtatgaaattattattttttttaatgagggatgtaaacagtataagcttgttgtatttgataacctgtcttccttgtttctgtgtaacatgatttgtttagtaatagggggaaaatgtcaattagtagcttaccacagatactgtttcctaccatttataaaatttactttttattgaaaaactattttttgatttttgcattaagtggtctagaattcttttgcaatgcatttgcaacagaattttgtagccttaaggggtaggaagaaaaacctgactgcaaatcatgtcagtgtagtacaaaattctgaaaacacataagggctggttatttacctccttttttttttttttttttaaagaaaaaaggacttttaacctttgctgacaaggttttgtctgtttcagttatacttgtgaattgtgatctaactgcagaaaggatacattattaaaatactttgccttggaatagattataaatgagaaaatggaatgtttgcatccctttaaaaatgaaaatcatatcaaaagtatgttgtttcaggagactttgtatttagaatattcatgtaaaacttgtgaacaagctttcattttgatcaaactgatcttcatttttgtaataaaacggaagactcatccagt

SEQ ID NO: 8159 - protein, 548 aa, Homo sapiens
MQGLLRFEDQDSARGDQNIAMFYPTSTQMVYRRGLQAIPLSVDLWIHYINFLKETLDPGDPETNNTIRGTFEHAVLAAGTDFRSDRLWEMYINWENEQGNLREVTAIYDRILGIPTQLYSHHFQRFKEHVQNNLPRDLLTGEQFIQLRRELASVNGHSGDDGPPGDDLPSGIEDITDPAKLITEIENMRHRIIEIHQEMFNYNEHEVSKRWTFEEGIKRPYFHVKPLEKAQLKNWKEYLEFEIENGTHERVVVLFERCVISCALYEEFWIKYAKYMENHSIEGVRHVFSRACTIHLPKKPMVHMLWAAFEEQQGNINEARNILKTFEECVLGLAMVRLRRVSLERRHGNLEEAEHLLQDAIKNAKSNNESSFYAVKLARHLFKIQKNLPKSRKVLLEAIERDKENTKLYLNLLEMEYSGDLKQNEENILNCFDKAVHGSLPIKMRITFSQRKVEFLEDFGSDVNKLLNAYDEHQTLLKEQDSLKRKAENGSEEPEEKKAHTEDTTSSSTQMIDGDLQANQAVYNYSAWYQYNYQNPWNYGQYYPPPPT

SEQ ID NO: 8160 - DNA, 4008 bp, Homo sapiens
gacgcatgcgcatcgtgccctggaccaggcggccgtggcgcgggtggcggctgctgtgctggctgtggggacggaggcggtgaagtgccatcttcggctaggtcgtcacaggctccggctcatggcatcaagtggcatccatcataagatcgttaactgaagacaatatgcaaaattctcacatggatgaatacagaaattctagtaatggcagcacaggcaacagttcagaggtagtggtagaacatcctactgatttcagtactgagattatgaacgttacagaaatggaacagtcacctgatgactctcccaatgtgaatgcatctacagaagaaactgaaatggcaagtgctgtggaccttccagtgacgctgacagaaacagaagcaaatttccctccagaatatgaaaaattttggaaaactgtagaaaataatcctcaggattttacaggctgggtatatttgcttcaatatgtagaacaggagaatcacttgatggctgccaggaaggcatttgacagatttttcatacactatccgtattgctatggttactggaaaaagtatgcagaccttgaaaagcggcacgacaacattaaaccatcagatgaggtgcgttaaacctctacagtttgtcaagctttgcagtgcaagcctctgtattacactgcagcttaacaagtagggcagggcttttctctcacttacatttatttctcattttccaaacaatatagttggtttgctagtcacatttgctacgtcttattgcatttttggtcagacgctgtcattgatgctctaatgggtctgtgccctatggtctgtaacccaaagcctgcccacacaacccggtcagaatgcagggactgctgcgctttgaagatcaagactctgcacgtggggatcagaacattgccatgttctatccaacctccacccaaatggtttatcggcgggggcttcaggcaatacctcttagtgttgacctttggatacattatataaacttcttaaaagaaacattggaccctggtgatcctgagacaaacaatacaataagaggaacttttgagcatgctgttctagctgcaggaacagatttccgttctgacagactgtgggaaatgtatataaactgggaaaatgagcagggaaacctgagagaagttacagctatatatgatcgtattcttggtattccaacacagctgtatagtcatcattttcagagatttaaagaacatgtacagaataatttgcctagagatcttttaactggtgaacagtttattcagttgcgaagggaattagcttctgtaaatggtcatagtggtgatgatggtcctcctggtgatgatctaccatcgggaattgaagacataaccgatcctgcaaagctaattacagaaatagaaaacatgagacatagaatcattgagattcatcaagaaatgtttaattataatgagcatgaagttagtaaaaggtggacatttgaagaaggtattaaaagaccttactttcatgtgaaacctttggaaaaggcacaactaaaaaactggaaagaatacttagaatttgaaattgaaaatgggactcatgaacgagttgtggttctctttgaaagatgtgtcatatcatgtgccctctatgaggagttttggattaagtatgccaagtacatggaaaaccatagcattgaaggagtgaggcatgtcttcagcagagcttgtactatacatctcccaaagaaacccatggtgcatatgctttgggcagcttttgaggaacagcagggtaatattaatgaagccaggaatatcttgaaaacatttgaagaatgtgttctaggattggcaatggttcgtttacgaagagtaagtttagaacgacggcatggaaatctggaagaagctgaacatttgcttcaggatgccattaagaatgccaaatcaaataatgaatcttcattttatgctgtcaaactagcccggcatcttttcaaaatacagaaaaaccttccaaaatcaagaaaggtgcttttggaagcaatcgaaagagacaaagagaacacaaagttatacctcaatttacttgaaatggaatatagtggtgacctcaaacaaaatgaagaaaatatcctaaattgttttgacaaagctgtacatggttcattacctattaaaatgagaattacattttctcagagaaaagtggaatttcttgaagattttggttccgatgttaataagcttctgaatgcttatgatgaacatcaaacactcctgaaagaacaggattctttaaaaaggaaagcagaaaatggatcagaagaaccagaggaaaagaaagcacatacagaagatacaacttcatcatctacacagatgattgatggtgatttacaggcaaaccaagctgtatataattatagtgcgtggtatcaatacaattatcagaatccttggaattatggacaatattatcctccccctccaacctgatgggaaaaatgtaaatttcaaatgcagtgtgtgaaaagtatgaaattattattttttttaatgagggatgtaaacagtataagcttgttgtatttgataacctgtcttccttgtttctgtgtaacatgatttgtttagtaatagggggaaaatgtcaattagtagcttaccacagatactgtttcctaccatttataaaatttactttttattgaaaaactattttttgatttttgcattaagtggtctagaattcttttgcaatgcatttgcaacagaattttgtagccttaaggggtaggaagaaaaacctgactgcaaatcatgtcagtgtagtacaaaattctgaaaacacataagggctggttatttacctccttttttttttttttttttaaagaaaaaaggacttttaacctttgctgacaaggttttgtctgtttcagttatacttgtgaattgtgatctaactgcagaaaggatacattattaaaatactttgccttggaatagattataaatgagaaaatggaatgtttgcatccctttaaaaatgaaaatcatatcaaaagtatgttgtttcaggagactttgtatttagaatattcatgtaaaacttgtgaacaagctttcattttgatcaaactgatcttcatttttgtaataaaacggaagactcatccagtaattgtttatgaatttattttggggggatcaattagtaatattaaccttatgttcacctttattagtggctcattggttttgaagtacaccttttctaaattcaggtcttgatcttcctgccaagatttttctgcttttagcattttgtttcccctcaagccttatgcttttgccttctcattatacaggcaatctgtccagataattttactgggagttactccctggtttgatgaggtccttagttccaattccctaatcagaacaataatatattaacaccaaacaaatcacagtcagatcaagacagtggatcaatttttattgagccacttaagtttacaacatgaggtaaaaggaaaaagttctccttgaccagtattttacacagctgtaggaaagtattttagaccagggattcataagggatttatctctcaaaagctgggaccaagtaaacaaattttattaactccttgaattttccagttgactcttcctttacaatagtaacaagttctaactagttgtgtaaatttcttcaaggccaagttttatcattgttgctaatatccttagagctgaagcactgctatttcaatcaatatccactaattccacttcaaaagtgagttttgcatttggtggaattctgttgaagaagtcaaggtacatttgataaaaagtgcctctcccctacccccataaccttagtgtaggataggctgactagataggctcactagataaattgagcttggactaggatcctccttacctggatgctttacaagtactcctaaattagc

SEQ ID NO: 8161 - protein, 548 aa, Homo sapiens; identical to SEQ ID NO: 8159

SEQ ID NO: 8162 - DNA, 3516 bp, Homo sapiens
atgcgcatcgtgccctggaccaggcggccgtggcgcgggtggcggctgctgtgctggctgtggggacggaggcggtgaagtgccatcttcggctaggtcgtcacaggctccggctcatggcatcaagtggcatccatcataagatcgttaactgaagacaatatgcaaaattctcacatggatgaatacagaaattctagtaatggcagcacaggcaacagttcagaggtagtggtagaacatcctactgatttcagtactgagattatgaacgttacagaaatggaacagtcacctgatgactctcccaatgtgaatgcatctacagaagaaactgaaatggcaagtgctgtggaccttccagtgacgctgacagaaacagaagcaaatttccctccagaatatgaaaaattttggaaaactgtagaaaataatcctcaggattttacaggctgggtatatttgcttcaatatgtagaacaggagaatcacttgatggctgccaggaaggcatttgacagatttttcatacactatccgtattgctatggttactggaaaaagtatgcagaccttgaaaagcggcacgacaacattaaaccatcagatgaggtgcgtacatcactgaataaacttatctccaataggtactgtaagccaattaataacaaaacaaagatttttttttttttttttttttggctggcagtacctaccatttatggtcaaacaatttttatagggtatttatttgcatttgtcactcttgtggcatttgtagctaatattttctctctttgttggcaggtgcgttaaacctctacagtttgtcaagctttgcagtgcaagcctctgtattacactgcagcttaacaagtagggcagggcttttctctcacttacatttatttctcattttccaaacaatatagttggtttgctagtcacatttgctacgtcttattgcatttttggtcagacgctgtcattgatgctctaatgggtctgtgccctatggtctgtaacccaaagcctgcccacacaacccggtcagaatgcagggactgctgcgctttgaagatcaagactctgcacgtggggatcagaacattgccatgttctatccaacctccacccaaatggtaatggtagattatttaaacaaaattccagtaattagtatttctaaggttcaccggataacacagtgttgcctctctgttaagaaataattaaatatttgaagtacagtttgctgttttcttcttaggtttatcggcgggggcttcaggcaatacctcttagtgttgacctttggatacattatataaacttcttaaaagaaacattggaccctggtgatcctgagacaaacaatacaataagaggaacttttgagcatgctgttctagctgcaggaacagatttccgttctgacagactgtgggaaatgtatataaactgggaaaatgagcagggaaacctgagagaagttacagctatatatgatcgtattcttggtattccaacacagctgtatagtcatcattttcagagatttaaagaacatgtacagaataatttgcctagagatcttttaactggtgaacagtttattcagttgcgaagggaattagcttctgtaaatggtcatagtggtgatgatggtcctcctggtgatgatctaccatcgggaattgaagacataaccgatcctgcaaagctaattacagaaatagaaaacatgagacatagaatcattgagattcatcaagaaatgtttaattataatgagcatgaagttagtaaaaggtggacatttgaagaaggtattaaaagaccttactttcatgtgaaacctttggaaaaggcacaactaaaaaactggaaagaatacttagaatttgaaattgaaaatgggactcatgaacgagttgtggttctctttgaaagatgtgtcatatcatgtgccctctatgaggagttttggattaagtatgccaagtacatggaaaaccatagcattgaaggagtgaggcatgtcttcagcagagcttgtactatacatctcccaaagaaacccatggtgcatatgctttgggcagcttttgaggaacagcagggtaatattaatgaagccaggaatatcttgaaaacatttgaagaatgtgttctaggattggcaatggttcgtttacgaagagtaagtttagaacgacggcatggaaatctggaagaagctgaacatttgcttcaggatgccattaagaatgccaaatcaaataatgaatcttcattttatgctgtcaaactagcccggcatcttttcaaaatacagaaaaaccttccaaaatcaagaaaggtgcttttggaagcaatcgaaagagacaaagagaacacaaagttatacctcaatttacttgaaatggaatatagtggtgacctcaaacaaaatgaagaaaatatcctaaattgttttgacaaagctgtacatggttcattacctattaaaatgagaattacattttctcagagaaaagtggaatttcttgaagattttggttccgatgttaataagcttctgaatgcttatgatgaacatcaaacactcctgaaagaacaggattctttaaaaaggaaagcagaaaatggatcagaagaaccagaggaaaagaaagcacatacagaagatacaacttcatcatctacacagatgattgatggtgatttacaggcaaaccaagctgtatataattatagtgcgtggtatcaatacaattatcagaatccttggaattatggacaatattatcctccccctccaacctgatgggaaaaatgtaaatttcaaatgcagtgtgtgaaaagtatgaaattattattttttttaatgagggatgtaaacagtataagcttgttgtatttgataacctgtcttccttgtttctgtgtaacatgatttgtttagtaatagggggaaaatgtcaattagtagcttaccacagatactgtttcctaccatttataaaatttactttttattgaaaaactattttttgatttttgcattaagtggtctagaattcttttgcaatgcatttgcaacagaattttgtagccttaaggggtaggaagaaaaacctgactgcaaatcatgtcagtgtagtacaaaattctgaaaacacataagggctggttatttacctccttttttttttttttttttaaagaaaaaaggacttttaacctttgctgacaaggttttgtctgtttcagttatacttgtgaattgtgatctaactgcagaaaggatacattattaaaatactttgccttggaatagattataaatgagaaaatggaatgtttgcatccctttaaaaatgaaaatcatatcaaaagtatgttgtttcaggagactttgtatttagaatattcatgtaaaacttgtgaacaagctttcattttgatcaaactgatcttcatttttgtaataaaacggaagactcatccagt

SEQ ID NO: 8163 - protein, 459 aa, Homo sapiens [sequence omitted]

SEQ ID NO: 8164 - DNA, 645 bp, Homo sapiens
gccctggaccaggcggccgtggcgcgggtggcggctgctgtgctggctgtggggacggaggcggtgaagtgccatcttcggctaggtcgtcacaggctccggctcatggcatcaagtggcatccatcataagatcgttaactgaagacaatatgcaaaattctcacatggatgaatacagaaattctagtaatggcagcacaggcaacagttcagaggtagtggtagaacatcctactgatttcagtactgagattatgaacgttacagaaatggaacagtcacctgatgactctcccaatgtgaatgcatctacagaagaaactgaaatggcaagtgctgtggaccttccagtgacgctgacagaaacagaagcaaatttccctccagaatatgaaaaattttggaaaactgtagaaaataatcctcaggattttacaggctgggtatatttgcttcaatatgtagaacaggaggttagtaactattaaaatggtatcagaagggacaaattaatcaagtcattaatttataatgaaacagtagaccttattgtttatgattaaaattgactcataattttcaaatgaagttgaataacattaggtagctacatttttagctttgaaaatagcttacagctttt

SEQ ID NO: 8165 - protein, 112 aa, Homo sapiens [sequence omitted]

SEQ ID NO: 8166 - DNA, 997 bp, Homo sapiens
tgaaagatgtgtcatatcatgtgccctctatgaggagttttggattaaggtaagaaaatcatgtgctcttaaacttgaatatattataaacattgatctagtgactaaccttttttgtacttctgttgaatgttgttcatataactatatctgttgcattaggagatggtctgcttgcaaccagatttgactgctgcatatgccaacctcgttgcctctcttcgtccttccttacagaaactagtctagtggttcaataaaggtgctgaatgggtttaaaaatagaattttatcgttctgtcacaaatttaatggcttgttcaactgtaaattattcagtatttcctcttttctgtatgtagtatgccaagtacatggaaaaccatagcattgaaggagtgaggcatgtcttcagcagagcttgtactatacatctcccaaagaaacccatggtgcatatgctttgggcagcttttgaggaacagcagggtaatattaatgaagccaggaatatcttgaaaacatttgaagaatgtgttctaggattggcaatggttcgtttacgaagagtaagtttagaacgacggcatggaaatctggaagaagctgaacatttgcttcaggatgccattaagaatgccaaatcaaataatgaatcttcattttatgctgtcaaactagcccggcatcttttcaaaatacagaaaaaccttccaaaatcaagaaaggtgcttttggaagcaatcgaaagagacaaagagaacacaaagttatacctcaatttacttgaaatggaatatagtggtgacctcaaacaaaatgaagaaaatatcctaaattgttttgacaaagctgtacatggttcattacctattaaaatgagaattacattttctcagagaaaagtggaatttcttgaagattttggttccgatgttaataagcttctgaatgcttatgatgaacatcaaacactcctgaaagaacaggattcttt

SEQ ID NO: 8167 - protein, 206 aa, Homo sapiens
MENHSIEGVRHVFSRACTIHLPKKPMVHMLWAAFEEQQGNINEARNILKTFEECVLGLAMVRLRRVSLERRHGNLEEAEHLLQDAIKNAKSNNESSFYAVKLARHLFKIQKNLPKSRKVLLEAIERDKENTKLYLNLLEMEYSGDLKQNEENILNCFDKAVHGSLPIKMRITFSQRKVEFLEDFGSDVNKLLNAYDEHQTLLKEQD

SEQ ID NO: 8168 - DNA, 2124 bp, Homo sapiens
tgaaagatgtgtcatatcatgtgccctctatgaggagttttggattaaggtaagaaaatcatgtgctcttaaacttgaatatattataaacattgatctagtgactaaccttttttgtacttctgttgaatgttgttcatataactatatctgttgcattaggagatggtctgcttgcaaccagatttgactgctgcatatgccaacctcgttgcctctcttcgtccttccttacagaaactagtctagtggttcaataaaggtgctgaatgggtttaaaaatagaattttatcgttctgtcacaaatttaatggcttgttcaactgtaaattattcagtatttcctcttttctgtatgtagtatgccaagtacatggaaaaccatagcattgaaggagtgaggcatgtcttcagcagagcttgtactatacatctcccaaagaaacccatggtgcatatgctttgggcagcttttgaggaacagcagggtaatattaatgaagccaggaatatcttgaaaacatttgaagaatgtgttctaggattggcaatggttcgtttacgaagagtaagtttagaacgacggcatggaaatctggaagaagctgaacatttgcttcaggatgccattaagaatgccaaatcaaataatgaatcttcattttatgctgtcaaactagcccggcatcttttcaaaatacagaaaaaccttccaaaatcaagaaaggtgcttttggaagcaatcgaaagagacaaagagaacacaaagttatacctcaatttacttgaaatggaatatagtggtgacctcaaacaaaatgaagaaaatatcctaaattgttttgacaaagctgtacatggttcattacctattaaaatgagaattacattttctcagagaaaagtggaatttcttgaagattttggttccgatgttaataagcttctgaatgcttatgatgaacatcaaacactcctgaaagaacaggattctttaaaaaggaaagcagaaaatggatcagaagaaccagaggaaaagaaagcacatacagaagatacaacttcatcatctacacagatgattgatggtgatttacaggcaaaccaagctgtatataattatagtgcgtggtatcaagtgagtctgcataattataattctttgttcatagatgttattagcataaattaggatagtttctttttttttaaaaaaagtttttgttccaattgtgtaatacattctttggtggttaagtactagaattttagcagtgaacacttgcttgttttcttaaacatagctgctttaattatacttttacatatggaactctgccacagttctaatatgctaacatacttactttttcctttcagtacaattatcagaatccttggaattatggacaatattatcctccccctccaacctgatgggaaaaatgtaaatttcaaatgcagtgtgtgaaaagtatgaaattattattttttttaatgagggatgtaaacagtataagcttgttgtatttgataacctgtcttccttgtttctgtgtaacatgatttgtttagtaatagggggaaaatgtcaattagtagcttaccacagatactgtttcctaccatttataaaatttactttttattgaaaaactattttttgatttttgcattaagtggtctagaattcttttgcaatgcatttgcaacagaattttgtagccttaaggggtaggaagaaaaacctgactgcaaatcatgtcagtgtagtacaaaattctgaaaacacataagggctggttatttacctccttttttttttttttttttaaagaaaaaaggacttttaacctttgctgacaaggttttgtctgtttcagttatacttgtgaattgtgatctaactgcagaaaggatacattattaaaatactttgccttggaatagattataaatgagaaaatggaatgtttgcatccctttaaaaatgaaaatcatatcaaaagtatgttgtttcaggagactttgtatttagaatattcatgtaaaacttgtgaacaagctttcattttgatcaaactgatcttcatttttgtaataaaacggaagactcatccagt

SEQ ID NO: 8169 - protein, 272 aa, Homo sapiens
MENHSIEGVRHVFSRACTIHLPKKPMVHMLWAAFEEQQGNINEARNILKTFEECVLGLAMVRLRRVSLERRHGNLEEAEHLLQDAIKNAKSNNESSFYAVKLARHLFKIQKNLPKSRKVLLEAIERDKENTKLYLNLLEMEYSGDLKQNEENILNCFDKAVHGSLPIKMRITFSQRKVEFLEDFGSDVNKLLNAYDEHQTLLKEQDSLKRKAENGSEEPEEKKAHTEDTTSSSTQMIDGDLQANQAVYNYSAWYQVSLHNYNSLFIDVISIN

SEQ ID NO: 8170 - DNA, 2934 bp, Homo sapiens
tgaaagatgtgtcatatcatgtgccctctatgaggagttttggattaaggtaagaaaatcatgtgctcttaaacttgaatatattataaacattgatctagtgactaaccttttttgtacttctgttgaatgttgttcatataactatatctgttgcattaggagatggtctgcttgcaaccagatttgactgctgcatatgccaacctcgttgcctctcttcgtccttccttacagaaactagtctagtggttcaataaaggtgctgaatgggtttaaaaatagaattttatcgttctgtcacaaatttaatggcttgttcaactgtaaattattcagtatttcctcttttctgtatgtagtatgccaagtacatggaaaaccatagcattgaaggagtgaggcatgtcttcagcagagcttgtactatacatctcccaaagaaacccatggtgcatatgctttgggcagcttttgaggaacagcagggtaatattaatgaagccaggaatatcttgaaaacatttgaagaatgtgttctaggattggcaatggttcgtttacgaagagtaagtttagaacgacggcatggaaatctggaagaagctgaacatttgcttcaggatgccattaagaatgccaaatcaaataatgaatcttcattttatgctgtcaaactagcccggcatcttttcaaaatacagaaaaaccttccaaaatcaagaaaggtgcttttggaagcaatcgaaagagacaaagagaacacaaagttatacctcaatttacttgaaatggaatatagtggtgacctcaaacaaaatgaagaaaatatcctaaattgttttgacaaagctgtacatggttcattacctattaaaatgagaattacattttctcagagaaaagtggaatttcttgaagattttggttccgatgttaataagcttctgaatgcttatgatgaacatcaaacactcctgaaagaacaggattctttaaaaaggaaagcagaaaatggatcagaagaaccagaggaaaagaaagcacatacagaagatacaacttcatcatctacacagatgattgatggtgatttacaggcaaaccaagctgtatataattatagtgcgtggtatcaagtgagtctgcataattataattctttgttcatagatgttattagcataaattaggatagtttctttttttttaaaaaaagtttttgttccaattgtgtaatacattctttggtggttaagtactagaattttagcagtgaacacttgcttgttttcttaaacatagctgctttaattatacttttacatatggaactctgccacagttctaatatgctaacatacttactttttcctttcagtacaattatcagaatccttggaattatggacaatattatcctccccctccaacctgatgggaaaaatgtaaatttcaaatgcagtgtgtgaaaagtatgaaattattattttttttaatgagggatgtaaacagtataagcttgttgtatttgataacctgtcttccttgtttctgtgtaacatgatttgtttagtaatagggggaaaatgtcaattagtagcttaccacagatactgtttcctaccatttataaaatttactttttattgaaaaactattttttgatttttgcattaagtggtctagaattcttttgcaatgcatttgcaacagaattttgtagccttaaggggtaggaagaaaaacctgactgcaaatcatgtcagtgtagtacaaaattctgaaaacacataagggctggttatttacctccttttttttttttttttttaaagaaaaaaggacttttaacctttgctgacaaggttttgtctgtttcagttatacttgtgaattgtgatctaactgcagaaaggatacattattaaaatactttgccttggaatagattataaatgagaaaatggaatgtttgcatccctttaaaaatgaaaatcatatcaaaagtatgttgtttcaggagactttgtatttagaatattcatgtaaaacttgtgaacaagctttcattttgatcaaactgatcttcatttttgtaataaaacggaagactcatccagtaattgtttatgaatttattttggggggatcaattagtaatattaaccttatgttcacctttattagtggctcattggttttgaagtacaccttttctaaattcaggtcttgatcttcctgccaagatttttctgcttttagcattttgtttcccctcaagccttatgcttttgccttctcattatacaggcaatctgtccagataattttactgggagttactccctggtttgatgaggtccttagttccaattccctaatcagaacaataatatattaacaccaaacaaatcacagtcagatcaagacagtggatcaatttttattgagccacttaagtttacaacatgaggtaaaaggaaaaagttctccttgaccagtattttacacagctgtaggaaagtattttagaccagggattcataagggatttatctctcaaaagctgggaccaagtaaacaaattttattaactccttgaattttccagttgactcttcctttacaatagtaacaagttctaactagttgtgtaaatttcttcaaggccaagttttatcattgttgctaatatccttagagctgaagcactgctatttcaatcaatatccactaattccacttcaaaagtgagttttgcatttggtggaattctgttgaagaagtcaaggtacatttgataaaaagtgcctctcccctacccccataaccttagtgtaggataggctgactagataggctcactagataaattgagcttggactaggatcctccttacctggatgctttacaagtactcctaaattagc

SEQ ID NO: 8171 - protein, 272 aa, Homo sapiens; identical to SEQ ID NO: 8169

SEQ ID NO: 8172 - DNA, 2566 bp, Homo sapiens
tttttttttttttttttttttttttgagacagagtcttgctctgtcacctaggctggaatgcagtggtgcgatctcggctcactgcaacctccacctcccaggttcacgccattctcctgcttcagcctcccgagctgggactacaggcatgcgccaccatggccagctaaattttgtatttttagtagagatggggttttgtcacgttggccaggctggtctcaaactcctgacctcaggtgatccgcctgcctcagcctcccaaaatgctgagattacaggcatgagccaccgcgcccggcccacacagctaggattttaacctagataatatgactccacagcccatatacttagcaattatatatataatgttaagcatagcaatctcaacatatgtatgttacatgcttgtgtaacagtgactcttcctagtcggctaagaatgggttacaaatgcctcaggatagctatgtccaacctggctggaggctctcaagggctgcacccaagtatcctcctgcagtgagcagctgactcaagtcaccacagtgtgcttgctgtataaatgttattttttgtgagtgttgacaggaaaaagtttaggatgaaacactgtgttcagtacataacactacagttgcagtcttgtcactaattcttgtaaataccgaatttttaaaaaatctcttactttttttgtaacaaagagtataaactataggctttatttcttcttcagtactagtactactgaaaacacaactgctaacataaaaggatcgttttctaattttagacacttcttactcgggagaagttatcttgattacccagcttttttccttatagtttcttgcagaacataaattattaggaaacattaaaaatgtggccaagacagctaacaaggaccacttggttacagcctataaccatctttttgaaactaagcgttttaagggtactgaaagtataagtaaagtgtctgagcaagtaaaaaatgtgaagcttaatgaagataaacccaaagaaaccaagtctgaagagaccctggatgagggtccaccaaaatatactaaatctgttctgaaaaagggagataaaaccaactttcccaaaaagggagatgttgttcactgctggtatacaggaacactacaagatgggactgtttttgatactaatattcaaacaagtgcaaagaagaagaaaaatgccaagcctttaagttttaaggtcggagtaggcaaagttatcagaggatgggatgaagctctcttgactatgagtaaaggagaaaaggctcgactggagattgaaccagaatgggcttacggaaagaaaggacagcctgatgccaaaattccaccaaatgcaaaactcacttttgaagtggaattagtggatattgattgaaatagcagtgcttcagctctaaggatattagcaacaatgataaaacttggccttgaagaaatttacacaactagttagaacttgttactattgtaaaggaagagtcaactggaaaattcaaggagttaataaaatttgtttacttggtcccagcttttgagagataaatcccttatgaatccctggtctaaaatactttcctacagctgtgtaaaatactggtcaaggagaactttttccttttacctcatgttgtaaacttaagtggctcaataaaaattgatccactgtcttgatctgactgtgatttgtttggtgttaatatattattgttctgattagggaattggaactaaggacctcatcaaaccagggagtaactcccagtaaaattatctggacagattgcctgtataatgagaaggcaaaagcataaggcttgaggggaaacaaaatgctaaaagcagaaaaatcttggcaggaagatcaagacctgaatttagaaaaggtgtacttcaaaaccaatgagccactaataaaggtgaacataaggttaatattactaattgatccccccaaaataaattcataaacaattactggatgagtcttccgttttattacaaaaatgaagatcagtttgatcaaaatgaaagcttgttcacaagttttacatgaatattctaaatacaaagtctcctgaaacaacatacttttgatatgattttcatttttaaagggatgcaaacattccattttctcatttataatctattccaaggcaaagtattttaataatgtatcctttctgcagttagatcacaattcacaagtataactgaaacagacaaaaccttgtcagcaaaggttaaaagtccttttttctttaaaaaaaaaaaaaaaaaaggaggtaaataaccagcccttatgtgttttcagaattttgtactacactgacatgatttgcagtcaggtttttcttcctaccccttaaggctacaaaattctgttgcaaatgcattgcaaaagaattctagaccacttaatgcaaaaatcaaaaaatagtttttcaataaaaagtaaattttataaatggtaggaaacagtatctgtggtaagctactaattgacattttccccctatta

SEQ ID NO: 8173 - protein, 43 aa, Homo sapiens [sequence omitted]

SEQ ID NO: 8174 - DNA, 972 bp, Homo sapiens
aattccaccaaatgcaaaactcacttttgaagtggaattagtggatattgattgaaatagcagtgcttcagctctaaggatattagcaacaatgataaaacttggccttgaagaaatttacacaactagttagaacttgttactattgtaaaggaagagtcaactggaaaattcaaggagttaataaaatttgtttacttggtcccagcttttgagagataaatcccttatgaatccctggtctaaaatactttcctacagctgtgtaaaatactggtcaaggagaactttttccttttacctcatgttgtaaacttaagtggctcaataaaaattgatccactgtcttgatctgactgtgatttgtttggtgttaatatattattgttctgattagggaattggaactaaggacctcatcaaaccagggagtaactcccagtaaaattatctggacagattgcctgtataatgagaaggcaaaagcataaggcttgaggggaaacaaaatgctaaaagcagaaaaatcttggcaggaagatcaagacctgaatttagaaaaggtgtacttcaaaaccaatgagccactaataaaggtgaacataaggttaatattactaattgatccccccaaaataaattcataaacaattactggatgagtcttccgttttattacaaaaatgaagatcagtttgatcaaaatgaaagcttgttcacaagttttacatgaatattctaaatacaaagtctcctgaaacaacatacttttgatatgattttcatttttaaagggatgcaaacattccattttctcatttataatctattccaaggcaaagtattttaataatgtatcctttctgcagttagatcacaattcacaagtataactgaaacagacaaaaccttgtcagcaaaggttaaaagtcctttttttacactgacatgatttgcagtcaggtttttctt

SEQ ID NO: 8175 - protein, 45 aa, Homo sapiens [sequence omitted]

SEQ ID NO: 8176 - DNA, 1726 bp, Homo sapiens
tttttttttttttttttttttttttgagacagagtcttgctctgtcacctaggctggaatgcagtggtgcgatctcggctcactgcaacctccacctcccaggttcacgccattctcctgcttcagcctcccgagctgggactacaggcatgcgccaccatggccagctaaattttgtatttttagtagagatggggttttgtcacgttggccaggctggtctcaaactcctgacctcaggtgatccgcctgcctcagcctcccaaaatgctgagattacaggcatgagccaccgcgcccggcccacacagctaggattttaacctagataatatgactccacagcccatatacttagcaattatatatataatgttaagcatagcaatctcaacatatgtatgttacatgcttgtgtaacagtgactcttcctagtcggctaagaatgggttacaaatgcctcaggatagctatgtccaacctggctggaggctctcaagggctgcacccaagtatcctcctgcagtgagcagctgactcaagtcaccacagtgtgcttgctgtataaatgttattttttgtgagtgttgacaggaaaaagtttaggatgaaacactgtgttcagtacataacactacagttgcagtcttgtcactaattcttgtaaataccgaatttttaaaaaatctcttactttttttgtaacaaagagtataaactataggctttatttcttcttcagtactagtactactgaaaacacaactgctaacataaaaggatcgttttctaattttagacacttcttactcgggagaagttatcttgattacccagcttttttccttatagtttcttgcagaacataaattattaggaaacattaaaaatgtggccaagacagctaacaaggaccacttggttacagcctataaccatctttttgaaactaagcgttttaagggtactgaaagtataagtaaagtgtctgagcaagtaaaaaatgtgaagcttaatgaagataaacccaaagaaaccaagtctgaagagaccctggatgagggtccaccaaaatatactaaatctgttctgaaaaagggagataaaaccaactttcccaaaaagggagatgttgttcactgctggtatacaggaacactacaagatgggactgtttttgatactaatattcaaacaagtgcaaagaagaagaaaaatgccaagcctttaagttttaaggtcggagtaggcaaagttatcagaggatgggatgaagctctcttgactatgagtaaaggagaaaaggctcgactggagattgaaccagaatgggcttacggaaagaaaggacagcctgatgccaaaattccaccaaatgcaaaactcacttttgaagtggaattagtggatattgattgaaatagcagtgcttcagctctaaggatattagcaacaatgataaaacttggccttgaagaaatttacacaactagttagaacttgttactattgtaaaggaagagtcaactggaaaattcaaggagttaataaaatttgtttacttggtcccagcttttgagagataaatcccttatgaatccctggtctaaaatactttcctacagctgtgtaaaatactggtcaaggagaactttttccttttacctcatgttgtaaacttaagtggctcaataaaaattgatccactgtcttgatctgactgtg

SEQ ID NO: 8177 - protein, 43 aa, Homo sapiens [sequence omitted]

SEQ ID NO: 8178 - DNA, 1392 bp, Homo sapiens
gtcagcctacatttttttaagtaaggagtcctgatgttcaactattaaatctttattataggttatagactggactttaaaggcatagctgccttaaatgtgggtaatggttgataaatgtcgctaccatcagaggtcgcttcacaaggtgtctaattcagaatcgaagatctctagcggtcttctactcagtcgactgcagagacgaccgcggtaggtttttcaacccggactcaacaaagaagccctcatagcacagccttgacgtcactcaaagacaggccccaatcccgactgctagagcagaggcccgcccctcgacctccgtgagtggccccgccccgccctagggggcggggcgatgccgaactgcggcgggctggctcagtaaagcggaggcagcgggggaagatggcggcggccgttccacagcgggcgtggaccgtggagcagctgcgcagtgagcagctgcccaagaaggacattatcaagtttctgcaggaacacggttcagattcgtttcttgcagaacataaattattaggaaacattaaaaatgtggccaagacagctaacaaggaccacttggttacagcctataaccatctttttgaaactaagcgttttaagggtactgaaagtataagtaaagtgtctgagcaagtaaaaaatgtgaagcttaatgaagataaacccaaagaaaccaagtctgaagagaccctggatgagggtccaccaaaatatactaaatctgttctgaaaaagggagataaaaccaactttcccaaaaagggagatgttgttcactgctggtatacaggaacactacaagatgggactgtttttgatactaatattcaaacaagtgcaaagaagaagaaaaatgccaagcctttaagttttaaggtcggagtaggcaaagttatcagaggatgggatgaagctctcttgactatgagtaaaggagaaaaggctcgactggagattgaaccagaatgggcttacggaaagaaaggacagcctgatgccaaaattccaccaaatgcaaaactcacttttgaagtggaattagtggatattgattgaaatagcagtgcttcagctctaaggatattagcaacaatgataaaacttggccttgaagaaatttacacaactagttagaacttgttactattgtaaaggaagagtcaactggaaaattcaaggagttaataaaatttgtttacttggtcccagcttttgagagataaatcccttatgaatccctggtctaaaatactttcctacagctgtgtaaaatactggtcaaggagaactttttccttttacctcatgttgtaaacttaagtggctcaataaaaattgatccactgtcttgatctgactgtg

SEQ ID NO: 8179 - protein, 224 aa, Homo sapiens; identical to SEQ ID NO: 1178

SEQ ID NO: 8180 - DNA, 1567 bp, Homo sapiens
tttttttttttttttttttttttttgagacagagtcttgctctgtcacctaggctggaatgcagtggtgcgatctcggctcactgcaacctccacctcccaggttcacgccattctcctgcttcagcctcccgagctgggactacaggcatgcgccaccatggccagctaaattttgtatttttagtagagatggggttttgtcacgttggccaggctggtctcaaactcctgacctcaggtgatccgcctgcctcagcctcccaaaatgctgagattacaggcatgagccaccgcgcccggcccacacagctaggattttaacctagataatatgactccacagcccatatacttagcaattatatatataatgttaagcatagcaatctcaacatatgtatgttacatgcttgtgtaacagtgactcttcctagtcggctaagaatgggttacaaatgcctcaggatagctatgtccaacctggctggaggctctcaagggctgcacccaagtatcctcctgcagtgagcagctgactcaagtcaccacagtgtgcttgctgtataaatgttattttttgtgagtgttgacaggaaaaagtttaggatgaaacactgtgttcagtacataacactacagttgcagtcttgtcactaattcttgtaaataccgaatttttaaaaaatctcttactttttttgtaacaaagagtataaactataggctttatttcttcttcagtactagtactactgaaaacacaactgctaacataaaaggatcgttttctaattttagacacttcttactcgggagaagttatcttgattacccagcttttttccttatagtttcttgcagaacataaattattaggaaacattaaaaatgtggccaagacagctaacaaggaccacttggttacagcctataaccatctttttgaaactaagcgttttaagggtactgaaagtataagtaaagtgtctgagcaagtaaaaaatgtgaagcttaatgaagataaacccaaagaaaccaagtctgaagagaccctggatgagggtccaccaaaatatactaaatctgttctgaaaaagggagataaaaccaactttcccaaaaagggagatgttgttcactgctggtatacaggaacactacaagatgggactgtttttgatactaatattcaaacaagtgcaaagaagaagaaaaatgccaagcctttaagttttaaggtcggagtaggcaaagttatcagaggatgggatgaagctctcttgactatgagtaaaggagaaaaggctcgactggagattgaaccagaatgggcttacggaaagaaaggacagcctgatgccaaaattccaccaaatgcaaaactcacttttgaagtggaattagtggatattgattgaaatagcagtgcttcagctctaaggatattagcaacaatgataaaacttggccttgaagaaatttacacaactagttagaacttgttactattgtaaaggaagagtcaactggaaaattcaaggagttaataaaatttgtttacttgg

SEQ ID NO: 8181 - protein, 43 aa, Homo sapiens [sequence omitted]

SEQ ID NO: 8182 - DNA, 2221 bp, Homo sapiens
gcatgagtctccggcagggctgtgaaggtttccgggaagccagccaatcattcccaacggaaactcagtagcggcattttcaactggataaactggccttagtcccgccttctcgttccagagttttgtgcgaaggaaaccgatggggatcggaaccgtagcggttgagctgctgctgctacggatatctgacagaagccttcggtggttgtcggcctaatgagcggacggcaaagaacgctttttcagacgtggggctcaagtatctcccgatcatctgggactccgggttgcagctccggaactgagcgacctcagagccctggcagctccaaggcgcctttgccagcagcagcggaggctcagctggagtcggacgatgatgtgttgcttgtcgcggcgtacgaggctgagcggcagttgtgtctagagaatggcgggttctgcacctccgcgggcgccctgtggatttaccctaccaattgcccagtgcgggactaccagctgcacatttcccgggctgctctgttttgcaatacgctggtgtgtctgcctaccggactgggaaagacctttattgccgccgtggtcatgtacaatttctaccgctggttcccttcaggaaaggtggtcttcatggccccaacgaaacccttggtgacacagcagatcgaggcttgctaccaggtgatgggtatcccgcaatcccacatggccgaaatgacagggtctacacaagcttccaccaggaaggaaatatggtgcagtaagagagtgctttttcttacacctcaggtcatggtaaatgacctttctagaggagcttgtcccgctgctgaaataaagtgtttagttattgatgaagctcataaagctctcggaaactatgcttattgccaggttgtaagagaactagtcaaatatacaaatcactttagaatcttggctctaagtgccacaccaggtagtgatataaaggctgtgcaacaagttattactaacctgctaattgggcagatagagcttcgttctgaagattctccagatattttgacatattctcatgaaagaaaagttgaaaagcttattgttccgcttggtgaagaacttgcagccatccaaaagacctatatccagattttggaatcatttgctcgttctttgattcagaggaatgttttgatgagaagggatatcccaaatctaacaaaatatcagataattctggcaagagatcagtttaggaaaaacccatctccgaatattgtgggaatacaacaaggcataatcgagggagagtttgctatttgtattagtttatatcatggttatgaattattgcagcaaatgggaatgagatcattatatttcttcctttgtggaattatggatggaactaaagggatgacacggtcaaaaaatgaacttggccgaaatgaagacttcatgaaactctataatcatctagagtgtatgtttgcacgtacacgtagtacttcagcaaatggtatttctgctatccaacaaggagataaaaataaaaaatttgtttatagtcatccaaagttaaagaaattagaagaagttgtaattgaacacttcaagtcatggaatgctgaaaacactactgaaaagaaacgtgatgagacccgagttatgatcttctcttcatttcgagatagtgttcaagaaattgcagaaatgctttcacagcatcagccaattattagagtaatgacttttgtcggccatgcctcagggaaaagcacgaagggttttacccagaaggagcaactggaggtagtgaaacagtttcgtgacggtggttacaacacgctggtttctacctgtgtgggtgaagaaggtttggatataggagaagttgatcttataatatgttttgattcccagaagagcccaattcgtcttgtacaacgaatgggtagaactggccgtaaacgtcaaggcaggatagttattatcctttctgaaggacgagaggaacgtatttataatcagagtcagtccaacaaaagaagtatatataaagctatttcaagtaacaggcaggtccttcatttttaccaaagaagtccacgaatggttcctgatggaatcaacccaaaattacacaaaatgttcatcacacatggtgtctatgaaccagagaagccttctcggaacttgcagcgaaagtcatctatcttttcctatagggatg

SEQ ID NO: 8183 - protein, 666 aa, Homo sapiens
MSGRQRTLFQTWGSSISRSSGTPGCSSGTERPQSPGSSKAPLPAAAEAQLESDDDVLLVAAYEAERQLCLENGGFCTSAGALWIYPTNCPVRDYQLHISRAALFCNTLVCLPTGLGKTFIAAVVMYNFYRWFPSGKVVFMAPTKPLVTQQIEACYQVMGIPQSHMAEMTGSTQASTRKEIWCSKRVLFLTPQVMVNDLSRGACPAAEIKCLVIDEAHKALGNYAYCQVVRELVKYTNHFRILALSATPGSDIKAVQQVITNLLIGQIELRSEDSPDILTYSHERKVEKLIVPLGEELAAIQKTYIQILESFARSLIQRNVLMRRDIPNLTKYQIILARDQFRKNPSPNIVGIQQGIIEGEFAICISLYHGYELLQQMGMRSLYFFLCGIMDGTKGMTRSKNELGRNEDFMKLYNHLECMFARTRSTSANGISAIQQGDKNKKFVYSHPKLKKLEEVVIEHFKSWNAENTTEKKRDETRVMIFSSFRDSVQEIAEMLSQHQPIIRVMTFVGHASGKSTKGFTQKEQLEVVKQFRDGGYNTLVSTCVGEEGLDIGEVDLIICFDSQKSPIRLVQRMGRTGRKRQGRIVIILSEGREERIYNQSQSNKRSIYKAISSNRQVLHFYQRSPRMVPDGINPKLHKMFITHGVYEPEKPSRNLQRKSSIFSYR

SEQ ID NO: 8184 - DNA, 2481 bp, Homo sapiens
gcatgagtctccggcagggctgtgaaggtttccgggaagccagccaatcattcccaacggaaactcagtagcggcattttcaactggataaactggccttagtcccgccttctcgttccagagttttgtgcgaaggaaaccgatggggatcggaaccgtagcggttgagctgctgctgctacggatatctgacagaagccttcggtggttgtcggcctaatgagcggacggcaaagaacgctttttcagacgtggggctcaagtatctcccgatcatctgggactccgggttgcagctccggaactgagcgacctcagagccctggcagctccaaggcgcctttgccagcagcagcggaggctcagctggagtcggacgatgatgtgttgcttgtcgcggcgtacgaggctgagcggcagttgtgtctagagaatggcgggttctgcacctccgcgggcgccctgtggatttaccctaccaattgcccagtgcgggactaccagctgcacatttcccgggctgctctgttttgcaatacgctggtgtgtctgcctaccggactgggaaagacctttattgccgccgtggtcatgtacaatttctaccgctggttcccttcaggaaaggtggtcttcatggccccaacgaaacccttggtgacacagcagatcgaggcttgctaccaggtgatgggtatcccgcaatcccacatggccgaaatgacagggtctacacaagcttccaccaggaaggaaatatggtgcagtaagagagtgctttttcttacacctcaggtcatggtaaatgacctttctagaggagcttgtcccgctgctgaaataaagtgtttagttattgatgaagctcataaagctctcggaaactatgcttattgccaggttgtaagagaactagtcaaatatacaaatcactttagaatcttggctctaagtgccacaccaggtagtgatataaaggctgtgcaacaagttattactaacctgctaattgggcagatagagcttcgttctgaagattctccagatattttgacatattctcatgaaagaaaagttgaaaagcttattgttccgcttggtgaagaacttgcagccatccaaaagacctatatccagattttggaatcatttgctcgttctttgattcagaggaatgttttgatgagaagggatatcccaaatctaacaaaatatcagataattctggcaagagatcagtttaggaaaaacccatctccgaatattgtgggaatacaacaaggcataatcgagggagagtttgctatttgtattagtttatatcatggttatgaattattgcagcaaatgggaatgagatcattatatttcttcctttgtggaattatggatggaactaaagggatgacacggtcaaaaaatgaacttggccgaaatgaagacttcatgaaactctataatcatctagagtgtatgtttgcacgtacacgtagtacttcagcaaatggtatttctgctatccaacaaggagataaaaataaaaaatttgtttatagtcatccaaagttaaagaaattagaagaagttgtaattgaacacttcaagtcatggaatgctgaaaacactactgaaaagaaacgtgatgagacccgagttatgatcttctcttcatttcgagatagtgttcaagaaattgcagaaatgctttcacagcatcagccaattattagagtaatgacttttgtcggccatgcctcagggaaaagcacgaagggttttacccagaaggagcaactggaggtagtgaaacagtttcgtgacggtggttacaacacgctggtttctacctgtgtgggtgaagaaggtttggatataggagaagttgatcttataatatgttttgattcccagaagagcccaattcgtcttgtacaacgaatgggtagaactggccgtaaacgtcaaggcaggatagttattatcctttctgaaggacgagaggaacgtatttataatcagagtcagtccaacaaaagaagtatatataaagctatttcaagtaacaggcaggtccttcatttttaccaaagaagtccacgaatggttcctgatggaatcaacccaaaattacacaaaatgttcatcacacatggtgtctatgaaccagagaagccttctcggaacttgcagcgaaagtcatctatcttttcctatagggatggtaaataaattttgcatttgacacatgcatttttcccctgttcttacttagcaggtcgtatcttgatataatatttcttgtttgaaaaactgaatatatgttctaattaatatattataggcattctctttggaaaggctgtacgagattattcatgtggcaaatggagagacactggtagtatagagtgacagaaactcagtgttggggaaaattaaacataccctaccaacccagagaatgttctccataaagtttag

SEQ ID NO: 8185 - protein, 669 aa, Homo sapiens
MSGRQRTLFQTWGSSISRSSGTPGCSSGTERPQSPGSSKAPLPAAAEAQLESDDDVLLVAAYEAERQLCLENGGFCTSAGALWIYPTNCPVRDYQLHISRAALFCNTLVCLPTGLGKTFIAAVVMYNFYRWFPSGKVVFMAPTKPLVTQQIEACYQVMGIPQSHMAEMTGSTQASTRKEIWCSKRVLFLTPQVMVNDLSRGACPAAEIKCLVIDEAHKALGNYAYCQVVRELVKYTNHFRILALSATPGSDIKAVQQVITNLLIGQIELRSEDSPDILTYSHERKVEKLIVPLGEELAAIQKTYIQILESFARSLIQRNVLMRRDIPNLTKYQIILARDQFRKNPSPNIVGIQQGIIEGEFAICISLYHGYELLQQMGMRSLYFFLCGIMDGTKGMTRSKNELGRNEDFMKLYNHLECMFARTRSTSANGISAIQQGDKNKKFVYSHPKLKKLEEVVIEHFKSWNAENTTEKKRDETRVMIFSSFRDSVQEIAEMLSQHQPIIRVMTFVGHASGKSTKGFTQKEQLEVVKQFRDGGYNTLVSTCVGEEGLDIGEVDLIICFDSQKSPIRLVQRMGRTGRKRQGRIVIILSEGREERIYNQSQSNKRSIYKAISSNRQVLHFYQRSPRMVPDGINPKLHKMFITHGVYEPEKPSRNLQRKSSIFSYRDGK

SEQ ID NO: 8186 - DNA, 7247 bp, Homo sapiens
gcatgagtctccggcagggctgtgaaggtttccgggaagccagccaatcattcccaacggaaactcagtagcggcattttcaactggataaactggccttagtcccgccttctcgttccagagttttgtgcgaaggaaaccgatggggatcggaaccgtagcggttgagctgctgctgctacggatatctgacagaagccttcggtggttgtcggcctaatgagcggacggcaaagaacgctttttcagacgtggggctcaagtatctcccgatcatctgggactccgggttgcagctccggaactgagcgacctcagagccctggcagctccaaggcgcctttgccagcagcagcggaggctcagctggagtcggacgatgatgtgttgcttgtcgcggcgtacgaggctgagcggcagttgtgtctagagaatggcgggttctgcacctccgcgggcgccctgtggatttaccctaccaattgcccagtgcgggactaccagctgcacatttcccgggctgctctgttttgcaatacgctggtgtgtctgcctaccggactgggaaagacctttattgccgccgtggtcatgtacaatttctaccgctggttcccttcaggaaaggtggtcttcatggccccaacgaaacccttggtgacacagcagatcgaggcttgctaccaggtgatgggtatcccgcaatcccacatggccgaaatgacagggtctacacaagcttccaccaggaaggaaatatggtgcagtaagagagtgctttttcttacacctcaggtcatggtaaatgacctttctagaggagcttgtcccgctgctgaaataaagtgtttagttattgatgaagctcataaagctctcggaaactatgcttattgccaggttgtaagagaactagtcaaatatacaaatcactttagaatcttggctctaagtgccacaccaggtagtgatataaaggctgtgcaacaagttattactaacctgctaattgggcagatagagcttcgttctgaagattctccagatattttgacatattctcatgaaagaaaagttgaaaagcttattgttccgcttggtgaagaacttgcagccatccaaaagacctatatccagattttggaatcatttgctcgttctttgattcagaggaatgttttgatgagaagggatatcccaaatctaacaaaatatcagataattctggcaagagatcagtttaggaaaaacccatctccgaatattgtgggaatacaacaaggcataatcgagggagagtttgctatttgtattagtttatatcatggttatgaattattgcagcaaatgggaatgagatcattatatttcttcctttgtggaattatggatggaactaaagggatgacacggtcaaaaaatgaacttggccgaaatgaagacttcatgaaactctataatcatctagagtgtatgtttgcacgtacacgtagtacttcagcaaatggtatttctgctatccaacaaggagataaaaataaaaaatttgtttatagtcatccaaagttaaagaaattagaagaagttgtaattgaacacttcaagtcatggaatgctgaaaacactactgaaaagaaacgtgatgagacccgagttatgatcttctcttcatttcgagatagtgttcaagaaattgcagaaatgctttcacagcatcagccaattattagagtaatgacttttgtcggccatgcctcagggaaaagcacgaagggttttacccagaaggagcaactggaggtagtgaaacagtttcgtgacggtggttacaacacgctggtttctacctgtgtgggtgaagaaggtttggatataggagaagttgatcttataatatgttttgattcccagaagagcccaattcgtcttgtacaacgaatgggtagaactggccgtaaacgtcaaggcaggatagttattatcctttctgaaggacgagaggaacgtatttataatcagagtcagtccaacaaaagaagtatatataaagctatttcaagtaacaggcaggtccttcatttttaccaaagaagtccacgaatggttcctgatggaatcaacccaaaattacacaaaatgttcatcacacatggtgtctatgaaccagagaagccttctcggaacttgcagcgaaagtcatctatcttttcctatagggatggaatgaggcaaagtagcctaaagaaagattggttcttatcagaagaagaatttaaattatggaacagactttatagattaagggacagtgatgaaattaaagagataacattgcctcaagttcagttttcttctttacaaaatgaggaaaacaaaccagctcaagaatcaaccactggaattcatcaactctctctctctgaatggagactgtggcaagatcatcctttgcctacacatcaagttgatcactcagatcgatgccgccattttataggccttatgcaaatgatagagggaatgagacacgaagagggagaatgcagctatgaattggaagttgaatcttatttacaaatggaagatgttacctcaacatttattgctcccaggaatgaatctaataatcttgccagtgacacctttatcactcacaagaaatcgtcatttataaagaacataaatcaaggcagttcatcctcagtgatagaatctgatgaagaatgtgctgaaattgttaaacaaactcatatcaaacctactaaaattgtttctttaaagaaaaaagtgtctaaagaaataaaaaaagatcagcttaaaaaagaaaataatcacggtattatagattctgtagataatgacagaaattccactgttgaaaatatttttcaagaagacctaccaaatgataaaaggacatcagatacagatgaaattgctgccacatgtactattaatgaaaatgttattaaagaaccgtgtgtgttattaacagagtgtcagtttacaaataaatccactagttcacttgctggaaatgttttagattctggttataacagtttcaatgatgaaaaatctgtttcatctaacttatttcttccattcgaagaagagctttatattgttagaacagatgaccaattttataattgtcactcattgacaaaagaggtactagctaatgtagagagatttttatcttattctcctccgcctctcagtggactctcagacttggaatatgaaattgctaagggtactgcacttgagaatttgcttttcttaccctgtgcagagcatttacgaagtgataaatgcacctgtttgctgtcacattcagctgtgaattctcaacagaatttagaattgaattcacttaaatgtataaattatccatctgaaaaaagttgcctttatgatatacctaatgataatatttctgatgagccaagtctctgtgactgtgatgtacataaacataatcaaaatgaaaatttagtacctaacaatcgtgttcaaatacacagaagccctgcacagaatttagttggagagaacaatcatgatgttgataacagtgacctcccagtattgtccactgatcaagatgaaagtttgctgttatttgaagatgttaatacagagttcgacgatgtgagtctttcacccttgaacagtaaaagcgaatctttacctgtgtcagacaaaactgctattagtgaaacgcctctggtctctcagttcttaatttctgatgaacttttgttggacaataattctgaactccaagatcaaatcacccgtgatgctaatagttttaaatctcgtgatcagagaggtgtacaggaagaaaaagtgaagaatcatgaggatatttttgattgctctagggatttattttctgttacctttgatttaggattctgtagtccagattctgatgatgaaatattggaacatacatcagatagcaatagacctctagatgatctatatggaaggtatttggaaattaaggagataagtgatgcaaattatgtttcgaatcaagcactaataccaagagatcatagtaaaaattttactagtggaactgttattatcccatcaaatgaagatatgcagaatccaaattatgtacatttgccactgagtgcagcaaaaaatgaagaattgttatctcctggttattctcagttttctttaccagtgcaaaaaaaagttatgagtacaccactctctaaatcaaacacattgaactcattttctaagataagaaaggaaatacttaagacaccagattctagtaaggaaaaagtaaacctacaaagattcaaagaagcattgaattcaacttttgattattcagaattttctctagaaaagtctaaaagcagtggtccaatgtatctgcataaatcctgtcattctgttgaagatggacaattattaacaagtaacgaaagtgaagatgacgagattttccgaagaaaagttaaaagagcaaaaggaaatgttttaaactctcctgaggatcagaaaaatagtgaagttgattctccacttcatgctgtcaaaaagcgcagatttcctataaacagatcagaattatcatctagtgatgagagtgagaattttcccaaaccatgttcacaattagaagacttcaaggtttgtaacgggaatgccagaagaggcatcaaagtcccaaagagacagagtcacttaaagcatgtagctaggaagtttttagatgatgaagcagaactttctgaagaagatgcagaatatgtttcatcagatgaaaatgatgagtcagaaaatgaacaagattcctcattacttgactttttaaatgatgaaactcaactttcacaggctataaatgattctgaaatgagagctatttacatgaaatctttgcgtagtccaatgatgaacaataagtacaaaatgattcataagacacataaaaacataaacattttctcgcagattcctgaacaagatgaaacctatttagaggatagtttttgtgttgatgaagaggagtcttgcaaaggccaatcaagtgaagaagaagtttgtgttgattttaacttaataactgatgattgctttgcaaatagtaaaaagtataaaactcgacgtgcagtaatgctaaaagaaatgatggaacaaaattgtgcacattcaaaaaagaaattatccagaattattttaccagatgattcaagtgaggaggagaacaatgtaaatgataaaagagaatctaatattgcggttaacccaagcactgttaagaagaacaaacaacaggaccattgtttaaattcagtgccttctggatcttctgcgcagtccaaggtgcgttctactccaagagttaatccattagcaaagcagagcaaacagacatcgctgaatttaaaggatacaatttccgaagtctcagacttcaaacctcagaatcataatgaagtccagtctaccacaccacccttcactactgttgattcacagaaagactgtagaaaatttccagttccacagaaggatggtagtgctttggaggattctagcacttcaggggcatcctgttccaagtcaagaccacatttagctgggacacatacttctcttagacttccgcaggaaggaaaaggaacctgtattcttgtaggtggtcatgaaatcacttctggattagaagtaatttcttccctaagagcaattcatgggttgcaagtagaagtttgtcctcttaatggctgtgattacatcgtgagtaatcgcatggtggtggaaaggaggtctcaatctgagatgttaaatagtgtcaataagaacaagttcattgagcagatccagcacctgcagagtatgtttgaaagaatatgtgtgattgtggaaaaggacagagaaaaaacaggagacacatcaaggatgtttaggagaacaaagagctatgacagcctgctgactaccttaattggcgctggaatccgaattcttttcagttcctgccaagaagaaaccgcagatttgctaaaggaactgtctttagtggaacaaagaaagaatgttggtattcatgttccaacagtggtgaatagtaataaaagtgaggcactccagttttatttaagtattcccaatataagttatataactgcattaaatatgtgtcaccagttttcatctgtgaaaaggatggctaacagctcacttcaagaaatctccatgtatgcacaagtaactcatcagaaggctgaggagatctatagatatattcactatgtatttgacatacaaatgttaccaaatgatcttaaccaagatagactgaaatctgatatataatcaagctgctcaagatggggttttcaaagacctctcacaatattaaatgcacttcaataatcattgctgttttatgtttatttgtaaataagagaatattttatttaaatattttatattgtatacatttttatttatagattatagaaattattaaaaaagaaaaatctgatgttcagtgatcattttgactagattataaaactaatttttcttattaaataaaacaaggtttattaaaagtgttactaaggatagtttaagaaagtaaaagctaagctagagatatactttggaatgtttcccaaaattaaagttgtactgttgtgataaatagtaaagttgacatgtctatgactacagccaacttgtcgattttccctatgtgtagatagtatacttttaagtgtactgattctaaatacatgtacttggtaaggtgtgggtgatgggtgggttgtgagataaatgacccagtaactaggaaagtagaaaacttaactgaatgtttatctgaccaaaggtgtgtcccagttaagtactgtcaaatctattaatatgaactctgatatggtttggctgtgtccccaaccaaaatctcatcttgacttgtaatctgaattataatcccaatatattggggagggacctcctggaacgtgattagctcatgggggcggttcccccatgctgttctagtgatagttctcagaggatctgatggttttataagcttttcctctgttcactctgcagttctcttgcctactgccatgtggaaaaggaaacgtttgcttcccctccaccatgattgtaagttcccgaggcctccccagccatgcaggactgtgagtcaattaaacatcttttccttataaatt

SEQ ID NO: 8187 - protein, 2048 aa, Homo sapiens; identical to SEQ ID NO: 1180

SEQ ID NO: 8188 - DNA, 1491 bp, Homo sapiens
gtgcgaaggaaaccgatggggatcggaaccgtagcggttgagctgctgctgctacggatatctgacagaagccttcggtggttgtcggcctaatgagcggacggcaaagaacgctttttcagacgtggggctcaagtatctcccgatcatctgggactccgggttgcagctccggaactgagcgacctcagagccctggcagctccaaggcgcctttgccagcagcagcggaggctcagctggagtcggacgatgatgtgttgcttgtcgcggcgtacgaggctgagcggcagttgtgtctagagaatggcgggttctgcacctccgcgggcgccctgtggatttaccctaccaattgcccagtgcgggactaccagctgcacatttcccgggctgctctgttttgcaatacgctggtgtgtctgcctaccggactgggaaagacctttattgccgccgtggtcatgtacaatttctaccgctggttcccttcaggaaaggtggtcttcatggccccaacgaaacccttggtgacacagcagatcgaggcttgctaccaggtgatgggtatcccgcaatcccacatggccgaaatgacagggtctacacaagcttccaccaggaaggaaatatggtgcagtaagagagtgctttttcttacacctcaggtcatggtaaatgacctttctagaggagcttgtcccgctgctgaaataaagtgtttagttattgatgaagctcataaagctctcggaaactatgcttattgccaggtaataattttgttaaacggtattttgtattgtaactgtactgttaaagagaattttggcgaatagttactagtgatggaagttattgacaatattattataaaaagcctttacgtctattatctcagaacagatggtgataaagaatatctgtactttctgtcatccattcaaatcagtgtcttcactgccttttgctgttattgttgttttctttttcttttcttctattttaagactaaccagataattagtgtcagatgtagatcatgagagcctagtcatggttgggacagtgatctaaaatagggtatgaaaggagttttgaaattaataaagattggtagtggatatgcggtgtctcttcttggcggctaggtaaaataatgacataatgtatgccacatacctaacacagtgccttccagttgagtactccaggaatataaaataagatgaagtagtgggatgtggttgcaaacatcattcatatctttgcactgaatgaagttgactttctgtttccctcttctcctaagggggattttgcctcttctactcaaggtccaggtcattaatattttatgcttaatagtttgaaagcctttgtaggccataggggataaaggtggtggggactcattaaaaaatgtttggctgggataacacttaagatttgaaagagattagagagaagaaggctaaagacagagtatct

SEQ ID NO: 8189 - protein, 248 aa, Homo sapiens
MSGRQRTLFQTWGSSISRSSGTPGCSSGTERPQSPGSSKAPLPAAAEAQLESDDDVLLVAAYEAERQLCLENGGFCTSAGALWIYPTNCPVRDYQLHISRAALFCNTLVCLPTGLGKTFIAAVVMYNFYRWFPSGKVVFMAPTKPLVTQQIEACYQVMGIPQSHMAEMTGSTQASTRKEIWCSKRVLFLTPQVMVNDLSRGACPAAEIKCLVIDEAHKALGNYAYCQVIILLNGILYCNCTVKENFGE

SEQ ID NO: 8190 - DNA, 3601 bp, Homo sapiens
tcagacttggaatatgaaattgctaagggtactgcacttgagaatttgcttttcttaccctgtgcagagcatttacgaagtgataaatgcacctgtttgctgtcacattcagctgtgaattctcaacagaatttagaattgaattcacttaaatgtataaattatccatctgaaaaaagttgcctttatgatatacctaatgataatatttctgatgagccaagtctctgtgactgtgatgtacataaacataatcaaaatgaaaatttagtacctaacaatcgtgttcaaatacacagaagccctgcacagaatttagttggagagaacaatcatgatgttgataacagtgacctcccagtattgtccactgatcaagatgaaagtttgctgttatttgaagatgttaatacagagttcgacgatgtgagtctttcacccttgaacagtaaaagcgaatctttacctgtgtcagacaaaactgctattagtgaaacgcctctggtctctcagttcttaatttctgatgaacttttgttggacaataattctgaactccaagatcaaatcacccgtgatgctaatagttttaaatctcgtgatcagagaggtgtacaggaagaaaaagtgaagaatcatgaggatatttttgattgctctagggatttattttctgttacctttgatttaggattctgtagtccagattctgatgatgaaatattggaacatacatcagatagcaatagacctctagatgatctatatggaaggtatttggaaattaaggagataagtgatgcaaattatgtttcgaatcaagcactaataccaagagatcatagtaaaaattttactagtggaactgttattatcccatcaaatgaagatatgcagaatccaaattatgtacatttgccactgagtgcagcaaaaaatgaagaattgttatctcctggttattctcagttttctttaccagtgcaaaaaaaagttatgagtacaccactctctaaatcaaacacattgaactcattttctaagataagaaaggaaatacttaagacaccagattctagtaaggaaaaagtaaacctacaaagattcaaagaagcattgaattcaacttttgattattcagaattttctctagaaaagtctaaaagcagtggtccaatgtatctgcataaatcctgtcattctgttgaagatggacaattattaacaagtaacgaaagtgaagatgacgagattttccgaagaaaagttaaaagagcaaaaggaaatgttttaaactctcctgaggatcagaaaaatagtgaagttgattctccacttcatgctgtcaaaaagcgcagatttcctataaacagatcagaattatcatctagtgatgagagtgagaattttcccaaaccatgttcacaattagaagacttcaaggtttgtaacgggaatgccagaagaggcatcaaagtcccaaagagacagagtcacttaaagcatgtagctaggaagtttttagatgatgaagcagaactttctgaagaagatgcagaatatgtttcatcagatgaaaatgatgagtcagaaaatgaacaagattcctcattacttgactttttaaatgatgaaactcaactttcacaggctataaatgattctgaaatgagagctatttacatgaaatctttgcgtagtccaatgatgaacaataagtacaaaatgattcataagacacataaaaacataaacattttctcgcagattcctgaacaagatgaaacctatttagaggatagtttttgtgttgatgaagaggagtcttgcaaaggccaatcaagtgaagaagaagtttgtgttgattttaacttaataactgatgattgctttgcaaatagtaaaaagtataaaactcgacgtgcagtaatgctaaaagaaatgatggaacaaaattgtgcacattcaaaaaagaaattatccagaattattttaccagatgattcaagtgaggaggagaacaatgtaaatgataaaagagaatctaatattgcggttaacccaagcactgttaagaagaacaaacaacaggaccattgtttaaattcagtgccttctggatcttctgcgcagtccaaggtgcgttctactccaagagttaatccattagcaaagcagagcaaacagacatcgctgaatttaaaggatacaatttccgaagtctcagacttcaaacctcagaatcataatgaagtccagtctaccacaccacccttcactactgttgattcacagaaagactgtagaaaatttccagttccacagaagaggttcggacatctagcactaatgtttcccatgccctctgcctctgcaaaaagaggagctcatggtccacaggatttggcagattactttggaaaggaaagctgggatggtagtgctttggaggattctagcacttcaggggcatcctgttccaagtcaagaccacatttagctgggacacatacttctcttagacttccgcaggaaggaaaaggaacctgtattcttgtaggtggtcatgaaatcacttctggattagaagtaatttcttccctaagagcaattcatgggttgcaagtagaagtttgtcctcttaatggctgtgattacatcgtgagtaatcgcatggtggtggaaaggaggtctcaatctgagatgttaaatagtgtcaataagaacaagttcattgagcagatccagcacctgcagagtatgtttgaaagaatatgtgtgattgtggaaaaggacagagaaaaaacaggagacacatcaaggatgtttaggagaacaaagagctatgacagcctgctgactaccttaattggcgctggaatccgaattcttttcagttcctgccaagaagaaaccgcagatttgctaaaggaactgtctttagtggaacaaagaaagaatgttggtattcatgttccaacagtggtgaatagtaataaaagtgaggcactccagttttatttaagtattcccaatataagttatataactgcattaaatatgtgtcaccagttttcatctgtgaaaaggatggctaacagctcacttcaagaaatctccatgtatgcacaagtaactcatcagaaggctgaggagatctatagatatattcactatgtatttgacatacaaatgttaccaaatgatcttaaccaagatagactgaaatctgatatataatcaagctgctcaagatggggttttcaaagacctctcacaatattaaatgcacttcaataatcattgctgttttatgtttatttgtaaataagagaatattttatttaaatattttatattgtatacatttttatttatagattatagaaattattaaaaaagaaaaatctgatgttcagtgatcattttgactagattataaaactaatttttcttattaaataaaacaaggtttattaaaagtgttactaaggatagtttaagaaagtaaaagctaagctagagatatactttggaatgtttcccaaaattaaagttgtactgttgtgataaatagtaaagttgacatgtctatgactac

SEQ ID NO: 8191 - protein, 782 aa, Homo sapiens
MQNPNYVHLPLSAAKNEELLSPGYSQFSLPVQKKVMSTPLSKSNTLNSFSKIRKEILKTPDSSKEKVNLQRFKEALNSTFDYSEFSLEKSKSSGPMYLHKSCHSVEDGQLLTSNESEDDEIFRRKVKRAKGNVLNSPEDQKNSEVDSPLHAVKKRRFPINRSELSSSDESENFPKPCSQLEDFKVCNGNARRGIKVPKRQSHLKHVARKFLDDEAELSEEDAEYVSSDENDESENEQDSSLLDFLNDETQLSQAINDSEMRAIYMKSLRSPMMNNKYKMIHKTHKNINIFSQIPEQDETYLEDSFCVDEEESCKGQSSEEEVCVDFNLITDDCFANSKKYKTRRAVMLKEMMEQNCAHSKKKLSRIILPDDSSEEENNVNDKRESNIAVNPSTVKKNKQQDHCLNSVPSGSSAQSKVRSTPRVNPLAKQSKQTSLNLKDTISEVSDFKPQNHNEVQSTTPPFTTVDSQKDCRKFPVPQKRFGHLALMFPMPSASAKRGAHGPQDLADYFGKESWDGSALEDSSTSGASCSKSRPHLAGTHTSLRLPQEGKGTCILVGGHEITSGLEVISSLRAIHGLQVEVCPLNGCDYIVSNRMVVERRSQSEMLNSVNKNKFIEQIQHLQSMFERICVIVEKDREKTGDTSRMFRRTKSYDSLLTTLIGAGIRILFSSCQEETADLLKELSLVEQRKNVGIHVPTVVNSNKSEALQFYLSIPNISYITALNMCHQFSSVKRMANSSLQEISMYAQVTHQKAEEIYRYIHYVFDIQMLPNDLNQDRLKSDI

SEQ ID NO: 8192 - DNA, 2043 bp, Homo sapiens
ggaaatgaaataaagaaaaaaaatttggtggttggtatggggaattcaagaaagataaaattttgtagaaataaaaggcttgatgagctggattagaaacccagcacagttggaaaaattgacagttttcaatcaccaggcatatctttaaagtgaataaactgagattcaattaggacagggaaggaagtgaacaggagagataatggtatagcaaaagggagtccaaggagaagaagtctcagtgggagttttggaaaaccaagagaggcagcaagataccggaaagagcgtagacggtacaatgaacggtaagcaaagcataatttcccaaaatagtcttgatcagtatttcctgtaaaatgtttgatttaagcattttgtccatctccataggcacattttattgtcctctttaaaatacagaatgtactttttaaagatggaaatacgtttgaggtcaggcgtggtggctcacgactgtcatcccaacactttgggaggcccaggagggcagattgcttgatgagctcagtagtttgaaaccagcctgggcaatgtggtgaaaccctgtctcttaagaaaaatacaaagattagccaggcatgatggcacgtgcctgtagtccaagctacttgggaggctgagttgggaggatcacttgagcccaggaggttgaggctgcagtgagccattatcatgttactgcactccagcctgggcgacagagtgagaccctgtttcaaaaaaagaaatacatttgaaattaatttaggcaattgttgttcaacctgtggttaaaagtatgacagttaacttaaaattattaggttgacttaaaaatattgttgacttaaaattatttcgtattcaaacaggaatgactgtgataaatatgtttttcgtatgcaaaaatatcataaaagtaatggtggtattgtctggggcaacatcaagaaaaaattagttgaaactgatttctcaactccaacaccaagaaggaaaaccccatttaacacagacttaggagaaaactctggtattggaaaacttttcactaatgctgtggaatctttagatgaagaagagaaagattattatttttcgaactctgattctgcatagtaaaatgagaaaatatgattcctgggatttttaccataaagcagacagtgtttgtattttcaactggagtacatgtattttctttgtaaagtagcttcctatgaaaatgtggacttttttgaaggtttcatatgtttgtgttcaaagtaaaatatcctcattgctgcagcttactaaaaatgtaaagaaaattgtttttgctcgtgtagatatctgtaaatttgtttttgcatattaaaatatatatagataattttttaataagcatccaagtctgtttactttaagaaaaccatttcccaaacagatttttttttatttcaagaaaattttgctaccatttaagtaagagaaggtgagaaggatgacagaggttgtattggtagctattgaattcatgaaaacttttaagttagcatttgttagcagttattatccaagccagagtaggatttgttaccagttgttatccaaacctaatgtttaaattacacattgttgaaattaaattacacattgttgacatgcttctctcctgattgtttttattttaaacttgtgataggcatatctatgaaacctttgtaaatttagtttattgctttaccattattttactaggtaaaattagagaacagattttgttctctaatttttaagccttatttacatatgcagaaacagcttaaatattttgactagattagacaaacagttaatagatccaccattaggaatcaatatattatgtcataataaacatcctttttctttcactgaaatttcttttagaaataaacttatttttgcttgttatgttttgaaacttgacataggatattttccctctggctacacattcacctacccttgttctctatttagattattcaaataaagttagtttgcttttatagt

SEQ ID NO: 8193 - protein, 72 aa, Homo sapiens [sequence omitted]

SEQ ID NO: 8194 - DNA, 4914 bp, Homo sapiens
agtagtgccggggcgtgctcgcggcccacggcgtcccacgtcgtcccacgtcagccttgtcccggcagagcttcacgagaggaaaggcgggattcagggtgggcgcgtgccctacgaagacgaaacgaactttgaagacaactagaggagctcgccccctgcctgtgacagcttagggtcgcctactttttgtggacacactgccgtccacggagtgcagaggccgcctgcagttttcttgcgtccctgtgagacgcacggtggcgcaattcccgagcgtgccaatcccgggctggctggagggcgggctcttcaaatttgaattgcggaagtgttttgtgtgttagagaacgtcgcggaggaggtaagcgtcgcttggcgcctggccgccgcgggcaggatacaccgtgggcctgaggcgcgagcccggcggcgtgcggccctctctccgcgcggagccgagccggaactgcggcagtctctccctgccaggctcttcatccaaggtttctgtggatcccttctgaagttctatctgaaaattgcgcttaagtgaattttctgttagaagaacttggttgctactttcttgtcaagatgattgcaacacctttgaaacattcaagaatttacttacctccagaggcatcttctcaaaggagaaatctacccatggatgcaatcttttttgacagcattccttcaggcacacttactcctgtaaaagatttggtgaaatatcagaactcctccttaaaattgaatgaccataaaaagaatcagttcctaaaaatgacaacttttaacaataaaaatatatttcaatcaactatgctaacagaggctactacctctaacagttctcttgatatcagtgctataaagcccaacaaggatggattaaaaaataaagcaaactatgaatcaccaggaaaaatatttctaagaatgaaagaaaaagtactgcgtgacaagcaagaacagccatcaagaaacagtagtttgttggaaccacagaaaagtggaaataatgaaaccttcactcctaacagagttgaaaaaaaaaaattgcagcatacctacctatgtgaagaaaaggaaaacaacaaatcattccagtcagatgacagttcactaagagcctcagtccaaggagttcctctagaatcatcaaataatgatattttcctcccggtcaaacaaaagattcagtgccagcaggaaaagaaagcaccactgcacaatttaacttacgaacttccaactctgaaccaagaacaggaaaattttttggctgtagaagcccgaaacaagacattaactagagctcagttggctaaacaaatttttcactcaaaggagagtatagttgcaaccactaaatccaaaaaggacacgtttgttttagaaagcgttgattctgctgatgaacaatttcaaaatactaatgctgagactctcagtactaattgtattcctattaaaaatggcagcctgttaatggtttctgatagtgagaggacaacagaagggacttcgcaacagaaagttaaggaaggaaatggaaaaacagtgcctggagagacaggtcttccaggttccatgaaagatacatgtaaaattgtacttgcaacaccaagacttcatataacaatacctcggaggtcaaaaagaaatatttcaaagctttctcctccaagaatatttcaaactgttacaaatggacttaaaaaaaatcaggtagttcagctacaggaatggatgattaaaagcatcaataataatactgctatatgtgtagaaggaaaattgatagacgtcactaacatatattggcacagtaatgtaattatagagcggattgagcacaacaaacttaggactatatcaggcaacgtttatatattaaaaggcatgatagaccaaatttccatgaaagaagcaggatatccaaattatctcataaggaaatttatgtttggatttccagaaaattggaaagagcacattgataattttctggaacaattaagggctggtgaaaagaacagggaaaagaccaaacaaaaacagaaaactggaagatctgtccgtgacataaggaaatcaatgaaaaatgatgcacgagaaaaccaaacagatactgctcaaagagccaccaccacttacgattttgattgtgataatttggaactgaagagtaataagcacagtgagtcaccaggagctacagaattaaacatgtgccacagtaattgccaaaataaaccaacattaaggttcccagatgaccaagtaaataatactattcaaaatggaggaggagatgacttatctaatcaggaattaattggaaaaaaagaatataaaatgtcttcaaagaaactaaaaattggtgaaagaacaaatgaaaggataataaaaagtcagaagcaagagacaactgaagaattggatgtatccattgatattctaacctcaagggaacagtttttctcagatgaagaaagaaaatacatggccatcaatcagaagaaagcttatattttagtaacaccacttaaatctagaaaagtgatagagcaaagatgcatgaggtataatctgtccgctggcaccatcaaagcagtaacagattttgtaataccagagtgtcaaaaaaaaagtcccatcagcaagtccatggggactttagaaaatacatttgaaggtcataaaagtaaaaacaaggaagattgcgatgaacgtgacttacttactgtcaaccggaaaataaaaatatctaaccttgaaaaggaacaaatgctcacctctgactttaagaaaaataccagactattaccaaaattgaagaaaatagaaaatcaggtagctatgtcattttataagcatcagtcctcaccagatttgtcaagtgaagaaagtgaaacagaaaaggaaattaaaaggaaagctgaagttaagaaaaccaaagcaggaaacaccaaagaagcagtggttcacctgagaaagagcacaagaaacacaagtaatattccagtgattttggaacctgaaactgaagaaagtgaaaatgaattttatatcaaacaaaagaaagctagaccttccgtcaaagaaactcttcagaagtctggtgttaggaaagagtttccaattactgaggcagtaggatctgataagacaaataggcatcccttagaatgcttacctggtttaattcaggataaggaatggaatgagaaggagttacagaaacttcattgtgcttttgcatctcttccaaagcacaaacctggtttctggtcagaggtagctgcggctgtaggttctcgatctcctgaagaatgccagaggaaatacatggaaaatcccagaggaaaaggatcccagaaacatgtcactaagaagaagccagccaattccaaaggccaaaatggcaagagaggtgatgctgatcagaaacaaactattaagataactgccaaagtgggaactcttaaaaggaagcaacagatgagggaatttctggaacagttgccaaaagatgaccatgatgattttttcagtacaacacctttacagcatcaaagaatactgttgccaagtttccaggacagtgaagatgatgatgatattctgccaaatatggacaaaaatccaacaactccatcatcagttatctttccattggtaaaaactcctcaatgtcagcatgtcagtcctggcatgctaggttctataaataggaatgactgtgataaatatgtttttcgtatgcaaaaatatcataaaagtaatggtggtattgtctggggcaacatcaagaaaaaattagttgaaactgatttctcaactccaacaccaagaaggaaaaccccatttaacacagacttaggagaaaactctggtattggaaaacttttcactaatgctgtggaatctttagatgaagaagagaaagattattatttttcgaactctgattctgcatagtaaaatgagaaaatatgattcctgggatttttaccataaagcagacagtgtttgtattttcaactggagtacatgtattttctttgtaaagtagcttcctatgaaaatgtggacttttttgaaggtttcatatgtttgtgttcaaagtaaaatatcctcattgctgcagcttactaaaaatgtaaagaaaattgtttttgctcgtgtagatatctgtaaatttgtttttgcatattaaaatatatatagataattttttaataagcatccaagtctgtttactttaagaaaaccatttcccaaacagatttttttttatttcaagaaaattttgctaccatttaagtaagagaaggtgagaaggatgacagaggttgtattggtagctattgaattcatgaaaacttttaagttagcatttgttagcagttattatccaagccagagtaggatttgttaccagttgttatccaaacctaatgtttaaattacacattgttgaaattaaattacacattgttgacatgcttctctcctgattgtttttattttaaacttgtgataggcatatctatgaaacctttgtaaatttagtttattgctttaccattattttactaggtaaaattagagaacagattttgttctctaatttttaagccttatttacatatgcagaaacagcttaaatattttgactagattagacaaacagttaatagatccaccattaggaatcaatatattatgtcataataaacatcctttttctttcactgaaatttcttttagaaataaacttatttttgcttgttatgttttgaaacttgacataggatattttccctctggctacacattcacctacccttgttctctatttagattattcaaataaagttagtttgcttttatagt

SEQ ID NO: 8195 - protein, 1132 aa, Homo sapiens; identical to SEQ ID NO: 1182

SEQ ID NO: 8196 - DNA, 1386 bp, Homo sapiens
ggaaatgaaataaagaaaaaaaatttggtggttggtatggggaattcaagaaagataaaattttgtagaaataaaaggcttgatgagctggattagaaacccagcacagttggaaaaattgacagttttcaatcaccaggcatatctttaaagtgaataaactgagattcaattaggacagggaaggaagtgaacaggagagataatggtatagcaaaagggagtccaaggagaagaagtctcagtgggagttttggaaaaccaagagaggcagcaagataccggaaagagcgtagacggtacaatgaacggtaagcaaagcataatttcccaaaatagtcttgatcagtatttcctgtaaaatgtttgatttaagcattttgtccatctccataggcacattttattgtcctctttaaaatacagaatgtactttttaaagatggaaatacgtttgaggtcaggcgtggtggctcacgactgtcatcccaacactttgggaggcccaggagggcagattgcttgatgagctcagtagtttgaaaccagcctgggcaatgtggtgaaaccctgtctcttaagaaaaatacaaagattagccaggcatgatggcacgtgcctgtagtccaagctacttgggaggctgagttgggaggatcacttgagcccaggaggttgaggctgcagtgagccattatcatgttactgcactccagcctgggcgacagagtgagaccctgtttcaaaaaaagaaatacatttgaaattaatttaggcaattgttgttcaacctgtggttaaaagtatgacagttaacttaaaattattaggttgacttaaaaatattgttgacttaaaattatttcgtattcaaacaggaatgactgtgataaatatgtttttcgtatgcaaaaatatcataaaagtaatggtggtattgtctggggcaacatcaagaaaaaattagttgaaactgatttctcaactccaacaccaagaaggaaaaccccatttaacacagacttaggagaaaactctggtattggaaaacttttcactaatgctgtggaatctttagatgaagaagagaaagattattatttttcgaactctgattctgcatagtaaaatgagaaaatatgattcctgggatttttaccataaagcagacagtgtttgtattttcaactggagtacatgtattttctttgtaaagtagcttcctatgaaaatgtggacttttttgaaggtttcatatgtttgtgttcaaagtaaaatatcctcattgctgcagcttactaaaaatgtaaagaaaattgtttttgctcgtgtagatatctgtaaatttgtttttgcatattaaaatatatatagataattttttaa

SEQ ID NO: 8197 - protein, 72 aa, Homo sapiens [sequence omitted]

SEQ ID NO: 8198 - DNA, 454 bp, Homo sapiens
ggattaataatgtaagattaaagataccctgcctgggtggaaagagctttatgtgaggggtttttatttatttatgaagattttttttgttttgtttttttgagaatcagtattaaggaaaaataaaataattgtttttaaagggctggtgaaaagaacagggaaaagaccaaacaaaaacagaaaactggaagatctgtccgtgacataaggaaatcaatgaaaaatgatgcacgagaaaaccaaacagatactgctcaaagagccaccaccacttacgattttgattgtgataatttggaactgaagagtaataagcacagtgagtcaccaggagctacagaattaaacatgtgccacagtaattgccaaaataaaccaacattaaggttcccagatgaccaagtaaataatactattcaaaatggaggaggagatgacttatctaatcagg

SEQ ID NO: 8199 - protein, 77 aa, Homo sapiens
MKNDARENQTDTAQRATTTYDFDCDNLELKSNKHSESPGATELNMCHSNCQNKPTLRFPDDQVNNTIQNGGGDDLSN

SEQ ID NO: 8200 - DNA, 4896 bp, Homo sapiens
ggcgccgacccatgctggctgggaacgtgtctcccggtgacgcagccccgggtggggaacgtggtgcggcggcggcggcggcggcgactgtacgcgcctccgccgcccccgagaggacgcgccgtgcagcggctgagtggcggcggcggcgacggcaaacccggagctgccggccggcgcgcgggaggaggacgcgggtgcggtctaggaaacggagctgcgggcggaggctccatgttgggaagcggcgccgttcgtgcttgttagcgggaatccgggagccgcggggtgagctggcgggggccgggccctaagtgaagatggaggccccgctgcggcctgccgcggacatcctgaggcggaacccgcagcaggactacgaactcgtccagagggtcggcagcggcacctacggggacgtctataaggccagaaatgtacacacaggagagctggctgcagtaaaaatcattaaattggagcctggagatgatttttctttgattcaacaagaaatatttatggttaaagaatgtaaacattgtaacatcgttgcctactttgggagttatcttagtcgggaaaaactatggatttgtatggaatactgtggtggcggatcacttcaagatatttaccatgttactggaccattatcagaattgcaaatagcctatgtatgcagagaaaccttacagggtcttgcctatttgcatactaaaggcaaaatgcatagagatatcaaaggtgctaatattttattgacagaccatggcgatgtaaaattagctgactttggtgtggctgcaaaaataacagctaccattgcaaaacgaaaatctttcattggcaccccttactggatggccccagaagttgcagcagtagagaagaatggtggctacaaccaactctgtgatatctgggcagtaggaataacagcaattgaacttggagaacttcagccacctatgtttgatctccacccaatgagggctctcttcttaatgtcaaaaagtaattttcagcctccaaaactaaaggacaaaacaaaatggtcatcaacattccataattttgtcaaaatagcactaaccaaaaacccaaaaaaaagaccaactgctgaaagacttctgactcacacttttgttgcacagccaggtctctctagagccctagcagttgaactgttagacaaagtgaacaatccagataaccacgcacattacactgaagcagatgacgatgactttgagccccatgcaatcattcgtcataccattagatctacaaacaggaatgccagagctgaacggacagcttcagaaataaattttgacaaattacaatttgaacctcctctgagaaaagaaacagaagcacgagatgaaatgggattgtcatcagacccaaatttcatgttacagtggaatccttttgttgatggtgcaaatactggcaaatcaacctcaaaacgtgcaataccacctcccctacctcctaagccaaggataagcagttaccctgaagacaactttccggatgaagaaaaagcatcaaccataaaacattgtcctgattcagaaagcagagctccccaaattctcagaagacagagtagcccaagttgtgggcctgtggcagagacttcttctattggaaatggtgatggtatttcaaaactgatgagtgaaaatacagaaggatcagcacaagcaccacagttaccacgaaaaaaggacaaacgagacttccctaaaccagccatcaatggccttccacccaccccaaaagttctgatgggagcatgcttttcaaaagtttttgatggctgtcctttgaaaattaattgtgcaacatcctggatacatcctgatacaaaagatcagtacattatttttggaactgaagatggtatttacacactgaatctcaatgagctacatgaggcaacgatggaacagttatttccacggaagtgtacttggctgtatgttatcaataatactttaatgtcattatcaggaaaaacctttcagctctactctcacaatcttatagctttgtttgaacatgccaaaaaaccaggattagctgcccatattcaaactcacaggtttccagaccgaatactaccaagaaaattcgctttaacaacaaagattcctgatacaaaaggctgccacaaatgttgcatagtcagaaacccttacacgggacataaatacctctgtggagctttacagtctggaattgttttacttcagtggtatgagccaatgcagaaattcatgttgataaagcactttgattttcctttgccaagtcctttgaatgtttttgaaatgctggtgatacctgaacaggaataccctatggtctgtgtagctattagcaaaggcactgaatcgaatcaggtagttcagtttgagacaatcaatttgaactctgcatcttcatggtttacagaaattggtgcaggcagccagcagttagattccattcatgtaacacagttggagagagataccgttttagtgtgtttagacaaatttgtgaaaattgtaaatctacaaggaaaattaaaatcaagtaagaaactggcctctgagttaagttttgattttcgcattgaatctgtagtatgccttcaagacagtgtgttggctttctggaaacatgggatgcagggtaaaagcttcaagtcagatgaggttacccaggagatttcagatgaaacaagagttttccgcttattaggatcagacagggttgtcgttttggaaagtaggccaacagaaaatcctactgcacacagcaatctctacatcttggctggacatgaaaatagttactaagcaacagaaactgatctcaaatgacaggaaaatgaatatactccattgaaaggaaaaataaggaaattcaatacaaactgcactatgatttgctttaactattatgggttatattgcaaatgatctgtactttagggtagaattcaatattttctgcagctggaaacagctagtctatctcttgccactgtgtggtggttatatcaagtttgcttaataaaagctatgagacaaatagtcctctagttccaggaaacacagtctttttttaaaaaaaacaatgtttgtaacaagggtgccatggtatttttagataactcgtgattatcttaagagaggtaaatttagtgatcattttatatcatgtcttattccttcttaatgaacataatttgttaaattctcaagcaaggttttcacttttatattggccattctgtatgtttttgtaaaacagaatatttaatccttatttattaatctcttgctggagtggtgtaatgtatctaacttttagcaaaggagggttgcagagcagcttaaattttttttataatgtataagaattttgtttatcttttaagagtagtaaagtactttgagtgtttgggggttcaacacacacatgcaattttgcttaacaaaagtattttataatacagtttcatacagaattaccttaaaagggagtcttatgttttcaactacagatagttgtaagggatcatacagaagatattgatgatagttgaaatattcttagaaggggtgtgtatgtctagctgtgtctaccatgtgtatgtattcttgacaagcagtataaaatacctgtgatttttctttacattagggataatgcataaggaattaatcttcatatatattatcatccctaatgtagcagggggaagtatttaattgcccatgatatgtattttacttatactatgccagagaggaaactataaagtaattacacatgtaatcttgggtttttcacatatgtaggtattcattttgagtaggttgaagaagaaaaaaaatatttaaatgaattgaattcctgatgggatagtatcaataagtatttaaaagccagtattctaaaaataataaagggtagggtcatttttgagtttgtttttcttttgctattgttaatattcaaaattaaagtgttacattggtacctgttgtcttaatgcatttattgagaacagcattgagatgatgaacaaggggttagcaatagcaaactctataattattttgactaattacttaagaggaaaacagtataagtatctcattcagtatttagcaattctgtaaaataagtattatctctatttttcagatgaggaagtaagggtttagcaaggttaagagatctatccaatttacacagcaagttagtagttgagcctgaccatgagtcttctgactctgttcttttcactatgcaatacgcaaacaataaaatgttatacaaatggaatataaagttatttattctttaaaaatgcacatatgatatgatttcagtaagtgtgtggctgtttattttggctatgttaagaatacgggatacagtagatgacaggggaaccatcctcaaaacaggggacatttacatgatggataagaaagccagaatcctccttttcttactgaatcctggcagccagatctttaccatcccatggtggaataccgaagagtcttctctgtgaaatctgaccaatgcaagtgaaaaggcctcattaagatcttgatgtcagacatgtcccggctaaactgcccagctagatgacactacagtgaaaatcatagttggcaatcccaccatcccacgcattatgtctagaccttgcagttagtcttttagtcctgtgctcttaaaaatgagcaaacaaccaaggattacaaataaatgaaagagaaaaaacagtctggggaaaacagaggaaacaggctatgaagggtaaggagaacatcaaaagaaaaagtattttcagaaggatgttgcaaccatgag

SEQ ID NO: 8201 - protein, 845 aa, Homo sapiens
MEAPLRPAADILRRNPQQDYELVQRVGSGTYGDVYKARNVHTGELAAVKIIKLEPGDDFSLIQQEIFMVKECKHCNIVAYFGSYLSREKLWICMEYCGGGSLQDIYHVTGPLSELQIAYVCRETLQGLAYLHTKGKMHRDIKGANILLTDHGDVKLADFGVAAKITATIAKRKSFIGTPYWMAPEVAAVEKNGGYNQLCDIWAVGITAIELGELQPPMFDLHPMRALFLMSKSNFQPPKLKDKTKWSSTFHNFVKIALTKNPKKRPTAERLLTHTFVAQPGLSRALAVELLDKVNNPDNHAHYTEADDDDFEPHAIIRHTIRSTNRNARAERTASEINFDKLQFEPPLRKETEARDEMGLSSDPNFMLQWNPFVDGANTGKSTSKRAIPPPLPPKPRISSYPEDNFPDEEKASTIKHCPDSESRAPQILRRQSSPSCGPVAETSSIGNGDGISKLMSENTEGSAQAPQLPRKKDKRDFPKPAINGLPPTPKVLMGACFSKVFDGCPLKINCATSWIHPDTKDQYIIFGTEDGIYTLNLNELHEATMEQLFPRKCTWLYVINNTLMSLSGKTFQLYSHNLIALFEHAKKPGLAAHIQTHRFPDRILPRKFALTTKIPDTKGCHKCCIVRNPYTGHKYLCGALQSGIVLLQWYEPMQKFMLIKHFDFPLPSPLNVFEMLVIPEQEYPMVCVAISKGTESNQVVQFETINLNSASSWFTEIGAGSQQLDSIHVTQLERDTVLVCLDKFVKIVNLQGKLKSSKKLASELSFDFRIESVVCLQDSVLAFWKHGMQGKSFKSDEVTQEISDETRVFRLLGSDRVVVLESRPTENPTAHSNLYILAGHENSY

SEQ ID NO: 8202 - DNA, 4232 bp, Homo sapiens
ggacgcgccgtgcagcggctgagtggcggcggcggcgacggcaaacccggagctgccggccggcgcgcgggaggaggacgcgggtgcggtctaggaagtaggtcccgggctccgcgctcaacaaagacggggccgcccccattagacggagctgcgggcggaggctccatgttgggaagcggcgccgttcgtgcttgttagcgggaatccgggagccgcggggtgagctggcgggggccgggccctaagtgaagatggaggccccgctgcggcctgccgcggacatcctgaggcggaacccgcagcaggactacgaactcgtccagagggtcggcagcggcacctacggggacgtctataaggggagatgatttttctttgattcaacaagaaatatttatggttaaagaatgtaaacattgtaacatcgttgcctactttgggagttatcttagtcgggaaaaactatggatttgtatggaatactgtggtggcggatcacttcaagatatttaccatgttactggaccattatcagaattgcaaatagcctatgtatgcagagaaaccttacagggtcttgcctatttgcatactaaaggcaaaatgcatagagatatcaaaggtgctaatattttattgacagaccatggcgatgtaaaattagctgactttggtgtggctgcaaaaataacagctaccattgcaaaacgaaaatctttcattggcaccccttactggatggccccagaagttgcagcagtagagaagaatggtggctacaaccaactctgtgatatctgggcagtaggaataacagcaattgaacttggagaacttcagccacctatgtttgatctccacccaatgagggctctcttcttaatgtcaaaaagtaattttcagcctccaaaactaaaggacaaaacaaaatggtcatcaacattccataattttgtcaaaatagcactaaccaaaaacccaaaaaaaagaccaactgctgaaagacttctgactcacacttttgttgcacagccaggtctctctagagccctagcagttgaactgttagacaaagtgaacaatccagataaccacgcacattacactgaagcagatgacgatgactttgagccccatgcaatcattcgtcataccattagatctacaaacaggaatgccagagctgaacggacagcttcagaaataaattttgacaaattacaatttgaacctcctctgagaaaagaaacagaagcacgagatgaaatgggattgtcatcagacccaaatttcatgttacagtggaatccttttgttgatggtgcaaatactggcaaatcaacctcaaaacgtgcaataccacctcccctacctcctaagccaaggataagcagttaccctgaagacaactttccggatgaagaaaaagcatcaaccataaaacattgtcctgattcagaaagcagagctccccaaattctcagaagacagagtagcccaagttgtgggcctgtggcagagacttcttctattggaaatggtgatggtatttcaaaactgatgagtgaaaatacagaaggatcagcacaagcaccacagttaccacgaaaaaaggacaaacgagacttccctaaaccagccatcaatggccttccacccaccccaaaagttctgatgggagcatgcttttcaaaagtttttgatggctgtcctttgaaaattaattgtgcaacatcctggatacatcctgatacaaaagatcagtacattatttttggaactgaagatggtatttacacactgaatctcaatgagctacatgaggcaacgatggaacagttatttccacggaagtgtacttggctgtatgttatcaataatactttaatgtcattatcaggaaaaacctttcagctctactctcacaatcttatagctttgtttgaacatgccaaaaaaccaggattagctgcccatattcaaactcacaggtttccagaccgaatactaccaagaaaattcgctttaacaacaaagattcctgatacaaaaggctgccacaaatgttgcatagtcagaaacccttacacgggacataaatacctctgtggagctttacagtctggaattgttttacttcagtggtatgagccaatgcagaaattcatgttgataaagcactttgattttcctttgccaagtcctttgaatgtttttgaaatgctggtgatacctgaacaggaataccctatggtctgtgtagctattagcaaaggcactgaatcgaatcaggtagttcagtttgagacaatcaatttgaactctgcatcttcatggtttacagaaattggtgcaggcagccagcagttagattccattcatgtaacacagttggagagagataccgttttagtgtgtttagacaaatttgtgaaaattgtaaatctacaaggaaaattaaaatcaagtaagaaactggcctctgagttaagttttgattttcgcattgaatctgtagtatgccttcaagacagtgtgttggctttctggaaacatgggatgcagggtaaaagcttcaagtcagatgaggttacccaggagatttcagatgaaacaagagttttccgcttattaggatcagacagggttgtcgttttggaaagtaggccaacagaaaatcctactgcacacagcaatctctacatcttggctggacatgaaaatagttactaagcaacagaaactgatctcaaatgacaggaaaatgaatatactccattgaaaggaaaaataaggaaattcaatacaaactgcactatgatttgctttaactattatgggttatattgcaaatgatctgtactttagggtagaattcaatattttctgcagctggaaacagctagtctatctcttgccactgtgtggtggttatatcaagtttgcttaataaaagctatgagacaaatagtcctctagttccaggaaacacagtctttttttaaaaaaaacaatgtttgtaacaagggtgccatggtatttttagataactcgtgattatcttaagagaggtaaatttagtgatcattttatatcatgtcttattccttcttaatgaacataatttgttaaattctcaagcaaggttttcacttttatattggccattctgtatgtttttgtaaaacagaatatttaatccttatttattaatctcttgctggagtggtgtaatgtatctaacttttagcaaaggagggttgcagagcagcttaaattttttttataatgtataagaattttgtttatcttttaagagtagtaaagtactttgagtgtttgggggttcaacacacacatgcaattttgcttaacaaaagtattttataatacagtttcatacagaattaccttaaaagggagtcttatgttttcaactacagatagttgtaagggatcatacagaagatattgatgatagttgaaatattcttagaaggggtgtgtatgtctagctgtgtctaccatgtgtatgtattcttgacaagcagtataaaatacctgtgatttttctttacattagggataatgcataaggaattaatcttcatatatattatcatccctaatgtagcagggggaagtatttaattgcccatgatatgtattttacttatactatgccagagaggaaactataaagtaattacacatgtaatcttgggtttttcacatatgtaggtattcattttgagtaggttgaagaagaaaaaaaatatttaaatgaattgaattcctgatgggatagtatcaataagtatttaaaagccagtattctaaaaataataaagggtagggtcatttttgagtttgtttttcttttgctattgttaatattcaaaattaaagtgttacattggtacctgttgtcttaatgcatttattgagaacagcattgagatgatgaacaaggggttagcaatagcaaactctataattattttgactaattacttaagaggaaaacagtataagtatctcattcagtatttagcaattctgtaaaataagtattatctctatttttcagatgaggaagtaagggtttagcaaggttaagagatctatccaatttacacagcaagttagtagttgagcctgaccatgagtcttctgactctgttcttttcactatgcaatacgcaaacaataaaatgttatacaaatgg

SEQ ID NO: 8203 - protein, 778 aa, Homo sapiens
MVKECKHCNIVAYFGSYLSREKLWICMEYCGGGSLQDIYHVTGPLSELQIAYVCRETLQGLAYLHTKGKMHRDIKGANILLTDHGDVKLADFGVAAKITATIAKRKSFIGTPYWMAPEVAAVEKNGGYNQLCDIWAVGITAIELGELQPPMFDLHPMRALFLMSKSNFQPPKLKDKTKWSSTFHNFVKIALTKNPKKRPTAERLLTHTFVAQPGLSRALAVELLDKVNNPDNHAHYTEADDDDFEPHAIIRHTIRSTNRNARAERTASEINFDKLQFEPPLRKETEARDEMGLSSDPNFMLQWNPFVDGANTGKSTSKRAIPPPLPPKPRISSYPEDNFPDEEKASTIKHCPDSESRAPQILRRQSSPSCGPVAETSSIGNGDGISKLMSENTEGSAQAPQLPRKKDKRDFPKPAINGLPPTPKVLMGACFSKVFDGCPLKINCATSWIHPDTKDQYIIFGTEDGIYTLNLNELHEATMEQLFPRKCTWLYVINNTLMSLSGKTFQLYSHNLIALFEHAKKPGLAAHIQTHRFPDRILPRKFALTTKIPDTKGCHKCCIVRNPYTGHKYLCGALQSGIVLLQWYEPMQKFMLIKHFDFPLPSPLNVFEMLVIPEQEYPMVCVAISKGTESNQVVQFETINLNSASSWFTEIGAGSQQLDSIHVTQLERDTVLVCLDKFVKIVNLQGKLKSSKKLASELSFDFRIESVVCLQDSVLAFWKHGMQGKSFKSDEVTQEISDETRVFRLLGSDRVVVLESRPTENPTAHSNLYILAGHENSY

SEQ ID NO: 8204 - DNA, 4354 bp, Homo sapiens
ggcgccgacccatgctggctgggaacgtgtctcccggtgacgcagccccgggtggggaacgtggtgcggcggcggcggcggcggcgactgtacgcgcctccgccgcccccgagaggacgcgccgtgcagcggctgagtggcggcggcggcgacggcaaacccggagctgccggccggcgcgcgggaggaggacgcgggtgcggtctaggaaacggagctgcgggcggaggctccatgttgggaagcggcgccgttcgtgcttgttagcgggaatccgggagccgcggggtgagctggcgggggccgggccctaagtgaagatggaggccccgctgcggcctgccgcggacatcctgaggcggaacccgcagcaggactacgaactcgtccagagggtcggcagcggcacctacggggacgtctataaggccagaaatgtacacacaggagagctggctgcagtaaaaatcattaaattggagcctggagatgatttttctttgattcaacaagaaatatttatggttaaagaatgtaaacattgtaacatcgttgcctactttgggagttatcttagtcgggaaaaactatggatttgtatggaatactgtggtggcggatcacttcaagatatttaccatgttactggaccattatcagaattgcaaatagcctatgtatgcagagaaaccttacagggtcttgcctatttgcatactaaaggcaaaatgcatagagatatcaaaggtgctaatattttattgacagaccatggcgatgtaaaattagctgactttggtgtggctgcaaaaataacagctaccattgcaaaacgaaaatctttcattggcaccccttactggatggccccagaagttgcagcagtagagaagaatggtggctacaaccaactctgtgatatctgggcagtaggaataacagcaattgaacttggagaacttcagccacctatgtttgatctccacccaatgagggctctcttcttaatgtcaaaaagtaattttcagcctccaaaactaaaggacaaaacaaaatggtcatcaacattccataattttgtcaaaatagcactaaccaaaaacccaaaaaaaagaccaactgctgaaagacttctgactcacacttttgttgcacagccaggtctctctagagccctagcagttgaactgttagacaaagtgaacaatccagataaccacgcacattacactgaagcagatgacgatgactttgagccccatgcaatcattcgtcataccattagatctacaaacaggaatgccagagctgaacggacagcttcagaaataaattttgacaaattacaatttgaacctcctctgagaaaagaaacagaagcacgagatgaaatgggattgtcatcagacccaaatttcatgttacagtggaatccttttgttgatggtgcaaatactggcaaatcaacctcaaaacgtgcaataccacctcccctacctcctaagccaaggataagcagttaccctgaagacaactttccggatgaagaaaaagcatcaaccataaaacattgtcctgattcagaaagcagagctccccaaattctcagaagacagagtagcccaagttgtgggcctgtggcagagacttcttctattggaaatggtgatggtatttcaaaactgatgagtgaaaatacagaaggatcagcacaagcaccacagttaccacgaaaaaaggacaaacgagacttccctaaaccagccatcaatggccttccacccaccccaaaagttctgatgggagcatgcttttcaaaagtttttgatggctgtcctttgaaaattaattgtgcaacatcctggatacatcctgatacaaaagatcagtacattatttttggaactgaagatggtatttacacactgaatctcaatgagctacatgaggcaacgatggaacagttatttccacggaagtgtacttggctgtatgttatcaataatactttaatgtcattatcaggaaaaacctttcagctctactctcacaatcttatagctttgtttgaacatgccaaaaaaccaggattagctgcccatattcaaactcacaggtttccagaccgaatactaccaagaaaattcgctttaacaacaaagattcctgatacaaaaggctgccacaaatgttgcatagtcagaaacccttacacgggacataaatacctctgtggagctttacagtctggaattgttttacttcagtggtatgagccaatgcagaaattcatgttgataaagcactttgattttcctttgccaagtcctttgaatgtttttgaaatgctggtgatacctgaacaggaataccctatggtctgtgtagctattagcaaaggcactgaatcgaatcaggtagttcagtttgagacaatcaatttgaactctgcatcttcatggtttacagaaattggtgcaggcagccagcagttagattccattcatgtaacacagttggagagagataccgttttagtgtgtttagacaaatttgtgaaaattgtaaatctacaaggaaaattaaaatcaagtaagaaactggcctctgagttaagttttgattttcgcattgaatctgtagtatgccttcaagacagtgtgttggctttctggaaacatgggatgcagggtaaaagcttcaagtcagatgaggttacccaggagatttcagatgaaacaagagttttccgcttattaggatcagacagggttgtcgttttggaaagtaggccaacagaaaatcctactgcacacagcaatctctacatcttggctggacatgaaaatagttactaagcaacagaaactgatctcaaatgacaggaaaatgaatatactccattgaaaggaaaaataaggaaattcaatacaaactgcactatgatttgctttaactattatgggttatattgcaaatgatctgtactttagggtagaattcaatattttctgcagctggaaacagctagtctatctcttgccactgtgtggtggttatatcaagtttgcttaataaaagctatgagacaaatagtcctctagttccaggaaacacagtctttttttaaaaaaaacaatgtttgtaacaagggtgccatggtatttttagataactcgtgattatcttaagagaggtaaatttagtgatcattttatatcatgtcttattccttcttaatgaacataatttgttaaattctcaagcaaggttttcacttttatattggccattctgtatgtttttgtaaaacagaatatttaatccttatttattaatctcttgctggagtggtgtaatgtatctaacttttagcaaaggagggttgcagagcagcttaaattttttttataatgtataagaattttgtttatcttttaagagtagtaaagtactttgagtgtttgggggttcaacacacacatgcaattttgcttaacaaaagtattttataatacagtttcatacagaattaccttaaaagggagtcttatgttttcaactacagatagttgtaagggatcatacagaagatattgatgatagttgaaatattcttagaaggggtgtgtatgtctagctgtgtctaccatgtgtatgtattcttgacaagcagtataaaatacctgtgatttttctttacattagggataatgcataaggaattaatcttcatatatattatcatccctaatgtagcagggggaagtatttaattgcccatgatatgtattttacttatactatgccagagaggaaactataaagtaattacacatgtaatcttgggtttttcacatatgtaggtattcattttgagtaggttgaagaagaaaaaaaatatttaaatgaattgaattcctgatgggatagtatcaataagtatttaaaagccagtattctaaaaataataaagggtagggtcatttttgagtttgtttttcttttgctattgttaatattcaaaattaaagtgttacattggtacctgttgtcttaatgcatttattgagaacagcattgagatgatgaacaaggggttagcaatagcaaactctataattattttgactaattacttaagaggaaaacagtataagtatctcattcagtatttagcaattctgtaaaataagtattatctctatttttcagatgaggaagtaagggtttagcaaggttaagagatctatccaatttacacagcaagttagtagttgagcctgaccatgagtcttctgactctgttcttttcactatgcaatacgcaaacaataaaatgttatacaaatgg

SEQ ID NO: 8205 - protein, 845 aa, Homo sapiens; identical to SEQ ID NO: 8201

SEQ ID NO: 8206 - DNA, 4402 bp, Homo sapiens
ggcgccgacccatgctggctgggaacgtgtctcccggtgacgcagccccgggtggggaacgtggtgcggcggcggcggcggcggcgactgtacgcgcctccgccgcccccgagaggacgcgccgtgcagcggctgagtggcggcggcggcgacggcaaacccggagctgccggccggcgcgcgggaggaggacgcgggtgcggtctaggaagtaggtcccgggctccgcgctcaacaaagacggggccgcccccattagacggagctgcgggcggaggctccatgttgggaagcggcgccgttcgtgcttgttagcgggaatccgggagccgcggggtgagctggcgggggccgggccctaagtgaagatggaggccccgctgcggcctgccgcggacatcctgaggcggaacccgcagcaggactacgaactcgtccagagggtcggcagcggcacctacggggacgtctataaggccagaaatgtacacacaggagagctggctgcagtaaaaatcattaaattggagcctggagatgatttttctttgattcaacaagaaatatttatggttaaagaatgtaaacattgtaacatcgttgcctactttgggagttatcttagtcgggaaaaactatggatttgtatggaatactgtggtggcggatcacttcaagatatttaccatgttactggaccattatcagaattgcaaatagcctatgtatgcagagaaaccttacagggtcttgcctatttgcatactaaaggcaaaatgcatagagatatcaaaggtgctaatattttattgacagaccatggcgatgtaaaattagctgactttggtgtggctgcaaaaataacagctaccattgcaaaacgaaaatctttcattggcaccccttactggatggccccagaagttgcagcagtagagaagaatggtggctacaaccaactctgtgatatctgggcagtaggaataacagcaattgaacttggagaacttcagccacctatgtttgatctccacccaatgagggctctcttcttaatgtcaaaaagtaattttcagcctccaaaactaaaggacaaaacaaaatggtcatcaacattccataattttgtcaaaatagcactaaccaaaaacccaaaaaaaagaccaactgctgaaagacttctgactcacacttttgttgcacagccaggtctctctagagccctagcagttgaactgttagacaaagtgaacaatccagataaccacgcacattacactgaagcagatgacgatgactttgagccccatgcaatcattcgtcataccattagatctacaaacaggaatgccagagctgaacggacagcttcagaaataaattttgacaaattacaatttgaacctcctctgagaaaagaaacagaagcacgagatgaaatgggattgtcatcagacccaaatttcatgttacagtggaatccttttgttgatggtgcaaatactggcaaatcaacctcaaaacgtgcaataccacctcccctacctcctaagccaaggataagcagttaccctgaagacaactttccggatgaagaaaaagcatcaaccataaaacattgtcctgattcagaaagcagagctccccaaattctcagaagacagagtagcccaagttgtgggcctgtggcagagacttcttctattggaaatggtgatggtatttcaaaactgatgagtgaaaatacagaaggatcagcacaagcaccacagttaccacgaaaaaaggacaaacgagacttccctaaaccagccatcaatggccttccacccaccccaaaagttctgatgggagcatgcttttcaaaagtttttgatggctgtcctttgaaaattaattgtgcaacatcctggatacatcctgatacaaaagatcagtacattatttttggaactgaagatggtatttacacactgaatctcaatgagctacatgaggcaacgatggaacagttatttccacggaagtgtacttggctgtatgttatcaataatactttaatgtcattatcaggaaaaacctttcagctctactctcacaatcttatagctttgtttgaacatgccaaaaaaccaggattagctgcccatattcaaactcacaggtttccagaccgaatactaccaagaaaattcgctttaacaacaaagattcctgatacaaaaggctgccacaaatgttgcatagtcagaaacccttacacgggacataaatacctctgtggagctttacagtctggaattgttttacttcagtggtatgagccaatgcagaaattcatgttgataaagcactttgattttcctttgccaagtcctttgaatgtttttgaaatgctggtgatacctgaacaggaataccctatggtctgtgtagctattagcaaaggcactgaatcgaatcaggtagttcagtttgagacaatcaatttgaactctgcatcttcatggtttacagaaattggtgcaggcagccagcagttagattccattcatgtaacacagttggagagagataccgttttagtgtgtttagacaaatttgtgaaaattgtaaatctacaaggaaaattaaaatcaagtaagaaactggcctctgagttaagttttgattttcgcattgaatctgtagtatgccttcaagacagtgtgttggctttctggaaacatgggatgcagggtaaaagcttcaagtcagatgaggttacccaggagatttcagatgaaacaagagttttccgcttattaggatcagacagggttgtcgttttggaaagtaggccaacagaaaatcctactgcacacagcaatctctacatcttggctggacatgaaaatagttactaagcaacagaaactgatctcaaatgacaggaaaatgaatatactccattgaaaggaaaaataaggaaattcaatacaaactgcactatgatttgctttaactattatgggttatattgcaaatgatctgtactttagggtagaattcaatattttctgcagctggaaacagctagtctatctcttgccactgtgtggtggttatatcaagtttgcttaataaaagctatgagacaaatagtcctctagttccaggaaacacagtctttttttaaaaaaaacaatgtttgtaacaagggtgccatggtatttttagataactcgtgattatcttaagagaggtaaatttagtgatcattttatatcatgtcttattccttcttaatgaacataatttgttaaattctcaagcaaggttttcacttttatattggccattctgtatgtttttgtaaaacagaatatttaatccttatttattaatctcttgctggagtggtgtaatgtatctaacttttagcaaaggagggttgcagagcagcttaaattttttttataatgtataagaattttgtttatcttttaagagtagtaaagtactttgagtgtttgggggttcaacacacacatgcaattttgcttaacaaaagtattttataatacagtttcatacagaattaccttaaaagggagtcttatgttttcaactacagatagttgtaagggatcatacagaagatattgatgatagttgaaatattcttagaaggggtgtgtatgtctagctgtgtctaccatgtgtatgtattcttgacaagcagtataaaatacctgtgatttttctttacattagggataatgcataaggaattaatcttcatatatattatcatccctaatgtagcagggggaagtatttaattgcccatgatatgtattttacttatactatgccagagaggaaactataaagtaattacacatgtaatcttgggtttttcacatatgtaggtattcattttgagtaggttgaagaagaaaaaaaatatttaaatgaattgaattcctgatgggatagtatcaataagtatttaaaagccagtattctaaaaataataaagggtagggtcatttttgagtttgtttttcttttgctattgttaatattcaaaattaaagtgttacattggtacctgttgtcttaatgcatttattgagaacagcattgagatgatgaacaaggggttagcaatagcaaactctataattattttgactaattacttaagaggaaaacagtataagtatctcattcagtatttagcaattctgtaaaataagtattatctctatttttcagatgaggaagtaagggtttagcaaggttaagagatctatccaatttacacagcaagttagtagttgagcctgaccatgagtcttctgactctgttcttttcactatgcaatacgcaaacaataaaatgttatacaaatgg

SEQ ID NO: 8207 - protein, 845 aa, Homo sapiens; identical to SEQ ID NO: 8201

SEQ ID NO: 8208 - DNA, 4046 bp, Homo sapiens
ggcgccgacccatgctggctgggaacgtgtctcccggtgacgcagccccgggtggggaacgtggtgcggcggcggcggcggcggcgactgtacgcgcctccgccgcccccgagaggacgcgccgtgcagcggctgagtggcggcggcggcgacggcaaacccggagctgccggccggcgcgcgggaggaggacgcgggtgcggtctaggaaacggagctgcgggcggaggctccatgttgggaagcggcgccgttcgtgcttgttagcgggaatccgggagccgcggggtgagctggcgggggccgggccctaagtgaagatggaggccccgctgcggcctgccgcggacatcctgaggcggaacccgcagcaggactacgaactcgtccagagggtcggcagcggcacctacggggacgtctataaggccagaaatgtacacacaggagagctggctgcagtaaaaatcattaaattggagcctggagatgatttttctttgattcaacaagaaatatttatggttaaagaatgtaaacattgtaacatcgttgcctactttgggagttatcttagtcgggaaaaactatggatttgtatggaatactgtggtggcggatcacttcaagatatttaccatgttactggaccattatcagaattgcaaatagcctatgtatgcagagaaaccttacagggtcttgcctatttgcatactaaaggcaaaatgcatagagatatcaaaggtgctaatattttattgacagaccatggcgatgtaaaattagctgactttggtgtggctgcaaaaataacagctaccattgcaaaacgaaaatctttcattggcaccccttactggatggccccagaagttgcagcagtagagaagaatggtggctacaaccaactctgtgatatctgggcagtaggaataacagcaattgaacttggagaacttcagccacctatgtttgatctccacccaatgagggctctcttcttaatgtcaaaaagtaattttcagcctccaaaactaaaggacaaaacaaaatggtcatcaacattccataattttgtcaaaatagcactaaccaaaaacccaaaaaaaagaccaactgctgaaagacttctgactcacacttttgttgcacagccaggtctctctagagccctagcagttgaactgttagacaaagtgaacaatccagataaccacgcacattacactgaagcagatgacgatgactttgagccccatgcaatcattcgtcataccattagatctacaaacaggaatgccagagctgaacggacagcttcagaaataaattttgacaaattacaatttgaacctcctctgagaaaagaaacagaagcacgagatgaaatgggattgtcatcagacccaaatttcatgttacagtggaatccttttgttgatggtgcaaatactggcaaatcaacctcaaaacgtgcaataccacctcccctacctcctaagccaaggataagcagttaccctgaagacaactttccggatgaagaaaaagcatcaaccataaaacattgtcctgattcagaaagcagagctccccaaattctcagaagacagagtagcccaagttgtgggcctgtggcagagacttcttctattggaaatggtgatggtatttcaaaactgatgagtgaaaatacagaaggatcagcacaagcaccacagttaccacgaaaaaaggacaaacgagacttccctaaaccagccatcaatggccttccacccaccccaaaagttctgatgggagcatgcttttcaaaagtttttgatggctgtcctttgaaaattaattgtgcaacatcctggatacatcctgatacaaaagatcagtacattatttttggaactgaagatggtatttacacactgaatctcaatgagctacatgaggcaacgatggaacagttatttccacggaagtgtacttggctgtatgttatcaataatactttaatgtcattatcaggaaaaacctttcagctctactctcacaatcttatagctttgtttgaacatgccaaaaaaccaggattagctgcccatattcaaactcacaggtttccagaccgaatactaccaagaaaattcgctttaacaacaaagattcctgatacaaaaggctgccacaaatgttgcatagtcagaaacccttacacgggacataaatacctctgtggagctttacagtctggaattgttttacttcagtggtatgagccaatgcagaaattcatgttgataaagcactttgattttcctttgccaagtcctttgaatgtttttgaaatgctggtgatacctgaacaggaataccctatggtctgtgtagctattagcaaaggcactgaatcgaatcaggtagttcagtttgagacaatcaatttgaactctgcatcttcatggtttacagaaattggtgcaggcagccagcagttagattccattcatgtaacacagttggagagagataccgttttagtgtgtttagacaaatttgtgaaaattgtaaatctacaaggaaaattaaaatcaagtaagaaactggcctctgagttaagttttgattttcgcattgaatctgtagtatgccttcaagacagtgtgttggctttctggaaacatgggatgcagggtaaaagcttcaagtcagatgaggttacccaggagatttcagatgaaacaagagttttccgcttattaggatcagacagggttgtcgttttggaaagtaggccaacagaaaatcctactgcacacagcaatctctacatcttggctggacatgaaaatagttactaagcaacagaaactgatctcaaatgacaggaaaatgaatatactccattgaaaggaaaaataaggaaattcaatacaaactgcactatgatttgctttaactattatgggttatattgcaaatgatctgtactttagggtagaattcaatattttctgcagctggaaacagctagtctatctcttgccactgtgtggtggttatatcaagtttgcttaataaaagctatgagacaaatagtcctctagttccaggaaacacagtctttttttaaaaaaaacaatgtttgtaacaagggtgccatggtatttttagataactcgtgattatcttaagagaggtaaatttagtgatcattttatatcatgtcttattccttcttaatgaacataatttgttaaattctcaagcaaggttttcacttttatattggccattctgtatgtttttgtaaaacagaatatttaatccttatttattaatctcttgctggagtggtgtaatgtatctaacttttagcaaaggagggttgcagagcagcttaaattttttttataatgtataagaattttgtttatcttttaagagtagtaaagtactttgagtgtttgggggttcaacacacacatgcaattttgcttaacaaaagtattttataatacagtttcatacagaattaccttaaaagggagtcttatgttttcaactacagatagttgtaagggatcatacagaagatattgatgatagttgaaatattcttagaaggggtgtgtatgtctagctgtgtctaccatgtgtatgtattcttgacaagcagtataaaatacctgtgatttttctttacattagggataatgcataaggaattaatcttcatatatattatcatccctaatgtagcagggggaagtatttaattgcccatgatatgtattttacttatactatgccagagaggaaactataaagtaattacacatgtaatcttgggtttttcacatatgtaggtattcattttgagtaggttgaagaagaaaaaaaatatttaaatgaattgaattcctgatgggatagtatcaataagtatttaaaagccagtattctaaaaataataaagggtagggtcatttttgagtttgtttttcttttgctattgttaatattcaaaattaaagtgttacattggt

SEQ ID NO: 8209 - protein, 845 aa, Homo sapiens; identical to SEQ ID NO: 8201

SEQ ID NO: 8210 - DNA, 3111 bp, Homo sapiens
ggcgccgacccatgctggctgggaacgtgtctcccggtgacgcagccccgggtggggaacgtggtgcggcggcggcggcggcggcgactgtacgcgcctccgccgcccccgagaggacgcgccgtgcagcggctgagtggcggcggcggcgacggcaaacccggagctgccggccggcgcgcgggaggaggacgcgggtgcggtctaggaaacggagctgcgggcggaggctccatgttgggaagcggcgccgttcgtgcttgttagcgggaatccgggagccgcggggtgagctggcgggggccgggccctaagtgaagatggaggccccgctgcggcctgccgcggacatcctgaggcggaacccgcagcaggactacgaactcgtccagagggtcggcagcggcacctacggggacgtctataaggccagaaatgtacacacaggagagctggctgcagtaaaaatcattaaattggagcctggagatgatttttctttgattcaacaagaaatatttatggttaaagaatgtaaacattgtaacatcgttgcctactttgggagttatcttagtcgggaaaaactatggatttgtatggaatactgtggtggcggatcacttcaagatatttaccatgttactggaccattatcagaattgcaaatagcctatgtatgcagagaaaccttacagggtcttgcctatttgcatactaaaggcaaaatgcatagagatatcaaaggtgctaatattttattgacagaccatggcgatgtaaaattagctgactttggtgtggctgcaaaaataacagctaccattgcaaaacgaaaatctttcattggcaccccttactggatggccccagaagttgcagcagtagagaagaatggtggctacaaccaactctgtgatatctgggcagtaggaataacagcaattgaacttggagaacttcagccacctatgtttgatctccacccaatgagggctctcttcttaatgtcaaaaagtaattttcagcctccaaaactaaaggacaaaacaaaatggtcatcaacattccataattttgtcaaaatagcactaaccaaaaacccaaaaaaaagaccaactgctgaaagacttctgactcacacttttgttgcacagccaggtctctctagagccctagcagttgaactgttagacaaagtgaacaatccagataaccacgcacattacactgaagcagatgacgatgactttgagccccatgcaatcattcgtcataccattagatctacaaacaggaatgccagagctgaacggacagcttcagaaataaattttgacaaattacaatttgaacctcctctgagaaaagaaacagaagcacgagatgaaatgggattgtcatcagacccaaatttcatgttacagtggaatccttttgttgatggtgcaaatactggcaaatcaacctcaaaacgtgcaataccacctcccctacctcctaagccaaggataagcagttaccctgaagacaactttccggatgaagaaaaagcatcaaccataaaacattgtcctgattcagaaagcagagctccccaaattctcagaagacagagtagcccaagttgtgggcctgtggcagagacttcttctattggaaatggtgatggtatttcaaaactgatgagtgaaaatacagaaggatcagcacaagcaccacagttaccacgaaaaaaggacaaacgagacttccctaaaccagccatcaatggccttccacccaccccaaaagttctgatgggagcatgcttttcaaaagtttttgatggctgtcctttgaaaattaattgtgcaacatcctggatacatcctgatacaaaagatcagtacattatttttggaactgaagatggtatttacacactgaatctcaatgagctacatgaggcaacgatggaacagttatttccacggaagtgtacttggctgtatgttatcaataatactttaatgtcattatcaggaaaaacctttcagctctactctcacaatcttatagctttgtttgaacatgccaaaaaaccaggattagctgcccatattcaaactcacaggtttccagaccgaatactaccaagaaaattcgctttaacaacaaagattcctgatacaaaaggctgccacaaatgttgcatagtcagaaacccttacacgggacataaatacctctgtggagctttacagtctggaattgttttacttcagtggtatgagccaatgcagaaattcatgttgataaagcactttgattttcctttgccaagtcctttgaatgtttttgaaatgctggtgatacctgaacaggaataccctatggtctgtgtagctattagcaaaggcactgaatcgaatcaggtagttcagtttgagacaatcaatttgaactctgcatcttcatggtttacagaaattggtgcaggcagccagcagttagattccattcatgtaacacagttggagagagataccgttttagtgtgtttagacaaatttgtgaaaattgtaaatctacaaggaaaattaaaatcaagtaagaaactggcctctgagttaagttttgattttcgcattgaatctgtagtatgccttcaagacagtgtgttggctttctggaaacatgggatgcagggtaaaagcttcaagtcagatgaggttacccaggagatttcagatgaaacaagagttttccgcttattaggatcagacagggttgtcgttttggaaagtaggccaacagaaaatcctactgcacacagcaatctctacatcttggctggacatgaaaatagttactaagcaacagaaactgatctcaaatgacaggaaaatgaatatactccattgaaaggaaaaataaggaaattcaatacaaactgcactatgatttgctttaactattatgggttatattgcaaatgatctgtactttagggtagaattcaatattttctgcagctggaaacagctagtctatctcttgccactgtgtggtggttatatcaagtttgcttaataaaagctatgagacaaatagtcctctagttccagg

SEQ ID NO: 8211 - protein, 845 aa, Homo sapiens; identical to SEQ ID NO: 8201

SEQ ID NO: 8212 - DNA, 595 bp, Homo sapiens
ctgaagaaaagccttggaggaagtagaccaaattttaaacaggagctgtttttgagtggtgggactattggtaattttttaaacacttttgtgtcttatctatatttttctttaatgggaaaatgagtttgctcagcattttattggaaatattttgttttttagttttgataaaagtatggttgataagcaattaacatagtaccaagtaattttaatgtaattaacaagcttttaattaacaagatttttgtttttattttatttttaggccagaaatgtacacacaggagagctggctgcagtaaaaatcattaaattggagcctggagatgatttttctttgattcaacaagaaatatttatggttaaagaatgtaaacattgtaacatcgttgcctactttgggagttatcttaggtaagagaaaaaaaagcatcatctctctctgtattttatatattctttgctactacactctctcccttgtatgtaagtgctactatatttgtatgtttttaaacactgcaaagttctaaattttttaaggttttcctatttctacggttttcccctattacatattaataatggt

SEQ ID NO: 8213 - protein, 42 aa, Homo sapiens
AINIVPSNFNVINKLLINKIFVFILFLGQKCTHRRAGCSKNH

SEQ ID NO: 8214 - DNA, 265 bp, Homo sapiens
attcagccttggctaaagttagagctgaaattagaggccacagattacagtcagcattttactgaagaactttcaaagaagggaactgcgggcggaggctccatgttgggaagcggcgccgttcgtgcttgttagcgggaatccgggagccgcggggtgagctggcgggggccgggccctaagtgaagatggaggccccgctgcggcctgccgcggacatcctgaggcggaacccgcagcaggactacgaactcgtccagagggt

SEQ ID NO: 8215 - protein, 41 aa, Homo sapiens
RPQITVSILLKNFQRRELRAEAPCWEAAPFVLVSGNPGAAG

SEQ ID NO: 8216 - DNA, 1853 bp, Homo sapiens
agtatgtgctctgggacaaaacagcatatttggcaacatctcggtgtccttatctgcagcttgaagaggcgccacagcaacatcctcagagtctgagcgaactgcgcccagcgcgggcacggagcctcccaccgccagcaacctgcggccccggagaaggcagcgagcgcagtgacagcgcctcaccgccaccagctcctggaccaccatggccaagaaccgcagggacagaaacagttggggtggattttcggaaaagacatatgaatggagctcagaagaggaggagccagtgaaaaaggcaggaccagtccaagtcctcattgtcaaagatgaccattcctttgagttagatgaaactgcattaaatcggatccttctctcggaggctgtcagagacaaggaggttgttgctgtatctgttgctggagcatttagaaaaggaaaatcattcctgatggacttcatgttgagatacatgtacaaccaggaatcagttgattgggttggagactacaatgaaccattgactggtttttcatggagaggtggatctgagcgagagaccacaggaattcagatatggagtgaaatcttccttatcaataaacctgatggtaaaaaggttgcagtgttattgatggatactcagggaacctttgatagtcagtcaactttgagagattcagccacagtatttgcccttagcacaatgatcagctcaatacaggtatataacttatcccaaaatgtccaggaggatgatcttcagcacctccagcttttcactgagtatggcagactggcaatggaggaaacattcctgaagccatttcagagtctgatatttcttgttcgagactggagtttcccatacgaattttcatatggagccgatggtggtgccaaattcttggaaaaacgcctcaaggtctcagggaaccagcatgaagaactacagaacgtcagaaaacacatccattcctgtttcaccaacatttcctgttttctgctacctcatcctggcttaaaagtagctaccaatccaaactttgatggaaaattgaaagaaatagatgatgaattcatcaaaaacttgaaaatactgattccttggctacttagtcccgagagcctagatattaaagagatcaatgggaataaaatcacctgccggggtctggtggagtacttcaaggcttatataaagatctatcaaggtgaagaattaccacatcccaaatccatgttacaggccacagcagaagctaacaatttagcagccgtggcaactgccaaggacacatacaacaaaaaaatggaagagatttgtggtggtgacaaaccatttctggccccaaatgacttgcagaccaaacacctgcaacttaaggaagaatctgtgaagctattccgaggggtgaagaagatgggtggggaagaatttagccggcgttacctgcagcagttggagagtgaaatagatgaactttacatccaatatatcaagcacaatgatagcaaaaatatcttccatgcagctcgtaccccagccacactgtttgtagtcatctttatcacatatgtgattgctggtgtgactggattcattggtttggacatcatagctagcctatgcaatatgataatgggactgacccttatcaccctgtgcacttgggcatatatccggtactctggagaataccgagagctgggagctgtaatagaccaggtggctgcagctctgtgggaccaggctttgtacaagctttacagtgcagcagcaacccacagacatctgtatcatcaagctttccctacaccaaagtcggaatctactgaacaatcag

SEQ ID NO: 8217 - protein, 547 aa, Homo sapiens
MAKNRRDRNSWGGFSEKTYEWSSEEEEPVKKAGPVQVLIVKDDHSFELDETALNRILLSEAVRDKEVVAVSVAGAFRKGKSFLMDFMLRYMYNQESVDWVGDYNEPLTGFSWRGGSERETTGIQIWSEIFLINKPDGKKVAVLLMDTQGTFDSQSTLRDSATVFALSTMISSIQVYNLSQNVQEDDLQHLQLFTEYGRLAMEETFLKPFQSLIFLVRDWSFPYEFSYGADGGAKFLEKRLKVSGNQHEELQNVRKHIHSCFTNISCFLLPHPGLKVATNPNFDGKLKEIDDEFIKNLKILIPWLLSPESLDIKEINGNKITCRGLVEYFKAYIKIYQGEELPHPKSMLQATAEANNLAAVATAKDTYNKKMEEICGGDKPFLAPNDLQTKHLQLKEESVKLFRGVKKMGGEEFSRRYLQQLESEIDELYIQYIKHNDSKNIFHAARTPATLFVVIFITYVIAGVTGFIGLDIIASLCNMIMGLTLITLCTWAYIRYSGEYRELGAVIDQVAAALWDQALYKLYSAAATHRHLYHQAFPTPKSESTEQ

SEQ ID NO: 8218 - DNA, 594 bp, Homo sapiens
agggagggtgtgacgctggtatctgtgtgaactcgggcttgtgatgctgagcttggttcatctgctttctcctcccttttcctccccactccttcccaccagcgccacagcaacatcctcagagtctgagcgaactgcgcccagcgcgggcacggagcctcccaccgccagcaacctgcggccccggagaaggcagcgagcgcagtgacagcgcctcaccgccaccagctcctggaccaccatggccaagaaccgcagggacagaaacagttggggtggattttcggaaaagacatatgaatggagctcagaagaggaggagccagtgaaaaaggcaggaccagtccaagtcctcattgtcaaagatgaccattcctttgagttagatgaaactgcattaaatcggatccttctctcggaggctgtcagagacaaggaggttgttgctgtatctgttgctggagcatttagaaaaggaaaatcattcctgatggacttcatgttgagatacatgtacaaccaggaatcagttgattgggttggagactacaatgaaccattgactggtttttcatggagaggtggatctgagcg

SEQ ID NO: 8219 - protein, 116 aa, Homo sapiens
MAKNRRDRNSWGGFSEKTYEWSSEEEEPVKKAGPVQVLIVKDDHSFELDETALNRILLSEAVRDKEVVAVSVAGAFRKGKSFLMDFMLRYMYNQESVDWVGDYNEPLTGFSWRGGS

SEQ ID NO: 8220 - DNA, 2235 bp, Homo sapiens
gggagggtgtgacgctggtatctgtgtgaactcgggcttgtgatgctgagcttggttcatctgctttctcctcccttttcctccccactccttcccaccagcgccacagcaacatcctcagagtctgagcgaactgcgcccagcgcgggcacggagcctcccaccgccagcaacctgcggccccggagaaggcagcgagcgcagtgacagcgcctcaccgccaccagctcctggaccaccatggccaagaaccgcagggacagaaacagttggggtggattttcggaaaagacatatgaatggagctcagaagaggaggagccagtgaaaaaggcaggaccagtccaagtcctcattgtcaaagatgaccattcctttgagttagatgaaactgcattaaatcggatccttctctcggaggctgtcagagacaaggaggttgttgctgtatctgttgctggagcatttagaaaaggaaaatcattcctgatggacttcatgttgagatacatgtacaaccaggaatcagttgattgggttggagactacaatgaaccattgactggtttttcatggagaggtggatctgagcgagagaccacaggaattcagatatggagtgaaatcttccttatcaataaacctgatggtaaaaaggttgcagtgttattgatggatactcagggaacctttgatagtcagtcaactttgagagattcagccacagtatttgcccttagcacaatgatcagctcaatacaggtatataacttatcccaaaatgtccaggaggatgatcttcagcacctccagcttttcactgagtatggcagactggcaatggaggaaacattcctgaagccatttcagagtctgatatttcttgttcgagactggagtttcccatacgaattttcatatggagccgatggtggtgccaaattcttggaaaaacgcctcaaggtctcagggaaccagcatgaagaactacagaacgtcagaaaacacatccattcctgtttcaccaacatttcctgttttctgctacctcatcctggcttaaaagtagctaccaatccaaactttgatggaaaattgaaagaaatagatgatgaattcatcaaaaacttgaaaatactgattccttggctacttagtcccgagagcctagatattaaagagatcaatgggaataaaatcacctgccggggtctggtggagtacttcaaggcttatataaagatctatcaaggtgaagaattaccacatcccaaatccatgttacaggccacagcagaagctaacaatttagcagccgtggcaactgccaaggacacatacaacaaaaaaatggaagagatttgtggtggtgacaaaccatttctggccccaaatgacttgcagaccaaacacctgcaacttaaggaagaatctgtgaagctattccgaggggtgaagaagatgggtggggaagaatttagccggcgttacctgcagcagttggagagtgaaatagatgaactttacatccaatatatcaagcacaatgatagcaaaaatatcttccatgcagctcgtaccccagccacactgtttgtagtcatctttatcacatatgtgattgctggtgtgactggattcattggtttggacatcatagctagcctatgcaatatgataatgggactgacccttatcaccctgtgcacttgggcatatatccggtactctggagaataccgagagctgggagctgtaatagaccaggtggctgcagctctgtgggaccaggctttgtacaagctttacagtgcagcagcaacccacagacatctgtatcatcaagctttccctacaccaaagtcggaatctactgaacaatcagaaaagaaaaaaatgtaatgcaaattttaagaaatacaggtgcatgaccaattgtcaattaaatattcagttttatgtctccatgcaaacattcaaagtgcttccatcagaacggagtaaaatactaaacacctctgaagactgcaaactggattagttcttttacttcagtgtttaataagcagatgtatgtatgcatggttatactattttgttaacatgtacaatttcctgatttttcttcaaaaatgctgttataaagtatttgtctatttatgataacagtacacgtgttctgcttgaatttactaaattctactactgggttataattaaatcatgtgatattcc

SEQ ID NO: 8221 - protein, 553 aa, Homo sapiens; identical to SEQ ID NO: 1190

SEQ ID NO: 8222 - DNA, 2250 bp, Homo sapiens
gggagggtgtgacgctggtatctgtgtgaactcgggcttgtgatgctgagcttggttcatctgctttctcctcccttttcctccccactccttcccaccagcgccacagcaacatcctcagagtctgagcgaactgcgcccagcgcgggcacggagcctcccaccgccagcaacctgcggccccggagaaggcagcgagcgcagtgacagcgcctcaccgccaccagctcctggaccaccatggccaagaaccgcagggacagaaacagttggggtggattttcggaaaagacatatgaatggagctcagaagaggaggagccagtgaaaaaggcaggaccagtccaagtcctcattgtcaaagatgaccattcctttgagttagatgaaactgcattaaatcggatccttctctcggaggctgtcagagacaaggaggttgttgctgtatctgttgctggagcatttagaaaaggaaaatcattcctgatggacttcatgttgagatacatgtacaaccaggaatcagttgattgggttggagactacaatgaaccattgactggtttttcatggagaggtggatctgagcgagagaccacaggaattcagatatggagtgaaatcttccttatcaataaacctgatggtaaaaaggttgcagtgttattgatggatactcagggaacctttgatagtcagtcaactttgagagattcagccacagtatttgcccttagcacaatgatcagctcaatacaggtatataacttatcccaaaatgtccaggaggatgatcttcagcacctccagcttttcactgagtatggcagactggcaatggaggaaacattcctgaagccatttcagagtctgatatttcttgttcgagactggagtttcccatacgaattttcatatggagccgatggtggtgccaaattcttggaaaaacgcctcaaggtctcagggaaccagcatgaagaactacagaacgtcagaaaacacatccattcctgtttcaccaacatttcctgttttctgctacctcatcctggcttaaaagtagctaccaatccaaactttgatggaaaattgaaagaaatagatgatgaattcatcaaaaacttgaaaatactgattccttggctacttagtcccgagagcctagatattaaagagatcaatgggaataaaatcacctgccggggtctggtggagtacttcaaggcttatataaagatctatcaaggtgaagaattaccacatcccaaatccatgttacaggccacagcagaagctaacaatttagcagccgtggcaactgccaaggacacatacaacaaaaaaatggaagagatttgtggtggtgacaaaccatttctggccccaaatgacttgcagaccaaacacctgcaacttaaggaagaatctgtgaagctattccgaggggtgaagaagatgggtggggaagaatttagccggcgttacctgcagcagttggagagtgaaatagatgaactttacatccaatatatcaagcacaatgatagcaaaaatatcttccatgcagctcgtaccccagccacactgtttgtagtcatctttatcacatatgtgattgctggtgtgactggattcattggtttggacatcatagctagcctatgcaatatgataatgggactgacccttatcaccctgtgcacttgggcatatatccggtactctggagaataccgagagctgggagctgtaatagaccaggtggctgcagctctgtgggaccagggaagtacaaatgaggctttgtacaagctttacagtgcagcagcaacccacagacatctgtatcatcaagctttccctacaccaaagtcggaatctactgaacaatcagaaaagaaaaaaatgtaatgcaaattttaagaaatacaggtgcatgaccaattgtcaattaaatattcagttttatgtctccatgcaaacattcaaagtgcttccatcagaacggagtaaaatactaaacacctctgaagactgcaaactggattagttcttttacttcagtgtttaataagcagatgtatgtatgcatggttatactattttgttaacatgtacaatttcctgatttttcttcaaaaatgctgttataaagtatttgtctatttatgataacagtacacgtgttctgcttgaatttactaaattctactactgggttataattaaatcatgtgatattcc

SEQ ID NO: 8223 - protein, 558 aa, Homo sapiens; identical to SEQ ID NO: 1188

SEQ ID NO: 8224 - DNA, 3246 bp, Homo sapiens
atttggaacctattatgtagatcacacaaataagaaggcccaatacaggcatccctgtgctcctagatatgaccacattctgaagtgggaactcttccagctggctgacctggatacataccagggaatgctaaagttgctcttcatgaaagaattggagcagattgttaaaatgtatgaagcatacagacaagcccttcttacagagttggaaaaccgaaagcagagacagcagtggtatgcccaacaacatggaaaaaatttttgagctgattttttaaaaatttaagttttgtaagagctttaaaatattttcacagataaaaaattgcaaacaagtactctggttaataaatgctgcttcctttgtggaaattataaaattctaactttacatgtattttgttattagaaattttcttttattgaatgagaaaaattagtctatcattttaagagccaatatggcaaacactttcaaatactgtatattaggaaactgttttggtattcttgatggaaaaaaacgcagcggaaatgtcattatgaacagatgttaaataggaaattattacttgttaacttcttacagcagtagtaccttctttaaaaaaaaaaaagaatctgcggtatttttttaaaaaaaaagtttaccgctgtagtgtgaaatattgtctggaaagggatggtttaaatattaccatgatgtagttgaaatataaaataggatttggaaccttattgtgataaatatttatatatgatgtatgtttgtctcccctctccaaagtaaggaacccagctgggcgtggtggctcactcctgtaatcccagcattttgggaggccgaggtgggtggaccgcttgagtccacgagtttaagaccagcctgggcaacatggtgaagccccatctctacaaaaaatacaaaaaaattagccgggtatgatggtgtgtgcctctagtcccagctacttgggaggctgaggtcagaggatggcttgagcccaagaggcagaggttgcagggtcaagatcgcaccacttgcactgcagcctgagagagagagagccagaccttgtctcaaaaaataaaaaataaaaaaataaaaacaaaataaggaatccttttaaagcatgttgagaaagtattttttggtatgaatgggtgacgggccttttaatctttcaggaatacatataagcaggaatacttagcctgtattgggaaggtgcgtgaaactcaaagttgctaacatcatcttccttattttcagccagtgctgttactgcatttagcatggctctgacgaggcagtggagagttcctgacagcatagcatactgccttctgacagactgggttaagctaccaaaaatgacaaccagggattcaaaaaaaatttttggtcattaaatcgaatgtatattattactttttaattttctaagtatttatcacaggactttaacaccatatatttccctcccagtttttctccccttttggtttaatagttaaaacatttttcataattagtgctgtacatttgattgcaaacaaattggtgatacttctaaactataactataaatctctagaattctgtgaatttcaacattatttgaagtagttcttcagttatatttacatgtgttgtaaatatgtaaatatacttttagcttaggaagtcttccagaatacaaactactcccagttagatatcagtgagtttgaataactgaagaaatgttgacaatgttaagtgtttgattttatataacaagcttattaaatatatttttgtggaaactaagcgcgtggtttttgagtccatgttttagacatagtgctgtatttcatttttctgttcaaaaggccatagacaaaggaatcaatataattgaaaggggtaatgaaaaggggtattgaaaaatgaaagtgtggctagtggaattttatcactgggaaaagataatttgctgaacttgtgatcagacttttctaagatgtcagtatatatatcttatgaactcccacactcctctatcttaattgttctttcctgtcacttcttactttatatcgctacttaattatggtgtagccatttctgtgacagtctttagaagtttctctgttttggacctcctagataagtattacttttttcattaacacactttccttcttcctctaagaagtctgttcagtgaaactccactagagattttagtcattaagaactagaagttacctaaaggaattagcatgttttgtaaaatagaaacttaagtttgtactgatgtcaacattaaataaaatgcatcttgagtctaaaaaaagagataaaccttcatcattctatatcagcacctctcattttcaaattcagtaagcatttgtttttaatcttaggaaccagagtaaactttaataatagttcacatattaaaagaataaacctatgaagaatacattctttgtgtaccaaatgaaaaaatatacaatgcagtgaaactcacatatacaaagtgattttttgtgcattttttatcaagaggtttatattctattaaaccatgtaaaagcaatatctggtttttgataaagcaactaaggaactctaaaatgtgcttaaaaataagattgtgatatatataagatgatacagattaaatccagcctgctgagttatgatgctgtgttttaacaaatggctaatgtgaaataatttaaaattttttctgtagaaattaaatgagcatatccaaacgtggaatatcacatgatttaattataacccagtagtagaatttagtaaattcaagcagaacacgtgtactgttatcataaatagacaaatactttataacagcatttttgaagaaaaatcaggaaattgtacatgttaacaaaatagtataaccatgcatacatacatctgcttattaaacactgaagtaaaagaactaatccagtttgcagtcttcagaggtgtttagtattttactccgttctgatggaagcactttgaatgtttgcatggagacataaaactgaatatttaattgacaattggtcatgcacctgtatttcttaaaatttgcattacatttttttcttttctgattgttcagtagattccgactttggtgtagggaaagcttgatgatacagatgtctgtgggttgctgctgcactgtaaagcttgtacaaagcctagaataaaagcatcaaaattat

SEQ ID NO: 8225 - protein, 46 aa, Homo sapiens
MLKLLFMKELEQIVKMYEAYRQALLTELENRKQRQQWYAQQHGKNF

SEQ ID NO: 8226 - DNA, 4292 bp, Homo sapiens
gcagaatacattttattctagctgagcttttacgcatagtccattaatgcaagttatataaattcatttgattgggaaaatattaatcttcctcaatttaaaatgcccaagtaccatcctaaaccaaaatttaaaattgtgttttcttaagttgactgacattttgattttggggtggtagacataaatgaacaaatttcgaaaacttttgttacttaatgatgaaagggtaattttatcctttgttttattgtagatcttatgccttcattcatccggcatggtccaacaattccaagacgaactgatatctgtcttccagattcaagccctaatgccttttcaacttctggagatgtagtttcaagaaaccagagtttccttagaactccaattcaaagaacacctcatgaaataatgagaagagaaagcaacagattatctgcaccttcttatcttgccagaagtctagcagatgtccctagagagtatggttcttctcagtcatttgtaacggaagttagttttgctgttgaaaatggagactctggttcccgatattattattcagacaatttttttgatggtcagagaaagcggccacttggagatcgtgcacatgaagactacagatattatgaatacaaccatgatctcttccaaagaatgccacagaatcaggggaggcatgcttcaggtattgggagagttgctgctacatctttaggaaatttgactaaccatggttctgaagatttaccccttcctcctggctggtctgtggactggacaatgagagggagaaaatattatatagatcataacacaaatacaactcactggagccatcctcttgagcgagaaggacttcctcctggatgggaacgagttgagtcatccgaatttggaacctattatgtagatcacacaaataagaaggcccaatacaggcatccctgtgctcctagtgtacctcggtatgatcaaccacctcctgtcacataccagccacagcaaactgaaagaaatcagtcccttctggtacctgcaaatccatatcatactgcagaaattcctgactggcttcaggtttacgcacgagcccctgtgaaatatgaccacattctgaagtgggaactcttccagctggctgacctggatacataccagggaatgctaaagttgctcttcatgaaagaattggagcagattgttaaaatgtatgaagcatacagacaagcccttcttacagagttggaaaaccgaaagcagagacagcagtggtatgcccaacaacatggaaaaaatttttgagctgattttttaaaaatttaagttttgtaagagctttaaaatattttcacagataaaaaattgcaaacaagtactctggttaataaatgctgcttcctttgtggaaattataaaattctaactttacatgtattttgttattagaaattttcttttattgaatgagaaaaattagtctatcattttaagagccaatatggcaaacactttcaaatactgtatattaggaaactgttttggtattcttgatggaaaaaaacgcagcggaaatgtcattatgaacagatgttaaataggaaattattacttgttaacttcttacagcagtagtaccttctttaaaaaaaaaaaagaatctgcggtatttttttaaaaaaaaagtttaccgctgtagtgtgaaatattgtctggaaagggatggtttaaatattaccatgatgtagttgaaatataaaataggatttggaaccttattgtgataaatatttatatatgatgtatgtttgtctcccctctccaaagtaaggaacccagctgggcgtggtggctcactcctgtaatcccagcattttgggaggccgaggtgggtggaccgcttgagtccacgagtttaagaccagcctgggcaacatggtgaagccccatctctacaaaaaatacaaaaaaattagccgggtatgatggtgtgtgcctctagtcccagctacttgggaggctgaggtcagaggatggcttgagcccaagaggcagaggttgcagggtcaagatcgcaccacttgcactgcagcctgagagagagagagccagaccttgtctcaaaaaataaaaaataaaaaaataaaaacaaaataaggaatccttttaaagcatgttgagaaagtattttttggtatgaatgggtgacgggccttttaatctttcaggaatacatataagcaggaatacttagcctgtattgggaaggtgcgtgaaactcaaagttgctaacatcatcttccttattttcagccagtgctgttactgcatttagcatggctctgacgaggcagtggagagttcctgacagcatagcatactgccttctgacagactgggttaagctaccaaaaatgacaaccagggattcaaaaaaaatttttggtcattaaatcgaatgtatattattactttttaattttctaagtatttatcacaggactttaacaccatatatttccctcccagtttttctccccttttggtttaatagttaaaacatttttcataattagtgctgtacatttgattgcaaacaaattggtgatacttctaaactataactataaatctctagaattctgtgaatttcaacattatttgaagtagttcttcagttatatttacatgtgttgtaaatatgtaaatatacttttagcttaggaagtcttccagaatacaaactactcccagttagatatcagtgagtttgaataactgaagaaatgttgacaatgttaagtgtttgattttatataacaagcttattaaatatatttttgtggaaactaagcgcgtggtttttgagtccatgttttagacatagtgctgtatttcatttttctgttcaaaaggccatagacaaaggaatcaatataattgaaaggggtaatgaaaaggggtattgaaaaatgaaagtgtggctagtggaattttatcactgggaaaagataatttgctgaacttgtgatcagacttttctaagatgtcagtatatatatcttatgaactcccacactcctctatcttaattgttctttcctgtcacttcttactttatatcgctacttaattatggtgtagccatttctgtgacagtctttagaagtttctctgttttggacctcctagataagtattacttttttcattaacacactttccttcttcctctaagaagtctgttcagtgaaactccactagagattttagtcattaagaactagaagttacctaaaggaattagcatgttttgtaaaatagaaacttaagtttgtactgatgtcaacattaaataaaatgcatcttgagtctaaaaaaagagataaaccttcatcattctatatcagcacctctcattttcaaattcagtaagcatttgtttttaatcttaggaaccagagtaaactttaataatagttcacatattaaaagaataaacctatgaagaatacattctttgtgtaccaaatgaaaaaatatacaatgcagtgaaactcacatatacaaagtgattttttgtgcattttttatcaagaggtttatattctattaaaccatgtaaaagcaatatctggtttttgataaagcaactaaggaactctaaaatgtgcttaaaaataagattgtgatatatataagatgatacagattaaatccagcctgctgagttatgatgctgtgttttaacaaatggctaatgtgaaataatttaaaattttttctgtagaaattaaatgagcatatccaaacgtggaatatcacatgatttaattataacccagtagtagaatttagtaaattcaagcagaacacgtgtactgttatcataaatagacaaatactttataacagcatttttgaagaaaaatcaggaaattgtacatgttaacaaaatagtataaccatgcatacatacatctgcttattaaacactgaagtaaaagaactaatccagtttgcagtcttcagaggtgtttagtattttactccgttctgatggaagcactttgaatgtttgcatggagacataaaactgaatatttaattgacaattggtcatgcacctgtatttcttaaaatttgcattacatttttttcttttctgattgttcagtagattccgactttggtgtagggaaagcttgatgatacagatgtctgtgggttgctgctgcactgtaaagcttgtacaaagcctagaataaaagcatcaaaattat

SEQ ID NO: 8227 - protein, 350 aa, Homo sapiens
MPSFIRHGPTIPRRTDICLPDSSPNAFSTSGDVVSRNQSFLRTPIQRTPHEIMRRESNRLSAPSYLARSLADVPREYGSSQSFVTEVSFAVENGDSGSRYYYSDNFFDGQRKRPLGDRAHEDYRYYEYNHDLFQRMPQNQGRHASGIGRVAATSLGNLTNHGSEDLPLPPGWSVDWTMRGRKYYIDHNTNTTHWSHPLEREGLPPGWERVESSEFGTYYVDHTNKKAQYRHPCAPSVPRYDQPPPVTYQPQQTERNQSLLVPANPYHTAEIPDWLQVYARAPVKYDHILKWELFQLADLDTYQGMLKLLFMKELEQIVKMYEAYRQALLTELENRKQRQQWYAQQHGKNF

SEQ ID NO: 8228 - DNA, 4512 bp, Homo sapiens
tcagtcggcaggacctgcttctcgctgaggatgagtgaggacagccgcagctcggcggggacggcccggtagcctagagcgccggcacccgagtcccgccgccggagccgcgcctggagccgcggtgggggaggggcagcggcggcccgcgctgcgtcgagcttcccagaattcccagcggccgcggggaaagtttacgggatgtaggcggcggcggcggtagtggtagcggttattcggcggcccgcggcggaccatggccctggccctggcccggcgtcgctgggctttcctcacggcgtccccgagcagcgtcgcagagcgggccgacttccgggaaggaactgaccagcgactgagcggcggccggcgcgcttagcgccctgaacatgcggcagtccctgcgggcgaccccgggctccggacagaggtgcaggggaagtacgtgaagaaggagacgtcgcctctgcttcggaatcttatgccttcattcatccggcatggtccaacaattccaagacgaactgatatctgtcttccagattcaagccctaatgccttttcaacttctggagatgtagtttcaagaaaccagagtttccttagaactccaattcaaagaacacctcatgaaataatgagaagagaaagcaacagattatctgcaccttcttatcttgccagaagtctagcagatgtccctagagagtatggttcttctcagtcatttgtaacggaagttagttttgctgttgaaaatggagactctggttcccgatattattattcagacaatttttttgatggtcagagaaagcggccacttggagatcgtgcacatgaagactacagatattatgaatacaaccatgatctcttccaaagaatgccacagaatcaggggaggcatgcttcaggtattgggagagttgctgctacatctttaggaaatttgactaaccatggttctgaagatttaccccttcctcctggctggtctgtggactggacaatgagagggagaaaatattatatagatcataacacaaatacaactcactggagccatcctcttgagcgagaaggacttcctcctggatgggaacgagttgagtcatccgaatttggaacctattatgtagatcacacaaataagaaggcccaatacaggcatccctgtgctcctagtgtacctcggtatgatcaaccacctcctgtcacataccagccacagcaaactgaaagaaatcagtcccttctggtacctgcaaatccatatcatactgcagaaattcctgactggcttcaggtttacgcacgagcccctgtgaaatatgaccacattctgaagtgggaactcttccagctggctgacctggatacataccagggaatgctaaagttgctcttcatgaaagaattggagcagattgttaaaatgtatgaagcatacagacaagcccttcttacagagttggaaaaccgaaagcagagacagcagtggtatgcccaacaacatggaaaaaatttttgagctgattttttaaaaatttaagttttgtaagagctttaaaatattttcacagataaaaaattgcaaacaagtactctggttaataaatgctgcttcctttgtggaaattataaaattctaactttacatgtattttgttattagaaattttcttttattgaatgagaaaaattagtctatcattttaagagccaatatggcaaacactttcaaatactgtatattaggaaactgttttggtattcttgatggaaaaaaacgcagcggaaatgtcattatgaacagatgttaaataggaaattattacttgttaacttcttacagcagtagtaccttctttaaaaaaaaaaaagaatctgcggtatttttttaaaaaaaaagtttaccgctgtagtgtgaaatattgtctggaaagggatggtttaaatattaccatgatgtagttgaaatataaaataggatttggaaccttattgtgataaatatttatatatgatgtatgtttgtctcccctctccaaagtaaggaacccagctgggcgtggtggctcactcctgtaatcccagcattttgggaggccgaggtgggtggaccgcttgagtccacgagtttaagaccagcctgggcaacatggtgaagccccatctctacaaaaaatacaaaaaaattagccgggtatgatggtgtgtgcctctagtcccagctacttgggaggctgaggtcagaggatggcttgagcccaagaggcagaggttgcagggtcaagatcgcaccacttgcactgcagcctgagagagagagagccagaccttgtctcaaaaaataaaaaataaaaaaataaaaacaaaataaggaatccttttaaagcatgttgagaaagtattttttggtatgaatgggtgacgggccttttaatctttcaggaatacatataagcaggaatacttagcctgtattgggaaggtgcgtgaaactcaaagttgctaacatcatcttccttattttcagccagtgctgttactgcatttagcatggctctgacgaggcagtggagagttcctgacagcatagcatactgccttctgacagactgggttaagctaccaaaaatgacaaccagggattcaaaaaaaatttttggtcattaaatcgaatgtatattattactttttaattttctaagtatttatcacaggactttaacaccatatatttccctcccagtttttctccccttttggtttaatagttaaaacatttttcataattagtgctgtacatttgattgcaaacaaattggtgatacttctaaactataactataaatctctagaattctgtgaatttcaacattatttgaagtagttcttcagttatatttacatgtgttgtaaatatgtaaatatacttttagcttaggaagtcttccagaatacaaactactcccagttagatatcagtgagtttgaataactgaagaaatgttgacaatgttaagtgtttgattttatataacaagcttattaaatatatttttgtggaaactaagcgcgtggtttttgagtccatgttttagacatagtgctgtatttcatttttctgttcaaaaggccatagacaaaggaatcaatataattgaaaggggtaatgaaaaggggtattgaaaaatgaaagtgtggctagtggaattttatcactgggaaaagataatttgctgaacttgtgatcagacttttctaagatgtcagtatatatatcttatgaactcccacactcctctatcttaattgttctttcctgtcacttcttactttatatcgctacttaattatggtgtagccatttctgtgacagtctttagaagtttctctgttttggacctcctagataagtattacttttttcattaacacactttccttcttcctctaagaagtctgttcagtgaaactccactagagattttagtcattaagaactagaagttacctaaaggaattagcatgttttgtaaaatagaaacttaagtttgtactgatgtcaacattaaataaaatgcatcttgagtctaaaaaaagagataaaccttcatcattctatatcagcacctctcattttcaaattcagtaagcatttgtttttaatcttaggaaccagagtaaactttaataatagttcacatattaaaagaataaacctatgaagaatacattctttgtgtaccaaatgaaaaaatatacaatgcagtgaaactcacatatacaaagtgattttttgtgcattttttatcaagaggtttatattctattaaaccatgtaaaagcaatatctggtttttgataaagcaactaaggaactctaaaatgtgcttaaaaataagattgtgatatatataagatgatacagattaaatccagcctgctgagttatgatgctgtgttttaacaaatggctaatgtgaaataatttaaaattttttctgtagaaattaaatgagcatatccaaacgtggaatatcacatgatttaattataacccagtagtagaatttagtaaattcaagcagaacacgtgtactgttatcataaatagacaaatactttataacagcatttttgaagaaaaatcaggaaattgtacatgttaacaaaatagtataaccatgcatacatacatctgcttattaaacactgaagtaaaagaactaatccagtttgcagtcttcagaggtgtttagtattttactccgttctgatggaagcactttgaatgtttgcatggagacataaaactgaatatttaattgacaattggtcatgcacctgtatttcttaaaatttgcattacatttttttcttttctgattgttcagtagattccgactttggtgtagggaaagcttgatgatacagatgtctgtgggttgctgctgcactgtaaagcttgtacaaagcctagaataaaagcatcaaaattat

SEQ ID NO: 8229 - protein, 350 aa, Homo sapiens; identical to SEQ ID NO: 8227

SEQ ID NO: 8230 - DNA, 4541 bp, Homo sapiens
tcagtcggcaggacctgcttctcgctgaggatgagtgaggacagccgcagctcggcggggacggcccggtagcctagagcgccggcacccgagtcccgccgccggagccgcgcctggagccgcggtgggggaggggcagcggcggcccgcgctgcgtcgagcttcccagaattcccagcggccgcggggaaagtttacgggatgtaggcggcggcggcggtagtggtagcggttattcggcggcccgcggcggaccatggccctggccctggcccggcgtcgctgggctttcctcacggcgtccccgagcagcgtcgcagagcgggccgacttccgggaaggaactgaccagcgactgagcggcggccggcgcgcttagcgccctgaacatgcggcagtccctgcgggcgaccccgggctccggacacggcgcccggcgcggagccctagggaggcagttcagcgcggcctcgggcctcgtcgagaaggatgctgtcccgaaagaaaaccaaaaacgaagtgtccaagccggccgaggtgcaggggaagtacgtgaagaaggagacgtcgcctctgcttcggaatgcgtcgagatgtgcgtcatgtttgcaaacattgcgggtgtctctcgactgtgctgcaagttgtgcgaactctggggcagaattccttagtcctgctgccggatgcagacttgagaagatcttatgccttcattcatccggcatggtccaacaattccaagacgaactgatatctgtcttccagattcaagccctaatgccttttcaactttctggttcccgatattattattcagacaatttttttgatggtcagagaaagcggccacttggagatcgtgcacatgaagactacagatattatgaatacaaccatgatctcttccaaagaatgccacagaatcaggggaggcatgcttcaggtattgggagagttgctgctacatctttaggaaatttgactaaccatggttctgaagatttaccccttcctcctggctggtctgtggactggacaatgagagggagaaaatattatatagatcataacacaaatacaactcactggagccatcctcttgagcgagaaggacttcctcctggatgggaacgagttgagtcatccgaatttggaacctattatgtagatcacacaaataagaaggcccaatacaggcatccctgtgctcctagtgtacctcggtatgatcaaccacctcctgtcacataccagccacagcaaactgaaagaaatcagtcccttctggtacctgcaaatccatatcatactgcagaaattcctgactggcttcaggtttacgcacgagcccctgtgaaatatgaccacattctgaagtgggaactcttccagctggctgacctggatacataccagggaatgctaaagttgctcttcatgaaagaattggagcagattgttaaaatgtatgaagcatacagacaagcccttcttacagagttggaaaaccgaaagcagagacagcagtggtatgcccaacaacatggaaaaaatttttgagctgattttttaaaaatttaagttttgtaagagctttaaaatattttcacagataaaaaattgcaaacaagtactctggttaataaatgctgcttcctttgtggaaattataaaattctaactttacatgtattttgttattagaaattttcttttattgaatgagaaaaattagtctatcattttaagagccaatatggcaaacactttcaaatactgtatattaggaaactgttttggtattcttgatggaaaaaaacgcagcggaaatgtcattatgaacagatgttaaataggaaattattacttgttaacttcttacagcagtagtaccttctttaaaaaaaaaaaagaatctgcggtatttttttaaaaaaaaagtttaccgctgtagtgtgaaatattgtctggaaagggatggtttaaatattaccatgatgtagttgaaatataaaataggatttggaaccttattgtgataaatatttatatatgatgtatgtttgtctcccctctccaaagtaaggaacccagctgggcgtggtggctcactcctgtaatcccagcattttgggaggccgaggtgggtggaccgcttgagtccacgagtttaagaccagcctgggcaacatggtgaagccccatctctacaaaaaatacaaaaaaattagccgggtatgatggtgtgtgcctctagtcccagctacttgggaggctgaggtcagaggatggcttgagcccaagaggcagaggttgcagggtcaagatcgcaccacttgcactgcagcctgagagagagagagccagaccttgtctcaaaaaataaaaaataaaaaaataaaaacaaaataaggaatccttttaaagcatgttgagaaagtattttttggtatgaatgggtgacgggccttttaatctttcaggaatacatataagcaggaatacttagcctgtattgggaaggtgcgtgaaactcaaagttgctaacatcatcttccttattttcagccagtgctgttactgcatttagcatggctctgacgaggcagtggagagttcctgacagcatagcatactgccttctgacagactgggttaagctaccaaaaatgacaaccagggattcaaaaaaaatttttggtcattaaatcgaatgtatattattactttttaattttctaagtatttatcacaggactttaacaccatatatttccctcccagtttttctccccttttggtttaatagttaaaacatttttcataattagtgctgtacatttgattgcaaacaaattggtgatacttctaaactataactataaatctctagaattctgtgaatttcaacattatttgaagtagttcttcagttatatttacatgtgttgtaaatatgtaaatatacttttagcttaggaagtcttccagaatacaaactactcccagttagatatcagtgagtttgaataactgaagaaatgttgacaatgttaagtgtttgattttatataacaagcttattaaatatatttttgtggaaactaagcgcgtggtttttgagtccatgttttagacatagtgctgtatttcatttttctgttcaaaaggccatagacaaaggaatcaatataattgaaaggggtaatgaaaaggggtattgaaaaatgaaagtgtggctagtggaattttatcactgggaaaagataatttgctgaacttgtgatcagacttttctaagatgtcagtatatatatcttatgaactcccacactcctctatcttaattgttctttcctgtcacttcttactttatatcgctacttaattatggtgtagccatttctgtgacagtctttagaagtttctctgttttggacctcctagataagtattacttttttcattaacacactttccttcttcctctaagaagtctgttcagtgaaactccactagagattttagtcattaagaactagaagttacctaaaggaattagcatgttttgtaaaatagaaacttaagtttgtactgatgtcaacattaaataaaatgcatcttgagtctaaaaaaagagataaaccttcatcattctatatcagcacctctcattttcaaattcagtaagcatttgtttttaatcttaggaaccagagtaaactttaataatagttcacatattaaaagaataaacctatgaagaatacattctttgtgtaccaaatgaaaaaatatacaatgcagtgaaactcacatatacaaagtgattttttgtgcattttttatcaagaggtttatattctattaaaccatgtaaaagcaatatctggtttttgataaagcaactaaggaactctaaaatgtgcttaaaaataagattgtgatatatataagatgatacagattaaatccagcctgctgagttatgatgctgtgttttaacaaatggctaatgtgaaataatttaaaattttttctgtagaaattaaatgagcatatccaaacgtggaatatcacatgatttaattataacccagtagtagaatttagtaaattcaagcagaacacgtgtactgttatcataaatagacaaatactttataacagcatttttgaagaaaaatcaggaaattgtacatgttaacaaaatagtataaccatgcatacatacatctgcttattaaacactgaagtaaaagaactaatccagtttgcagtcttcagaggtgtttagtattttactccgttctgatggaagcactttgaatgtttgcatggagacataaaactgaatatttaattgacaattggtcatgcacctgtatttcttaaaatttgcattacatttttttcttttctgattgttcagtagattccgactttggtgtagggaaagcttgatgatacagatgtctgtgggttgctgctgcactgtaaagcttgtacaaagcctagaataaaagcatcaaaattat

SEQ ID NO: 8231 - protein, 357 aa, Homo sapiens
MLSRKKTKNEVSKPAEVQGKYVKKETSPLLRNASRCASCLQTLRVSLDCAASCANSGAEFLSPAAGCRLEKILCLHSSGMVQQFQDELISVFQIQALMPFQLSGSRYYYSDNFFDGQRKRPLGDRAHEDYRYYEYNHDLFQRMPQNQGRHASGIGRVAATSLGNLTNHGSEDLPLPPGWSVDWTMRGRKYYIDHNTNTTHWSHPLEREGLPPGWERVESSEFGTYYVDHTNKKAQYRHPCAPSVPRYDQPPPVTYQPQQTERNQSLLVPANPYHTAEIPDWLQVYARAPVKYDHILKWELFQLADLDTYQGMLKLLFMKELEQIVKMYEAYRQALLTELENRKQRQQWYAQQHGKNF

SEQ ID NO: 8232 - DNA, 5016 bp, Homo sapiens
atactcagtagaggatcaacttatttctagttaatcagcatgaacgtttccagcagaatagatgctttggtgtagcacttgcctgggagtcatggttagcattccgcattttttagagagctgaattcagcagcctaggaaacattaggaagaacaccttcaaacagggaacaacgtcttggggggaaagagagtcactgcctccgctagggatcccgagggggtacaaaagcaacaacaataaaaactcgtggagagtaggttccacgacatgcgcatgcgacgaactcccgcactcagcggggcaggtttcgtccttcatcttctcagtcggcaggacctgcttctcgctgaggatgagtgaggacagccgcagctcggcggggacggcccggtagcctagagcgccggcacccgagtcccgccgccggagccgcgcctggagccgcggtgggggaggggcagcggcggcccgcgctgcgtcgagcttcccagaattcccagcggccgcggggaaagtttacgggatgtaggcggcggcggcggtagtggtagcggttattcggcggcccgcggcggaccatggccctggccctggcccggcgtcgctgggctttcctcacggcgtccccgagcagcgtcgcagagcgggccgacttccgggaaggaactgaccagcgactgagcggcggccggcgcgcttagcgccctgaacatgcggcagtccctgcgggcgaccccgggctccggacaggcggcggcggaggcggcggctcgggagggaaggaggcggcggcgccggcggaggtggcggcggagacggccggcgcccggcgcggagccctagggaggcagttcagcgcggcctcgggcctcgtcgagaaggatgctgtcccgaaagaaaaccaaaaacgaagtgtccaagccggccgaggtgcaggggaagtacgtgaagaaggagacgtcgcctctgcttcggaatcttatgccttcattcatccggcatggtccaacaattccaagacgaactgatatctgtcttccagattcaagccctaatgccttttcaacttctggagatgtagtttcaagaaaccagagtttccttagaactccaattcaaagaacacctcatgaaataatgagaagagaaagcaacagattatctgcaccttcttatcttgccagaagtctagcagatgtccctagagagtatggttcttctcagtcatttgtaacggaagttagttttgctgttgaaaatggagactctggttcccgatattattattcagacaatttttttgatggtcagagaaagcggccacttggagatcgtgcacatgaagactacagatattatgaatacaaccatgatctcttccaaagaatgccacagaatcaggggaggcatgcttcaggtattgggagagttgctgctacatctttaggaaatttgactaaccatggttctgaagatttaccccttcctcctggctggtctgtggactggacaatgagagggagaaaatattatatagatcataacacaaatacaactcactggagccatcctcttgagcgagaaggacttcctcctggatgggaacgagttgagtcatccgaatttggaacctattatgtagatcacacaaataagaaggcccaatacaggcatccctgtgctcctagtgtacctcggtatgatcaaccacctcctgtcacataccagccacagcaaactgaaagaaatcagtcccttctggtacctgcaaatccatatcatactgcagaaattcctgactggcttcaggtttacgcacgagcccctgtgaaatatgaccacattctgaagtgggaactcttccagctggctgacctggatacataccagggaatgctaaagttgctcttcatgaaagaattggagcagattgttaaaatgtatgaagcatacagacaagcccttcttacagagttggaaaaccgaaagcagagacagcagtggtatgcccaacaacatggaaaaaatttttgagctgattttttaaaaatttaagttttgtaagagctttaaaatattttcacagataaaaaattgcaaacaagtactctggttaataaatgctgcttcctttgtggaaattataaaattctaactttacatgtattttgttattagaaattttcttttattgaatgagaaaaattagtctatcattttaagagccaatatggcaaacactttcaaatactgtatattaggaaactgttttggtattcttgatggaaaaaaacgcagcggaaatgtcattatgaacagatgttaaataggaaattattacttgttaacttcttacagcagtagtaccttctttaaaaaaaaaaaagaatctgcggtatttttttaaaaaaaaagtttaccgctgtagtgtgaaatattgtctggaaagggatggtttaaatattaccatgatgtagttgaaatataaaataggatttggaaccttattgtgataaatatttatatatgatgtatgtttgtctcccctctccaaagtaaggaacccagctgggcgtggtggctcactcctgtaatcccagcattttgggaggccgaggtgggtggaccgcttgagtccacgagtttaagaccagcctgggcaacatggtgaagccccatctctacaaaaaatacaaaaaaattagccgggtatgatggtgtgtgcctctagtcccagctacttgggaggctgaggtcagaggatggcttgagcccaagaggcagaggttgcagggtcaagatcgcaccacttgcactgcagcctgagagagagagagccagaccttgtctcaaaaaataaaaaataaaaaaataaaaacaaaataaggaatccttttaaagcatgttgagaaagtattttttggtatgaatgggtgacgggccttttaatctttcaggaatacatataagcaggaatacttagcctgtattgggaaggtgcgtgaaactcaaagttgctaacatcatcttccttattttcagccagtgctgttactgcatttagcatggctctgacgaggcagtggagagttcctgacagcatagcatactgccttctgacagactgggttaagctaccaaaaatgacaaccagggattcaaaaaaaatttttggtcattaaatcgaatgtatattattactttttaattttctaagtatttatcacaggactttaacaccatatatttccctcccagtttttctccccttttggtttaatagttaaaacatttttcataattagtgctgtacatttgattgcaaacaaattggtgatacttctaaactataactataaatctctagaattctgtgaatttcaacattatttgaagtagttcttcagttatatttacatgtgttgtaaatatgtaaatatacttttagcttaggaagtcttccagaatacaaactactcccagttagatatcagtgagtttgaataactgaagaaatgttgacaatgttaagtgtttgattttatataacaagcttattaaatatatttttgtggaaactaagcgcgtggtttttgagtccatgttttagacatagtgctgtatttcatttttctgttcaaaaggccatagacaaaggaatcaatataattgaaaggggtaatgaaaaggggtattgaaaaatgaaagtgtggctagtggaattttatcactgggaaaagataatttgctgaacttgtgatcagacttttctaagatgtcagtatatatatcttatgaactcccacactcctctatcttaattgttctttcctgtcacttcttactttatatcgctacttaattatggtgtagccatttctgtgacagtctttagaagtttctctgttttggacctcctagataagtattacttttttcattaacacactttccttcttcctctaagaagtctgttcagtgaaactccactagagattttagtcattaagaactagaagttacctaaaggaattagcatgttttgtaaaatagaaacttaagtttgtactgatgtcaacattaaataaaatgcatcttgagtctaaaaaaagagataaaccttcatcattctatatcagcacctctcattttcaaattcagtaagcatttgtttttaatcttaggaaccagagtaaactttaataatagttcacatattaaaagaataaacctatgaagaatacattctttgtgtaccaaatgaaaaaatatacaatgcagtgaaactcacatatacaaagtgattttttgtgcattttttatcaagaggtttatattctattaaaccatgtaaaagcaatatctggtttttgataaagcaactaaggaactctaaaatgtgcttaaaaataagattgtgatatatataagatgatacagattaaatccagcctgctgagttatgatgctgtgttttaacaaatggctaatgtgaaataatttaaaattttttctgtagaaattaaatgagcatatccaaacgtggaatatcacatgatttaattataacccagtagtagaatttagtaaattcaagcagaacacgtgtactgttatcataaatagacaaatactttataacagcatttttgaagaaaaatcaggaaattgtacatgttaacaaaatagtataaccatgcatacatacatctgcttattaaacactgaagtaaaagaactaatccagtttgcagtcttcagaggtgtttagtattttactccgttctgatggaagcactttgaatgtttgcatggagacataaaactgaatatttaattgacaattggtcatgcacctgtatttcttaaaatttgcattacatttttttcttttctgattgttcagtagattccgactttggtgtagggaaagcttgatgatacagatgtctgtgggttgctgctgcactgtaaagcttgtacaaagcctagaataaaagcatcaaaattat

SEQ ID NO: 8233 - protein, 383 aa, Homo sapiens; identical to SEQ ID NO: 1192

SEQ ID NO: 8234 - DNA, 1814 bp, Homo sapiens
atttggaacctattatgtagatcacacaaataagaaggcccaatacaggcatccctgtgctcctagatatgaccacattctgaagtgggaactcttccagctggctgacctggatacataccagggaatgctaaagttgctcttcatgaaagaattggagcagattgttaaaatgtatgaagcatacagacaagcccttcttacagagttggaaaaccgaaagcagagacagcagtggtatgcccaacaacatggaaaaaatttttgagctgattttttaaaaatttaagttttgtaagagctttaaaatattttcacagataaaaaattgcaaacaagtactctggttaataaatgctgcttcctttgtggaaattataaaattctaactttacatgtattttgttattagaaattttcttttattgaatgagaaaaattagtctatcattttaagagccaatatggcaaacactttcaaatactgtatattaggaaactgttttggtattcttgatggaaaaaaacgcagcggaaatgtcattatgaacagatgttaaataggaaattattacttgttaacttcttacagcagtagtaccttctttaaaaaaaaaaaagaatctgcggtatttttttaaaaaaaaagtttaccgctgtagtgtgaaatattgtctggaaagggatggtttaaatattaccatgatgtagttgaaatataaaataggatttggaaccttattgtgataaatatttatatatgatgtatgtttgtctcccctctccaaagtaaggaacccagctgggcgtggtggctcactcctgtaatcccagcattttgggaggccgaggtgggtggaccgcttgagtccacgagtttaagaccagcctgggcaacatggtgaagccccatctctacaaaaaatacaaaaaaattagccgggtatgatggtgtgtgcctctagtcccagctacttgggaggctgaggtcagaggatggcttgagcccaagaggcagaggttgcagggtcaagatcgcaccacttgcactgcagcctgagagagagagagccagaccttgtctcaaaaaataaaaaataaaaaaataaaaacaaaataaggaatccttttaaagcatgttgagaaagtattttttggtatgaatgggtgacgggccttttaatctttcaggaatacatataagcaggaatacttagcctgtattgggaaggtgcgtgaaactcaaagttgctaacatcatcttccttattttcagccagtgctgttactgcatttagcatggctctgacgaggcagtggagagttcctgacagcatagcatactgccttctgacagactgggttaagctaccaaaaatgacaaccagggattcaaaaaaaatttttggtcattaaatcgaatgtatattattactttttaattttctaagtatttatcacaggactttaacaccatatatttccctcccagtttttctccccttttggtttaatagttaaaacatttttcataattagtgctgtacatttgattgcaaacaaattggtgatacttctaaactataactataaatctctagaattctgtgaatttcaacattatttgaagtagttcttcagttatatttacatgtgttgtaaatatgtaaatatacttttagcttaggaagtcttccagaatacaaactactcccagttagatatcagtgagtttgaataactgaagaaatgttgacaatgttaagtgtttgattttatataacaagcttattaaatatatttttgtggaaact

SEQ ID NO: 8235 - protein, 46 aa, Homo sapiens; identical to SEQ ID NO: 8225

SEQ ID NO: 8236 - DNA, 2860 bp, Homo sapiens
gcagaatacattttattctagctgagcttttacgcatagtccattaatgcaagttatataaattcatttgattgggaaaatattaatcttcctcaatttaaaatgcccaagtaccatcctaaaccaaaatttaaaattgtgttttcttaagttgactgacattttgattttggggtggtagacataaatgaacaaatttcgaaaacttttgttacttaatgatgaaagggtaattttatcctttgttttattgtagatcttatgccttcattcatccggcatggtccaacaattccaagacgaactgatatctgtcttccagattcaagccctaatgccttttcaacttctggagatgtagtttcaagaaaccagagtttccttagaactccaattcaaagaacacctcatgaaataatgagaagagaaagcaacagattatctgcaccttcttatcttgccagaagtctagcagatgtccctagagagtatggttcttctcagtcatttgtaacggaagttagttttgctgttgaaaatggagactctggttcccgatattattattcagacaatttttttgatggtcagagaaagcggccacttggagatcgtgcacatgaagactacagatattatgaatacaaccatgatctcttccaaagaatgccacagaatcaggggaggcatgcttcaggtattgggagagttgctgctacatctttaggaaatttgactaaccatggttctgaagatttaccccttcctcctggctggtctgtggactggacaatgagagggagaaaatattatatagatcataacacaaatacaactcactggagccatcctcttgagcgagaaggacttcctcctggatgggaacgagttgagtcatccgaatttggaacctattatgtagatcacacaaataagaaggcccaatacaggcatccctgtgctcctagtgtacctcggtatgatcaaccacctcctgtcacataccagccacagcaaactgaaagaaatcagtcccttctggtacctgcaaatccatatcatactgcagaaattcctgactggcttcaggtttacgcacgagcccctgtgaaatatgaccacattctgaagtgggaactcttccagctggctgacctggatacataccagggaatgctaaagttgctcttcatgaaagaattggagcagattgttaaaatgtatgaagcatacagacaagcccttcttacagagttggaaaaccgaaagcagagacagcagtggtatgcccaacaacatggaaaaaatttttgagctgattttttaaaaatttaagttttgtaagagctttaaaatattttcacagataaaaaattgcaaacaagtactctggttaataaatgctgcttcctttgtggaaattataaaattctaactttacatgtattttgttattagaaattttcttttattgaatgagaaaaattagtctatcattttaagagccaatatggcaaacactttcaaatactgtatattaggaaactgttttggtattcttgatggaaaaaaacgcagcggaaatgtcattatgaacagatgttaaataggaaattattacttgttaacttcttacagcagtagtaccttctttaaaaaaaaaaaagaatctgcggtatttttttaaaaaaaaagtttaccgctgtagtgtgaaatattgtctggaaagggatggtttaaatattaccatgatgtagttgaaatataaaataggatttggaaccttattgtgataaatatttatatatgatgtatgtttgtctcccctctccaaagtaaggaacccagctgggcgtggtggctcactcctgtaatcccagcattttgggaggccgaggtgggtggaccgcttgagtccacgagtttaagaccagcctgggcaacatggtgaagccccatctctacaaaaaatacaaaaaaattagccgggtatgatggtgtgtgcctctagtcccagctacttgggaggctgaggtcagaggatggcttgagcccaagaggcagaggttgcagggtcaagatcgcaccacttgcactgcagcctgagagagagagagccagaccttgtctcaaaaaataaaaaataaaaaaataaaaacaaaataaggaatccttttaaagcatgttgagaaagtattttttggtatgaatgggtgacgggccttttaatctttcaggaatacatataagcaggaatacttagcctgtattgggaaggtgcgtgaaactcaaagttgctaacatcatcttccttattttcagccagtgctgttactgcatttagcatggctctgacgaggcagtggagagttcctgacagcatagcatactgccttctgacagactgggttaagctaccaaaaatgacaaccagggattcaaaaaaaatttttggtcattaaatcgaatgtatattattactttttaattttctaagtatttatcacaggactttaacaccatatatttccctcccagtttttctccccttttggtttaatagttaaaacatttttcataattagtgctgtacatttgattgcaaacaaattggtgatacttctaaactataactataaatctctagaattctgtgaatttcaacattatttgaagtagttcttcagttatatttacatgtgttgtaaatatgtaaatatacttttagcttaggaagtcttccagaatacaaactactcccagttagatatcagtgagtttgaataactgaagaaatgttgacaatgttaagtgtttgattttatataacaagcttattaaatatatttttgtggaaact

SEQ ID NO: 8237 - protein, 350 aa, Homo sapiens; identical to SEQ ID NO: 8227

SEQ ID NO: 8238 - DNA, 3109 bp, Homo sapiens
tcagtcggcaggacctgcttctcgctgaggatgagtgaggacagccgcagctcggcggggacggcccggtagcctagagcgccggcacccgagtcccgccgccggagccgcgcctggagccgcggtgggggaggggcagcggcggcccgcgctgcgtcgagcttcccagaattcccagcggccgcggggaaagtttacgggatgtaggcggcggcggcggtagtggtagcggttattcggcggcccgcggcggaccatggccctggccctggcccggcgtcgctgggctttcctcacggcgtccccgagcagcgtcgcagagcgggccgacttccgggaaggaactgaccagcgactgagcggcggccggcgcgcttagcgccctgaacatgcggcagtccctgcgggcgaccccgggctccggacacggcgcccggcgcggagccctagggaggcagttcagcgcggcctcgggcctcgtcgagaaggatgctgtcccgaaagaaaaccaaaaacgaagtgtccaagccggccgaggtgcaggggaagtacgtgaagaaggagacgtcgcctctgcttcggaatgcgtcgagatgtgcgtcatgtttgcaaacattgcgggtgtctctcgactgtgctgcaagttgtgcgaactctggggcagaattccttagtcctgctgccggatgcagacttgagaagatcttatgccttcattcatccggcatggtccaacaattccaagacgaactgatatctgtcttccagattcaagccctaatgccttttcaactttctggttcccgatattattattcagacaatttttttgatggtcagagaaagcggccacttggagatcgtgcacatgaagactacagatattatgaatacaaccatgatctcttccaaagaatgccacagaatcaggggaggcatgcttcaggtattgggagagttgctgctacatctttaggaaatttgactaaccatggttctgaagatttaccccttcctcctggctggtctgtggactggacaatgagagggagaaaatattatatagatcataacacaaatacaactcactggagccatcctcttgagcgagaaggacttcctcctggatgggaacgagttgagtcatccgaatttggaacctattatgtagatcacacaaataagaaggcccaatacaggcatccctgtgctcctagtgtacctcggtatgatcaaccacctcctgtcacataccagccacagcaaactgaaagaaatcagtcccttctggtacctgcaaatccatatcatactgcagaaattcctgactggcttcaggtttacgcacgagcccctgtgaaatatgaccacattctgaagtgggaactcttccagctggctgacctggatacataccagggaatgctaaagttgctcttcatgaaagaattggagcagattgttaaaatgtatgaagcatacagacaagcccttcttacagagttggaaaaccgaaagcagagacagcagtggtatgcccaacaacatggaaaaaatttttgagctgattttttaaaaatttaagttttgtaagagctttaaaatattttcacagataaaaaattgcaaacaagtactctggttaataaatgctgcttcctttgtggaaattataaaattctaactttacatgtattttgttattagaaattttcttttattgaatgagaaaaattagtctatcattttaagagccaatatggcaaacactttcaaatactgtatattaggaaactgttttggtattcttgatggaaaaaaacgcagcggaaatgtcattatgaacagatgttaaataggaaattattacttgttaacttcttacagcagtagtaccttctttaaaaaaaaaaaagaatctgcggtatttttttaaaaaaaaagtttaccgctgtagtgtgaaatattgtctggaaagggatggtttaaatattaccatgatgtagttgaaatataaaataggatttggaaccttattgtgataaatatttatatatgatgtatgtttgtctcccctctccaaagtaaggaacccagctgggcgtggtggctcactcctgtaatcccagcattttgggaggccgaggtgggtggaccgcttgagtccacgagtttaagaccagcctgggcaacatggtgaagccccatctctacaaaaaatacaaaaaaattagccgggtatgatggtgtgtgcctctagtcccagctacttgggaggctgaggtcagaggatggcttgagcccaagaggcagaggttgcagggtcaagatcgcaccacttgcactgcagcctgagagagagagagccagaccttgtctcaaaaaataaaaaataaaaaaataaaaacaaaataaggaatccttttaaagcatgttgagaaagtattttttggtatgaatgggtgacgggccttttaatctttcaggaatacatataagcaggaatacttagcctgtattgggaaggtgcgtgaaactcaaagttgctaacatcatcttccttattttcagccagtgctgttactgcatttagcatggctctgacgaggcagtggagagttcctgacagcatagcatactgccttctgacagactgggttaagctaccaaaaatgacaaccagggattcaaaaaaaatttttggtcattaaatcgaatgtatattattactttttaattttctaagtatttatcacaggactttaacaccatatatttccctcccagtttttctccccttttggtttaatagttaaaacatttttcataattagtgctgtacatttgattgcaaacaaattggtgatacttctaaactataactataaatctctagaattctgtgaatttcaacattatttgaagtagttcttcagttatatttacatgtgttgtaaatatgtaaatatacttttagcttaggaagtcttccagaatacaaactactcccagttagatatcagtgagtttgaataactgaagaaatgttgacaatgttaagtgtttgattttatataacaagcttattaaatatatttttgtggaaact

SEQ ID NO: 8239 - protein, 357 aa, Homo sapiens; identical to SEQ ID NO: 8231

SEQ ID NO: 8240 - DNA, 3080 bp, Homo sapiens
tcagtcggcaggacctgcttctcgctgaggatgagtgaggacagccgcagctcggcggggacggcccggtagcctagagcgccggcacccgagtcccgccgccggagccgcgcctggagccgcggtgggggaggggcagcggcggcccgcgctgcgtcgagcttcccagaattcccagcggccgcggggaaagtttacgggatgtaggcggcggcggcggtagtggtagcggttattcggcggcccgcggcggaccatggccctggccctggcccggcgtcgctgggctttcctcacggcgtccccgagcagcgtcgcagagcgggccgacttccgggaaggaactgaccagcgactgagcggcggccggcgcgcttagcgccctgaacatgcggcagtccctgcgggcgaccccgggctccggacagaggtgcaggggaagtacgtgaagaaggagacgtcgcctctgcttcggaatcttatgccttcattcatccggcatggtccaacaattccaagacgaactgatatctgtcttccagattcaagccctaatgccttttcaacttctggagatgtagtttcaagaaaccagagtttccttagaactccaattcaaagaacacctcatgaaataatgagaagagaaagcaacagattatctgcaccttcttatcttgccagaagtctagcagatgtccctagagagtatggttcttctcagtcatttgtaacggaagttagttttgctgttgaaaatggagactctggttcccgatattattattcagacaatttttttgatggtcagagaaagcggccacttggagatcgtgcacatgaagactacagatattatgaatacaaccatgatctcttccaaagaatgccacagaatcaggggaggcatgcttcaggtattgggagagttgctgctacatctttaggaaatttgactaaccatggttctgaagatttaccccttcctcctggctggtctgtggactggacaatgagagggagaaaatattatatagatcataacacaaatacaactcactggagccatcctcttgagcgagaaggacttcctcctggatgggaacgagttgagtcatccgaatttggaacctattatgtagatcacacaaataagaaggcccaatacaggcatccctgtgctcctagtgtacctcggtatgatcaaccacctcctgtcacataccagccacagcaaactgaaagaaatcagtcccttctggtacctgcaaatccatatcatactgcagaaattcctgactggcttcaggtttacgcacgagcccctgtgaaatatgaccacattctgaagtgggaactcttccagctggctgacctggatacataccagggaatgctaaagttgctcttcatgaaagaattggagcagattgttaaaatgtatgaagcatacagacaagcccttcttacagagttggaaaaccgaaagcagagacagcagtggtatgcccaacaacatggaaaaaatttttgagctgattttttaaaaatttaagttttgtaagagctttaaaatattttcacagataaaaaattgcaaacaagtactctggttaataaatgctgcttcctttgtggaaattataaaattctaactttacatgtattttgttattagaaattttcttttattgaatgagaaaaattagtctatcattttaagagccaatatggcaaacactttcaaatactgtatattaggaaactgttttggtattcttgatggaaaaaaacgcagcggaaatgtcattatgaacagatgttaaataggaaattattacttgttaacttcttacagcagtagtaccttctttaaaaaaaaaaaagaatctgcggtatttttttaaaaaaaaagtttaccgctgtagtgtgaaatattgtctggaaagggatggtttaaatattaccatgatgtagttgaaatataaaataggatttggaaccttattgtgataaatatttatatatgatgtatgtttgtctcccctctccaaagtaaggaacccagctgggcgtggtggctcactcctgtaatcccagcattttgggaggccgaggtgggtggaccgcttgagtccacgagtttaagaccagcctgggcaacatggtgaagccccatctctacaaaaaatacaaaaaaattagccgggtatgatggtgtgtgcctctagtcccagctacttgggaggctgaggtcagaggatggcttgagcccaagaggcagaggttgcagggtcaagatcgcaccacttgcactgcagcctgagagagagagagccagaccttgtctcaaaaaataaaaaataaaaaaataaaaacaaaataaggaatccttttaaagcatgttgagaaagtattttttggtatgaatgggtgacgggccttttaatctttcaggaatacatataagcaggaatacttagcctgtattgggaaggtgcgtgaaactcaaagttgctaacatcatcttccttattttcagccagtgctgttactgcatttagcatggctctgacgaggcagtggagagttcctgacagcatagcatactgccttctgacagactgggttaagctaccaaaaatgacaaccagggattcaaaaaaaatttttggtcattaaatcgaatgtatattattactttttaattttctaagtatttatcacaggactttaacaccatatatttccctcccagtttttctccccttttggtttaatagttaaaacatttttcataattagtgctgtacatttgattgcaaacaaattggtgatacttctaaactataactataaatctctagaattctgtgaatttcaacattatttgaagtagttcttcagttatatttacatgtgttgtaaatatgtaaatatacttttagcttaggaagtcttccagaatacaaactactcccagttagatatcagtgagtttgaataactgaagaaatgttgacaatgttaagtgtttgattttatataacaagcttattaaatatatttttgtggaaact

SEQ ID NO: 8241 - protein, 350 aa, Homo sapiens; identical to SEQ ID NO: 8227

SEQ ID NO: 8242 - DNA, 3584 bp, Homo sapiens
atactcagtagaggatcaacttatttctagttaatcagcatgaacgtttccagcagaatagatgctttggtgtagcacttgcctgggagtcatggttagcattccgcattttttagagagctgaattcagcagcctaggaaacattaggaagaacaccttcaaacagggaacaacgtcttggggggaaagagagtcactgcctccgctagggatcccgagggggtacaaaagcaacaacaataaaaactcgtggagagtaggttccacgacatgcgcatgcgacgaactcccgcactcagcggggcaggtttcgtccttcatcttctcagtcggcaggacctgcttctcgctgaggatgagtgaggacagccgcagctcggcggggacggcccggtagcctagagcgccggcacccgagtcccgccgccggagccgcgcctggagccgcggtgggggaggggcagcggcggcccgcgctgcgtcgagcttcccagaattcccagcggccgcggggaaagtttacgggatgtaggcggcggcggcggtagtggtagcggttattcggcggcccgcggcggaccatggccctggccctggcccggcgtcgctgggctttcctcacggcgtccccgagcagcgtcgcagagcgggccgacttccgggaaggaactgaccagcgactgagcggcggccggcgcgcttagcgccctgaacatgcggcagtccctgcgggcgaccccgggctccggacaggcggcggcggaggcggcggctcgggagggaaggaggcggcggcgccggcggaggtggcggcggagacggccggcgcccggcgcggagccctagggaggcagttcagcgcggcctcgggcctcgtcgagaaggatgctgtcccgaaagaaaaccaaaaacgaagtgtccaagccggccgaggtgcaggggaagtacgtgaagaaggagacgtcgcctctgcttcggaatcttatgccttcattcatccggcatggtccaacaattccaagacgaactgatatctgtcttccagattcaagccctaatgccttttcaacttctggagatgtagtttcaagaaaccagagtttccttagaactccaattcaaagaacacctcatgaaataatgagaagagaaagcaacagattatctgcaccttcttatcttgccagaagtctagcagatgtccctagagagtatggttcttctcagtcatttgtaacggaagttagttttgctgttgaaaatggagactctggttcccgatattattattcagacaatttttttgatggtcagagaaagcggccacttggagatcgtgcacatgaagactacagatattatgaatacaaccatgatctcttccaaagaatgccacagaatcaggggaggcatgcttcaggtattgggagagttgctgctacatctttaggaaatttgactaaccatggttctgaagatttaccccttcctcctggctggtctgtggactggacaatgagagggagaaaatattatatagatcataacacaaatacaactcactggagccatcctcttgagcgagaaggacttcctcctggatgggaacgagttgagtcatccgaatttggaacctattatgtagatcacacaaataagaaggcccaatacaggcatccctgtgctcctagtgtacctcggtatgatcaaccacctcctgtcacataccagccacagcaaactgaaagaaatcagtcccttctggtacctgcaaatccatatcatactgcagaaattcctgactggcttcaggtttacgcacgagcccctgtgaaatatgaccacattctgaagtgggaactcttccagctggctgacctggatacataccagggaatgctaaagttgctcttcatgaaagaattggagcagattgttaaaatgtatgaagcatacagacaagcccttcttacagagttggaaaaccgaaagcagagacagcagtggtatgcccaacaacatggaaaaaatttttgagctgattttttaaaaatttaagttttgtaagagctttaaaatattttcacagataaaaaattgcaaacaagtactctggttaataaatgctgcttcctttgtggaaattataaaattctaactttacatgtattttgttattagaaattttcttttattgaatgagaaaaattagtctatcattttaagagccaatatggcaaacactttcaaatactgtatattaggaaactgttttggtattcttgatggaaaaaaacgcagcggaaatgtcattatgaacagatgttaaataggaaattattacttgttaacttcttacagcagtagtaccttctttaaaaaaaaaaaagaatctgcggtatttttttaaaaaaaaagtttaccgctgtagtgtgaaatattgtctggaaagggatggtttaaatattaccatgatgtagttgaaatataaaataggatttggaaccttattgtgataaatatttatatatgatgtatgtttgtctcccctctccaaagtaaggaacccagctgggcgtggtggctcactcctgtaatcccagcattttgggaggccgaggtgggtggaccgcttgagtccacgagtttaagaccagcctgggcaacatggtgaagccccatctctacaaaaaatacaaaaaaattagccgggtatgatggtgtgtgcctctagtcccagctacttgggaggctgaggtcagaggatggcttgagcccaagaggcagaggttgcagggtcaagatcgcaccacttgcactgcagcctgagagagagagagccagaccttgtctcaaaaaataaaaaataaaaaaataaaaacaaaataaggaatccttttaaagcatgttgagaaagtattttttggtatgaatgggtgacgggccttttaatctttcaggaatacatataagcaggaatacttagcctgtattgggaaggtgcgtgaaactcaaagttgctaacatcatcttccttattttcagccagtgctgttactgcatttagcatggctctgacgaggcagtggagagttcctgacagcatagcatactgccttctgacagactgggttaagctaccaaaaatgacaaccagggattcaaaaaaaatttttggtcattaaatcgaatgtatattattactttttaattttctaagtatttatcacaggactttaacaccatatatttccctcccagtttttctccccttttggtttaatagttaaaacatttttcataattagtgctgtacatttgattgcaaacaaattggtgatacttctaaactataactataaatctctagaattctgtgaatttcaacattatttgaagtagttcttcagttatatttacatgtgttgtaaatatgtaaatatacttttagcttaggaagtcttccagaatacaaactactcccagttagatatcagtgagtttgaataactgaagaaatgttgacaatgttaagtgtttgattttatataacaagcttattaaatatatttttgtggaaact

SEQ ID NO: 8243 - protein, 383 aa, Homo sapiens; identical to SEQ ID NO: 1192

SEQ ID NO: 8244 - DNA, 1181 bp, Homo sapiens
gcagaatacattttattctagctgagcttttacgcatagtccattaatgcaagttatataaattcatttgattgggaaaatattaatcttcctcaatttaaaatgcccaagtaccatcctaaaccaaaatttaaaattgtgttttcttaagttgactgacattttgattttggggtggtagacataaatgaacaaatttcgaaaacttttgttacttaatgatgaaagggtaattttatcctttgttttattgtagatcttatgccttcattcatccggcatggtccaacaattccaagacgaactgatatctgtcttccagattcaagccctaatgccttttcaacttctggagatgtagtttcaagaaaccagagtttccttagaactccaattcaaagaacacctcatgaaataatgagaagagaaagcaacagattatctgcaccttcttatcttgccagaagtctagcagatgtccctagagagtatggttcttctcagtcatttgtaacggaagttagttttgctgttgaaaatggagactctggttcccgatattattattcagacaatttttttgatggtcagagaaagcggccacttggagatcgtgcacatgaagactacagatattatgaatacaaccatgatctcttccaaagaatgccacagaatcaggggaggcatgcttcaggtagcttaacattataaataatatagtagtttatatttattgacatgtcaattaaaaagatgttcttttctagattttcttgggacacgaacaaatactactagcgaaatgtttttccactttgctcatcctgcttaagcctgtgtgcaaatagttgttaatctacactgaatggaagagtccttgtgaccatttattttattaactcatgttatgtaaacttggtatttatctcaaggctgtctagactcttaatgctgtgacccttgaaaacctagagaatttaatgtctccagttgggctgaatttaggtttaggtttggtagaataatgggaagggtaagtcttcagagacacttgacggagtcctcagagacacttgacaaacttgggaaaggaaagaagaatgggagaaatgtacaattctactttattcctgaagtcctggttttaccagataaaatgaagtgagatgaaaattaaa

SEQ ID NO: 8245 - protein, 46 aa, Homo sapiens [sequence omitted]

SEQ ID NO: 8246 - DNA, 735 bp, Homo sapiens
tcagtcggcaggacctgcttctcgctgaggatgagtgaggacagccgcagctcggcggggacggcccggtagcctagagcgccggcacccgagtcccgccgccggagccgcgcctggagccgcggtgggggaggggcagcggcggcccgcgctgcgtcgagcttcccagaattcccagcggccgcggggaaagtttacgggatgtaggcggcggcggcggtagtggtagcggttattcggcggcccgcggcggaccatggccctggccctggcccggcgtcgctgggctttcctcacggcgtccccgagcagcgtcgcagagcgggccgacttccgggaaggaactgaccagcgactgagcggcggccggcgcgcttagcgccctgaacatgcggcagtccctgcgggcgaccccgggctccggacaggcggcggcggaggcggcggctcgggagggaaggaggcggcggcgccggcggaggtggcggcggagacggccggcgcccggcgcggagccctagggaggcagttcagcgcggcctcgggcctcgtcgagaaggatgctgtcccgaaagaaaaccaaaaacgaagtgtccaagccggccgaggtgcaggggaagtacgtgaagaaggagacgtcgcctctgcttcggaatcttatgccttcattcatccggcatggtccaacaattccaagacgaactgatatctgtcttccagattcaagccctaatg

SEQ ID NO: 8247 - protein, 57 aa, Homo sapiens
MLSRKKTKNEVSKPAEVQGKYVKKETSPLLRNLMPSFIRHGPTIPRRTDICLPDSSP

SEQ ID NO: 8248 - DNA, 773 bp, Homo sapiens
tcagtcggcaggacctgcttctcgctgaggatgagtgaggacagccgcagctcggcggggacggcccggtagcctagagcgccggcacccgagtcccgccgccggagccgcgcctggagccgcggtgggggaggggcagcggcggcccgcgctgcgtcgagcttcccagaattcccagcggccgcggggaaagtttacgggatgtaggcggcggcggcggtagtggtagcggttattcggcggcccgcggcggaccatggccctggccctggcccggcgtcgctgggctttcctcacggcgtccccgagcagcgtcgcagagcgggccgacttccgggaaggaactgaccagcgactgagcggcggccggcgcgcttagcgccctgaacatgcggcagtccctgcgggcgaccccgggctccggacaggcggcggcggaggcggcggctcgggagggaaggaggcggcggcgccggcggaggtggcggcggagacggccggcgcccggcgcggagccctagggaggcagttcagcgcggcctcgggcctcgtcgagaaggatgctgtcccgaaagaaaaccaaaaacgaagtgtccaagccggccgaggtgcaggggaagtacgtgaagaaggagacgtcgcctctgcttcggaatgcgtcgagatgtgcgtcatgtttgcaaacattgcgggtgtctctcgactgtgctgcaagttgtgcgaactctggggcagaattccttagtcctgctgccggatgcagacttgagaag

SEQ ID NO: 8249 - protein, 70 aa, Homo sapiens
MLSRKKTKNEVSKPAEVQGKYVKKETSPLLRNASRCASCLQTLRVSLDCAASCANSGAEFLSPAAGCRLE

SEQ ID NO: 8250 - DNA, 3658 bp, Homo sapiens
gccgaagggagcagcgctgcggaccccggccgtcccctcgcggggcgtgtgcccagcgctgtgccgccctcggcctgcgacgcgcgggcgaggctccgggccggacagaccagcccgtaggcggcggcggcaggatgcctgccacacacgcgcgcacacacacacgcacacgcgcgcgcacagtgaccgctccggccggagcaggcccagggagacctcccgggtgggctggtgcggcgcggcgcgggggagccggggctctgggttgcgccgccgcccgctgggcgcggagctttgggtggagagagtttatttttgtctcgagctgctgccgcggctgctcacggcctaaatccagaggggcgcctggcggtggagatgctggctgttgctgtagatggagctgcagccgctcggctgcttctctgggaggaggaggaggagtaagaggaggaggaaggaactcgggctgccgctgcctccgcctctgctttgcattagctcccacccccacccccgcgccccttcgcagccgcattgcaagttttctgcgcggggaagatctgttgctggtgctggcgttcttaagcacggcgcccgaggccaccccaggcgggccgtgaggggagcaccagccgttggcagcggcagcaacaggaagccgcggggtctcctcccgcacctgggaagcaggcttctcgctgttacccggtggggaatagcccatctcccacatcgggtgcggagggggcggagggggcggctggatttcggcgaacccaaccttccgcgggacgccccctcccctggccccagcaccctctgatgccctcgtccccccagggcgcgctcctccgctagccgaggtctcactgcagctctttctctccttccagtggtgatcgccgctcgggaatgcgggcgtgaagggtccgagttgccgcccagcggggaggagaccccaggacgccggaaatcaccatcccaaagctgcaagaaggggggagaaagcattcttcattcagttgtgtgccttgtgggggatttttaaaaagtcgtttttttttttaaagaaacatttccgtgctactgtctgtcatcgtctctggggaaatcagccagaaccaccggaacgtaactgaaaccagacaagagaggcaggagcccaggcagtacctgcagcgtccgggcaccagagccaccttggaacaggaacgcgtctccggccgcggggctgcggctccgccaaactttggggcgggcggggcgggctggggcgcccagggggctctgtagaccgagggcggccccctaaccatgatgtttcgcgaccaggtcggggtgctggcgggctggtttaagggctggaacgagtgcgagcagactgttgcgctgctgtcgctgctcaagcgcgtgagccagacccaggcccgcttcctccagctctgcctggagcactcgctggccgactgcgccgagctgcacgtcctcgaacgcgaggccaacagccccggaatcattaaccaatggcaacaggaatccaaggataaagtgatttccctcctgttaactcatctgcctttgctgaagccaggaaacctcgacgcgaaagtagaatatatgaaactgctgcccaaaatcctggctcactctattgaacacaaccagcacattgaggagagcaggcagctgctgtcctatgctttgatacatccagccacttcgttagaagaccgtagtgctttagccatgtggctgaatcacttggaggaccgcacgtcgaccagctttggtggccagaaccgaggccgctcagactctgtggattatggacagacacactactatcaccaaagacagaactctgatgacaagctcaatgggtggcagaactctcgggattctgggatttgcatcaatgcctccaactggcaggacaaaagcatggggtgtgagaatggccatgtgcccctctactcctcctcatctgtccccaccacaatcaatacgattggaaccagcacaagtacaattctctcaggccaggcacaccacagccctttgaaacgatctgtgtcccttaccccacccatgaatgtgccaaaccagcctctaggacatggatggatgtctcatgaggacttacgagctagaggaccccagtgcctcccatccgatcatgcccccctgtctccacaaagcagtgtagcctcttcaggaagtggtgggagtgaacacttagaagatcagaccactgctcgtaacacattccaagaagaaggtagtgggatgaaagatgttccagcctggctgaaaagcctccgcctgcacaaatatgccgcgcttttctcccagatgacctatgaggagatgatggccctcaccgagtgccagctggaggcgcagaatgttaccaaaggtgcaagacacaaaattgtcatcagtattcagaagctcaaagaaagacaaaatctcctgaagtctttggaaagggacatcatcgaggggggcagcctgcgcatcccgctccaggaactgcaccagatgatcctgactccgatcaaggcctacagctccccgagcaccacccccgaggctcgccgccgggagccccaggccccgcgtcagccctcactgatgggccccgagagccagagccccgactgcaaagatggggccgcagccactggcgccacggccaccccctcggccggggccagcggggggctccagccgcaccagctgagcagctgcgatggggagctggccgtcgcccccctgccagagggggacctccccgggcagttcacacgcgtcatggggaaagtgtgcacacagctcttggtctccagacctgatgaggaaaatataagttcctatttacagctcatagacaagtgtctaattcatgaggcatttacagagacacagaaaaaaagattgttgtcatggaaacagcaggtgcagaagctctttcggtctttccctcggaaaacccttctagacatatcaggatatcgacagcaaagaaatcgaggctttgggcaatccaactccctcccgacggctggctctgtgggcggtggcatgggcagacggaacccgcgccagtaccagatcccctctcggaacgtcccttccgcccgcctgggcctcttgggcaccagtggattcgtcagctccaaccagcgcaacaccacagctacccccaccatcatgaaacaaggaagacagaacctgtggtttgccaaccccgggggcagcaatagcatgccaagccgcacccacagctcagtccagaggacccgctcgctgcccgtgcacacttccccacagaacatgctgatgttccagcagccagaattccagcttcccgtgaccgaacctgacatcaacaacaggctggagtcgttgtgcctcagtatgaccgaacacgccctgggagacggggttgaccggacctccaccatctagaagctgaagacgagagtgaccgcgctggccgtgaaatcgactgctgcgggtccagtgtccgccatcttcagggttgcacagaatcctccaagatactttgcagccttttttccccctggtccctctcccgttttgattttgtgagagcgtaggtcatcctcgtaaacatatcagtagacctggg

SEQ ID NO: 8251 - protein, 718 aa, Homo sapiens
MMFRDQVGVLAGWFKGWNECEQTVALLSLLKRVSQTQARFLQLCLEHSLADCAELHVLEREANSPGIINQWQQESKDKVISLLLTHLPLLKPGNLDAKVEYMKLLPKILAHSIEHNQHIEESRQLLSYALIHPATSLEDRSALAMWLNHLEDRTSTSFGGQNRGRSDSVDYGQTHYYHQRQNSDDKLNGWQNSRDSGICINASNWQDKSMGCENGHVPLYSSSSVPTTINTIGTSTSTILSGQAHHSPLKRSVSLTPPMNVPNQPLGHGWMSHEDLRARGPQCLPSDHAPLSPQSSVASSGSGGSEHLEDQTTARNTFQEEGSGMKDVPAWLKSLRLHKYAALFSQMTYEEMMALTECQLEAQNVTKGARHKIVISIQKLKERQNLLKSLERDIIEGGSLRIPLQELHQMILTPIKAYSSPSTTPEARRREPQAPRQPSLMGPESQSPDCKDGAAATGATATPSAGASGGLQPHQLSSCDGELAVAPLPEGDLPGQFTRVMGKVCTQLLVSRPDEENISSYLQLIDKCLIHEAFTETQKKRLLSWKQQVQKLFRSFPRKTLLDISGYRQQRNRGFGQSNSLPTAGSVGGGMGRRNPRQYQIPSRNVPSARLGLLGTSGFVSSNQRNTTATPTIMKQGRQNLWFANPGGSNSMPSRTHSSVQRTRSLPVHTSPQNMLMFQQPEFQLPVTEPDINNRLESLCLSMTEHALGDGVDRTSTI

SEQ ID NO: 8252 - DNA, 1383 bp, Homo sapiens
atcagtggtggctgtctgagttctgtgtgcagagctcttttgttcagttactgaacccttatcaagcagctgcctgggactcaatttgccccatccattggagattaaccgacatcatcgaggggggcagcctgcgcatcccgctccaggaactgcaccagatgatcctgactccgatcaaggcctacagctccccgagcaccacccccgaggctcgccgccgggagccccaggccccgcgtcagccctcactgatgggccccgagagccagagccccgactgcaaagatggggccgcagccactggcgccacggccaccccctcggccggggccagcggggggctccagccgcaccagctgagcagctgcgatggggagctggccgtcgcccccctgccagagggggacctccccgggcagttcacacgcgtcatggggaaagtgtgcacacagctcttggtctccagacctgatgaggaaaatataagttcctatttacagctcatagacaagtgtctaattcatgaggcatttacagagacacagaaaaaaagattgttgtcatggaaacagcaggtgcagaagctctttcggtctttccctcggaaaacccttctagacatatcaggatatcgacagcaaagaaatcgaggctttgggcaatccaactccctcccgacggctggctctgtgggcggtggcatgggcagacggaacccgcgccagtaccagatcccctctcggaacgtcccttccgcccgcctgggcctcttgggcaccagtggattcgtcagctccaaccagcgcaacaccacagctacccccaccatcatgaaacaaggaagacagaacctgtggtttgccaaccccgggggcagcaatagcatgccaagccgcacccacagctcagtccagaggacccgctcgctgcccgtgcacacttccccacagaacatgctgatgttccagcagccaggttcccaagttcacagtggactgtgtttaacagaccttagaggttggttgagcctgagtggagccccttccatgccagcgctgacagtccccaagtcctcccagggagaattccagcttcccgtgaccgaacctgacatcaacaacaggctggagtcgttgtgcctcagtatgaccgaacacgccctgggagacggggttgaccggacctccaccatctagaagctgaagacgagagtgaccgcgctggccgtgaaatcgactgctgcgggtccagtgtccgccatcttcagggttgcacagaatcctccaagatactttgcagccttttttccccctggtccctctcccgttttgattttgtgagagcgtaggtcatcctcgtaaacatatcagtagacctggg

SEQ ID NO: 8253 - protein, 345 aa, Homo sapiens
MILTPIKAYSSPSTTPEARRREPQAPRQPSLMGPESQSPDCKDGAAATGATATPSAGASGGLQPHQLSSCDGELAVAPLPEGDLPGQFTRVMGKVCTQLLVSRPDEENISSYLQLIDKCLIHEAFTETQKKRLLSWKQQVQKLFRSFPRKTLLDISGYRQQRNRGFGQSNSLPTAGSVGGGMGRRNPRQYQIPSRNVPSARLGLLGTSGFVSSNQRNTTATPTIMKQGRQNLWFANPGGSNSMPSRTHSSVQRTRSLPVHTSPQNMLMFQQPGSQVHSGLCLTDLRGWLSLSGAPSMPALTVPKSSQGEFQLPVTEPDINNRLESLCLSMTEHALGDGVDRTSTI

SEQ ID NO: 8254 - DNA, 413 bp, Homo sapiens
cgctggagggttctgagcagaggaggcacagactgtgacatgaccagctatttttagtctccgttttgttccaggttcccaagttcacagtggactgtgtttaacagaccttagagaattccagcttcccgtgaccgaacctgacatcaacaacaggctggagtcgttgtgcctcagtatgaccgaacacgccctgggagacggggttgaccggacctccaccatctagaagctgaagacgagagtgaccgcgctggccgtgaaatcgactgctgcgggtccagtgtccgccatcttcagggttgcacagaatcctccaagatactttgcagccttttttccccctggtccctctcccgttttgattttgtgagagcgtaggtcatcctcgtaaacatatcagtagacctggg

SEQ ID NO: 8255 - protein, 56 aa, Homo sapiens
PDLHHLEAEDESDRAGREIDCCGSSVRHLQGCTESSKILCSLFSPWSLSRFDFVRA

SEQ ID NO: 8256 - DNA, 540 bp, Homo sapiens
aaatggctatggtgttgctaagtaatatggctgcgtacacagacacccgaagctgagaccatcacgggcccattaaagcatcatttcccgctgtggctaatgaggtttgaatccttcaaaggaaacctgctgttcttttttaaggtctactgatatgtttacgaggatgacctacgctctcacaaaatcaaaacgggagagggaccagggggaaaaaaggctgcaaagtatcttggaggattctgtgcaaccctgaagatggcggacactggacccgcagcagtcgatttcacggccagcgcggtcactctcgtcttcagcttctagatggtggaggtccggtcaaccccgtctgggagagaaagcagcaaacgatgggcacagcctctccttctcaacccacgtccctgatgagacactggggacaaggtggctgtgaccctgtccacagctgagcagaccagagggatggacacatctgacccaaacaaatccagattctctgtctcgagaatctgatcaaaggcagagatgtctgag

SEQ ID NO: 8257 - protein, 33 aa, Homo sapiens
MFTRMTYALTKSKRERDQGEKRLQSILEDSVQP

SEQ ID NO: 8258 - DNA, 1374 bp, Homo sapiens
cacataagaggacagcagaagccctggccctggggaggcttctcggaaggcctggcttcacaggcaggccacagaaggatatcgcgggcacgtgcacccaaagcaagatagtggcttcccttttatatccaatctaatcctgattggatgtccctgaggcccctgctggaaacagccataggagagggcccatggcagtaggggaaagaaggaagaaattccctgcaacaaaacttcagctaaactttgatttgtgtattgtttacataataattttaaagggtacataatgtgtaaagagtttggatagaacctctcttcatactatggttttcgtaaaggatctgttgttgttacggattcattttttcccttctctcccattcgtttgaagagacactgagggaaacaagggtttcttttgaggtgtccttggctgccttttacgggatgggagccttctccggatcttttgttcttctgcacctcttgtagctactgccggtgcaaggttgtagatgttattccccaggagcctgggcttgggggctgagctgggctgaatgcaaaagcatgcaaccagaaggcgggcaaggggaggaaaagcaggcctggcctcattggtcccctggagatgtctgtagcagtcagctccagcttgggcctggggaagcagcctgaccaaggcgctcaggtgtgcctgttacaagaagaacctgcagaaggataatttgcacatggagctgtgataacactaatgttgattttttttttttttacaagtcatcagagatgtttgcaaagtgagttttatttttttgtaattcctttatctttacttaaaggtgaatgtgtattcctctgggaggaataggaagaaaacaggaatgttaataatgtcgaacagaaaacttcctcccttattaatatataatcctcatgtatttatgcctaatgtaagctgacttttaaaaagctttcttttgttgcatgccctgtgcaggcatctgtattgtacatgcatgcctttcgtcctgttttcctgtataaagttagtgaacaaagaaatatttttgcctagttcatgttgccaagcaatgcatattttttaaatttgtcatatatggaaagagcatgtttgttacatgtaaaagctttactgatatacagatatactaatgtttgaagatgctgttctttgcaagtgtacagttttcaaatgttgttaccagtgaaacacccttgtggtttaaacttgctacaatgtatttattattcatttcctcccatgtaactaagaatcatggctatatttcatatcaacgttatattgaaagtgaagggaaatgattaatacaaggttttgtaacactg

SEQ ID NO: 8259 - protein, 53 aa, Homo sapiens [sequence omitted]

SEQ ID NO: 8260 - DNA, 2972 bp, Homo sapiens
agcctgtggccgctcccggctcggagtgtgatctaagcaggttgcgtaccttcctcaggtgactccggccacagcccattgtccgcggccaccggcggagtttagccgcagacctcgaagcgccccggggtccttcccgaacggcagcggctgcggcgggtccatggagaagggccctgtgcgggcaccggcggagaagccgcggggcgccaggtgcagcaatgggttccccgagcgggatccgccgcggcccgggcccagcaggccggcggagaagcccccgcggcccgaggccaagagcgcgcagcccgcggacggctggaagggcgagcggccccgcagcgaggaggataacgagctgaacctccctaacctggcagccgcctactcgtccatcctgagctcgctgggcgagaacccccagcggcaagggctgctcaagacgccctggagggcggcctcggccatgcagttcttcaccaagggctaccaggagaccatctcagatgtcctaaacgatgctatatttgatgaagatcatgatgagatggtgattgtgaaggacatagacatgttttccatgtgtgagcatcacttggttccatttgttggaaaggtccatattggttatcttcctaacaagcaagtccttggcctcagcaaacttgcgaggattgtagaaatctatagtagaagactacaagttcaggagcgccttacaaaacaaattgctgtagcaatcacggaagccttgcggcctgctggagtcggggtagtggttgaagcaacacacatgtgtatggtaatgcgaggtgtacagaaaatgaacagcaaaactgtgaccagcacaatgttgggtgtgttccgggaggatccaaagactcgggaagagttcctgactctcattaggagctgagcttcattcagtgtgtgtgcgttggttgccgatcgtactgccagtagcattgtctgtctgtccggtcttgtttgtacattccattttcaattgttacagatgtgaactttattccttgtcactaattatatttaaaattatttctaggaagtcaaataaatataataaagggttgagccctctactttcttcttgccacctttttgtggcaatattaaagtgaactgctaatagtgtaagtacgtgcacaaaaccactgccagataaccagaggggcctgggaagggagaagaattagtgtatttttttcaaatagtacagtaatttgcctcataagcataggagcattgggaatgagagggaactgtgcccagtatactgttttttttcttcctccaataaaagtggtgtagtgccgaaagtgctaaaatatttagtgcggtattgctctgtgaattcaagttcaacagacttcactttggtcatgtttattaaaccaccagtgacatttaaaaatatatttttagcagtcgtaatgttagtcaccaagggaaggtggtggaatgtctatgtttttgattttactgtgagttaaaaaggcacatttctaccttctattgtttttaaattcaagaatagggaattagttcctggtgttgtttacgagtgtattctcgtgtcaacatacagggatttagacatttaactctctgtgccttgataagaatatcatttagagtgtagatacttttgcctttttaaaaaagccattattttatgagacttagtactcacactgcaaataactagtcagctcagttttaactttataggtttattgagtttcctttgtgtgatccatgtagatgcctcaaaatgtttcttcttcttcttttttttaatcttataagatatttttctaagtatttccagaaacatttgagagtgcccatcattttcaggtctgcagaaccatagcttccacgcacctgaacgagcacagaatgaactgacggtggaagacattatgagctgtgtccaacgttttaaccaaagcgtatcgtaccaacgatctgtgaaaatgcactggaagcttctggtcccggtttcctttgtggtctatgtgggtcttgtcctcattgtaactccgtatagatggtataggtattttaatcctggaagctgttgccttattaatgattatcttaaaatttcctccattggggcagcgtgggccaaattaaaacaaacaaaaccgcaactcctccacagaaacacaaacacagttattccatgaagtttagtatttggttgacatagtgctcttcaaattcatcccattaccctaaaagtaataactttgatgcttgctttaactttagtcccatctctgccactttgatgctatttgggttatgatggggcaagatggcagaggtattgggtttttttgtttttttccattcctctctacttctgtttcctagctttttctttctggagtttaagtacagtgatggttggcttgagtacctttttaaatctagcccagtataaacattagcctgcttaatatttagacatttataggtagaattctgagcactcaactcatgtttggcattttaaagtaaaaacaagtgtgacttcgaggaccaaagaaattgtcagctatacatttatctttatgaactcatttatattcctttttaatgactcgttgttctaacatttcctagaagtgttcttataaaggtctaatgtatccacaggctgttgtcttattagtaaatgcaaagtaatgactttgtctgttttactctagtctttagtacttcaaaattaccttttcatatccatgatcttgagtccatttgggggatttttaagaatttgatgtatttcaatacactgttcaaaattaaattgtttaattttatgtatgagtatgtatgttcctgaaggtggtcctatttaaattattaaactattgtaactttgttcttgtgaaagttgtttctttttcaaccaccactataaatatttaaataacttg

SEQ ID NO: 8261 - protein, 250 aa, Homo sapiens; identical to SEQ ID NO: 1196

SEQ ID NO: 8262 - DNA, 2026 bp, Homo sapiens
agcctgtggccgctcccggctcggagtgtgatctaagcaggttgcgtaccttcctcaggtgactccggccacagcccattgtccgcggccaccggcggagtttagccgcagacctcgaagcgccccggggtccttcccgaacggcagcggctgcggcgggtccatggagaagggccctgtgcgggcaccggcggagaagccgcggggcgccaggtgcagcaatgggttccccgagcgggatccgccgcggcccgggcccagcaggccggcggagaagcccccgcggcccgaggccaagagcgcgcagcccgcggacggctggaagggcgagcggccccgcagcgaggaggataacgagctgaacctccctaacctggcagccgcctactcgtccatcctgagctcgctgggcgagaacccccagcggcaagggctgctcaagacgccctggagggcggcctcggccatgcagttcttcaccaagggctaccaggagaccatctcagatgtcctaaacgatgctatatttgatgaagatcatgatgagatggtgattgtgaaggacatagacatgttttccatgtgtgagcatcacttggttccatttgttggaaaggtccatattggttatcttcctaacaagcaagtccttggcctcagcaaacttgcgaggattgtagaaatctatagtagaagactacaagttcaggagcgccttacaaaacaaattgctgtagcaatcacggaagccttgcggcctgctggagtcggggtagtggttgaagcaacacacatgtgtatggtaatgcgaggtgtacagaaaatgaacagcaaaactgtgaccagcacaatgttgggtgtgttccgggaggatccaaagactcgggaagagttcctgactctcattaggagctgagcttcattcagtgtgtgtctgcagaaccatagcttccacgcacctgaacgagcacagaatgaactgacggtggaagacattatgagctgtgtccaacgttttaaccaaagcgtatcgtaccaacgatctgtgaaaatgcactggaagcttctggtcccggtttcctttgtggtctatgtgggtcttgtcctcattgtaactccgtatagatggtataggtattttaatcctggaagctgttgccttattaatgattatcttaaaatttcctccattggggcagcgtgggccaaattaaaacaaacaaaaccgcaactcctccacagaaacacaaacacagttattccatgaagtttagtatttggttgacatagtgctcttcaaattcatcccattaccctaaaagtaataactttgatgcttgctttaactttagtcccatctctgccactttgatgctatttgggttatgatggggcaagatggcagaggtattgggtttttttgtttttttccattcctctctacttctgtttcctagctttttctttctggagtttaagtacagtgatggttggcttgagtacctttttaaatctagcccagtataaacattagcctgcttaatatttagacatttataggtagaattctgagcactcaactcatgtttggcattttaaagtaaaaacaagtgtgacttcgaggaccaaagaaattgtcagctatacatttatctttatgaactcatttatattcctttttaatgactcgttgttctaacatttcctagaagtgttcttataaaggtctaatgtatccacaggctgttgtcttattagtaaatgcaaagtaatgactttgtctgttttactctagtctttagtacttcaaaattaccttttcatatccatgatcttgagtccatttgggggatttttaagaatttgatgtatttcaatacactgttcaaaattaaattgtttaattttatgtatgagtatgtatgttcctgaaggtggtcctatttaaattattaaactattgtaactttgttcttgtgaaagttgtttctttttcaaccaccactataaatatttaaataacttg

SEQ ID NO: 8263 - protein, 250 aa, Homo sapiens; identical to SEQ ID NO: 1196

SEQ ID NO: 8264 - DNA, 1883 bp, Homo sapiens
agcctgtggccgctcccggctcggagtgtgatctaagcaggttgcgtaccttcctcaggtgactccggccacagcccattgtccgcggccaccggcggagtttagccgcagacctcgaagcgccccggggtccttcccgaacggcagcggctgcggcgggtccatggagaagggccctgtgcgggcaccggcggagaagccgcggggcgccaggtgcagcaatgggttccccgagcgggatccgccgcggcccgggcccagcaggccggcggagaagcccccgcggcccgaggccaagagcgcgcagcccgcggacggctggaagggcgagcggccccgcagcgaggaggataacgagctgaacctccctaacctggcagccgcctactcgtccatcctgagctcgctgggcgagaacccccagcggcaagggctgctcaagacgccctggagggcggcctcggccatgcagttcttcaccaagggctaccaggagaccatctcagatgtcctaaacgatgctatatttgatgaagatcatgatgagatggtgattgtgaaggacatagacatgttttccatgtgtgagcatcacttggttccatttgttggaaaggtccatattggttatcttcctaacaagcaagtccttggcctcagcaaacttgcgaggattgtagaaatctatagtagaagactacaagttcaggagcgccttacaaaacaaattgctgtagcaatcacggaagccttgcggcctgctggagtcggggtagtggttgaagcaacgtctgcagaaccatagcttccacgcacctgaacgagcacagaatgaactgacggtggaagacattatgagctgtgtccaacgttttaaccaaagcgtatcgtaccaacgatctgtgaaaatgcactggaagcttctggtcccggtttcctttgtggtctatgtgggtcttgtcctcattgtaactccgtatagatggtataggtattttaatcctggaagctgttgccttattaatgattatcttaaaatttcctccattggggcagcgtgggccaaattaaaacaaacaaaaccgcaactcctccacagaaacacaaacacagttattccatgaagtttagtatttggttgacatagtgctcttcaaattcatcccattaccctaaaagtaataactttgatgcttgctttaactttagtcccatctctgccactttgatgctatttgggttatgatggggcaagatggcagaggtattgggtttttttgtttttttccattcctctctacttctgtttcctagctttttctttctggagtttaagtacagtgatggttggcttgagtacctttttaaatctagcccagtataaacattagcctgcttaatatttagacatttataggtagaattctgagcactcaactcatgtttggcattttaaagtaaaaacaagtgtgacttcgaggaccaaagaaattgtcagctatacatttatctttatgaactcatttatattcctttttaatgactcgttgttctaacatttcctagaagtgttcttataaaggtctaatgtatccacaggctgttgtcttattagtaaatgcaaagtaatgactttgtctgttttactctagtctttagtacttcaaaattaccttttcatatccatgatcttgagtccatttgggggatttttaagaatttgatgtatttcaatacactgttcaaaattaaattgtttaattttatgtatgagtatgtatgttcctgaaggtggtcctatttaaattattaaactattgtaactttgttcttgtgaaagttgtttctttttcaaccaccactataaatatttaaataacttg

SEQ ID NO: 8265 - protein, 213 aa, Homo sapiens; identical to SEQ ID NO: 1202

SEQ ID NO: 8266 - DNA, 1971 bp, Homo sapiens
agcctgtggccgctcccggctcggagtgtgatctaagcaggttgcgtaccttcctcaggtgactccggccacagcccattgtccgcggccaccggcggagtttagccgcagacctcgaagcgccccggggtccttcccgaacggcagcggctgcggcgggtccatggagaagggccctgtgcgggcaccggcggagaagccgcggggcgccaggtgcagcaatgggttccccgagcgggatccgccgcggcccgggcccagcaggccggcggagaagcccccgcggcccgaggccaagagcgcgcagcccgcggacggctggaagggcgagcggccccgcagcgaggaggataacgagctgaacctccctaacctggcagccgcctactcgtccatcctgagctcgctgggcgagaacccccagcggcaagggctgctcaagacgccctggagggcggcctcggccatgcagttcttcaccaagggctaccaggagaccatctcagatgtcctaaacgatgctatatttgatgaagatcatgatgagatggtgattgtgaaggacatagacatgttttccatgtgtgagcatcacttggttccatttgttggaaaggtccatattggttatcttcctaacaagcaagtccttggcctcagcaaacttgcgaggattgtagaaatctatagtagaagactacaagttcaggagcgccttacaaaacaaattgctgtagcaatcacggaagccttgcggcctgctggagtcggggtagtggttgaagcaacgaagtcaaataaatataataaagggttgagccctctactttcttcttgccacctttttgtggcaatattaaagtgaactgctaatagtgtctgcagaaccatagcttccacgcacctgaacgagcacagaatgaactgacggtggaagacattatgagctgtgtccaacgttttaaccaaagcgtatcgtaccaacgatctgtgaaaatgcactggaagcttctggtcccggtttcctttgtggtctatgtgggtcttgtcctcattgtaactccgtatagatggtataggtattttaatcctggaagctgttgccttattaatgattatcttaaaatttcctccattggggcagcgtgggccaaattaaaacaaacaaaaccgcaactcctccacagaaacacaaacacagttattccatgaagtttagtatttggttgacatagtgctcttcaaattcatcccattaccctaaaagtaataactttgatgcttgctttaactttagtcccatctctgccactttgatgctatttgggttatgatggggcaagatggcagaggtattgggtttttttgtttttttccattcctctctacttctgtttcctagctttttctttctggagtttaagtacagtgatggttggcttgagtacctttttaaatctagcccagtataaacattagcctgcttaatatttagacatttataggtagaattctgagcactcaactcatgtttggcattttaaagtaaaaacaagtgtgacttcgaggaccaaagaaattgtcagctatacatttatctttatgaactcatttatattcctttttaatgactcgttgttctaacatttcctagaagtgttcttataaaggtctaatgtatccacaggctgttgtcttattagtaaatgcaaagtaatgactttgtctgttttactctagtctttagtacttcaaaattaccttttcatatccatgatcttgagtccatttgggggatttttaagaatttgatgtatttcaatacactgttcaaaattaaattgtttaattttatgtatgagtatgtatgttcctgaaggtggtcctatttaaattattaaactattgtaactttgttcttgtgaaagttgtttctttttcaaccaccactataaatatttaaataacttg

SEQ ID NO: 8267 - protein, 233 aa, Homo sapiens; identical to SEQ ID NO: 1200

SEQ ID NO: 8268 - DNA, 1766 bp, Homo sapiens
agcctgtggccgctcccggctcggagtgtgatctaagcaggttgcgtaccttcctcaggtgactccggccacagcccattgtccgcggccaccggcggagtttagccgcagacctcgaagcgccccggggtccttcccgaacggcagcggctgcggcgggtccatggagaagggccctgtgcgggcaccggcggagaagccgcggggcgccaggtgcagcaatgggttccccgagcgggatccgccgcggcccgggcccagcaggccggcggagaagcccccgcggcccgaggccaagagcgcgcagcccgcggacggctggaagggcgagcggccccgcagcgaggaggataacgagctgaacctccctaacctggcagccgcctactcgtccatcctgagctcgctgggcgagaacccccagcggcaagggctgctcaagacgccctggagggcggcctcggccatgcagttcttcaccaagggctaccaggagaccatctcagatgtcctaaacgatgctatatttgatgaagatcatgatgagatggtgattgtgaaggacatagacatgttttccatgtgtgagcatcacttggttccatttgttggaaaggtccatattggttatcttcctaacaagcaagtccttggcctcagcaaacttgcgaggtctgcagaaccatagcttccacgcacctgaacgagcacagaatgaactgacggtggaagacattatgagctgtgtccaacgttttaaccaaagcgtatcgtaccaacgatctgtgaaaatgcactggaagcttctggtcccggtttcctttgtggtctatgtgggtcttgtcctcattgtaactccgtatagatggtataggtattttaatcctggaagctgttgccttattaatgattatcttaaaatttcctccattggggcagcgtgggccaaattaaaacaaacaaaaccgcaactcctccacagaaacacaaacacagttattccatgaagtttagtatttggttgacatagtgctcttcaaattcatcccattaccctaaaagtaataactttgatgcttgctttaactttagtcccatctctgccactttgatgctatttgggttatgatggggcaagatggcagaggtattgggtttttttgtttttttccattcctctctacttctgtttcctagctttttctttctggagtttaagtacagtgatggttggcttgagtacctttttaaatctagcccagtataaacattagcctgcttaatatttagacatttataggtagaattctgagcactcaactcatgtttggcattttaaagtaaaaacaagtgtgacttcgaggaccaaagaaattgtcagctatacatttatctttatgaactcatttatattcctttttaatgactcgttgttctaacatttcctagaagtgttcttataaaggtctaatgtatccacaggctgttgtcttattagtaaatgcaaagtaatgactttgtctgttttactctagtctttagtacttcaaaattaccttttcatatccatgatcttgagtccatttgggggatttttaagaatttgatgtatttcaatacactgttcaaaattaaattgtttaattttatgtatgagtatgtatgttcctgaaggtggtcctatttaaattattaaactattgtaactttgttcttgtgaaagttgtttctttttcaaccaccactataaatatttaaataacttg

SEQ ID NO: 8269 - protein, 174 aa, Homo sapiens
MEKGPVRAPAEKPRGARCSNGFPERDPPRPGPSRPAEKPPRPEAKSAQPADGWKGERPRSEEDNELNLPNLAAAYSSILSSLGENPQRQGLLKTPWRAASAMQFFTKGYQETISDVLNDAIFDEDHDEMVIVKDIDMFSMCEHHLVPFVGKVHIGYLPNKQVLGLSKLARSAEP

SEQ ID NO: 8270 - DNA, 1836 bp, Homo sapiens
agcctgtggccgctcccggctcggagtgtgatctaagcaggttgcgtaccttcctcaggtgactccggccacagcccattgtccgcggccaccggcggagtttagccgcagacctcgaagcgccccggggtccttcccgaacggcagcggctgcggcgggtccatggagaagggccctgtgcgggcaccggcggagaagccgcggggcgccaggtgcagcaatgggttccccgagcgggatccgccgcggcccgggcccagcaggccggcggagaagcccccgcggcccgaggccaagagcgcgcagcccgcggacggctggaagggcgagcggccccgcagcgaggaggataacgagctgaacctccctaacctggcagccgcctactcgtccatcctgagctcgctgggcgagaacccccagcggcaagggctgctcaagacgccctggagggcggcctcggccatgcagttcttcaccaagggctaccaggagaccatctcagatgtcctaaacgatgctatatttgatgaagatcatgatgagatggtgattgtgaaggacatagacatgttttccatgtgtgagcatcacttggttccatttgttggaaaggtccatattggttatcttcctaacaagcaagtccttggcctcagcaaacttgcgaggattgtagaaatctatagtagaagactacaagttcaggagcgccttacaaaacaaattgctgtagcaatcacggaagccttgcggcctgctggagtcggggtagtggttgaagcaacgtctgcagaaccatagcttccacgcacctgaacgagcacagaatgaactgacggtggaagacattatgagctgtgtccaacgttttaaccaaagcgtatcgtaccaacgatctgtgaaaatgcactggaagcttctggtcccggtttcctttgtggtctatgtgggtcttgtcctcattgtaactccgtatagatggtataggtattttaatcctggaagctgttgccttattaatgattatcttaaaatttcctccattggggcagcgtgggccaaattaaaacaaacaaaaccgcaactcctccacagaaacacaaacacagttattccatgaagtttagtatttggttgacatagtgctcttcaaattcatcccattaccctaaaagtaataactttgatgcttgctttaactttagtcccatctctgccactttgatgctatttgggttatgatggggcaagatggcagaggtattgggtttttttgtttttttccattcctctctacttctgtttcctagctttttctttctggagtttaagtacagtgatggttggcttgagtacctttttaaatctagcccagtataaacattagcctgcttaatatttagacatttataggtagaattctgagcactcaactcatgtttggcattttaaagtaaaaacaagtgtgacttcgaggaccaaagaaattgtcagctatacatttatctttatgaactcatttatattcctttttaatgactcgttgttctaacatttcctagaagtgttcttataaaggtctaatgtatccacaggctgttgtcttattagtaaatgcaaagtaatgactttgtctgttttactctagtctttagtacttcaaaattaccttttcatatccatgatcttgagtccatttgggggatttttaagaatttgatgtatttcaatacactgttcaaaattaaattgtttaattttatgtatgagtatgtatgttcctgaaggtggtcctatttaaattattaaactattgtaactttgttcttgtg

SEQ ID NO: 8271 - protein, 213 aa, Homo sapiens; identical to SEQ ID NO: 1202

SEQ ID NO: 8272 - DNA, 1979 bp, Homo sapiens
agcctgtggccgctcccggctcggagtgtgatctaagcaggttgcgtaccttcctcaggtgactccggccacagcccattgtccgcggccaccggcggagtttagccgcagacctcgaagcgccccggggtccttcccgaacggcagcggctgcggcgggtccatggagaagggccctgtgcgggcaccggcggagaagccgcggggcgccaggtgcagcaatgggttccccgagcgggatccgccgcggcccgggcccagcaggccggcggagaagcccccgcggcccgaggccaagagcgcgcagcccgcggacggctggaagggcgagcggccccgcagcgaggaggataacgagctgaacctccctaacctggcagccgcctactcgtccatcctgagctcgctgggcgagaacccccagcggcaagggctgctcaagacgccctggagggcggcctcggccatgcagttcttcaccaagggctaccaggagaccatctcagatgtcctaaacgatgctatatttgatgaagatcatgatgagatggtgattgtgaaggacatagacatgttttccatgtgtgagcatcacttggttccatttgttggaaaggtccatattggttatcttcctaacaagcaagtccttggcctcagcaaacttgcgaggattgtagaaatctatagtagaagactacaagttcaggagcgccttacaaaacaaattgctgtagcaatcacggaagccttgcggcctgctggagtcggggtagtggttgaagcaacacacatgtgtatggtaatgcgaggtgtacagaaaatgaacagcaaaactgtgaccagcacaatgttgggtgtgttccgggaggatccaaagactcgggaagagttcctgactctcattaggagctgagcttcattcagtgtgtgtctgcagaaccatagcttccacgcacctgaacgagcacagaatgaactgacggtggaagacattatgagctgtgtccaacgttttaaccaaagcgtatcgtaccaacgatctgtgaaaatgcactggaagcttctggtcccggtttcctttgtggtctatgtgggtcttgtcctcattgtaactccgtatagatggtataggtattttaatcctggaagctgttgccttattaatgattatcttaaaatttcctccattggggcagcgtgggccaaattaaaacaaacaaaaccgcaactcctccacagaaacacaaacacagttattccatgaagtttagtatttggttgacatagtgctcttcaaattcatcccattaccctaaaagtaataactttgatgcttgctttaactttagtcccatctctgccactttgatgctatttgggttatgatggggcaagatggcagaggtattgggtttttttgtttttttccattcctctctacttctgtttcctagctttttctttctggagtttaagtacagtgatggttggcttgagtacctttttaaatctagcccagtataaacattagcctgcttaatatttagacatttataggtagaattctgagcactcaactcatgtttggcattttaaagtaaaaacaagtgtgacttcgaggaccaaagaaattgtcagctatacatttatctttatgaactcatttatattcctttttaatgactcgttgttctaacatttcctagaagtgttcttataaaggtctaatgtatccacaggctgttgtcttattagtaaatgcaaagtaatgactttgtctgttttactctagtctttagtacttcaaaattaccttttcatatccatgatcttgagtccatttgggggatttttaagaatttgatgtatttcaatacactgttcaaaattaaattgtttaattttatgtatgagtatgtatgttcctgaaggtggtcctatttaaattattaaactattgtaactttgttcttgtg

SEQ ID NO: 8273 - protein, 250 aa, Homo sapiens; identical to SEQ ID NO: 1196

SEQ ID NO: 8274 - DNA, 1719 bp, Homo sapiens
agcctgtggccgctcccggctcggagtgtgatctaagcaggttgcgtaccttcctcaggtgactccggccacagcccattgtccgcggccaccggcggagtttagccgcagacctcgaagcgccccggggtccttcccgaacggcagcggctgcggcgggtccatggagaagggccctgtgcgggcaccggcggagaagccgcggggcgccaggtgcagcaatgggttccccgagcgggatccgccgcggcccgggcccagcaggccggcggagaagcccccgcggcccgaggccaagagcgcgcagcccgcggacggctggaagggcgagcggccccgcagcgaggaggataacgagctgaacctccctaacctggcagccgcctactcgtccatcctgagctcgctgggcgagaacccccagcggcaagggctgctcaagacgccctggagggcggcctcggccatgcagttcttcaccaagggctaccaggagaccatctcagatgtcctaaacgatgctatatttgatgaagatcatgatgagatggtgattgtgaaggacatagacatgttttccatgtgtgagcatcacttggttccatttgttggaaaggtccatattggttatcttcctaacaagcaagtccttggcctcagcaaacttgcgaggtctgcagaaccatagcttccacgcacctgaacgagcacagaatgaactgacggtggaagacattatgagctgtgtccaacgttttaaccaaagcgtatcgtaccaacgatctgtgaaaatgcactggaagcttctggtcccggtttcctttgtggtctatgtgggtcttgtcctcattgtaactccgtatagatggtataggtattttaatcctggaagctgttgccttattaatgattatcttaaaatttcctccattggggcagcgtgggccaaattaaaacaaacaaaaccgcaactcctccacagaaacacaaacacagttattccatgaagtttagtatttggttgacatagtgctcttcaaattcatcccattaccctaaaagtaataactttgatgcttgctttaactttagtcccatctctgccactttgatgctatttgggttatgatggggcaagatggcagaggtattgggtttttttgtttttttccattcctctctacttctgtttcctagctttttctttctggagtttaagtacagtgatggttggcttgagtacctttttaaatctagcccagtataaacattagcctgcttaatatttagacatttataggtagaattctgagcactcaactcatgtttggcattttaaagtaaaaacaagtgtgacttcgaggaccaaagaaattgtcagctatacatttatctttatgaactcatttatattcctttttaatgactcgttgttctaacatttcctagaagtgttcttataaaggtctaatgtatccacaggctgttgtcttattagtaaatgcaaagtaatgactttgtctgttttactctagtctttagtacttcaaaattaccttttcatatccatgatcttgagtccatttgggggatttttaagaatttgatgtatttcaatacactgttcaaaattaaattgtttaattttatgtatgagtatgtatgttcctgaaggtggtcctatttaaattattaaactattgtaactttgttcttgtg

SEQ ID NO: 8275 - protein, 174 aa, Homo sapiens; identical to SEQ ID NO: 8269

SEQ ID NO: 8276 - DNA, 1924 bp, Homo sapiens
agcctgtggccgctcccggctcggagtgtgatctaagcaggttgcgtaccttcctcaggtgactccggccacagcccattgtccgcggccaccggcggagtttagccgcagacctcgaagcgccccggggtccttcccgaacggcagcggctgcggcgggtccatggagaagggccctgtgcgggcaccggcggagaagccgcggggcgccaggtgcagcaatgggttccccgagcgggatccgccgcggcccgggcccagcaggccggcggagaagcccccgcggcccgaggccaagagcgcgcagcccgcggacggctggaagggcgagcggccccgcagcgaggaggataacgagctgaacctccctaacctggcagccgcctactcgtccatcctgagctcgctgggcgagaacccccagcggcaagggctgctcaagacgccctggagggcggcctcggccatgcagttcttcaccaagggctaccaggagaccatctcagatgtcctaaacgatgctatatttgatgaagatcatgatgagatggtgattgtgaaggacatagacatgttttccatgtgtgagcatcacttggttccatttgttggaaaggtccatattggttatcttcctaacaagcaagtccttggcctcagcaaacttgcgaggattgtagaaatctatagtagaagactacaagttcaggagcgccttacaaaacaaattgctgtagcaatcacggaagccttgcggcctgctggagtcggggtagtggttgaagcaacgaagtcaaataaatataataaagggttgagccctctactttcttcttgccacctttttgtggcaatattaaagtgaactgctaatagtgtctgcagaaccatagcttccacgcacctgaacgagcacagaatgaactgacggtggaagacattatgagctgtgtccaacgttttaaccaaagcgtatcgtaccaacgatctgtgaaaatgcactggaagcttctggtcccggtttcctttgtggtctatgtgggtcttgtcctcattgtaactccgtatagatggtataggtattttaatcctggaagctgttgccttattaatgattatcttaaaatttcctccattggggcagcgtgggccaaattaaaacaaacaaaaccgcaactcctccacagaaacacaaacacagttattccatgaagtttagtatttggttgacatagtgctcttcaaattcatcccattaccctaaaagtaataactttgatgcttgctttaactttagtcccatctctgccactttgatgctatttgggttatgatggggcaagatggcagaggtattgggtttttttgtttttttccattcctctctacttctgtttcctagctttttctttctggagtttaagtacagtgatggttggcttgagtacctttttaaatctagcccagtataaacattagcctgcttaatatttagacatttataggtagaattctgagcactcaactcatgtttggcattttaaagtaaaaacaagtgtgacttcgaggaccaaagaaattgtcagctatacatttatctttatgaactcatttatattcctttttaatgactcgttgttctaacatttcctagaagtgttcttataaaggtctaatgtatccacaggctgttgtcttattagtaaatgcaaagtaatgactttgtctgttttactctagtctttagtacttcaaaattaccttttcatatccatgatcttgagtccatttgggggatttttaagaatttgatgtatttcaatacactgttcaaaattaaattgtttaattttatgtatgagtatgtatgttcctgaaggtggtcctatttaaattattaaactattgtaactttgttcttgtg

SEQ ID NO: 8277 - protein, 233 aa, Homo sapiens; identical to SEQ ID NO: 1200

SEQ ID NO: 8278 - DNA, 2925 bp, Homo sapiens
agcctgtggccgctcccggctcggagtgtgatctaagcaggttgcgtaccttcctcaggtgactccggccacagcccattgtccgcggccaccggcggagtttagccgcagacctcgaagcgccccggggtccttcccgaacggcagcggctgcggcgggtccatggagaagggccctgtgcgggcaccggcggagaagccgcggggcgccaggtgcagcaatgggttccccgagcgggatccgccgcggcccgggcccagcaggccggcggagaagcccccgcggcccgaggccaagagcgcgcagcccgcggacggctggaagggcgagcggccccgcagcgaggaggataacgagctgaacctccctaacctggcagccgcctactcgtccatcctgagctcgctgggcgagaacccccagcggcaagggctgctcaagacgccctggagggcggcctcggccatgcagttcttcaccaagggctaccaggagaccatctcagatgtcctaaacgatgctatatttgatgaagatcatgatgagatggtgattgtgaaggacatagacatgttttccatgtgtgagcatcacttggttccatttgttggaaaggtccatattggttatcttcctaacaagcaagtccttggcctcagcaaacttgcgaggattgtagaaatctatagtagaagactacaagttcaggagcgccttacaaaacaaattgctgtagcaatcacggaagccttgcggcctgctggagtcggggtagtggttgaagcaacacacatgtgtatggtaatgcgaggtgtacagaaaatgaacagcaaaactgtgaccagcacaatgttgggtgtgttccgggaggatccaaagactcgggaagagttcctgactctcattaggagctgagcttcattcagtgtgtgtgcgttggttgccgatcgtactgccagtagcattgtctgtctgtccggtcttgtttgtacattccattttcaattgttacagatgtgaactttattccttgtcactaattatatttaaaattatttctaggaagtcaaataaatataataaagggttgagccctctactttcttcttgccacctttttgtggcaatattaaagtgaactgctaatagtgtaagtacgtgcacaaaaccactgccagataaccagaggggcctgggaagggagaagaattagtgtatttttttcaaatagtacagtaatttgcctcataagcataggagcattgggaatgagagggaactgtgcccagtatactgttttttttcttcctccaataaaagtggtgtagtgccgaaagtgctaaaatatttagtgcggtattgctctgtgaattcaagttcaacagacttcactttggtcatgtttattaaaccaccagtgacatttaaaaatatatttttagcagtcgtaatgttagtcaccaagggaaggtggtggaatgtctatgtttttgattttactgtgagttaaaaaggcacatttctaccttctattgtttttaaattcaagaatagggaattagttcctggtgttgtttacgagtgtattctcgtgtcaacatacagggatttagacatttaactctctgtgccttgataagaatatcatttagagtgtagatacttttgcctttttaaaaaagccattattttatgagacttagtactcacactgcaaataactagtcagctcagttttaactttataggtttattgagtttcctttgtgtgatccatgtagatgcctcaaaatgtttcttcttcttcttttttttaatcttataagatatttttctaagtatttccagaaacatttgagagtgcccatcattttcaggtctgcagaaccatagcttccacgcacctgaacgagcacagaatgaactgacggtggaagacattatgagctgtgtccaacgttttaaccaaagcgtatcgtaccaacgatctgtgaaaatgcactggaagcttctggtcccggtttcctttgtggtctatgtgggtcttgtcctcattgtaactccgtatagatggtataggtattttaatcctggaagctgttgccttattaatgattatcttaaaatttcctccattggggcagcgtgggccaaattaaaacaaacaaaaccgcaactcctccacagaaacacaaacacagttattccatgaagtttagtatttggttgacatagtgctcttcaaattcatcccattaccctaaaagtaataactttgatgcttgctttaactttagtcccatctctgccactttgatgctatttgggttatgatggggcaagatggcagaggtattgggtttttttgtttttttccattcctctctacttctgtttcctagctttttctttctggagtttaagtacagtgatggttggcttgagtacctttttaaatctagcccagtataaacattagcctgcttaatatttagacatttataggtagaattctgagcactcaactcatgtttggcattttaaagtaaaaacaagtgtgacttcgaggaccaaagaaattgtcagctatacatttatctttatgaactcatttatattcctttttaatgactcgttgttctaacatttcctagaagtgttcttataaaggtctaatgtatccacaggctgttgtcttattagtaaatgcaaagtaatgactttgtctgttttactctagtctttagtacttcaaaattaccttttcatatccatgatcttgagtccatttgggggatttttaagaatttgatgtatttcaatacactgttcaaaattaaattgtttaattttatgtatgagtatgtatgttcctgaaggtggtcctatttaaattattaaactattgtaactttgttcttgtg

SEQ ID NO: 8279 - protein, 250 aa, Homo sapiens; identical to SEQ ID NO: 1196

SEQ ID NO: 8280 - DNA, 914 bp, Homo sapiens
agcctgtggccgctcccggctcggagtgtgatctaagcaggttgcgtaccttcctcaggtgactccggccacagcccattgtccgcggccaccggcggagtttagccgcagacctcgaagcgccccggggtccttcccgaacggcagcggctgcggcgggtccatggagaagggccctgtgcgggcaccggcggagaagccgcggggcgccaggtgcagcaatgggttccccgagcgggatccgccgcggcccgggcccagcaggccggcggagaagcccccgcggcccgaggccaagagcgcgcagcccgcggacggctggaagggcgagcggccccgcagcgaggaggataacgagctgaacctccctaacctggcagccgcctactcgtccatcctgagctcgctgggcgagaacccccagcggcaagggctgctcaagacgccctggagggcggcctcggccatgcagttcttcaccaagggctaccaggagaccatctcagatgtcctaaacgatgctatatttgatgaagatcatgatgagatggtgattgtgaaggacatagacatgttttccatgtgtgagcatcacttggttccatttgttggaaaggtccatattggttatcttcctaacaagcaagtccttggcctcagcaaacttgcgaggattgtagaaatctatagtagaagactacaagttcaggagcgccttacaaaacaaattgctgtagcaatcacggaagccttgcggcctgctggagtcggggtagtggttgaagcaacgtaagtctgcatctgcctttagtaacgtcataatggtgcactagaagtgatcttgctatttagtgcttctcatattttgtagcaccaggtgatgccacacaactgatatgataactgtagatttc

SEQ ID NO: 8281 - protein, 209 aa, Homo sapiens
MEKGPVRAPAEKPRGARCSNGFPERDPPRPGPSRPAEKPPRPEAKSAQPADGWKGERPRSEEDNELNLPNLAAAYSSILSSLGENPQRQGLLKTPWRAASAMQFFTKGYQETISDVLNDAIFDEDHDEMVIVKDIDMFSMCEHHLVPFVGKVHIGYLPNKQVLGLSKLARIVEIYSRRLQVQERLTKQIAVAITEALRPAGVGVVVEAT

SEQ ID NO: 8282 - DNA, 594 bp, Homo sapiens
acttttggcgcaggaagccgggcgctgtcacctccgaacccgccctagcctgccgccctgccgaggccctgcgtggggcacagtcggggcttcctgggtggcagcgacctctcagccccggaactcgctgcagccgccttccaggggcccttcccgctcccagcgcgcagccctcctagaacgccccgggtgggcgtggacgggagcccggagccctctcgcctgagcgcccagcgcgggattctcggggtacctgcggttccaaacttgcccacgataaggatcacctgggcacttgctgcggcgacggcttcctgggtagttccttattgagatcccattgtcaggatgtcctaaacgatgctatatttgatgaagatcatgatgagatggtgattgtgaaggacatagacatgttttccatgtgtgagcatcacttggttccatttgttggaaaggtccatattggttatcttcctaacaagcaagtccttggcctcagcaaacttgcgaggagttcaggagcgccttacaaaacaaattgctgtagcaatcacggaagccttgcggcctgctggagtcggggtagtggtt

SEQ ID NO: 8283 - protein, 67 aa, Homo sapiens
MVIVKDIDMFSMCEHHLVPFVGKVHIGYLPNKQVLGLSKLARSSGAPYKTNCCSNHGSLAACWSRGS

SEQ ID NO: 8284 - DNA, 8517 bp, Homo sapiens
gcagttccacttccggcgtatgaggcggtgacaatgggagcagcgcgggcggcgccgggaggcagctgacaagcgtttgcggcttcgcttcatggccgctctcccgcccctcctgggatctgtggggagctggggagcccgcagcggcccggagccggagctggcgagccgagcggagacctgtgcgccgcgcctctgaggcgcagcatgtgaagcggagacggcatccagtggggggcgagcctctcagccggccgggatggctaccacggccgagctcttcgaggagccttttgtggcagatgaatatattgaacgtcttgtatggagaaccccaggaggaggctctagaggtggacctgaagcttttgatcctaaaagattattagaagaatttgtaaatcatattcaggaactccagataatggatgaaaggattcagaggaaagtagagaaactagagcaacaatgtcagaaagaagccaaggaatttgccaagaaggtacaagagctgcagaaaagcaatcaggttgccttccaacatttccaagaactagatgagcacattagctatgtagcaactaaagtctgtcaccttggagaccagttagagggggtaaacacacccagacaacgggcagtggaggctcagaaattgatgaaatactttaatgagtttctagatggagaattgaaatctgatgtttttacaaattctgaaaagataaaggaagcagcagacatcattcagaagttgcacctaattgcccaagagttaccttttgatagattttcagaagttaaatccaaaattgcaagtaaataccatgatttagaatgccagctgattcaggagtttaccagtgctcaaagaagaggtgaaatctccagaatgagagaagtagcagcagttttacttcattttaagggttattcccattgtgttgatgtttatataaagcagtgccaggagggtgcttatttgagaaatgatatatttgaagacgctggaatactctgtcaaagagtgaacaaacaagttggagatatcttcagtaatccagaaacagtcctggctaaacttattcaaaatgtatttgaaatcaaactacagagttttgtgaaagagcagttagaagaatgtaggaagtccgatgcagagcaatatctcaaaaatctctatgatctgtatacaagaaccaccaatctttccagcaagctgatggagtttaatttaggtactgataaacagactttcttgtctaagcttatcaaatccattttcatttcctatttggagaactatattgaggtggagactggatatttgaaaagcagaagtgctatgatcctacagcgctattatgattcgaaaaaccatcaaaagagatccattggcacaggaggtattcaagatttgaaggaaagaattagacagcgtaccaacttaccacttgggccaagtatcgatactcatggggagacttttctatcccaagaagtggtggttaatcttttacaagaaaccaaacaagcctttgaaagatgtcataggctctctgatccttctgacttaccaaggaatgccttcagaatttttaccattcttgtggaatttttatgtattgagcatattgattatgctttggaaacaggacttgctggaattccctcttcagattctaggaatgcaaatctttattttttggacgttgtgcaacaggccaatactatttttcatctttttgacaaacagtttaatgatcaccttatgccactaataagctcttctcctaagttatctgaatgccttcagaagaaaaaagaaataattgaacaaatggagatgaaattggatactggcattgataggacattaaattgtatgattggacagatgaagcatattttggctgcagaacagaagaaaacagattttaagccagaagatgaaaacaatgttttgattcaatatactaatgcctgtgtaaaagtctgtgcttacgtaagaaaacaagtggagaagattaaaaattccatggatgggaagaatgtggatacagttttgatggaacttggagtacgttttcatcgacttatctatgagcatcttcaacaatattcctacagttgtatgggtggcatgttggccatttgtgatgtagccgaatataggaagtgtgccaaagacttcaagattccaatggtattacatctttttgatactctgcatgctctttgcaatcttctggtagttgccccagataatttaaagcaagtctgctcaggagaacaacttgctaatctggacaagaatatacttcactccttcgtacaacttcgtgctgattatagatctgcccgccttgctcgacacttcagctgagattgaatttacaaaggaattcagtgtcagttcctttacagaggaatgtcttatacttcagcagccctcggttgatagaaagcacaggagataccttatgacacagccaacattttgtgaaacaatgactggaacaaaacagcagccatacttacctttgaggttttatttaaagtttggataccactagctatattttgcttttttcccctcacattgaattttaattccattcttgaatgtagaaatttcagattctctaaaactacatgtcactgtttttatcctagaaaatgttgctgtcagaaggcaaaggaaatgttaccagtgttttcggttcttgtacttttaacatattccatttagaaattttgccattctgttttccattaataataggtgaaatacaggaaaactacatttgttattcctcagtttttaatgaccttttcagcatcaattgttaatcagattattttaggttttcgtaaataatttttttgcctctttcaaaaggttaacaattaagcatactttctgcagttggttgattggatttttttctgaggtacagcattaatactagtccaaaaaatgtcataaactgaactaaaatgatgaactattttatgtagacattaggagtggatcggaatacttctgctttctgggtaaaacttaaaagtttactatttcttatttggtaaatagattttaagccaattctagtaagaaattaataaaactaccttattttgtatttcacttaaggtggaggaccttaactaaaggaccatatttattcattattttaatattataagggaagtaaaaaaaagtgaggtatagtctaaatggtgcatataggaaatactgacagtgtttagcaacatgcagccctttgagatttctgtcgtaatgctaaacttgaataagatggaatggctgaacatgtggttagtcttttattttaagaagaattgagaattgatagatttggagatgagctttgcaaaggctgtttgcttttcatgtctataggtctgtcattgtcctttttcaaagcatttctgaagttattcctacttggatatagttaatggaattggcttaatttgatgacataataaatcacttataaaattttaaatatcaagtgaaaatttagaaaggccattactattctataaaccttataaacttgctctgggagaatgcattctaaattatatatagtgtttcagctcccattgtggtgttcatagtcttctaggaacagataaacttaagtattcaattcactcttggcattttttctttaatataggctttttagcctatttttggaaaactgcttttcttctgagaaccttattctgaatgtcatcaactttaccaaaccttctaagtccagagctaacttagtactgtttaagttactattgactgaattttcttcattttctgtttagtccagtgttaccaaggtaagctggggaatgaagtataccaacttctttcagagcattttaggacattatggcagctttagaaggctgtcttgtttctagccaagggagagccagcgcaggttttggatactagagaaagtcatttgcttgtactattgccattttagaaagctctgatgtgaattcaaattttacctctgttacttaaagccaacaattttaaggcagtagttttactggccatttaagctctttgtacagtgtcaatttgtaaaaaagaaaaaacgaaaaaaaatctcaaataaaacatgagataacattttaagacttccaaatcagagaagtgcttcaaattattttgtttggattaatttttaaaatgtaaagcatatacttgttgcttagttattttgtttattattttcatgtttgagttctgtgcaatattttctattatgtccgttgataggacagtgacaaaattcgtaagtgaatacttaatttaaaagtgttaacattaatgctcaataaacaaattccctgcagttgttttttttatttcactctttttatattttagagccatccatcctgaattttataaatgattttttatttaaaaatttgagatttttaaaatttttcacagcacaggtcttctcattttcttttttagcaaaaaatacttgactatataaacaagactagaaatttatcctaaacagatggtctttctctgagggaaaaaaaaaaatgtgtcatgtgaggcaatatgcattctttgtattctgattttttaagtgttttcatatttatagccatcacaaaattttgcccaaagtgtatggctcagaagagatgatcaataactaaaatgtttttcgttttgcacatggtaaaattttaggtagagagtggagctttgtataattggtaactttaaccaacatttacgtaagtacggtctttgcagtattacacaataccgcatgagctaatatgcagtatttaggtaatgcattgaatgaagttgaaaatatgctcttaacacactgtgcattgtttttctaaaattgagaaatatctgaaatacagaatacgaatttaataaaggaagcctaccttatgtaaattatgatgttgaaaatgacagtcaaccagagtagatgaagtgtccttatgaagaattattaaatagtagctggatggatctttagatggatgaccacctgaccattccaggacaatttttggtcccattttgaggattgccatagttgcaagtccttaggatcttccttgttttaaaaaactatcaaagtaggttaaattaaaatctaatttaaattaggttaatttatattacattgtagatcattcttttttcccccctctttcacttctaaatattttgctttctaaatactagccttctggttcacagtgaaataatttaattatcaatcagtagattgattccaagtggagaattcactgcttccctaaaatgcgtttttcttacctgtaatggtgaatatttacaaggatctggataaagagattttgatttttgaaatgccacaaaaccccttaaagtggtcaagtacctaaggtagtggctaaggcatgcttgaactgtgtttgagagacagcagttcagtcagtacataatttgttggtgactaacaaagctcacatctgggagattaactttttttaacgcaaaaatattctgcacattacccatatattgttgaattttacatacaaagcattttgtgctttcattcaattagtttaactatattcagtttctgtattatttctctctgatctatcctgtaattattctatactttagaagaaaagatcagttcatattgttagactgaataattctacatgaagttaaaagttagcaatttaaaaaattttgctgcataataaagataattatagttacatgtattgatttaagtctcacacactgtgctaataagtcctttgcacatattattggattctagagcaaccctaggatttgggtactattatttccatttgacagatgaaaaacctaatgcatagaaagataagtagaccagtcaaggtctacagctagtaaaatgctcagattgaaacctaaatcttttctcactcacttttaggttctatatgctattctccttacgtaacgttaaatagatcctttagtttgataggttcattagttttgcttaatcgttgcttccaatatgattcttattgtagtatttatattacaaagttggcatacagggtcaatatctaatttactgttgtgtttttcttaatatgttcaatgtatggtcatactttttaaatttgattttttaaatattataagtggtcatgaaattttaatgttaagtttgtacctaatagaaatatgtctatcacaaatctttattggtattattttatatacttttccagcttgataattttcacaatagaaagagaccaaatattttgtactatattttgtgacatagaagtaaatgacaactctaccttggaagatatgaagaaatcagtgtttttatgttcaaaaactattttaaatgtcataggcttgccaattgtgttaactatttagtacattggtagtttttaaatgactaatgctggagtgaaaatgtaaggcaaaatatttagtatattaacagtagatagtcattttcatgtaatcagaattgcatgttaagggttttaaaagctgtcataactcttaccttttatttctaccagtgatcaatcatttctctttacaaatttagggaggaaacaactgttcaaatgtataggggacagaaacctgacatttagagaacagaaattttaattgccaaattaaagcagctaggctgcccctgggcttaacaaaattcctatttttgaactagacccgaggtattttatcattattatttgataggtaccattaacctttgttttgtgattatcgacttttggggggaaagatgagtaattaaacacactcgcccattttctaagtggtttagaaggttgcagtctgcctcaccatacaaagccagtttaaataggaatatatcacatcatacttcacatagcagtcaacctcagaggaaagtcatttattcagaaggcatagattttgctagacagcagtgatgcattacaaatatataattatttgcactaatatttgagcaggtggaatggattagaacatggtcaacatcatgctgctgataacatgtatttttctatattaatatgtactgtgcaacatgtattaaaattgtcaataattcattttagccaagatactaatatttatattactgtgtttaagagacagtatccaactgagccacttttaatttaaaagtctgaaactggaattaagtttactttcaaaaatcacttaaattactttataatcagtgaaaggtcagtaaaatgtagaattataagtgcctagtgacttaataggaggaaatatggagggttaaggaaggaagtaggaacctggaataagaaagctaagtttcatttatagttccaatgagtgactttctttgttttcaccactgggaatcttaaatgaagaaagtgtcgtatcccttccagttatctttatgttaataaactaagtgaagtttggatagaactaacaaaggaattagtctccattggtggacttccagagttttgagattaaactttgagaggtgagaagccttcctgatgcccctgtaatcttaaattggcaggtgcctctaagtgaggccatccctctttgcctgcctatcattttaatctttatactgtaactggttcctttcaactctggccttttattgtagcacttttatcaagtctgcagcttcccagctacttgggaggctgaggtgggaagaacacttgaagctaggagttcaagaccactctgggcaacatagtgagtccctgtttttagaaaaataaataacctttaggtttttgctatagaaaatatccaaatagagtctggacaatgctggatgtaaagaaaactgtgaagctacctctaagcatattgtttgtgaatactgtgtaccatttagaggataacatgggggattcacatgaagttatgtgaaaatattttataaggaataatacctaagtgcctctcttaagttctccagtagaatgtattttcaatttttgccacaagggggagaagttatttttatagtaatatgtacatttttttattttaaaaatagaattcacacaactttacagcatctatgaacattttgctatcccaattatgtgtgtgtgtgcatgtgtgtaaacaagattctgaaagtcttgcatgagaaaaatttcaaaggaaattaataacaaaaccaaaacagttttgaagaacatgtgcacagtggacacaggaattgaacaaagtttaccatgattaacattatgttttcttagttatatatcacattgaattcctttatcaactctaataagaatctactgattagtgttctacattctgctttttaaagaaaaatttttgaaacaatcagacttaacagaagggttgtaaatactgtacaaataaaatttttcccttttgagaat

SEQ ID NO: 8285 - protein, 708 aa, Homo sapiens; identical to SEQ ID NO: 1204

SEQ ID NO: 8286 - DNA, 3237 bp, Homo sapiens
agattccaatggtattacatctttttgatactctgcatgctctttgcaatcttctggtagttgccccagataatttaaagcaagtctgctcaggagaacaacttgctaatctggacaagaatatacttcactccttcgtacaacttcgtgctgattatagatctgcccgccttgctcgacacttcagctgagattgaatttacaaaggaattcagtgtcagttcctttacagaggaatgtcttatacttcagcagccctcggttgatagaaagcacaggagataccttatgacacagccaacattttttctttaatataggctttttagcctatttttggaaaactgcttttcttctgagaaccttattctgaatgtcatcaactttaccaaaccttctaagtccagagctaacttagtactgtttaagttactattgactgaattttcttcattttctgtttagtccagtgttaccaaggtaagctggggaatgaagtataccaacttctttcagagcattttaggacattatggcagctttagaaggctgtcttgtttctagccaagggagagccagcgcaggttttggatactagagaaagtcatttgcttgtactattgccattttagaaagctctgatgtgaattcaaattttacctctgttacttaaagccaacaattttaaggcagtagttttactggccatttaagctctttgtacagtgtcaatttgtaaaaaagaaaaaacgaaaaaaaatctcaaataaaacatgagataacattttaagacttccaaatcagagaagtgcttcaaattattttgtttggattaatttttaaaatgtaaagcatatacttgttgcttagttattttgtttattattttcatgtttgagttctgtgcaatattttctattatgtccgttgataggacagtgacaaaattcgtaagtgaatacttaatttaaaagtgttaacattaatgctcaataaacaaattccctgcagttgttttttttatttcactctttttatattttagagccatccatcctgaattttataaatgattttttatttaaaaatttgagatttttaaaatttttcacagcacaggtcttctcattttcttttttagcaaaaaatacttgactatataaacaagactagaaatttatcctaaacagatggtctttctctgagggaaaaaaaaaaatgtgtcatgtgaggcaatatgcattctttgtattctgattttttaagtgttttcatatttatagccatcacaaaattttgcccaaagtgtatggctcagaagagatgatcaataactaaaatgtttttcgttttgcacatggtaaaattttaggtagagagtggagctttgtataattggtaactttaaccaacatttacgtaagtacggtctttgcagtattacacaataccgcatgagctaatatgcagtatttaggtaatgcattgaatgaagttgaaaatatgctcttaacacactgtgcattgtttttctaaaattgagaaatatctgaaatacagaatacgaatttaataaaggaagcctaccttatgtaaattatgatgttgaaaatgacagtcaaccagagtagatgaagtgtccttatgaagaattattaaatagtagctggatggatctttagatggatgaccacctgaccattccaggacaatttttggtcccattttgaggattgccatagttgcaagtccttaggatcttccttgttttaaaaaactatcaaagtaggttaaattaaaatctaatttaaattaggttaatttatattacattgtagatcattcttttttcccccctctttcacttctaaatattttgctttctaaatactagccttctggttcacagtgaaataatttaattatcaatcagtagattgattccaagtggagaattcactgcttccctaaaatgcgtttttcttacctgtaatggtgaatatttacaaggatctggataaagagattttgatttttgaaatgccacaaaaccccttaaagtggtcaagtacctaaggtagtggctaaggcatgcttgaactgtgtttgagagacagcagttcagtcagtacataatttgttggtgactaacaaagctcacatctgggagattaactttttttaacgcaaaaatattctgcacattacccatatattgttgaattttacatacaaagcattttgtgctttcattcaattagtttaactatattcagtttctgtattatttctctctgatctatcctgtaattattctatactttagaagaaaagatcagttcatattgttagactgaataattctacatgaagttaaaagttagcaatttaaaaaattttgctgcataataaagataattatagttacatgtattgatttaagtctcacacactgtgctaataagtcctttgcacatattattggattctagagcaaccctaggatttgggtactattatttccatttgacagatgaaaaacctaatgcatagaaagataagtagaccagtcaaggtctacagctagtaaaatgctcagattgaaacctaaatcttttctcactcacttttaggttctatatgctattctccttacgtaacgttaaatagatcctttagtttgataggttcattagttttgcttaatcgttgcttccaatatgattcttattgtagtatttatattacaaagttggcatacagggtcaatatctaatttactgttgtgtttttcttaatatgttcaatgtatggtcatactttttaaatttgattttttaaatattataagtggtcatgaaattttaatgttaagtttgtacctaatagaaatatgtctatcacaaatctttattggtattattttatatacttttccagcttgataattttcacaatagaaagagaccaaatattttgtactatattttgtgacatagaagtaaatgacaactctaccttggaagatatgaagaaatcagtgtttttatgttcaaaaactattttaaatgtcataggcttgccaattgtgttaactatttagtacattggtagtttttaaatgactaatgctggagtgaaaatgtaaggcaaaatatttagtatattaacagtagatagtcattttcatgtaatcagaattgcatgttaagggttttaaaagctgtcataactctt

SEQ ID NO: 8287 - protein, 69 aa, Homo sapiens
MSITNLYWYYFIYFSSLIIFTIERDQIFCTIFCDIEVNDNSTLEDMKKSVFLCSKTILNVIGLPIVLTI

SEQ ID NO: 8288 - DNA, 3026 bp, Homo sapiens
agattccaatggtattacatctttttgatactctgcatgctctttgcaatcttctggtagttgccccagataatttaaagcaagtctgctcaggagaacaacttgctaatctggacaagaatatacttcactccttcgtacaacttcgtgctgattatagatctgcccgccttgctcgacacttcagctgagattgaatttacaaaggaattcagtgtcagttcctttacagaggaatgtcttatacttcagcagccctcggttgatagaaagcacaggagataccttatgacacagccaacattttttctttaatataggctttttagcctatttttggaaaactgcttttcttctgagaaccttattctgaatgtcatcaactttaccaaaccttctaagtccagagctaacttagtactgtttaagttactattgactgaattttcttcattttctgtttagtccagtgttaccaaggtaagctggggaatgaagtataccaacttctttcagagcattttaggacattatggcagctttagaaggctgtcttgtttctagccaagggagagccagcgcaggttttggatactagagaaagtcatttgcttgtactattgccattttagaaagctctgatgtgaattcaaattttacctctgttacttaaagccaacaattttaaggcagtagttttactggccatttaagctctttgtacagtgtcaatttgtaaaaaagaaaaaacgaaaaaaaatctcaaataaaacatgagataacattttaagacttccaaatcagagaagtgcttcaaattattttgtttggattaatttttaaaatgtaaagcatatacttgttgcttagttattttgtttattattttcatgtttgagttctgtgcaatattttctattatgtccgttgataggacagtgacaaaattcgtaagtgaatacttaatttaaaagtgttaacattaatgctcaataaacaaattccctgcagttgttttttttatttcactctttttatattttagagccatccatcctgaattttataaatgattttttatttaaaaatttgagatttttaaaatttttcacagcacaggtcttctcattttcttttttagcaaaaaatacttgactatataaacaagactagaaatttatcctaaacagatggtctttctctgagggaaaaaaaaaaatgtgtcatgtgaggcaatatgcattctttgtattctgattttttaagtgttttcatatttatagccatcacaaaattttgcccaaagtgtatggctcagaagagatgatcaataactaaaatgtttttcgttttgcacatggtaaaattttaggtagagagtggagctttgtataattggtaactttaaccaacatttacgtaagtacggtctttgcagtattacacaataccgcatgagctaatatgcagtatttaggtaatgcattgaatgaagttgaaaatatgctcttaacacactgtgcattgtttttctaaaattgagaaatatctgaaatacagaatacgaatttaataaaggaagcctaccttatgtaaattatgatgttgaaaatgacagtcaaccagagtagatgaagtgtccttatgaagaattattaaatagtagctggatggatctttagatggatgaccacctgaccattccaggacaatttttggtcccattttgaggattgccatagttgcaagtccttaggatcttccttgttttaaaaaactatcaaagtaggttaaattaaaatctaatttaaattaggttaatttatattacattgtagatcattcttttttcccccctctttcacttctaaatattttgctttctaaatactagccttctggttcacagtgaaataatttaattatcaatcagtagattgattccaagtggagaattcactgcttccctaaaatgcgtttttcttacctgtaatggtgaatatttacaaggatctggataaagagattttgatttttgaaatgccacaaaaccccttaaagtggtcaagtacctaaggtagtggctaaggcatgcttgaactgtgtttgagagacagcagttcagtcagtacataatttgttggtgactaacaaagctcacatctgggagattaactttttttaacgcaaaaatattctgcacattacccatatattgttgaattttacatacaaagcattttgtgctttcattcaattagtttaactatattcagtttctgtattatttctctctgatctatcctgtaattattctatactttagaagaaaagatcagttcatattgttagactgaataattctacatgaagttaaaagttagcaatttaaaaaattttgctgcataataaagataattatagttacatgtattgatttaagtctcacacactgtgctaataagtcctttgcacatattattggattctagagcaaccctaggatttgggtactattatttccatttgacagatgaaaaacctaatgcatagaaagataagtagaccagtcaaggtctacagctagtaaaatgctcagattgaaacctaaatcttttctcactcacttttaggttctatatgctattctccttacgtaacgttaaatagatcctttagtttgataggttcattagttttgcttaatcgttgcttccaatatgattcttattgtagtatttatattacaaagttggcatacagggtcaatatctaatttactgttgtgtttttcttaatatgttcaatgtatggtcatactttttaaatttgattttttaaatattataagtggtcatgaaattttaatgttaagtttgtacctaatagaaatatgtctatcacaaatctttattggtattattttatatacttttccagcttgataattttcacaatagaaagagaccaaatattttgtactatattttgtgacatagaagtaaatgacaactctaccttggaag

SEQ ID NO: 8289 - protein, 60 aa, Homo sapiens
MVLHLFDTLHALCNLLVVAPDNLKQVCSGEQLANLDKNILHSFVQLRADYRSARLARHFS

SEQ ID NO: 8290 - DNA, 6419 bp, Homo sapiens
gcagttccacttccggcgtatgaggcggtgacaatgggagcagcgcgggcggcgccgggaggcagctgacaagcgtttgcggcttcgcttcatggccgctctcccgcccctcctgggatctgtggggagctggggagcccgcagcggcccggagccggagctggcgagccgagcggagacctgtgcgccgcgcctctgaggcgcagcatgtgaagcggagacggcatccagtggggggcgagcctctcagccggccgggatggctaccacggccgagctcttcgaggagccttttgtggcagatgaatatattgaacgtcttgtatggagaaccccaggaggaggctctagaggtggacctgaagcttttgatcctaaaagattattagaagaatttgtaaatcatattcaggaactccagataatggatgaaaggattcagaggaaagtagagaaactagagcaacaatgtcagaaagaagccaaggaatttgccaagaaggtacaagagctgcagaaaagcaatcaggttgccttccaacatttccaagaactagatgagcacattagctatgtagcaactaaagtctgtcaccttggagaccagttagagggggtaaacacacccagacaacgggcagtggaggctcagaaattgatgaaatactttaatgagtttctagatggagaattgaaatctgatgtttttacaaattctgaaaagataaaggaagcagcagacatcattcagaagttgcacctaattgcccaagagttaccttttgatagattttcagaagttaaatccaaaattgcaagtaaataccatgatttagaatgccagctgattcaggagtttaccagtgctcaaagaagaggtgaaatctccagaatgagagaagtagcagcagttttacttcattttaagggttattcccattgtgttgatgtttatataaagcagtgccaggagggtgcttatttgagaaatgatatatttgaagacgctggaatactctgtcaaagagtgaacaaacaagttggagatatcttcagtaatccagaaacagtcctggctaaacttattcaaaatgtatttgaaatcaaactacagagttttgtgaaagagcagttagaagaatgtaggaagtccgatgcagagcaatatctcaaaaatctctatgatctgtatacaagaaccaccaatctttccagcaagctgatggagtttaatttaggtactgataaacagactttcttgtctaagcttatcaaatccattttcatttcctatttggagaactatattgaggtggagactggatatttgaaaagcagaagtgctatgatcctacagcgctattatgattcgaaaaaccatcaaaagagatccattggcacaggaggtattcaagatttgaaggaaagaattagacagcgtaccaacttaccacttgggccaagtatcgatactcatggggagacttttctatcccaagaagtggtggttaatcttttacaagaaaccaaacaagcctttgaaagatgtcataggctctctgatccttctgacttaccaaggaatgccttcagaatttttaccattcttgtggaatttttatgtattgagcatattgattatgctttggaaacaggacttgctggaattccctcttcagattctaggaatgcaaatctttattttttggacgttgtgcaacaggccaatactatttttcatctttttgacaaacagtttaatgatcaccttatgccactaataagctcttctcctaagttatctgaatgccttcagaagaaaaaagaaataattgaacaaatggagatgaaattggatactggcattgataggacattaaattgtatgattggacagatgaagcatattttggctgcagaacagaagaaaacagattttaagccagaagatgaaaacaatgttttgattcaatatactaatgcctgtgtaaaagtctgtgcttacgtaagaaaacaagtggagaagattaaaaattccatggatgggaagaatgtggatacagttttgatggaacttggagtacgttttcatcgacttatctatgagcatcttcaacaatattcctacagttgtatgggtggcatgttggccatttgtgatgtagccgaatataggaagtgtgccaaagacttcaagattccaatggtattacatctttttgatactctgcatgctctttgcaatcttctggtagttgccccagataatttaaagcaagtctgctcaggagaacaacttgctaatctggacaagaatatacttcactccttcgtacaacttcgtgctgattatagatctgcccgccttgctcgacacttcagctgagattgaatttacaaaggaattcagtgtcagttcctttacagaggaatgtcttatacttcagcagccctcggttgatagaaagcacaggagataccttatgacacagccaacattttgtgaaacaatgactggaacaaaacagcagccatacttacctttgaggttttatttaaagtttggataccactagctatattttgcttttttcccctcacattgaattttaattccattcttgaatgtagaaatttcagattctctaaaactacatgtcactgtttttatcctagaaaatgttgctgtcagaaggcaaaggaaatgttaccagtgttttcggttcttgtacttttaacatattccatttagaaattttgccattctgttttccattaataataggtgaaatacaggaaaactacatttgttattcctcagtttttaatgaccttttcagcatcaattgttaatcagattattttaggttttcgtaaataatttttttgcctctttcaaaaggttaacaattaagcatactttctgcagttggttgattggatttttttctgaggtacagcattaatactagtccaaaaaatgtcataaactgaactaaaatgatgaactattttatgtagacattaggagtggatcggaatacttctgctttctgggtaaaacttaaaagtttactatttcttatttggtaaatagattttaagccaattctagtaagaaattaataaaactaccttattttgtatttcacttaaggtggaggaccttaactaaaggaccatatttattcattattttaatattataagggaagtaaaaaaaagtgaggtatagtctaaatggtgcatataggaaatactgacagtgtttagcaacatgcagccctttgagatttctgtcgtaatgctaaacttgaataagatggaatggctgaacatgtggttagtcttttattttaagaagaattgagaattgatagatttggagatgagctttgcaaaggctgtttgcttttcatgtctataggtctgtcattgtcctttttcaaagcatttctgaagttattcctacttggatatagttaatggaattggcttaatttgatgacataataaatcacttataaaattttaaatatcaagtgaaaatttagaaaggccattactattctataaaccttataaacttgctctgggagaatgcattctaaattatatatagtgtttcagctcccattgtggtgttcatagtcttctaggaacagataaacttaagtattcaattcactcttggcattttttctttaatataggctttttagcctatttttggaaaactgcttttcttctgagaaccttattctgaatgtcatcaactttaccaaaccttctaagtccagagctaacttagtactgtttaagttactattgactgaattttcttcattttctgtttagtccagtgttaccaaggtaagctggggaatgaagtataccaacttctttcagagcattttaggacattatggcagctttagaaggctgtcttgtttctagccaagggagagccagcgcaggttttggatactagagaaagtcatttgcttgtactattgccattttagaaagctctgatgtgaattcaaattttacctctgttacttaaagccaacaattttaaggcagtagttttactggccatttaagctctttgtacagtgtcaatttgtaaaaaagaaaaaacgaaaaaaaatctcaaataaaacatgagataacattttaagacttccaaatcagagaagtgcttcaaattattttgtttggattaatttttaaaatgtaaagcatatacttgttgcttagttattttgtttattattttcatgtttgagttctgtgcaatattttctattatgtccgttgataggacagtgacaaaattcgtaagtgaatacttaatttaaaagtgttaacattaatgctcaataaacaaattccctgcagttgttttttttatttcactctttttatattttagagccatccatcctgaattttataaatgattttttatttaaaaatttgagatttttaaaatttttcacagcacaggtcttctcattttcttttttagcaaaaaatacttgactatataaacaagactagaaatttatcctaaacagatggtctttctctgagggaaaaaaaaaaatgtgtcatgtgaggcaatatgcattctttgtattctgattttttaagtgttttcatatttatagccatcacaaaattttgcccaaagtgtatggctcagaagagatgatcaataactaaaatgtttttcgttttgcacatggtaaaattttaggtagagagtggagctttgtataattggtaactttaaccaacatttacgtaagtacggtctttgcagtattacacaataccgcatgagctaatatgcagtatttaggtaatgcattgaatgaagttgaaaatatgctcttaacacactgtgcattgtttttctaaaattgagaaatatctgaaatacagaatacgaatttaataaaggaagcctaccttatgtaaattatgatgttgaaaatgacagtcaaccagagtagatgaagtgtccttatgaagaattattaaatagtagctggatggatctttagatggatgaccacctgaccattccaggacaatttttggtcccattttgaggattgccatagttgcaagtccttaggatcttccttgttttaaaaaactatcaaagtaggttaaattaaaatctaatttaaattaggttaatttatattacattgtagatcattcttttttcccccctctttcacttctaaatattttgctttctaaatactagccttctggttcacagtgaaataatttaattatcaatcagtagattgattccaagtggagaattcactgcttccctaaaatgcgtttttcttacctgtaatggtgaatatttacaaggatctggataaagagattttgatttttgaaatgccacaaaaccccttaaagtggtcaagtacctaaggtagtggctaaggcatgcttgaactgtgtttgagagacagcagttcagtcagtacataatttgttggtgactaacaaagctcacatctgggagattaactttttttaacgcaaaaatattctgcacattacccatatattgttgaattttacatacaaagcattttgtgctttcattcaattagtttaactatattcagtttctgtattatttctctctgatctatcctgtaattattctatactttagaagaaaagatcagttcatattgttagactgaataattctacatgaagttaaaagttagcaatttaaaaaattttgctgcataataaagataattatagttacatgtattgatttaagtctcacacactgtgctaataagtcctttgcacatattattggattctagagcaaccctaggatttgggtactattatttccatttgacagatgaaaaacctaatgcatagaaagataagtagaccagtcaaggtctacagctagtaaaatgctcagattgaaacctaaatcttttctcactcacttttaggttctatatgctattctccttacgtaacgttaaatagatcctttagtttgataggttcattagttttgcttaatcgttgcttccaatatgattcttattgtagtatttatattacaaagttggcatacagggtcaatatctaatttactgttgtgtttttcttaatatgttcaatgtatggtcatactttttaaatttgattttttaaatattataagtggtcatgaaattttaatgttaagtttgtacctaatagaaatatgtctatcacaaatctttattggtattattttatatacttttccagcttgataattttcacaatagaaagagaccaaatattttgtactatattttgtgacatagaagtaaatgacaactctaccttggaag

SEQ ID NO: 8291 - protein, 708 aa, Homo sapiens; identical to SEQ ID NO: 1204

SEQ ID NO: 8292 - DNA, 1009 bp, Homo sapiens
agattccaatggtattacatctttttgatactctgcatgctctttgcaatcttctggtagttgccccagataatttaaagcaagtctgctcaggagaacaacttgctaatctggacaagaatatacttcactccttcgtacaacttcgtgctgattatagatctgcccgccttgctcgacacttcagctgagattgaatttacaaaggaattcagtgtcagttcctttacagaggaatgtcttatacttcagcagccctcggttgatagaaagcacaggagataccttatgacacagccaacattttttctttaatataggctttttagcctatttttggaaaactgcttttcttctgagaaccttattctgaatgtcatcaactttaccaaaccttctaagtccagagctaacttagtactgtttaagttactattgactgaattttcttcattttctgtttagtccagtgttaccaaggtaagctggggaatgaagtataccaacttctttcagagcattttaggacattatggcagctttagaaggctgtcttgtttctagccaagggagagccagcgcaggttttggatactagagaaagtcatttgcttgtactattgccattttagaaagctctgatgtgaattcaaattttacctctgttacttaaagccaacaattttaaggcagtagttttactggccatttaagctctttgtacagtgtcaatttgtaaaaaagaaaaaacgaaaaaaaatctcaaataaaacatgagataacattttaagacttccaaatcagagaagtgcttcaaattattttgtttggattaatttttaaaatgtaaagcatatacttgttgcttagttattttgtttattattttcatgtttgagttctgtgcaatattttctattatgtccgttgataggacagtgacaaaattcgtaagtgaatacttaatttaaaagtgttaacattaatgctcaataaacaaattccctgc

SEQ ID NO: 8293 - protein, 60 aa, Homo sapiens; identical to SEQ ID NO: 8289

SEQ ID NO: 8294 - DNA, 4402 bp, Homo sapiens
gcagttccacttccggcgtatgaggcggtgacaatgggagcagcgcgggcggcgccgggaggcagctgacaagcgtttgcggcttcgcttcatggccgctctcccgcccctcctgggatctgtggggagctggggagcccgcagcggcccggagccggagctggcgagccgagcggagacctgtgcgccgcgcctctgaggcgcagcatgtgaagcggagacggcatccagtggggggcgagcctctcagccggccgggatggctaccacggccgagctcttcgaggagccttttgtggcagatgaatatattgaacgtcttgtatggagaaccccaggaggaggctctagaggtggacctgaagcttttgatcctaaaagattattagaagaatttgtaaatcatattcaggaactccagataatggatgaaaggattcagaggaaagtagagaaactagagcaacaatgtcagaaagaagccaaggaatttgccaagaaggtacaagagctgcagaaaagcaatcaggttgccttccaacatttccaagaactagatgagcacattagctatgtagcaactaaagtctgtcaccttggagaccagttagagggggtaaacacacccagacaacgggcagtggaggctcagaaattgatgaaatactttaatgagtttctagatggagaattgaaatctgatgtttttacaaattctgaaaagataaaggaagcagcagacatcattcagaagttgcacctaattgcccaagagttaccttttgatagattttcagaagttaaatccaaaattgcaagtaaataccatgatttagaatgccagctgattcaggagtttaccagtgctcaaagaagaggtgaaatctccagaatgagagaagtagcagcagttttacttcattttaagggttattcccattgtgttgatgtttatataaagcagtgccaggagggtgcttatttgagaaatgatatatttgaagacgctggaatactctgtcaaagagtgaacaaacaagttggagatatcttcagtaatccagaaacagtcctggctaaacttattcaaaatgtatttgaaatcaaactacagagttttgtgaaagagcagttagaagaatgtaggaagtccgatgcagagcaatatctcaaaaatctctatgatctgtatacaagaaccaccaatctttccagcaagctgatggagtttaatttaggtactgataaacagactttcttgtctaagcttatcaaatccattttcatttcctatttggagaactatattgaggtggagactggatatttgaaaagcagaagtgctatgatcctacagcgctattatgattcgaaaaaccatcaaaagagatccattggcacaggaggtattcaagatttgaaggaaagaattagacagcgtaccaacttaccacttgggccaagtatcgatactcatggggagacttttctatcccaagaagtggtggttaatcttttacaagaaaccaaacaagcctttgaaagatgtcataggctctctgatccttctgacttaccaaggaatgccttcagaatttttaccattcttgtggaatttttatgtattgagcatattgattatgctttggaaacaggacttgctggaattccctcttcagattctaggaatgcaaatctttattttttggacgttgtgcaacaggccaatactatttttcatctttttgacaaacagtttaatgatcaccttatgccactaataagctcttctcctaagttatctgaatgccttcagaagaaaaaagaaataattgaacaaatggagatgaaattggatactggcattgataggacattaaattgtatgattggacagatgaagcatattttggctgcagaacagaagaaaacagattttaagccagaagatgaaaacaatgttttgattcaatatactaatgcctgtgtaaaagtctgtgcttacgtaagaaaacaagtggagaagattaaaaattccatggatgggaagaatgtggatacagttttgatggaacttggagtacgttttcatcgacttatctatgagcatcttcaacaatattcctacagttgtatgggtggcatgttggccatttgtgatgtagccgaatataggaagtgtgccaaagacttcaagattccaatggtattacatctttttgatactctgcatgctctttgcaatcttctggtagttgccccagataatttaaagcaagtctgctcaggagaacaacttgctaatctggacaagaatatacttcactccttcgtacaacttcgtgctgattatagatctgcccgccttgctcgacacttcagctgagattgaatttacaaaggaattcagtgtcagttcctttacagaggaatgtcttatacttcagcagccctcggttgatagaaagcacaggagataccttatgacacagccaacattttgtgaaacaatgactggaacaaaacagcagccatacttacctttgaggttttatttaaagtttggataccactagctatattttgcttttttcccctcacattgaattttaattccattcttgaatgtagaaatttcagattctctaaaactacatgtcactgtttttatcctagaaaatgttgctgtcagaaggcaaaggaaatgttaccagtgttttcggttcttgtacttttaacatattccatttagaaattttgccattctgttttccattaataataggtgaaatacaggaaaactacatttgttattcctcagtttttaatgaccttttcagcatcaattgttaatcagattattttaggttttcgtaaataatttttttgcctctttcaaaaggttaacaattaagcatactttctgcagttggttgattggatttttttctgaggtacagcattaatactagtccaaaaaatgtcataaactgaactaaaatgatgaactattttatgtagacattaggagtggatcggaatacttctgctttctgggtaaaacttaaaagtttactatttcttatttggtaaatagattttaagccaattctagtaagaaattaataaaactaccttattttgtatttcacttaaggtggaggaccttaactaaaggaccatatttattcattattttaatattataagggaagtaaaaaaaagtgaggtatagtctaaatggtgcatataggaaatactgacagtgtttagcaacatgcagccctttgagatttctgtcgtaatgctaaacttgaataagatggaatggctgaacatgtggttagtcttttattttaagaagaattgagaattgatagatttggagatgagctttgcaaaggctgtttgcttttcatgtctataggtctgtcattgtcctttttcaaagcatttctgaagttattcctacttggatatagttaatggaattggcttaatttgatgacataataaatcacttataaaattttaaatatcaagtgaaaatttagaaaggccattactattctataaaccttataaacttgctctgggagaatgcattctaaattatatatagtgtttcagctcccattgtggtgttcatagtcttctaggaacagataaacttaagtattcaattcactcttggcattttttctttaatataggctttttagcctatttttggaaaactgcttttcttctgagaaccttattctgaatgtcatcaactttaccaaaccttctaagtccagagctaacttagtactgtttaagttactattgactgaattttcttcattttctgtttagtccagtgttaccaaggtaagctggggaatgaagtataccaacttctttcagagcattttaggacattatggcagctttagaaggctgtcttgtttctagccaagggagagccagcgcaggttttggatactagagaaagtcatttgcttgtactattgccattttagaaagctctgatgtgaattcaaattttacctctgttacttaaagccaacaattttaaggcagtagttttactggccatttaagctctttgtacagtgtcaatttgtaaaaaagaaaaaacgaaaaaaaatctcaaataaaacatgagataacattttaagacttccaaatcagagaagtgcttcaaattattttgtttggattaatttttaaaatgtaaagcatatacttgttgcttagttattttgtttattattttcatgtttgagttctgtgcaatattttctattatgtccgttgataggacagtgacaaaattcgtaagtgaatacttaatttaaaagtgttaacattaatgctcaataaacaaattccctgc

SEQ ID NO: 8295 - protein, 708 aa, Homo sapiens; identical to SEQ ID NO: 1204

SEQ ID NO: 8296 - DNA, 815 bp, Homo sapiens
agattccaatggtattacatctttttgatactctgcatgctctttgcaatcttctggtagttgccccagataatttaaagcaagtctgctcaggagaacaacttgctaatctggacaagaatatacttcactccttcgtacaacttcgtgctgattatagatctgcccgccttgctcgacacttcagctgagattgaatttacaaaggaattcagtgtcagttcctttacagaggaatgtcttatacttcagcagccctcggttgatagaaagcacaggagataccttatgacacagccaacattttttctttaatataggctttttagcctatttttggaaaactgcttttcttctgagaaccttattctgaatgtcatcaactttaccaaaccttctaagtccagagctaacttagtactgtttaagttactattgactgaattttcttcattttctgtttagtccagtgttaccaaggtaagctggggaatgaagtataccaacttctttcagagcattttaggacattatggcagctttagaaggctgtcttgtttctagccaagggagagccagcgcaggttttggatactagagaaagtcatttgcttgtactattgccattttagaaagctctgatgtgaattcaaattttacctctgttacttaaagccaacaattttaaggcagtagttttactggccatttaagctctttgtacagtgtcaatttgtaaaaaagaaaaaacgaaaaaaaatctcaaataaaacatgagataacattttaagacttccaaatcagagaagtgcttc

SEQ ID NO: 8297 - protein, 60 aa, Homo sapiens; identical to SEQ ID NO: 8289

SEQ ID NO: 8298 - DNA, 3668 bp, Homo sapiens
caaatgacaatttcagctctaaatcttctgtaggaatttgtcttgtgcttttgtaaatgtcagtgttactcttagagattgtctcagaagcttcatatggagtcttgtggggttttttttttccttgacttttcccaaccctattactcttcttcagtgtcttcattttgggagaaggtttttccaaagttaccgtaatgaggaagtccatctcaacaacaacactgttatgaccctatcttcagcaatgggaaatagaaaattagagggaaagtccacaaggacaaaacaaaagagggtgaacagacagtagatctttcagtactctgttttgggtcccatgtgatgaatggcattagacatacttgaggccaatctgccactgtcgccatttctggactagttaattgcctcacaagttcttttcctaggaatttataacagttctcaaaaccgtaaagttgttcgtaatatttcactgtatttatatgtaaccctgtagagttgatctctgcatcataagtactctcccagagtttaagaaatggtggcttaacataagtcatgaaagtcacgttgtaaaaatttgtattccttaatattgttactatacctaaaatgtatattaatctttttctccccctttttcatgaaaagaaccaccaatctttccagcaagctgatggagtttaatttaggtactgataaacagactttcttgtctaagcttatcaaatccattttcatttcctatttggagaactatattgaggtggagactggatatttgaaaagcagaagtgctatgatcctacagcgctattatgattcgaaaaaccatcaaaagagatccattggcacaggaggtattcaagatttgaaggaaagaattagacagcgtaccaacttaccacttgggccaagtatcgatactcatggggagacttttctatcccaagaagtggtggttaatcttttacaagaaaccaaacaagcctttgaaagatgtcataggctctctgatccttctgacttaccaaggaatgccttcagaatttttaccattcttgtggaatttttatgtattgagcatattgattatgctttggaaacaggacttgctggaattccctcttcagattctaggaatgcaaatctttattttttggacgttgtgcaacaggccaatactatttttcatctttttgacaaacagtttaatgatcaccttatgccactaataagctcttctcctaagttatctgaatgccttcagaagaaaaaagaaataattgaacaaatggagatgaaattggatactggcattgataggacattaaattgtatgattggacagatgaagcatattttggctgcagaacagaagaaaacagattttaagccagaagatgaaaacaatgttttgattcaatatactaatgcctgtgtaaaagtctgtgcttacgtaagaaaacaagtggagaagattaaaaattccatggatgggaagaatgtggatacagttttgatggaacttggagtacgttttcatcgacttatctatgagcatcttcaacaatattcctacagttgtatgggtggcatgttggccatttgtgatgtagccgaatataggaagtgtgccaaagacttcaagattccaatggtattacatctttttgatactctgcatgctctttgcaatcttctggtagttgccccagataatttaaagcaagtctgctcaggagaacaacttgctaatctggacaagaatatacttcactccttcgtacaacttcgtgctgattatagatctgcccgccttgctcgacacttcagctgagattgaatttacaaaggaattcagtgtcagttcctttacagaggaatgtcttatacttcagcagccctcggttgatagaaagcacaggagataccttatgacacagccaacattttgtgaaacaatgactggaacaaaacagcagccatacttacctttgaggttttatttaaagtttggataccactagctatattttgcttttttcccctcacattgaattttaattccattcttgaatgtagaaatttcagattctctaaaactacatgtcactgtttttatcctagaaaatgttgctgtcagaaggcaaaggaaatgttaccagtgttttcggttcttgtacttttaacatattccatttagaaattttgccattctgttttccattaataataggtgaaatacaggaaaactacatttgttattcctcagtttttaatgaccttttcagcatcaattgttaatcagattattttaggttttcgtaaataatttttttgcctctttcaaaaggttaacaattaagcatactttctgcagttggttgattggatttttttctgaggtacagcattaatactagtccaaaaaatgtcataaactgaactaaaatgatgaactattttatgtagacattaggagtggatcggaatacttctgctttctgggtaaaacttaaaagtttactatttcttatttggtaaatagattttaagccaattctagtaagaaattaataaaactaccttattttgtatttcacttaaggtggaggaccttaactaaaggaccatatttattcattattttaatattataagggaagtaaaaaaaagtgaggtatagtctaaatggtgcatataggaaatactgacagtgtttagcaacatgcagccctttgagatttctgtcgtaatgctaaacttgaataagatggaatggctgaacatgtggttagtcttttattttaagaagaattgagaattgatagatttggagatgagctttgcaaaggctgtttgcttttcatgtctataggtctgtcattgtcctttttcaaagcatttctgaagttattcctacttggatatagttaatggaattggcttaatttgatgacataataaatcacttataaaattttaaatatcaagtgaaaatttagaaaggccattactattctataaaccttataaacttgctctgggagaatgcattctaaattatatatagtgtttcagctcccattgtggtgttcatagtcttctaggaacagataaacttaagtattcaattcactcttggcattttttctttaatataggctttttagcctatttttggaaaactgcttttcttctgagaaccttattctgaatgtcatcaactttaccaaaccttctaagtccagagctaacttagtactgtttaagttactattgactgaattttcttcattttctgtttagtccagtgttaccaaggtaagctggggaatgaagtataccaacttctttcagagcattttaggacattatggcagctttagaaggctgtcttgtttctagccaagggagagccagcgcaggttttggatactagagaaagtcatttgcttgtactattgccattttagaaagctctgatgtgaattcaaattttacctctgttacttaaagccaacaattttaaggcagtagttttactggccatttaagctctttgtacagtgtcaatttgtaaaaaagaaaaaacgaaaaaaaatctcaaataaaacatgagataacattttaagacttccaaatcagagaagtgcttc

SEQ ID NO: 8299 - protein, 398 aa, Homo sapiens [sequence omitted]

SEQ ID NO: 8300 - DNA, 4208 bp, Homo sapiens
gcagttccacttccggcgtatgaggcggtgacaatgggagcagcgcgggcggcgccgggaggcagctgacaagcgtttgcggcttcgcttcatggccgctctcccgcccctcctgggatctgtggggagctggggagcccgcagcggcccggagccggagctggcgagccgagcggagacctgtgcgccgcgcctctgaggcgcagcatgtgaagcggagacggcatccagtggggggcgagcctctcagccggccgggatggctaccacggccgagctcttcgaggagccttttgtggcagatgaatatattgaacgtcttgtatggagaaccccaggaggaggctctagaggtggacctgaagcttttgatcctaaaagattattagaagaatttgtaaatcatattcaggaactccagataatggatgaaaggattcagaggaaagtagagaaactagagcaacaatgtcagaaagaagccaaggaatttgccaagaaggtacaagagctgcagaaaagcaatcaggttgccttccaacatttccaagaactagatgagcacattagctatgtagcaactaaagtctgtcaccttggagaccagttagagggggtaaacacacccagacaacgggcagtggaggctcagaaattgatgaaatactttaatgagtttctagatggagaattgaaatctgatgtttttacaaattctgaaaagataaaggaagcagcagacatcattcagaagttgcacctaattgcccaagagttaccttttgatagattttcagaagttaaatccaaaattgcaagtaaataccatgatttagaatgccagctgattcaggagtttaccagtgctcaaagaagaggtgaaatctccagaatgagagaagtagcagcagttttacttcattttaagggttattcccattgtgttgatgtttatataaagcagtgccaggagggtgcttatttgagaaatgatatatttgaagacgctggaatactctgtcaaagagtgaacaaacaagttggagatatcttcagtaatccagaaacagtcctggctaaacttattcaaaatgtatttgaaatcaaactacagagttttgtgaaagagcagttagaagaatgtaggaagtccgatgcagagcaatatctcaaaaatctctatgatctgtatacaagaaccaccaatctttccagcaagctgatggagtttaatttaggtactgataaacagactttcttgtctaagcttatcaaatccattttcatttcctatttggagaactatattgaggtggagactggatatttgaaaagcagaagtgctatgatcctacagcgctattatgattcgaaaaaccatcaaaagagatccattggcacaggaggtattcaagatttgaaggaaagaattagacagcgtaccaacttaccacttgggccaagtatcgatactcatggggagacttttctatcccaagaagtggtggttaatcttttacaagaaaccaaacaagcctttgaaagatgtcataggctctctgatccttctgacttaccaaggaatgccttcagaatttttaccattcttgtggaatttttatgtattgagcatattgattatgctttggaaacaggacttgctggaattccctcttcagattctaggaatgcaaatctttattttttggacgttgtgcaacaggccaatactatttttcatctttttgacaaacagtttaatgatcaccttatgccactaataagctcttctcctaagttatctgaatgccttcagaagaaaaaagaaataattgaacaaatggagatgaaattggatactggcattgataggacattaaattgtatgattggacagatgaagcatattttggctgcagaacagaagaaaacagattttaagccagaagatgaaaacaatgttttgattcaatatactaatgcctgtgtaaaagtctgtgcttacgtaagaaaacaagtggagaagattaaaaattccatggatgggaagaatgtggatacagttttgatggaacttggagtacgttttcatcgacttatctatgagcatcttcaacaatattcctacagttgtatgggtggcatgttggccatttgtgatgtagccgaatataggaagtgtgccaaagacttcaagattccaatggtattacatctttttgatactctgcatgctctttgcaatcttctggtagttgccccagataatttaaagcaagtctgctcaggagaacaacttgctaatctggacaagaatatacttcactccttcgtacaacttcgtgctgattatagatctgcccgccttgctcgacacttcagctgagattgaatttacaaaggaattcagtgtcagttcctttacagaggaatgtcttatacttcagcagccctcggttgatagaaagcacaggagataccttatgacacagccaacattttgtgaaacaatgactggaacaaaacagcagccatacttacctttgaggttttatttaaagtttggataccactagctatattttgcttttttcccctcacattgaattttaattccattcttgaatgtagaaatttcagattctctaaaactacatgtcactgtttttatcctagaaaatgttgctgtcagaaggcaaaggaaatgttaccagtgttttcggttcttgtacttttaacatattccatttagaaattttgccattctgttttccattaataataggtgaaatacaggaaaactacatttgttattcctcagtttttaatgaccttttcagcatcaattgttaatcagattattttaggttttcgtaaataatttttttgcctctttcaaaaggttaacaattaagcatactttctgcagttggttgattggatttttttctgaggtacagcattaatactagtccaaaaaatgtcataaactgaactaaaatgatgaactattttatgtagacattaggagtggatcggaatacttctgctttctgggtaaaacttaaaagtttactatttcttatttggtaaatagattttaagccaattctagtaagaaattaataaaactaccttattttgtatttcacttaaggtggaggaccttaactaaaggaccatatttattcattattttaatattataagggaagtaaaaaaaagtgaggtatagtctaaatggtgcatataggaaatactgacagtgtttagcaacatgcagccctttgagatttctgtcgtaatgctaaacttgaataagatggaatggctgaacatgtggttagtcttttattttaagaagaattgagaattgatagatttggagatgagctttgcaaaggctgtttgcttttcatgtctataggtctgtcattgtcctttttcaaagcatttctgaagttattcctacttggatatagttaatggaattggcttaatttgatgacataataaatcacttataaaattttaaatatcaagtgaaaatttagaaaggccattactattctataaaccttataaacttgctctgggagaatgcattctaaattatatatagtgtttcagctcccattgtggtgttcatagtcttctaggaacagataaacttaagtattcaattcactcttggcattttttctttaatataggctttttagcctatttttggaaaactgcttttcttctgagaaccttattctgaatgtcatcaactttaccaaaccttctaagtccagagctaacttagtactgtttaagttactattgactgaattttcttcattttctgtttagtccagtgttaccaaggtaagctggggaatgaagtataccaacttctttcagagcattttaggacattatggcagctttagaaggctgtcttgtttctagccaagggagagccagcgcaggttttggatactagagaaagtcatttgcttgtactattgccattttagaaagctctgatgtgaattcaaattttacctctgttacttaaagccaacaattttaaggcagtagttttactggccatttaagctctttgtacagtgtcaatttgtaaaaaagaaaaaacgaaaaaaaatctcaaataaaacatgagataacattttaagacttccaaatcagagaagtgcttc

SEQ ID NO: 8301 - protein, 708 aa, Homo sapiens; identical to SEQ ID NO: 1204

SEQ ID NO: 8302 - DNA, 628 bp, Homo sapiens
gatagtattgtcattctctagaagtggggatgtaatgtacagcatttcacacatttactgtctaagaaaccctgttttggagtaatgcctatagacatctgaaggaacactagtgttacctggaactcagtttgggagatgctgccttaaggaattgactctattgtttgtactctcagttttgtttttttgatgcacctcacagagcagaataggccaatttaacagaaaaggtattattcctaagactgataaagatcctctacaggtaaatatgagaagtggtaaaatgtaaaaacctgttttaaaatattttatgattggtttgttttctgtaattgcctttttgattggattgtaagtcagaaaggttcaaaactgtggagtgaattttaaaagaaaaatatcttgagaagttgtagaatttaatatttacctaattaacagaatgttaacctttttcttttagagttttgtgaaagagcagttagaagaatgtaggaagtccgatgcagagcaatatctcaaaaatctctatgatctgtatacaagtgtcttcattttgggagaaggtttttccaaagttaccgtaatgaggaagtccatctcaacaacaacactgttatga

SEQ ID NO: 8303 - protein, 35 aa, Homo sapiens
NVKTCFKIFYDWFVFCNCLFDWIVSQKGSKLWSEF

SEQ ID NO: 8304 - DNA, 1207 bp, Homo sapiens
agttccacttccggcgtatgaggcggtgacaatgggagcagcgcgggcggcgccgggaggcagctgacaagcgtttgcggcttcgcttcatggccgctctcccgcccctcctgggatctgtggggagctggggagcccgcagcggcccggagccggagctggcgagccgagcggagacctgtgcgccgcgcctctgaggcgcagcatgtgaagcggagacggcatccagtggggggcgagcctctcagccggccgggatggctaccacggccgagctcttcgaggagccttttgtggcagatgaatatattgaacgtcttgtatggagaaccccaggaggaggctctagaggtggacctgaagcttttgatcctaaaagattattagaagaatttgtaaatcatattcaggaactccagataatggatgaaaggattcagaggaaagtagagaaactagagcaacaatgtcagaaagaagccaaggaatttgccaagaaggtacaagagctgcagaaaagcaatcaggttgccttccaacatttccaagaactagatgagcacattagctatgtagcaactaaagtctgtcaccttggagaccagttagagggggtaaacacacccagacaacgggcagtggaggctcagaaattgatgaaatactttaatgagtttctagatggagaattgaaatctgatgtttttacaaattctgaaaaggtaagtgctgtcagaggataaaaccaaatcacagcattaataacagtgccctaattatgagctgcaataattgctttccagagttagacttcaaatcactgagtagctgacttattaaaagtttttattgttctgaaatgtaaactaatacagtttcttgtagattgctgatgaagtgttaatattgagatgtttaattgggtttcctggcatttttttaatgaaattttttgtggcttaaaaatgctgtggtagctgtgttcataaatatctctttaccatagatttctttcaatattaacagaatttctatagtttttaaatagtgacagtccattgggtggtggtggggtggtctgacctaaatcattgataagctgagatgcttttctgtaaagcaataaggaattcagaacttctggtttttattacttgaataaagatctcttataaagaattaaagcagtttggaccaaggagagctg

SEQ ID NO: 8305 - protein, 161 aa, Homo sapiens
MATTAELFEEPFVADEYIERLVWRTPGGGSRGGPEAFDPKRLLEEFVNHIQELQIMDERIQRKVEKLEQQCQKEAKEFAKKVQELQKSNQVAFQHFQELDEHISYVATKVCHLGDQLEGVNTPRQRAVEAQKLMKYFNEFLDGELKSDVFTNSEKVSAVRG

SEQ ID NO: 8306 - DNA, 793 bp, Homo sapiens
atttcacgctccgcccgcgctgacacggagctgccaccccaacccttctgtttcgcacctctctcccgagggctcctcctgggcagccagcaaacgcccgctcctcggcccgcccacccagctgcctgcaaaccccgggcctgccactccctgtagagccgccggggcccacctcgaagagctcggccgtggtagccatcccggccggctgagaggctcgccccccactggatgccgtctccgcttcacatgctgcgcctcagaggcgcggcgcacaggtctccgctcggctcgccagctccggctccgggccgctgcgggctccccagctccccacagatcccaggaggggcgggagagcggccatgaagcgaagccgcaaacgcttgtcagctgcctcccggcgccgcccgcgctgctcccattgtcaccgcctcatacgccggaagtggaactgcgcgcgccagggaggttgtcgggaggggccggcgaataaaacgagcggcgaaagaaccgaaaaaaggctcgacgctaccgtgtatgaggaactttgatccttgcgggccaccattccggaagtagaatttagaggaagaaaataccggagttgcagggtataggtaaatttctcaaggttataggttggggttcttagaactttttgtggcaccgtgagattctccagacggtatccaactgttgaaaaacgagccagagtcttcaatggagcaagttatgtgcctgttcctgaagatggtccctttcttaaagcactgctctttgaacttagatt

SEQ ID NO: 8307 - protein, 62 aa, Homo sapiens
MKRSRKRLSAASRRRPRCSHCHRLIRRKWNCARQGGCREGPANKTSGERTEKRLDATVYEEL

SEQ ID NO: 8308 - DNA, 2152 bp, Homo sapiens
atttcacgctccgcccgcgctgacacggagctgccaccccaacccttctgtttcgcacctctctcccgagggctcctcctgggcagccagcaaacgcccgctcctcggcccgcccacccagctgcctgcaaaccccgggcctgccactccctgtagagccgccggggcccacctcgaagagctcggccgtggtagccatcccggccggctgagaggctcgccccccactggatgccgtctccgcttcacatgctgcgcctcagaggcgcggcgcacaggtctccgctcggctcgccagctccggctccgggccgctgcgggctccccagctccccacagatcccaggaggggcgggagagcggccatgaagcgaagccgcaaacgcttgtcagctgcctcccggcgccgcccgcgctgctcccattgtcaccgcctcatacgccggaagtggaactgcgcgcgccagggaggttgtcgggaggggccggcgaataaaacgagcggcgaaagaaccgaaaaaaggctcgacgctaccgtgtatgaggaactttgatccttgcgggccaccattccggaagtagaatttagaggaagaaaataccggagttgcagggtataggtaaatttctcaaggttataggttggggttcttagaactttttgtggtgtgtgttggcctagagcgactcagaagcgttagtgacttcacctaaaaaagctaacctctctgctgagcgcgaccggtatgcggcgcaggatgagcctcagggcttctgttaagagtctgtctgagaaagccggtctgcgctgttcctcggtggcgaccttaattatgagatgagctaatgctttactgacttaaccatggcgcagcgggcagtgtggctcataagccacgaaccgggaactccactttgtggcaccgtgagattctccagacggtatccaactgttgaaaaacgagccagagtcttcaatggagcaagttatgtgcctgttcctgaagatggtccctttcttaaagcactgctctttgaacttagattattggatgatgataaagacttcgttgagagtcgtgatagctgttcacgcatcaataaaacatccatttatggactcctgataggaggtgaagaactctggccagttgttgcttttctgaagaatgacatgatatatgcttgtgttccactagttgaacaaactctgtcccctcgtccgccactaattagtgtcagtggagtttcacaaggctttgaatttctttttgggatacaggattttctttattcaggtcaaaaaaatgactctgagctgaatacaaaattgagccagttgcctgacttgcttctgcaggcttgtccatttggtactttattagatgccaacttacagaattcattagataataccaattttgcatctgtgactcagccacagaaacagccagcttggaaaactgggacgtacaaaggaaaaccacaagtttctatttctatcactgaaaaggtaaaatccatgcaatatgataaacagggtatagcagatacatggcaagttgttggaacagtgacttgcaaggtgagatttttctctggtacttgctttatcgttttatttaacatatggagaaaagttaaatttgctagttgtattttaaataacattttttattttcatcttaagcagcagtttttaaatgggagagtcatgtaaaattttatgttatctttttgcattccttaccaattatattagttatctgtggctgtgtaaagaattgtctcattgtccccaaaatagacatttattattttcatagtttctgtagggattagcttagctgggaactttcagggtagaatcactcatgaagttgcagtcaagttttcagttgaggctatagtcatctgaaggtctgactgaggctggaagatctgcttgcaagatgactcactcacatggctaacaagttggtcctagttattggaggaaggccttagttcctttccacatggacttctcaactggctgcttaagtgtcctcacacttggtgactggcttccctcagaccagatgatgagagaggggtgggggggggagagagagaggagagagagagagagagaagagagaagagagagaag

SEQ ID NO: 8309 - protein, 284 aa, Homo sapiens
MAQRAVWLISHEPGTPLCGTVRFSRRYPTVEKRARVFNGASYVPVPEDGPFLKALLFELRLLDDDKDFVESRDSCSRINKTSIYGLLIGGEELWPVVAFLKNDMIYACVPLVEQTLSPRPPLISVSGVSQGFEFLFGIQDFLYSGQKNDSELNTKLSQLPDLLLQACPFGTLLDANLQNSLDNTNFASVTQPQKQPAWKTGTYKGKPQVSISITEKVKSMQYDKQGIADTWQVVGTVTCKVRFFSGTCFIVLFNIWRKVKFASCILNNIFYFHLKQQFLNGRVM

SEQ ID NO: 8310 - DNA, 2987 bp, Homo sapiens
atttcacgctccgcccgcgctgacacggagctgccaccccaacccttctgtttcgcacctctctcccgagggctcctcctgggcagccagcaaacgcccgctcctcggcccgcccacccagctgcctgcaaaccccgggcctgccactccctgtagagccgccggggcccacctcgaagagctcggccgtggtagccatcccggccggctgagaggctcgccccccactggatgccgtctccgcttcacatgctgcgcctcagaggcgcggcgcacaggtctccgctcggctcgccagctccggctccgggccgctgcgggctccccagctccccacagatcccaggaggggcgggagagcggccatgaagcgaagccgcaaacgcttgtcagctgcctcccggcgccgcccgcgctgctcccattgtcaccgcctcatacgccggaagtggaactgcgcgcgccagggaggttgtcgggaggggccggcgaataaaacgagcggcgaaagaaccgaaaaaaggctcgacgctaccgtgtatgaggaactttgatccttgcgggccaccattccggaagtagaatttagaggaagaaaataccggagttgcagggtataggtaaatttctcaaggttataggttggggttcttagaactttttgtggtgtgtgttggcctagagcgactcagaagcgttagtgacttcacctaaaaaagctaacctctctgctgagcgcgaccggtatgcggcgcaggatgagcctcagggcttctgttaagagtctgtctgagaaagccggtctgcgctgttcctcggtggcgaccttaattatgagatgagctaatgctttactgacttaaccatggcgcagcgggcagtgtggctcataagccacgaaccgggaactccactttgtggcaccgtgagattctccagacggtatccaactgttgaaaaacgagccagagtcttcaatggagcaagttatgtgcctgttcctgaagatggtccctttcttaaagcactgctctttgaacttagattattggatgatgataaagacttcgttgagagtcgtgatagctgttcacgcatcaataaaacatccatttatggactcctgataggaggtgaagaactctggccagttgttgcttttctgaagaatgacatgatatatgcttgtgttccactagttgaacaaactctgtcccctcgtccgccactaattagtgtcagtggagtttcacaaggctttgaatttctttttgggatacaggattttctttattcaggtcaaaaaaatgactctgagctgaatacaaaattgagccagttgcctgacttgcttctgcaggcttgtccatttggtactttattagatgccaacttacagaattcattagataataccaattttgcatctgtgactcagccacagaaacagccagcttggaaaactgggacgtacaaaggaaaaccacaagtttctatttctatcactgaaaaggtaaaatccatgcaatatgataaacagggtatagcagatacatggcaagttgttggaacagtgacttgcaaggtgagatttttctctggtacttgctttatcgttttatttaacatatggagaaaagttaaatttgctagttgtattttaaataacattttttattttcatcttaagcagcagtttttaaatgggagagtcatgtaaaattttatgttatctttttgcattccttaccaattatattagttatctgtggctgtgtaaagaattgtctcattgtccccaaaatagacatttattattttcatagtttctgtagggattagcttagctgggaactttcagggtagaatcactcatgaagttgcagtcaagttttcagttgaggctatagtcatctgaaggtctgactgaggctggaagatctgcttgcaagatgactcactcacatggctaacaagttggtcctagttattggaggaaggccttagttcctttccacatggacttctcaactggctgcttaagtgtcctcacacttggtgactggcttccctcagaccagatgatgagagaggggtgggggggggagagagagaggagagagagagagagagaagagagaagagagagaagagagaagagaaaagagagaggagagagacaggcaggcaggcaggcagaagcgattatttttattacctagctgggaggttacacttccactactttctgttcattagaagcaagtcactaagtggtccatattcaaggggcgtggaataaggctccacctatgaaaagagtaatgtcaaataacttcagaacatattttaaagtcaccactgctgttttccattttctttagagggatgaaattgacatctctgacatatctaaaatcatgttgaagggctcttatttaaacaagtcgttaggttaatattgggttctctgtagaaatagaaaacaggaaaacacaacgtaaataacaatacagttagcagtgattaatgccatgttgaataatgatcaaaaataaaatcctccaggtaaacttcctacaagtttatattaatagtattctcatttctttatttttctatcttcctttattccctgcagttacgtatactttttatatgtcaaatttaatgttgtgtggctatgtataaatattatagaataaaactagagttcaagagcagagaattagaacagtcctgacagaaaaattgggtctgtcttttttttttaatcctgtttaacgttaaagttacctaaaagtttttgtgtctattttaaactcatatctatcatggtcaaaaatatactccagttactcactttattagaaataactattgtaaatggctccaaaattgaggtgttcatggattatgtcattcttaagttttaaagtagttaaatcttttttctcctaagttcaatgaaatgaaaatagaaaaat

SEQ ID NO: 8311 - protein, 284 aa, Homo sapiens; identical to SEQ ID NO: 8309

SEQ ID NO: 8312 - DNA, 3532 bp, Homo sapiens
atttcacgctccgcccgcgctgacacggagctgccaccccaacccttctgtttcgcacctctctcccgagggctcctcctgggcagccagcaaacgcccgctcctcggcccgcccacccagctgcctgcaaaccccgggcctgccactccctgtagagccgccggggcccacctcgaagagctcggccgtggtagccatcccggccggctgagaggctcgccccccactggatgccgtctccgcttcacatgctgcgcctcagaggcgcggcgcacaggtctccgctcggctcgccagctccggctccgggccgctgcgggctccccagctccccacagatcccaggaggggcgggagagcggccatgaagcgaagccgcaaacgcttgtcagctgcctcccggcgccgcccgcgctgctcccattgtcaccgcctcatacgccggaagtggaactgcgcgcgccagggaggttgtcgggaggggccggcgaataaaacgagcggcgaaagaaccgaaaaaaggctcgacgctaccgtgtatgaggaactttgatccttgcgggccaccattccggaagtagaatttagaggaagaaaataccggagttgcagggtataggtaaatttctcaaggttataggttggggttcttagaactttttgtggtgtgtgttggcctagagcgactcagaagcgttagtgacttcacctaaaaaagctaacctctctgctgagcgcgaccggtatgcggcgcaggatgagcctcagggcttctgttaagagtctgtctgagaaagccggtctgcgctgttcctcggtggcgaccttaattatgagatgagctaatgctttactgacttaaccatggcgcagcgggcagtgtggctcataagccacgaaccgggaactccactttgtggcaccgtgagattctccagacggtatccaactgttgaaaaacgagccagagtcttcaatggagcaagttatgtgcctgttcctgaagatggtccctttcttaaagcactgctctttgaacttagattattggatgatgataaagacttcgttgagagtcgtgatagctgttcacgcatcaataaaacatccatttatggactcctgataggaggtgaagaactctggccagttgttgcttttctgaagaatgacatgatatatgcttgtgttccactagttgaacaaactctgtcccctcgtccgccactaattagtgtcagtggagtttcacaaggctttgaatttctttttgggatacaggattttctttattcaggtcaaaaaaatgactctgagctgaatacaaaattgagccagttgcctgacttgcttctgcaggcttgtccatttggtactttattagatgccaacttacagaattcattagataataccaattttgcatctgtgactcagccacagaaacagccagcttggaaaactgggacgtacaaaggaaaaccacaagtttctatttctatcactgaaaaggtaaaatccatgcaatatgataaacagggtatagcagatacatggcaagttgttggaacagtgacttgcaagtgtgatttggaaggaatcatgccaaatgttaccatcagcttgagtctccccaccaatggatctccacttcaggatattctagttcacccttgtgtaacttctcttgactctgcaattctgacttctagtagtattgatgcaatggatgactctgcatttagtgggccttacaaatttccattcactccacctttagagtcattcaacttatgcttctacacttcccaggtccctgtcccaccaattttgggtttttatcaaatgaaggaggaagaagtacaactaagaataaccattaatttaaaacttcatgaaagtgtgaaaaataattttgaattctgtgaagcccatatacctttttacaatagaggtccaattacacatttggaatacaaaactagttttggccagcttgaagtatttcgagagaaaagcttattgatctggattattggccagaagttcccaaaatcaatggaaattagtctttctggaactgtaacttttggagccaagagccatgagaagcagccatttgacccaatttgtactggagaaacagcatatttaaagcttcattttaggatcttagattacacacttactggatgttatgcagatcagcattcagttcaagtttttgcatcaggaaaaccaaaaataagtgcacaccggaaactaatttcttctgattattacatctggaattctaaagcccctgctccagtaacatatggatcattattattgtaatagtctcatgtttaaatgggattatataatgataacagtttaaagaaaatcataatcttatatttttaatgtggatgcatataacctgtgagtgaaaaatcactgaatgatttaattgtaaaagtagtcttatgtggtgtttgtagtctgatagagcttgaaaggacattttaaaagctaatgtctccaattttgttaaccttcgattttatgccagtataattcagaacatagaaaagtaatgattcacttgggctcattttagactggtcctgggtcaccctgccacacttgtttcctagtgtttctgtggcagacattgctaatcaattacagcccttttctgtactgagccttggataaagggtcaggctcctttttagttcagagattcaggcagccactcccagtgggttgtagataatgtgcaagataaaaactattttctcttccaaatctaagtactaagctcctagtataaggtgttgttacagaataccagagaccatgttagagacaactacatctcttcaaaaaacagccaacagagacaaaggaaaagtgtttaaatagtaagctgttcttcttaatcagaactatcctattgactaataaataatctgcataattctacttaaggtgtgtaatctctgttctagagttagtttttaagtaagcttgttaatctgccactttgacattttgcttaggatgtcagtagccatattaagatgtgtagaataccttcagaagatgatcatagtgttttgtaatcatttaatgtctgcagccaaatttttaaaggtaatttagacctaatactgctcttgctgtgtcttattaagttaaaattaatgaatgaattctggtaaaaattcaaaaggcactctgtgagtagagagtatcatttaagcttattttagtcacatgtagtatatatctccttaaagctgtcactctcactttcttaccattctcttgatttcttcagaaaccatctagtcatcatctttatactctacctgcttctgcaattatatatcatattatgttttcagagcagttcattgtcaagttggactttaagtgaccattcaagaaaagatgaaatctcacgaacctcaaaacttcattcatgtctttttacaaatgagaaaaaaaaatgcattaaagattaatactcaatttgattat

SEQ ID NO: 8313 - protein, 490 aa, Homo sapiens
MAQRAVWLISHEPGTPLCGTVRFSRRYPTVEKRARVFNGASYVPVPEDGPFLKALLFELRLLDDDKDFVESRDSCSRINKTSIYGLLIGGEELWPVVAFLKNDMIYACVPLVEQTLSPRPPLISVSGVSQGFEFLFGIQDFLYSGQKNDSELNTKLSQLPDLLLQACPFGTLLDANLQNSLDNTNFASVTQPQKQPAWKTGTYKGKPQVSISITEKVKSMQYDKQGIADTWQVVGTVTCKCDLEGIMPNVTISLSLPTNGSPLQDILVHPCVTSLDSAILTSSSIDAMDDSAFSGPYKFPFTPPLESFNLCFYTSQVPVPPILGFYQMKEEEVQLRITINLKLHESVKNNFEFCEAHIPFYNRGPITHLEYKTSFGQLEVFREKSLLIWIIGQKFPKSMEISLSGTVTFGAKSHEKQPFDPICTGETAYLKLHFRILDYTLTGCYADQHSVQVFASGKPKISAHRKLISSDYYIWNSKAPAPVTYGSLLL

SEQ ID NO: 8314 - DNA, 3747 bp, Homo sapiens
atttcacgctccgcccgcgctgacacggagctgccaccccaacccttctgtttcgcacctctctcccgagggctcctcctgggcagccagcaaacgcccgctcctcggcccgcccacccagctgcctgcaaaccccgggcctgccactccctgtagagccgccggggcccacctcgaagagctcggccgtggtagccatcccggccggctgagaggctcgccccccactggatgccgtctccgcttcacatgctgcgcctcagaggcgcggcgcacaggtctccgctcggctcgccagctccggctccgggccgctgcgggctccccagctccccacagatcccaggaggggcgggagagcggccatgaagcgaagccgcaaacgcttgtcagctgcctcccggcgccgcccgcgctgctcccattgtcaccgcctcatacgccggaagtggaactgcgcgcgccagggaggttgtcgggaggggccggcgaataaaacgagcggcgaaagaaccgaaaaaaggctcgacgctaccgtgtatgaggaactttgatccttgcgggccaccattccggaagtagaatttagaggaagaaaataccggagttgcagggtataggtaaatttctcaaggttataggttggggttcttagaactttttgtggtgtgtgttggcctagagcgactcagaagcgttagtgacttcacctaaaaaagctaacctctctgctgagcgcgaccggtatgcggcgcaggatgagcctcagggcttctgttaagagtctgtctgagaaagccggtctgcgctgttcctcggtggcgaccttaattatgagatgagctaatgctttactgacttaaccatggcgcagcgggcagtgtggctcataagccacgaaccgggaactccactttgtggcaccgtgagattctccagacggtatccaactgttgaaaaacgagccagagtcttcaatggagcaagttatgtgcctgttcctgaagatggtccctttcttaaagcactgctctttgaacttagattattggatgatgataaagacttcgttgagagtcgtgatagctgttcacgcatcaataaaacatccatttatggactcctgataggaggtgaagaactctggccagttgttgcttttctgaagaatgacatgatatatgcttgtgttccactagttgaacaaactctgtcccctcgtccgccactaattagtgtcagtggagtttcacaaggctttgaatttctttttgggatacaggattttctttattcaggtcaaaaaaatgactctgagctgaatacaaaattgagccagttgcctgacttgcttctgcaggcttgtccatttggtactttattagatgccaacttacagaattcattagataataccaattttgcatctgtgactcagccacagaaacagccagcttggaaaactgggacgtacaaaggaaaaccacaagtttctatttctatcactgaaaaggtaaaatccatgcaatatgataaacagggtatagcagatacatggcaagttgttggaacagtgacttgcaagtgtgatttggaaggaatcatgccaaatgttaccatcagcttgagtctccccaccaatggatctccacttcaggatattctagttcacccttgtgtaacttctcttgactctgcaattctgacttctagtagtattgatgcaatggatgactctgcatttagtgggccttacaaatttccattcactccacctttagagtcattcaacttatgcttctacacttcccaggtccctgtcccaccaattttgggtttttatcaaatgaaggaggaagaagtacaactaagaataaccattaatttaaaacttcatgaaagtgtgaaaaataattttgaattctgtgaagcccatatacctttttacaatagaggtccaattacacatttggaatacaaaactagttttggccagcttgaagtatttcgagagaaaagcttattgatctggattattggccagaagttcccaaaatcaatggaaattagtctttctggaactgtaacttttggagccaagagccatgagaagcagccatttgacccaatttgtactggagaaacagcatatttaaagcttcattttaggatcttagattacacacttactggatgttatgcagatcagcattcagttcaagtttttgcatcaggaaaaccaaaaataagtgcacaccggaaactaatttcttctgattattacatctggaattctaaagcccctgctccagtaacatatggatcattattattgtaatagtctcatgtttaaatgggattatataatgataacagtttaaagaaaatcataatcttatatttttaatgtggatgcatataacctgtgagtgaaaaatcactgaatgatttaattgtaaaagtagtcttatgtggtgtttgtagtctgatagagcttgaaaggacattttaaaagctaatgtctccaattttgttaaccttcgattttatgccagtataattcagaacatagaaaagtaatgattcacttgggctcattttagactggtcctgggtcaccctgccacacttgtttcctagtgtttctgtggcagacattgctaatcaattacagcccttttctgtactgagccttggataaagggtcaggctcctttttagttcagagattcaggcagccactcccagtgggttgtagataatgtgcaagataaaaactattttctcttccaaatctaagtactaagctcctagtataaggtgttgttacagaataccagagaccatgttagagacaactacatctcttcaaaaaacagccaacagagacaaaggaaaagtgtttaaatagtaagctgttcttcttaatcagaactatcctattgactaataaataatctgcataattctacttaaggtgtgtaatctctgttctagagttagtttttaagtaagcttgttaatctgccactttgacattttgcttaggatgtcagtagccatattaagatgtgtagaataccttcagaagatgatcatagtgttttgtaatcatttaatgtctgcagccaaatttttaaaggtaatttagacctaatactgctcttgctgtgtcttattaagttaaaattaatgaatgaattctggtaaaaattcaaaaggcactctgtgagtagagagtatcatttaagcttattttagtcacatgtagtatatatctccttaaagctgtcactctcactttcttaccattctcttgatttcttcagaaaccatctagtcatcatctttatactctacctgcttctgcaattatatatcatattatgttttcagagcagttcattgtcaagttggactttaagtgaccattcaagaaaagatgaaatctcacgaacctcaaaacttcattcatgtctttttacaaatgagaaaaaaaaatgcattaaagattaatactcaatttgattatatcttgggttctgttttttaatgagtgttctaaggaaaagcttagaaaagctgctaactcctcagaagaaagcatgatagtttaaaggtatagggcatataaatttaggatttgaaatatgattttttaattaaggtcagtcctactcataaactcattttctgcaaagcattatcatggcataaggttctatgttcaaaattatcccaagtaac

SEQ ID NO: 8315 - protein, 490 aa, Homo sapiens; identical to SEQ ID NO: 8313

SEQ ID NO: 8316 - DNA, 1035 bp, Homo sapiens
ccaacccttctgtttcgcacctctctcccgagggctcctcctgggcagccagcaaacgcccgctcctcggcccgcccacccagctgcctgcaaaccccgggcctgccactccctgtagagccgccggggcccacctcgaagagctcggccgtggtagccatcccggccggctgagaggctcgccccccactggatgccgtctccgcttcacatgctgcgcctcagaggcgcggcgcacaggtctccgctcggctcgccagctccggctccgggccgctgcgggctccccagctccccacagatcccaggaggggcgggagagcggccatgaagcgaagccgcaaacgcttgtcagctgcctcccggcgccgcccgcgctgctcccattgtcaccgcctcatacgccggaagtggaactgcgcgcgccagggaggttgtcgggaggggccggcgaataaaacgagcggcgaaagaaccgaaaaaaggctcgacgctaccgtgtatgaggaactttgatccttgcgggccaccattccggaagtagaatttagaggaagaaaataccggagttgcagggtataggtaaatttctcaaggttataggttggggttcttagaactttttgtggtgtgtgttggcctagagcgactcagaagcgttagtgacttcacctaaaaaagctaacctctctgctgagcgcgaccggtatgcggcgcaggatgagcctcagggcttctgttaagagtctgtctgagaaagccggtctgcgctgttcctcggtggcgaccttaattatgagatgagctaatgctttactgacttaaccatggcgcagcgggcagtgtggctcataagccacgaaccgggaactccactttgtggcaccgtgagattctccaggccattgtttcttcttgctctgtagtactcatggttcacatcctacacatttacctgtcccctttacctagtgatgacctctcccaaatttgcctccaaagaacactgccaaagtatgcatcctcaaatctgtc

SEQ ID NO: 8317 - protein, 32 aa, Homo sapiens
MAQRAVWLISHEPGTPLCGTVRFSRPLFLLAL

SEQ ID NO: 8318 - DNA, 929 bp, Homo sapiens
ccaacccttctgtttcgcacctctctcccgagggctcctcctgggcagccagcaaacgcccgctcctcggcccgcccacccagctgcctgcaaaccccgggcctgccactccctgtagagccgccggggcccacctcgaagagctcggccgtggtagccatcccggccggctgagaggctcgccccccactggatgccgtctccgcttcacatgctgcgcctcagaggcgcggcgcacaggtctccgctcggctcgccagctccggctccgggccgctgcgggctccccagctccccacagatcccaggaggggcgggagagcggccatgaagcgaagccgcaaacgcttgtcagctgcctcccggcgccgcccgcgctgctcccattgtcaccgcctcatacgccggaagtggaactgcgcgcgccagggaggttgtcgggaggggccggcgaataaaacgagcggcgaaagaaccgaaaaaaggctcgacgctaccgtgtatgaggaactttgatccttgcgggccaccattccggaagtagaatttagaggaagaaaataccggagttgcagggtataggtaaatttctcaaggttataggttggggttcttagaactttttgtggtgtgtgttggcctagagcgactcagaagcgttagtgacttcacctaaaaaagctaacctctctgctgagcgcgaccggtatgcggcgcaggatgagcctcagggcttctgttaagagtctgtctgagaaagccggtctgcgctgttcctcggtggcgaccttaattatgagatgagctaatgctttactgacttaaccatggcgcagcgggcagtgtggctcataagccacgaaccgggaactccactttgtggcaccgtgagattctccagggattggcaagaagactcagggtacctg

SEQ ID NO: 8319 - protein, 33 aa, Homo sapiens
MAQRAVWLISHEPGTPLCGTVRFSRDWQEDSGY

SEQ ID NO: 8320 - DNA, 941 bp, Homo sapiens
gtagagccgccggggcccacctcgaagagctcggccgtggtagccatcccggccggctgagaggctcgccccccactggatgccgtctccgcttcacatgctgcgcctcagaggcgcggcgcacaggtctccgctcggctcgccagctccggctccgggccgctgcgggctccccagctcccggcgccgcccgcgctgctcccattgtcaccgcctcatacgccggaagtggaactgcgcgcgccagggaggttgtcgggaggggccggcgaataaaacgagcggcgaaagaaccgaaaaaaggctcgacgctaccgtgtatgaggaactttgatccttgcgggccaccattccggaagtagaatttagaggaagaaaataccggagttgcagggtataggtaaatttctcaaggttataggttggggttcttagaactttttgtggtgtgtgttggcctagagcgactcagaagcgttagtgacttcacctaaaaaagctaacctctctgctgagcgcgaccggtatgcggcgcaggatgagcctcagggcttctgttaagagtctgtctgagaaagccggtctgcgctgttcctcggtggcgaccttaattatgagatgagctaatgctttactgacttaaccatggcgcagcgggcagtgtggctcataagccacgaaccgggaactccactttgtggcaccgtgagattctccaggtaaatgcaaatctgaatcctcagggatgatggatcagaagatcgatgaagtagcatagttttgtggtgcttcgtggcccaggtttgccacgaatagctgcgtgaccttgggctagccagttaacagacctctgtttcgtctgttaaatggagattttaatagtcctaccttacagtgttgtgagaattgagttgatgactggtacatattatttacggtat

SEQ ID NO: 8321 - protein, 84 aa, Homo sapiens
MPSPLHMLRLRGAAHRSPLGSPAPAPGRCGLPSSRRRPRCSHCHRLIRRKWNCARQGGCREGPANKTSGERTEKRLDATVYEEL

SEQ ID NO: 8322 - DNA, 851 bp, Homo sapiens
cggaaactaatttcttctgattattacatctggaattctaaagcccctgctccagtaacatatggatcattattattgtaatagtctcatgtttaaatgggattatataatgataacagtttaaagaaaatcataatcttatatttttaatgtggatgcatataacctgtgagtgaaaaatcactgaatgatttaattgtaaaagtagtcttatgtggtgtttgtagtctgatagagcttgaaaggacattttaaaagctaatgtctccaattttgttaaccttcgattttatgccagtataattcagaacatagaaaagtaatgattcacttgggctcattttagactggtcctgggtcaccctgccacacttgtttcctagtgtttctgtggcagacattgctaatcaattacagcccttttctgtactgagccttggataaagggtcaggctcctttttagttcagagattcaggcagccactcccagtgggttgtagataatgtgcaagataaaaactattttctcttccaaatctaagtactaagctcctagtataaggtgttgttacagaataccagagaccatgttagagacaactacatctcttcaaaaaacagccaacagagacaaaggaaaagtgtttaaataaaaccatctagtcatcatctttatactctacctgcttctgcaattatatatcatattatgttttcagagcagttcattgtcaagttggactttaagtgaccattcaagaaaagatgaaatctcacgaacctcaaaacttcattcatgtctttttacaaatgagaaaaaaaaatgcattaaagattaatactcaatttg

SEQ ID NO: 8323 - protein, 61 aa, Homo sapiens
NHLVIIFILYLLLQLYIILCFQSSSLSSWTLSDHSRKDEISRTSKLHSCLFTNEKKKCIKD

SEQ ID NO: 8324 - DNA, 4197 bp, Homo sapiens
atgaataagcaacaaagcgaagcgccctccccctagcgtcccagacagcggagggagtcgccgccgctaccgccgccgccgccgcagggcccgccgctgggatgccgagcgcccgcgccgccgctgcctctgtcctccgcgcgctgctcagctgaaggcgcacaggattcaattactggacttgtcaactctgccagtgtacgtgccatttctcttccactatgagaggaccgattgtattgcacatttgtctggctttctgtagccttctgcttttcagcgttgccacacaatgtctggccttccccaaaatagaaaggaggagggagatagcacatgttcatgcggaaaaagggcagtccgataagatgaacaccgatgacctagaaaatagctctgttacctcaaagcagactccccaactggtggtctctgaagatccaatgatgatgtcagcagtaccatcggcaacatcattaaataaagcattctcgattaacaaagaaacccagcctggacaagctgggctcatgcaaacagaacgccctggtgtttccacacctactgagtcaggtgtcccctcagctgaagaagtatttggttccagccagccagagagaatatctcctgaaagtggacttgccaaggccatgttaaccattgctatcactgcgactccttctctgactgttgatgaaaaggaggaactccttacaagcactaactttcagcccattgtagaagagatcacagaaaccacaaaaggttttctgaagtatatggataatcaatcatttgcaactgaaagtcaggaaggagttggtttgggacattcaccttcatcctatgtgaatactaaggaaatgctaaccaccaatccaaagactgagaaatttgaagcagacacagaccacaggacaacttcttttcctggtgctgagtccacagcaggcagtgagcctggaagcctcacccctgataaggagaagccttcgcagatgacagctgataacacccaggctgctgccaccaagcaaccactcgaaacttccgagtacaccctgagtgttgagccagaaactgatagtctgctgggagccccagaagtcacagtgagtgtcagcacagctgttccagctgcctctgccttaagtgatgagtgggatgacaccaaattagagagtgtaagccggataaggacccccaagcttggagacaatgaagagactcaggtgagaacggagatgtctcagacagcacaagtaagccatgagggtatggaaggaggccagccttggacagaggctgcacaggtggctctggggctgcctgaaggggaaacacacacgggcacagccctgctaatagcgcatgggaatgagagatcacctgctttcactgatcaaagttcctttacccccacaagtctgatggaagacatgaaagtttccattgtgaacttgctccaaagtacgggagacttcacggaatccaccaaggaaaacgatgccctgtttttcttagaaaccactgtttctgtctctgtatatgagtctgaggcagaccaactgttgggaaatacaatgaaagacatcatcactcaagagatgacaacagctgttcaagagccagatgccactttatccatggtgacacaagagcaggttgctaccctcgagcttatcagagacagtggcaagactgaggaagaaaaggaggacccctctcctgtgtctgacgttcctggtgttactcagctgtcaagaagatgggagcctctggccactacaatttcaactacagtcgtccctttgtcttttgaagttactcccactgtggaagaacaaatggacacagtcacagggccaaatgaggagttcacaccagttctgggatctccagtgacacctcctggaataatggtgggggaacccagcatttcccctgcacttcctgctttggaggcatcctctgagagaagaactgttgttccatctattactcgtgttaatacagctgcctcatatggcctggaccaacttgaatctgaagagggacaagaagatgaggatgaagaggatgaagaagatgaagatgaagaagaggaagatgaggaagaagatgaggaagataaagatgcagactcgctggatgagggcttggatggtgacactgagctgccaggttttaccctccctggtatcacatcccaggaaccaggcttagaggagggaaacatggacctgttggagggagctacctaccaggtgccagatgccctcgagtgggaacagcagaatcaaggcctggtgagaagctggatggaaaaattaaaagacaaggctggttacatgtctgggatgctggtgcctgtaggggttgggatagctggagccttgttcatcttgggagccctctacagcattaaggttatgaatcgccgaaggagaaatggcttcaaaaggcataaaagaaagcagagagaattcaacagcatgcaagatcgagtaatgctcttagccgacagctctgaagatgaattttgaattggactgggttttaattgggatattcaacgatgctactattctaatttttattttggagcagaaaaaaaaaaagaacaacctgccacattgctgctatcaggccgttagtcctagtgtctgctgggtgctgggtagtagatttttcttgtactgagcagaaatggcatgttgtatactaaacgtatcatgcagtatttggttttattctgtagtgaattttccacaaccgtgggctacaactcataaatatgcaacatatatgtttttcagtaggagttgctacattaggcagagtaaatattttgtagttttccacagtgtcttttccttggtttgaattacctgcattgagaataatgattgttgccaccaaggcatgcttgactctgagatataaatcttaacaaagaataacttctcaagatatactctacctacttgaaaccacagggttgtgggccatggtacatactgcatttgcatcaaactagcagtaactcagaatgaaatcattttcattaagaagctctctcagcatattaggattatatgtagatttgtatgtattttgcattatgtacttcagtctcctagttttattattctcaccttccgttttattcttggcgaggaaaaaaatgcactagaaataatacattaaactgactcttagtcttaatgtacgtttgctgtcttaaatagtgtgattgagtccaacagactcaatcatacatgtcatacatgtttatgattaagagatattctttttgtgtgctagttgattttgccgagaaaaaatgaagaagaattcaagaatgagatgagggtaggtaagctctcagagcatttctgtctgccatttggttctatgcttatgtggctgctaatgtgactaattcagagtgttgtatttccacatctgtggactccaccatggaaaaggtgggctaccattggtccttatatggctttattagaaaaatagacattctatcgtttgtctgcccagtggccagagtcctggtgaacaacagagctcatgggaaaccagcctctctcagggcaccccgctatgaggatattgaaatatgttcaatcatttctcatctcccttggaatgtaattccctgccctatacaaaataggatattccaatgcgctatttgaatctagggattgaggatttgtagttgagttttggggtaaaggcttggctcattgccatggaagaataaaagttatttattaatagtgctgtcactgtggagtacttgttggtgtttattagaagttgtctactatgttcaagaaaagttgcacagttattcctcagagctactatgtgaggtaggacatatgtttttattctcccatttgactgaagatggaactgaagcagagaagtgaaatgattttccaaagttgtacccagagagaatcagcgtgagaacccacttggacccagccatgcacccttatcttcagttcagtaaccttttcatagactttggtggaagcagtgacatttcagggtccttctttaaaacaaaggttctaagggaatagcagggaatagctgcctggtcaaggaacgtttgatgtgaatttccatctttgttaaatgaatgatgcctttctaatttctctc

SEQ ID NO: 8325 - protein, 774 aa, Homo sapiens; identical to SEQ ID NO: 1208

SEQ ID NO: 8326 - DNA, 1848 bp, Homo sapiens
tgtctggctttctgtagccttctgcttttcagcgttgccacacaatgtctggccttccccaaaatagaaaggaggagggagatagcacatgttcatgcggaaaaagggcagtccgataagatgaacaccgatgacctagaaaatagctctgttacctcaaagcagactccccaactggtggtctctgaagatccaatgatgatgtcagcagtaccatcggcaacatcattaaataaagcattctcgattaacaaagaaacccagcctggacaagctgggctcatgcaaacagaacgccctggtgtttccacacctactgagtcaggtgtcccctcagctgaagaagtatttggttccagccagccagagagaatatctcctgaaagtggacttgccaaggccatgttaaccattgctatcactgcgactccttctctgactgttgatgaaaaggaggaactccttacaagcactaactttcagcccattgtagaagagatcacagaaaccacaaaaggttttctgaagtatatggataatcaatcatttgcaactgaaagtcaggaaggagttggtttgggacattcaccttcatcctatgtgaatactaaggaaatgctaaccaccaatccaaagactgagaaatttgaagcagacacagaccacaggacaacttcttttcctggtgctgagtccacagcaggcagtgagcctggaagcctcacccctgataaggagaagccttcgcagatgacagctgataacacccaggctgctgccaccaagcaaccactcgaaacttccgagtacaccctgagtgttgagccagaaactgatagtctgctgggagccccagaagtcacagtgagtgtcagcacagctgttccagctgcctctgccttaagtgatgagtgggatgacaccaaattagagagtgtaagccggataaggacccccaagcttggagacaatgaagagactcagacatcatcactcaagagatgacaacagctgttcaagagccagatgccactttatccatggtgacacaagagcaggttgctaccctcgagcttatcagagacagtggcaagactgaggaagaaaaggaggacccctctcctgtgtctgacgttcctggtgttactcagctgtcaagaagatgggagcctctggccactacaatttcaactacagtcgtccctttgtcttttgaagttactcccactgtggaagaacaaatggacacagtcacagggccaaatgaggagttcacaccagttctgggatctccagtgacacctcctggaataatggtgggggaacccagcatttcccctgcacttcctgctttggaggcatcctctgagagaagaactgttgttccatctattactcgtgttaatacagctgcctcatatggcctggaccaacttgaatctgaagagacggggtttcaccatgttgcccaggctcgtctcaaactcctgggcttaagaagtctgcctgcctcggcctcccaaagtgttggaattacaagtgtgaactcctgcacccagccaagaaaatatttaaacagctgcctgaaatggaaattgaatccaaaacattttgccactggtgtttgaagtggactatcttgtctcaagcctttttattttctcatgaatgtaccttctaaatattgttaaggctacaatggaggaaattttaaattattatatttactattttacagtgagtggaaaatttgaaatttagtaaaaagttttcaagaaatttttatagattaataatggagtttaaaaagtcatggcgatgaggcatttaacaaggagagaactgaat

SEQ ID NO: 8327 - protein, 294 aa, Homo sapiens
MNTDDLENSSVTSKQTPQLVVSEDPMMMSAVPSATSLNKAFSINKETQPGQAGLMQTERPGVSTPTESGVPSAEEVFGSSQPERISPESGLAKAMLTIAITATPSLTVDEKEELLTSTNFQPIVEEITETTKGFLKYMDNQSFATESQEGVGLGHSPSSYVNTKEMLTTNPKTEKFEADTDHRTTSFPGAESTAGSEPGSLTPDKEKPSQMTADNTQAAATKQPLETSEYTLSVEPETDSLLGAPEVTVSVSTAVPAASALSDEWDDTKLESVSRIRTPKLGDNEETQTSSLKR

SEQ ID NO: 8328 - DNA, 2454 bp, Homo sapiens
atgaataagcaacaaagcgaagcgccctccccctagcgtcccagacagcggagggagtcgccgccgctaccgccgccgccgccgcagggcccgccgctgggatgccgagcgcccgcgccgccgctgcctctgtcctccgcgcgctgctcagctgaaggcgcacaggattcaattactggacttgtcaactctgccagtgtacgtgccatttctcttccactatgagaggaccgattgtattgcacatttgtctggctttctgtagccttctgcttttcagcgttgccacacaatgtctggccttccccaaaatagaaaggaggagggagatagcacatgttcatgcggaaaaagggcagtccgataagatgaacaccgatgacctagaaaatagctctgttacctcaaagcagactccccaactggtggtctctgaagatccaatgatgatgtcagcagtaccatcggcaacatcattaaataaagcattctcgattaacaaagaaacccagcctggacaagctgggctcatgcaaacagaacgccctggtgtttccacacctactgagtcaggtgtcccctcagctgaagaagtatttggttccagccagccagagagaatatctcctgaaagtggacttgccaaggccatgttaaccattgctatcactgcgactccttctctgactgttgatgaaaaggaggaactccttacaagcactaactttcagcccattgtagaagagatcacagaaaccacaaaaggttttctgaagtatatggataatcaatcatttgcaactgaaagtcaggaaggagttggtttgggacattcaccttcatcctatgtgaatactaaggaaatgctaaccaccaatccaaagactgagaaatttgaagcagacacagaccacaggacaacttcttttcctggtgctgagtccacagcaggcagtgagcctggaagcctcacccctgataaggagaagccttcgcagatgacagctgataacacccaggctgctgccaccaagcaaccactcgaaacttccgagtacaccctgagtgttgagccagaaactgatagtctgctgggagccccagaagtcacagtgagtgtcagcacagctgttccagctgcctctgccttaagtgatgagtgggatgacaccaaattagagagtgtaagccggataaggacccccaagcttggagacaatgaagagactcaggtgagaacggagatgtctcagacagcacaagtaagccatgagggtatggaaggaggccagccttggacagaggctgcacaggtggctctggggctgcctgaaggggaaacacacacgggcacagccctgctaatagcgcatgggaatgagagatcacctgctttcactgatcaaagttcctttacccccacaagtctgatggaagacatgaaagtttccattgtgaacttgctccaaagtacgggagacttcacggaatccaccaaggaaaacgatgccctgtttttcttagaaaccactgtttctgtctctgtatatgagtctgaggcagaccaactgttgggaaatacaatgaaagacatcatcactcaagagatgacaacagctgttcaagagccagatgccactttatccatggtgacacaagagcaggttgctaccctcgagcttatcagagacagtggcaagactgaggaagaaaaggaggacccctctcctgtgtctgacgttcctggtgttactcagctgtcaagaagatgggagcctctggccactacaatttcaactacagtcgtccctttgtcttttgaagttactcccactgtggaagaacaaatggacacagtcacagggccaaatgaggagttcacaccagttctgggatctccagtgacacctcctggaataatggtgggggaacccagcatttcccctgcacttcctgctttggaggcatcctctgagagaagaactgttgttccatctattactcgtgttaatacagctgcctcatatggcctggaccaacttgaatctgaagagacggggtttcaccatgttgcccaggctcgtctcaaactcctgggcttaagaagtctgcctgcctcggcctcccaaagtgttggaattacaagtgtgaactcctgcacccagccaagaaaatatttaaacagctgcctgaaatggaaattgaatccaaaacattttgccactggtgtttgaagtggactatcttgtctcaagcctttttattttctcatgaatgtaccttctaaatattgttaaggctacaatggaggaaattttaaattattatatttactattttacagtgagtggaaaatttgaaatttagtaaaaagttttcaagaaatttttatagattaataatggagtttaaaaagtcatggcgatgaggcatttaacaaggagagaactgaat

SEQ ID NO: 8329 - protein, 670 aa, Homo sapiens
MRGPIVLHICLAFCSLLLFSVATQCLAFPKIERRREIAHVHAEKGQSDKMNTDDLENSSVTSKQTPQLVVSEDPMMMSAVPSATSLNKAFSINKETQPGQAGLMQTERPGVSTPTESGVPSAEEVFGSSQPERISPESGLAKAMLTIAITATPSLTVDEKEELLTSTNFQPIVEEITETTKGFLKYMDNQSFATESQEGVGLGHSPSSYVNTKEMLTTNPKTEKFEADTDHRTTSFPGAESTAGSEPGSLTPDKEKPSQMTADNTQAAATKQPLETSEYTLSVEPETDSLLGAPEVTVSVSTAVPAASALSDEWDDTKLESVSRIRTPKLGDNEETQVRTEMSQTAQVSHEGMEGGQPWTEAAQVALGLPEGETHTGTALLIAHGNERSPAFTDQSSFTPTSLMEDMKVSIVNLLQSTGDFTESTKENDALFFLETTVSVSVYESEADQLLGNTMKDIITQEMTTAVQEPDATLSMVTQEQVATLELIRDSGKTEEEKEDPSPVSDVPGVTQLSRRWEPLATTISTTVVPLSFEVTPTVEEQMDTVTGPNEEFTPVLGSPVTPPGIMVGEPSISPALPALEASSERRTVVPSITRVNTAASYGLDQLESEETGFHHVAQARLKLLGLRSLPASASQSVGITSVNSCTQPRKYLNSCLKWKLNPKHFATGV

SEQ ID NO: 8330 - DNA, 1644 bp, Homo sapiens
ggcccggcgcgccgcggccgcgcgaggcccccgccgtcgccgacgcccgagcgccggagccccggccccgccccgcgagcgccgagacttgttggccgcggagactgcgaccctcttctctcagtctgccttactaccatgccgctctacgagggcctggggagcggcggggagaagacggcggtcgtgatcgacctgggagaggcctttaccaagtgtggatttgctggagaaactggtccaagatgtataattcctagtgtgataaaaagagctgggatgcctaagcctgtcagagttgttcagtataatatcaatacagaagaattatattcctacctaaaggaattcatccacatactatatttcaggcatctattggtgaatcccagagaccgccgagttgtgattatcgaatcggtattatgtccttctcacttcagagagacactcactcgtgttcttttcaaatattttgaggttccatctgtcttgcttgctccaagtcatctaatggctcttctgacgcttggaattaattctgccatggtcctagattgtggatatagggaaagcctggtgttacccatatcttttttgaatcccagttctaaattgttggggagcactacccctaggaggaaaagctcttcacaaagagttggaaactcaactattggaacaatgtactgttgacacaagtgttgctaaagaacagagccttccctcagtgatgggttcagttccggaaggtgtcttagaggacattaaagcgcgtacttgctttgtaagtgatctgaagcgaggactaaaaatccaagcagcaaaatttaatattgatgggaataatgagcgtccctccccacccccaaatgttgactatccattagatggagagaagattttacatatccttggatcaatcagagattcagttgtggaaattctttttgaacaagataatgaagagcaatcagttgccactttaatattggattcccttatacagtgtccgatagacaccaggaagcaactagcagagaatttggtagtcataggtggcacttctatgttgccaggatttctccacagattgcttgcagaaataaggtatttggtagaaaaaccaaaatataaaaaagcacttggcactaagacatttcgaattcatactccacctgcaaaagctaattgtgtggcctggttgggaggggctatttttggagcattacaagatatacttgggagccgttctgtttcaaaggaatattataatcagacgggccgtatacctgattggtgttctctcaataacccacctttggaaatgatgtttgatgtcgggaaaactcaaccacctctgatgaagagagcattttccactgagaaatagaagtttgattaaaaatcaaccttgcttcatatcaaatatttaaccaattataagcaaattgtacaaagtatgtaggatgttttgttatagaggactatagtggaagtgaaagcattctgtgtttactctttgcattaatatataattcttttgactttgtttctcttgtgtagtggtaaaatggtagctggtgcttattgagatttgctgtatttatatcaataaagtatagtaaagcagtttgattttgg

SEQ ID NO: 8331 - protein, 219 aa, Homo sapiens
MGSVPEGVLEDIKARTCFVSDLKRGLKIQAAKFNIDGNNERPSPPPNVDYPLDGEKILHILGSIRDSVVEILFEQDNEEQSVATLILDSLIQCPIDTRKQLAENLVVIGGTSMLPGFLHRLLAEIRYLVEKPKYKKALGTKTFRIHTPPAKANCVAWLGGAIFGALQDILGSRSVSKEYYNQTGRIPDWCSLNNPPLEMMFDVGKTQPPLMKRAFSTEK

SEQ ID NO: 8332 - DNA, 2787 bp, Homo sapiens
ggcccggcgcgccgcggccgcgcgaggcccccgccgtcgccgacgcccgagcgccggagccccggccccgccccgcgagcgccgagacttgttggccgcggagactgcgaccctcttctctcagtctgccttactaccatgccgctctacgagggcctggggagcggcggggagaagacggcggtcgtgatcgacctgggagaggcctttaccaagtgtggatttgctggagaaactggtccaagatgtataattcctagtgtgataaaaagagctgggatgcctaagcctgtcagagttgttcagtataatatcaatacagaagaattatattcctacctaaaggaattcatccacatactatatttcaggcatctattggtgaatcccagagaccgccgagttgtgattatcgaatcggtattatgtccttctcacttcagagagacactcactcgtgttcttttcaaatattttgaggttccatctgtcttgcttgctccaagtcatctaatggctcttctgacgcttggaattaattctgccatggtcctagattgtggatatagggaaagcctggtgttacccatatcttttttgaatcccagttctaaattgttggggagcactacccctaggaggaaaagctcttcacaaagagttggaaactcaactattggaacaatgtactgttgacacaagtgttgctaaagaacagagccttccctcagtgatgggttcagttccggaaggtgtcttagaggacattaaagcgcgtacttgctttgtaagtgatctgaagcgaggactaaaaatccaagcagcaaaatttaatattgatgggaataatgagcgtccctccccacccccaaatgttgactatccattagatggagagaagattttacatatccttggatcaatcagagattcagttgtggaaattctttttgaacaagataatgaagagcaatcagttgccactttaatattggattcccttatacagtgtccgatagacaccaggaagcaactagcagagaatttggtagtcataggtggcacttctatgttgccaggatttctccacagattgcttgcagaaataaggtatttggtagaaaaaccaaaatataaaaaagcacttggcactaagacatttcgaattcatactccacctgcaaaagctaattgtgtggcctggttgggaggggctatttttggagcattacaagatatacttgggagccgttctgtttcaaaggaatattataatcagacgggccgtatacctgattggtgttctctcaataacccacctttggaaatgatgtttgatgtcgggaaaactcaaccacctctgatgaagagagcattttccactgagaaatagaagtttgattaaaaatcaaccttgcttcatatcaaatatttaaccaattataagcaaattgtacaaagtatgtaggatgttttgttatagaggactatagtggaagtgaaagcattctgtgtttactctttgcattaatatataattcttttgactttgtttctcttgtgtagtggtaaaatggtagctggtgcttattgagatttgctgtatttatatcaataaagtatagtaaagcagtttgattttggaagtttgttatgtggctttttttttttttttttttttgagacggagtctcgctctgtcacttaggctggagtgcagtggcacaatctctactcattgcaagctccgcctcccgggtttacgccattctgtctcagcctcctgagtagctgggactataggcatacgccaccccgcccggctaattttttgtatatttagtagagacggggtttcaccatgttagccaggatggtctcaatttcctgacctcgtgatccaccctcctcggcctcccaaagtgttgggattacaggcgtgaaccactgtaccagcctatgttgcttgtctttcaaaaagaacagtatttctccacagttcacataacctgttctgggctcattaattgtgtttccagcagttactccatttaaagcataaatagtgttaaccattaccagttatttcaaatactaacatgggtccatttaaaaaaaatatttattttggtacttgggtgtccatattataataatgttgtttttccagaaatatatttgatctttggactgagaatgtttggtaacatagtcaagcatttgttaagccaagtgtggaaatgttcactttttaactttacagtttttttaatgagcaattctacatttctaagaaaaaagatacttcatttttatataaggttacaactgctttataaaaatgtattcacaatgtcattaatctttgcgtttgtgctttatatcttctcagggcagaggttcttgaaatatgtactcaatcatttaacttttattttattttttcatttgtttttaatgaactacctcttgttgaaattttgctggcttcattctttcgggatacctgtgtcctctagtcctaccgctcttccatagcactctttccttaagcacagtatccataattggggcacttctaacttttaccttgtaatcgtttcaacagaggttttatcttcttttctggaatataagctctcgtagaacaaggcttgtctatttcttaactttgaaacctcccaggaggattgccaggaataggtatactattatttgccaattggatggatttactattttattaacattatctcttttttcagtaaacatgaactttacatttat

SEQ ID NO: 8333 - protein, 219 aa, Homo sapiens; identical to SEQ ID NO: 8331

SEQ ID NO: 8334 - DNA, 670 bp, Homo sapiens
gcggccgcgcgaggcccccgccgtcgccgacgcccgagcgccggagccccggccccgccccgcgagcgccgagacttgttggccgcggagactgcgaccctcttctctcagtctgccttactaccatgccgctctacgagggcctggggagcggcggggagaagacggcggtcgtgatcgacctgggagaggcctttaccaagtgtggatttgctggagaaactggtccaagatgtataattcctagtgtgataaaaagagctgggatgcctaagcctgtcagagttgttcagtataatatcaatacagaagaattatattcctacctaaaggaattcatccacatactatatttcaggcatctattggtgaatcccagagaccgccgagttgtgattatcgaatcggtattatgtccttctcacttcagagagacactcactcgtgttcttttcaaatattttgaggttccatctgtcttgcttgctccaagtcatctaatggctcttctgacgcttggaattaattctgccatggtcctagattgtggatatagggaaagcctggtgttacccatatcttttttgaatcccagttctaaattgttggggagcactacccctaggaggaaaatgttgctaaagaacagagccttccctcagtgatgggt

SEQ ID NO: 8335 - protein, 179 aa, Homo sapiens
MPLYEGLGSGGEKTAVVIDLGEAFTKCGFAGETGPRCIIPSVIKRAGMPKPVRVVQYNINTEELYSYLKEFIHILYFRHLLVNPRDRRVVIIESVLCPSHFRETLTRVLFKYFEVPSVLLAPSHLMALLTLGINSAMVLDCGYRESLVLPISFLNPSSKLLGSTTPRRKMLLKNRAFPQ

SEQ ID NO: 8336 - DNA, 819 bp, Homo sapiens
gcggccgcgcgaggcccccgccgtcgccgacgcccgagcgccggagccccggccccgccccgcgagcgccgagacttgttggccgcggagactgcgaccctcttctctcagtctgccttactaccatgccgctctacgagggcctggggagcggcggggagaagacggcggtcgtgatcgacctgggagaggcctttaccaagtgtggatttgctggagaaactggtccaagatgtataattcctagtgtgataaaaagagctgggatgcctaagcctgtcagagttgttcagtataatatcaatacagaagaattatattcctacctaaaggaattcatccacatactatatttcaggcatctattggtgaatcccagagaccgccgagttgtgattatcgaatcggtattatgtccttctcacttcagagagacactcactcgtgttcttttcaaatattttgaggttccatctgtcttgcttgctccaagtcatctaatggctcttctgacgcttggaattaattctgccatggtcctagattgtggatatagggaaagcctggtgttacccatatcttttttgaatcccagttctaaattgttggggagcactacccctaggaggaaaagctcttcacaaagagttggaaactcaactattggaacaatgtactgttgacacaagtgttgctaaagaacagagccttccctcagtgatgggttcagttccggaaggtgtcttagaggacattaaagcgcgtacttgctttgtaagtgatctgaagcgaggactaaaaatccaagcagcaaaattt

SEQ ID NO: 8337 - protein, 185 aa, Homo sapiens
MPLYEGLGSGGEKTAVVIDLGEAFTKCGFAGETGPRCIIPSVIKRAGMPKPVRVVQYNINTEELYSYLKEFIHILYFRHLLVNPRDRRVVIIESVLCPSHFRETLTRVLFKYFEVPSVLLAPSHLMALLTLGINSAMVLDCGYRESLVLPISFLNPSSKLLGSTTPRRKSSSQRVGNSTIGTMYC

SEQ ID NO: 8338 - DNA, 841 bp, Homo sapiens
gcggccgcgcgaggcccccgccgtcgccgacgcccgagcgccggagccccggccccgccccgcgagcgccgagacttgttggccgcggagactgcgaccctcttctctcagtctgccttactaccatgccgctctacgagggcctggggagcggcggggagaagacggcggtcgtgatcgacctgggagaggcctttaccaagtgtggatttgctggagaaactggtccaagatgtataattcctagtgtgataaaaagagctgggatgcctaagcctgtcagagttgttcagtataatatcaatacagaagaattatattcctacctaaaggaattcatccacatactatatttcaggcatctattggtgaatcccagagaccgccgagttgtgattatcgaatcggtattatgtccttctcacttcagagagacactcactcgtgttcttttcaaatattttgaggttccatctgtcttgcttgctccaagtcatctaatggctcttctgacgcttggaattaattctgccatggtcctagattgtggatatagggaaagcctggtgttacccatatcttttttgaatcccagttctaaattgttggggagcactacccctaggaggaaaagctcttcacaaagagttggaaactcaactattggaacaatgtactgttgacacaagtgttgctaaagaacagagccttccctcagtgatgggttcagttccggaaggtgtcttagaggacattaaagcgcgtacttgctttgtaagtgatctgaagcgaggactaaaaatccaagcagcaaaatttaatattgatgggaataatgagg

SEQ ID NO: 8339 - protein, 185 aa, Homo sapiens; identical to SEQ ID NO: 8337

SEQ ID NO: 8340 - DNA, 1115 bp, Homo sapiens
gcggccgcgcgaggcccccgccgtcgccgacgcccgagcgccggagccccggccccgccccgcgagcgccgagacttgttggccgcggagactgcgaccctcttctctcagtctgccttactaccatgccgctctacgagggcctggggagcggcggggagaagacggcggtcgtgatcgacctgggagaggcctttaccaagtgtggatttgctggagaaactggtccaagatgtataattcctagtgtgataaaaagagctgggatgcctaagcctgtcagagttgttcagtataatatcaatacagaagaattatattcctacctaaaggaattcatccacatactatatttcaggcatctattggtgaatcccagagaccgccgagttgtgattatcgaatcggtattatgtccttctcacttcagagagacactcactcgtgttcttttcaaatattttgaggttccatctgtcttgcttgctccaagtcatctaatggctcttctgacgcttggaattaattctgccatggtcctagattgtggatatagggaaagcctggtgttacccatatcttttttgaatcccagttctaaattgttggggagcactacccctaggaggaaaagctcttcacaaagagttggaaactcaactattggaacaatgtactgttgacacaagtgttgctaaagaacagagccttccctcagtgatgggttcagttccggaaggtgtcttagaggacattaaagcgcgtacttgctttgtaagtgatctgaagcgaggactaaaaatccaagcagcaaaatttaatattgatgggaataatgagcgtccctccccacccccaaatgttgactatccattagatggagagaagattttacatatccttggatcaatcagagattcagttgtggaaattctttttgaacaagataatgaagagcaatcagttgccactttaatattggattcccttatacagtgtccgatagacaccaggaagcaactagcagagaatttggtagtcataggtggcacttctatgttgccaggatttctccacagattgcttgcagaaataaggtatttggtagaaaaacc

SEQ ID NO: 8341 - protein, 185 aa, Homo sapiens; identical to SEQ ID NO: 8337

SEQ ID NO: 8342 - DNA, 1705 bp, Homo sapiens
gcggccgcgcgaggcccccgccgtcgccgacgcccgagcgccggagccccggccccgccccgcgagcgccgagacttgttggccgcggagactgcgaccctcttctctcagtctgccttactaccatgccgctctacgagggcctggggagcggcggggagaagacggcggtcgtgatcgacctgggagaggcctttaccaagtgtggatttgctggagaaactggtccaagatgtataattcctagtgtgataaaaagagctgggatgcctaagcctgtcagagttgttcagtataatatcaatacagaagaattatattcctacctaaaggaattcatccacatactatatttcaggcatctattggtgaatcccagagaccgccgagttgtgattatcgaatcggtattatgtccttctcacttcagagagacactcactcgtgttcttttcaaatattttgaggttccatctgtcttgcttgctccaagtcatctaatggctcttctgacgcttggaattaattctgccatggtcctagattgtggatatagggaaagcctggtgttacccatatcttttttgaatcccagttctaaattgttggggagcactacccctaggaggaaaagctcttcacaaagagttggaaactcaactattggaacaatgtactgttgacacaagtgttgctaaagaacagagccttccctcagtgatgggttcagttccggaaggtgtcttagaggacattaaagcgcgtacttgctttgtaagtgatctgaagcgaggactaaaaatccaagcagcaaaatttaatattgatgggaataatgagcgtccctccccacccccaaatgttgactatccattagatggagagaagattttacatatccttggatcaatcagagattcagttgtggaaattctttttgaacaagataatgaagagcaatcagttgccactttaatattggattcccttatacagtgttgctcttgttgcccaggctggagtgcaatggcatgatctcagctcagcacaacctccgcccccgggttcaatgtccgatagacaccaggaagcaactagcagagaatttggtagtcataggtggcacttctatgttgccaggatttctccacagattgcttgcagaaataaggtatttggtagaaaaaccaaaatataaaaaagcacttggcactaagacatttcgaattcatactccacctgcaaaagctaattgtgtggcctggttgggaggggctatttttggagcattacaagatatacttgggagccgttctgtttcaaaggaatattataatcagacgggccgtatacctgattggtgttctctcaataacccacctttggaaatgatgtttgatgtcgggaaaactcaaccacctctgatgaagagagcattttccactgagaaatagaagtttgattaaaaatcaaccttgcttcatatcaaatatttaaccaattataagcaaattgtacaaagtatgtaggatgttttgttatagaggactatagtggaagtgaaagcattctgtgtttactctttgcattaatatataattcttttgactttgtttctcttgtgtagtggtaaaatggtagctggtgcttattgagatttgctgtatttatatcaataaagtatagtaaagcagtttgattttgg

SEQ ID NO: 8343 - protein, 185 aa, Homo sapiens; identical to SEQ ID NO: 8337

SEQ ID NO: 8344 - DNA, 2848 bp, Homo sapiens
gcggccgcgcgaggcccccgccgtcgccgacgcccgagcgccggagccccggccccgccccgcgagcgccgagacttgttggccgcggagactgcgaccctcttctctcagtctgccttactaccatgccgctctacgagggcctggggagcggcggggagaagacggcggtcgtgatcgacctgggagaggcctttaccaagtgtggatttgctggagaaactggtccaagatgtataattcctagtgtgataaaaagagctgggatgcctaagcctgtcagagttgttcagtataatatcaatacagaagaattatattcctacctaaaggaattcatccacatactatatttcaggcatctattggtgaatcccagagaccgccgagttgtgattatcgaatcggtattatgtccttctcacttcagagagacactcactcgtgttcttttcaaatattttgaggttccatctgtcttgcttgctccaagtcatctaatggctcttctgacgcttggaattaattctgccatggtcctagattgtggatatagggaaagcctggtgttacccatatcttttttgaatcccagttctaaattgttggggagcactacccctaggaggaaaagctcttcacaaagagttggaaactcaactattggaacaatgtactgttgacacaagtgttgctaaagaacagagccttccctcagtgatgggttcagttccggaaggtgtcttagaggacattaaagcgcgtacttgctttgtaagtgatctgaagcgaggactaaaaatccaagcagcaaaatttaatattgatgggaataatgagcgtccctccccacccccaaatgttgactatccattagatggagagaagattttacatatccttggatcaatcagagattcagttgtggaaattctttttgaacaagataatgaagagcaatcagttgccactttaatattggattcccttatacagtgttgctcttgttgcccaggctggagtgcaatggcatgatctcagctcagcacaacctccgcccccgggttcaatgtccgatagacaccaggaagcaactagcagagaatttggtagtcataggtggcacttctatgttgccaggatttctccacagattgcttgcagaaataaggtatttggtagaaaaaccaaaatataaaaaagcacttggcactaagacatttcgaattcatactccacctgcaaaagctaattgtgtggcctggttgggaggggctatttttggagcattacaagatatacttgggagccgttctgtttcaaaggaatattataatcagacgggccgtatacctgattggtgttctctcaataacccacctttggaaatgatgtttgatgtcgggaaaactcaaccacctctgatgaagagagcattttccactgagaaatagaagtttgattaaaaatcaaccttgcttcatatcaaatatttaaccaattataagcaaattgtacaaagtatgtaggatgttttgttatagaggactatagtggaagtgaaagcattctgtgtttactctttgcattaatatataattcttttgactttgtttctcttgtgtagtggtaaaatggtagctggtgcttattgagatttgctgtatttatatcaataaagtatagtaaagcagtttgattttggaagtttgttatgtggctttttttttttttttttttttgagacggagtctcgctctgtcacttaggctggagtgcagtggcacaatctctactcattgcaagctccgcctcccgggtttacgccattctgtctcagcctcctgagtagctgggactataggcatacgccaccccgcccggctaattttttgtatatttagtagagacggggtttcaccatgttagccaggatggtctcaatttcctgacctcgtgatccaccctcctcggcctcccaaagtgttgggattacaggcgtgaaccactgtaccagcctatgttgcttgtctttcaaaaagaacagtatttctccacagttcacataacctgttctgggctcattaattgtgtttccagcagttactccatttaaagcataaatagtgttaaccattaccagttatttcaaatactaacatgggtccatttaaaaaaaatatttattttggtacttgggtgtccatattataataatgttgtttttccagaaatatatttgatctttggactgagaatgtttggtaacatagtcaagcatttgttaagccaagtgtggaaatgttcactttttaactttacagtttttttaatgagcaattctacatttctaagaaaaaagatacttcatttttatataaggttacaactgctttataaaaatgtattcacaatgtcattaatctttgcgtttgtgctttatatcttctcagggcagaggttcttgaaatatgtactcaatcatttaacttttattttattttttcatttgtttttaatgaactacctcttgttgaaattttgctggcttcattctttcgggatacctgtgtcctctagtcctaccgctcttccatagcactctttccttaagcacagtatccataattggggcacttctaacttttaccttgtaatcgtttcaacagaggttttatcttcttttctggaatataagctctcgtagaacaaggcttgtctatttcttaactttgaaacctcccaggaggattgccaggaataggtatactattatttgccaattggatggatttactattttattaacattatctcttttttcagtaaacatgaactttacatttat

SEQ ID NO: 8345 - protein, 185 aa, Homo sapiens; identical to SEQ ID NO: 8337

SEQ ID NO: 8346 - DNA, 586 bp, Homo sapiens
gccccgcgagcgccgagacttgttggccgcggagactgcgaccctcttctctcagtctgccttactaccatgccgctctacgagggcctggggagcggcggggagaagacggcggtcgtgatcgacctgggagaggcctttaccaagtgtggatttgctggagaaactggtccaagatgtataattcctagtgtgataaaaagagctgggatgcctaagcctgtcagagttgttcagtataatatcaatacagaagaattatattcctacctaaaggaattcatccacatactatatttcaggcatctattggtgaatcccagagaccgccgagttgtgattatcgaatcggtattatgtccttctcacttcagagagacactcactcgtgttcttttcaaatattttgaggtacctgtctttatatcaaataagtaaattgcttttgaaataaaaagagaagcaataaaattcttaccaatttttagggaatctttcttctctttttttttgttggtaggtactcaaaacttaaactaataaaagcccttattttgtctcatattgtgtatggcacacagtgtag

SEQ ID NO: 8347 - protein, 122 aa, Homo sapiens
MPLYEGLGSGGEKTAVVIDLGEAFTKCGFAGETGPRCIIPSVIKRAGMPKPVRVVQYNINTEELYSYLKEFIHILYFRHLLVNPRDRRVVIIESVLCPSHFRETLTRVLFKYFEVPVFISNK

SEQ ID NO: 8348 - DNA, 1652 bp, Homo sapiens
cttgaacctgggaggtggaggttgcactgagccgagatcgcaccactgcactccagcctgggctacagagcaagaccctgtctcagaaaaaagttaatagagttttctaagagccacattttaaaaggcatgagaaaagatgaaattaatagtatattttatttaacccaatgtattcaaaatattccaatattccatcaatacaaaaattataatgaggtattttagtgaggttttttggtattaaaaccttctaaatttggtgtgtagcttagtcttagagcacatctcaattcagactagccatatttcatgtattaagtagctgcacaggcctagtggctactttatcagatgccccagctgtatctaatgaattgtgtgtggtcatgtgcttatgtgtatttttattctgttttctttgatgaagaacatgaaaaaaaacttactctttgatttttctgtaactatgttaaaaataagaaataaaaatttgtcactaaagcatatttagaacagtactgcagaaggtgaggaaaatatcaaggaaaccacattttatctcctaaaatagtagtatccttgactactctatagatatatgaaggaatcccagttctaaattgttggggagcactacccctaggaggaaaagctcttcacaaagagttggaaactcaactattggaacaatgtactgttgacacaagtgttgctaaagaacagagccttccctcagtgatgggttcagttccggaaggtgtcttagaggacattaaagcgcgtacttgctttgtaagtgatctgaagcgaggactaaaaatccaagcagcaaaatttaatattgatgggaataatgagcgtccctccccacccccaaatgttgactatccattagatggagagaagattttacatatccttggatcaatcagagattcagttgtggaaattctttttgaacaagataatgaagagcaatcagttgccactttaatattggattcccttatacagtgtccgatagacaccaggaagcaactagcagagaatttggtagtcataggtggcacttctatgttgccaggatttctccacagattgcttgcagaaataaggtatttggtagaaaaaccaaaatataaaaaagcacttggcactaagacatttcgaattcatactccacctgcaaaagctaattgtgtggcctggttgggaggggctatttttggagcattacaagatatacttgggagccgttctgtttcaaaggaatattataatcagacgggccgtatacctgattggtgttctctcaataacccacctttggaaatgatgtttgatgtcgggaaaactcaaccacctctgatgaagagagcattttccactgagaaatagaagtttgattaaaaatcaaccttgcttcatatcaaatatttaaccaattataagcaaattgtacaaagtatgtaggatgttttgttatagaggactatagtggaagtgaaagcattctgtgtttactctttgcattaatatataattcttttgactttgtttctcttgtgtagtggtaaaatggtagctggtgcttattgagatttgctgtatttatatcaataaagtatagtaaagcagtttgattttgg

SEQ ID NO: 8349 - protein, 219 aa, Homo sapiens; identical to SEQ ID NO: 8331

SEQ ID NO: 8350 - DNA, 2795 bp, Homo sapiens
cttgaacctgggaggtggaggttgcactgagccgagatcgcaccactgcactccagcctgggctacagagcaagaccctgtctcagaaaaaagttaatagagttttctaagagccacattttaaaaggcatgagaaaagatgaaattaatagtatattttatttaacccaatgtattcaaaatattccaatattccatcaatacaaaaattataatgaggtattttagtgaggttttttggtattaaaaccttctaaatttggtgtgtagcttagtcttagagcacatctcaattcagactagccatatttcatgtattaagtagctgcacaggcctagtggctactttatcagatgccccagctgtatctaatgaattgtgtgtggtcatgtgcttatgtgtatttttattctgttttctttgatgaagaacatgaaaaaaaacttactctttgatttttctgtaactatgttaaaaataagaaataaaaatttgtcactaaagcatatttagaacagtactgcagaaggtgaggaaaatatcaaggaaaccacattttatctcctaaaatagtagtatccttgactactctatagatatatgaaggaatcccagttctaaattgttggggagcactacccctaggaggaaaagctcttcacaaagagttggaaactcaactattggaacaatgtactgttgacacaagtgttgctaaagaacagagccttccctcagtgatgggttcagttccggaaggtgtcttagaggacattaaagcgcgtacttgctttgtaagtgatctgaagcgaggactaaaaatccaagcagcaaaatttaatattgatgggaataatgagcgtccctccccacccccaaatgttgactatccattagatggagagaagattttacatatccttggatcaatcagagattcagttgtggaaattctttttgaacaagataatgaagagcaatcagttgccactttaatattggattcccttatacagtgtccgatagacaccaggaagcaactagcagagaatttggtagtcataggtggcacttctatgttgccaggatttctccacagattgcttgcagaaataaggtatttggtagaaaaaccaaaatataaaaaagcacttggcactaagacatttcgaattcatactccacctgcaaaagctaattgtgtggcctggttgggaggggctatttttggagcattacaagatatacttgggagccgttctgtttcaaaggaatattataatcagacgggccgtatacctgattggtgttctctcaataacccacctttggaaatgatgtttgatgtcgggaaaactcaaccacctctgatgaagagagcattttccactgagaaatagaagtttgattaaaaatcaaccttgcttcatatcaaatatttaaccaattataagcaaattgtacaaagtatgtaggatgttttgttatagaggactatagtggaagtgaaagcattctgtgtttactctttgcattaatatataattcttttgactttgtttctcttgtgtagtggtaaaatggtagctggtgcttattgagatttgctgtatttatatcaataaagtatagtaaagcagtttgattttggaagtttgttatgtggctttttttttttttttttttttgagacggagtctcgctctgtcacttaggctggagtgcagtggcacaatctctactcattgcaagctccgcctcccgggtttacgccattctgtctcagcctcctgagtagctgggactataggcatacgccaccccgcccggctaattttttgtatatttagtagagacggggtttcaccatgttagccaggatggtctcaatttcctgacctcgtgatccaccctcctcggcctcccaaagtgttgggattacaggcgtgaaccactgtaccagcctatgttgcttgtctttcaaaaagaacagtatttctccacagttcacataacctgttctgggctcattaattgtgtttccagcagttactccatttaaagcataaatagtgttaaccattaccagttatttcaaatactaacatgggtccatttaaaaaaaatatttattttggtacttgggtgtccatattataataatgttgtttttccagaaatatatttgatctttggactgagaatgtttggtaacatagtcaagcatttgttaagccaagtgtggaaatgttcactttttaactttacagtttttttaatgagcaattctacatttctaagaaaaaagatacttcatttttatataaggttacaactgctttataaaaatgtattcacaatgtcattaatctttgcgtttgtgctttatatcttctcagggcagaggttcttgaaatatgtactcaatcatttaacttttattttattttttcatttgtttttaatgaactacctcttgttgaaattttgctggcttcattctttcgggatacctgtgtcctctagtcctaccgctcttccatagcactctttccttaagcacagtatccataattggggcacttctaacttttaccttgtaatcgtttcaacagaggttttatcttcttttctggaatataagctctcgtagaacaaggcttgtctatttcttaactttgaaacctcccaggaggattgccaggaataggtatactattatttgccaattggatggatttactattttattaacattatctcttttttcagtaaacatgaactttacatttat

SEQ ID NO: 8351 - protein, 219 aa, Homo sapiens; identical to SEQ ID NO: 8331

SEQ ID NO: 8352 - DNA, 2008 bp, Homo sapiens
ggcccgcttttttcccacaatactcctcgtcctgggggccggagccgcggaacgagccacagagaaaaaggttattggttggcagttcagccaatgagcgggcctgttactagtttgcggcatcctgtggtataggggaagcgctccgggcctggaatccctacgcgtccctttgggtttagcacgatgagctcaatcggcactgggtatgacctgtcagcctctacattctctcctgacggaagagtttttcaagttgaatatgctatgaaggctgtggaaaatagtagtacagctattggaatcagatgcaaagatggtgttgtctttggggtagaaaaattagtcctttctaaactttatgaagaaggttccaacaaaagactttttaatgttgatcggcatgttggaatggcagtagcaggtttgttggcagatgctcgttctttagcagacatagcaagagaagaagcttccaacttcagatctaactttggctacaacattccactaaaacatcttgcagacagagtggccatgtatgtgcatgcatatacactctacagtgctgttagaccttttggctgcagtttcatgttagggtcttacagtgtgaatgacggtgcgcaactctacatgattgacccatcaggtgtttcatacggttattggggctgtgccatcggcaaagccaggcaagctgcaaagacggaaatagagaagcttcagatgaaagaaatgacctgccgtgatatcgttaaagaagttgcaaaaatgtaagttgaaatttttcttaccatccacaaaaatatttcatttgacctttgcatatatatattacattaatcctaagaagctgttttcctgtaaaataacttagtgtataatttttagaaggtaaatttaacattctaagaagcctcacgaaggaagaaaatgtttttaagcaatattttttagtagtaatgaataggatgggaaaaatagcttgacaaaataaactcctgttacaggttaaggacatataccattagggtcttaatttgttagctcccaacttctcaaatctcttaagtcctaataatagtaatcttaagattgcctctattgtaagaatgcttacaaactttataggttacaactaattatttcaatacatgatccatgaagctggctcatttatataatctgctatttatttgggaaagatatgtttcactttttcaggtttattataaaagttcctataacaaggtaagaagagcagtattacaaaacatttcaacaaccagcttaagaaaccctgaatagtttattacaggtatataaagtagaatactattaatatgtaacaggtatttggacagtaaacaataaaaaagtcaattaacctgggtagtgatgtttctaaaattttgtgattctctagatcaaagagtgtagacatttggtattacaaaaagattccaacaaaatacgttgtgtagccagctttttagattcaaaagttatggataatcgtaattcataacaactctaagtattccacattagaactacataaacaaggtctagtcaatcacctgtctgtatggtagtgtatcaggttttacatctaacaatacgtggaagaaaaaaattccaatgggctctattgtttaataaacatactatttacatcacactcagagtctcttattaaccggtccatcattactgctactgcctttacccctcttgccacctcctcccctccgccctcctagtttcagttgtgaagcaagcagaagccattctatgattgtcagttaataatggcaacactaggaaccaacatgcagcagagctgctaagaaaggaagtcagatatcttccttgaattgtatagtatgttatcatgatatactctgtttccttcaccgaaccaatcctttgaagtccttctggaaatcagttcttaccatcttttatatttaggtataatggtagtcatctgttaagtgttcca

SEQ ID NO: 8353 - protein, 197 aa, Homo sapiens [sequence omitted]

SEQ ID NO: 8354 - DNA, 1071 bp, Homo sapiens
ggcccgcttttttcccacaatactcctcgtcctgggggccggagccgcggaacgagccacagagaaaaaggttattggttggcagttcagccaatgagcgggcctgttactagtttgcggcatcctgtggtataggggaagcgctccgggcctggaatccctacgcgtccctttgggtttagcacgatgagctcaatcggcactgggtatgacctgtcagcctctacattctctcctgacggaagagtttttcaagttgaatatgctatgaaggctgtggaaaatagtagtacagctattggaatcagatgcaaagatggtgttgtctttggggtagaaaaattagtcctttctaaactttatgaagaaggttccaacaaaagactttttaatgttgatcggcatgttggaatggcagtagcaggtttgttggcagatgctcgttctttagcagacatagcaagagaagaagcttccaacttcagatctaactttggctacaacattccactaaaacatcttgcagacagagtggccatgtatgtgcatgcatatacactctacagtgctgttagaccttttggctgcagtttcatgttagggtcttacagtgtgaatgacggtgcgcaactctacatgattgacccatcaggtgtttcatacggttattggggctgtgccatcggcaaagccaggcaagctgcaaagacggaaatagagaagcttcagatgaaagaaatgacctgccgtgatatcgttaaagaagttgcaaaaataatttacatagtacatgacgaagttaaggataaagcttttgaactagaactcagctgggttggtgaattaactaatggaagacatgaaattgttccaaaagatataagagaagaagcagagaaatatgctaaggaatctctgaaggaagaagatgaatcagatgatgataatatgtaacatttactccagcatctattgtattttaaatttctactccagtccaatgtaactatttagccctggattatacatactgtccaattttcattaaatttttgtcttataactattgaa

SEQ ID NO: 8355 - protein, 255 aa, Homo sapiens; identical to SEQ ID NO: 1212

SEQ ID NO: 8356 - DNA, 486 bp, Homo sapiens
agccaatgagcgggcctgttactagtttgcggcatcctgtggtataggggaagcgctccgggcctggaatccctacgcgtccctttgggtttagcacgatgagctcaatcggcactggggcctgcgtctcaggtgaccgtgactcctgaagcttttcagcgcaggtgtagccggcttggcgtcgccgcagtgaggtttggagccgctttggattgctgagtcactttcttcagccacttagggaaaccgaaagtggaaactcgtggggcttgaaatagtgtgttctcttgagaaccaccgaggcagtgagatttgggattccggggtctggagatcgtgctttttgtggactgcgtttgcagttcctagggtgctgctgattcacaggccttctctgtctttaagtgtgcagatcattgaccgctcagtttaagagtcactggaaatcctgtcggaacagaactaataaaaatggtctgaaaaaca

SEQ ID NO: 8357 - protein, 38 aa, Homo sapiens
AQSALGPASQVTVTPEAFQRRCSRLGVAAVRFGAALDC

SEQ ID NO: 8358 - DNA, 1351 bp, Homo sapiens
agccaatgagcgggcctgttactagtttgcggcatcctgtggtataggggaagcgctccgggcctggaatccctacgcgtccctttgggtttagcacgatgagctcaatcggcactgggtatgacctgtcagcctctacattctctcctgacggaagagtttttcaagttgaatatgctatgaaggctgtggaaaatagtagtacagctattggaatcagatgcaaagatggtgttgtctttggggtagaaaaattagtcctttctaaactttatgaagaaggttccaacaaaagactttttaatgttgatcggcatgttggaatggcagtagcaggtttgttggcagatgctcgttctttagcagacatagcaagagaagaagcttccaacttcagatctaactttggctacaacattccactaaaacatcttgcagacagagtggccatgtatgtgcatgcatatacactctacagtgctgttagaccttttggctgcaggtaagaaattttgtgaattattcaaaaggcagatctgtactatagatatttattatgttccccagcatcttagccttttacatacttaaaaatagaaactcgtcgataagtattagggcaatgattaaataaaacagtgtacatagaaactacttgaggctgggtgccatggctcaagcctgtaatcccagtactttgggaggttgaggtgggaggatccctcgcgcccaggagtatgagaccagcctggccaacgcagtgagaacctatctctacaaaaaaaatttaaaatttagccaggtgcagtatcacatgcctgtagtcacagctacttaggagctgcttgagaggatcatttgagcccaggagttgaaggctggaatgagctgtggccataccactgtactctagctggcgcaatagagactctgcctctttaaaaaaaaaaaaaaaaaaaaaaaaaaggtttcaatagtgaaaaggactatatagatctgaagtgattataaaacaaggaactgataacaatgactttaatctgattataataagctctcggtgttagtccctgatattcttaggtaattttaaaaattacgtctcacaattcccattaggcacggtttctctttctgttgaagtgctgatattttattgtggggtaaagtggagattcagctgcataaagacctggaataggtataaatattcaaatttggcttcacagagaagacttgtgactagatttttctaaaatgaaaagacatgtttggcttatgacttaaaacagtcaaacatgtttggtcaaaataatacatatactaacatctgagtgctcagctgtagtcc

SEQ ID NO: 8359 - protein, 135 aa, Homo sapiens
MSSIGTGYDLSASTFSPDGRVFQVEYAMKAVENSSTAIGIRCKDGVVFGVEKLVLSKLYEEGSNKRLFNVDRHVGMAVAGLLADARSLADIAREEASNFRSNFGYNIPLKHLADRVAMYVHAYTLYSAVRPFGCR

SEQ ID NO: 8360 - DNA, 900 bp, Homo sapiens
agccaatgagcgggcctgttactagtttgcggcatcctgtggtataggggaagcgctccgggcctggaatccctacgcgtccctttgggtttagcacgatgagctcaatcggcactgggtacagctattggaatcagatgcaaagatggtgttgtctttggggtagaaaaattagtcctttctaaactttatgaagaaggttccaacaaaagactttttaatgttgatcggcatgttggaatggcagtagcaggtttgttggcagatgctcgttctttagcagacatagcaagagaagaagcttccaacttcagatctaactttggctacaacattccactaaaacatcttgcagacagagtggccatgtatgtgcatgcatatacactctacagtgctgttagaccttttggctgcagtttcatgttagggtcttacagtgtgaatgacggtgcgcaactctacatgattgacccatcaggtgtttcatacggttattggggctgtgccatcggcaaagccaggcaagctgcaaagacggaaatagagaagcttcagatgaaagaaatgacctgccgtgatatcgttaaagaagttgcaaaaataatttacatagtacatgacgaagttaaggataaagcttttgaactagaactcagctgggttggtgaattaactaatggaagacatgaaattgttccaaaagatataagagaagaagcagagaaatatgctaaggaatctctgaaggaagaagatgaatcagatgatgataatatgtaacatttactccagcatctattgtattttaaatttctactccagtccaatgtaactatttagccctggattatacatactgtccaattttcattaaatttttgtcttataactattgaa

SEQ ID NO: 8361 - protein, 180 aa, Homo sapiens
MAVAGLLADARSLADIAREEASNFRSNFGYNIPLKHLADRVAMYVHAYTLYSAVRPFGCSFMLGSYSVNDGAQLYMIDPSGVSYGYWGCAIGKARQAAKTEIEKLQMKEMTCRDIVKEVAKIIYIVHDEVKDKAFELELSWVGELTNGRHEIVPKDIREEAEKYAKESLKEEDESDDDNM

SEQ ID NO: 8362 - DNA, 911 bp, Homo sapiens
gagggggatgtgtaagtggttaactgaagtctaactagataggtttgttgtaagcttaggatgtttacagttcttcatgttaagttgagcgtgatgggaagggaaagaatgctgatctttaaatttttgtccttagttaagttctgtatttagtgaattaattgcatcctaaaaagtcaaacttgaaaagcacattttaaatggcaaatctattttttacatgtttgtgaagtttttattttttagtaaacagaccatcagaagagaacaatggtacagagcaggggtcagcagatggattttgtaaagcatcaacttgtaaatattttcaagtttattagctgtatggctctggtttctgttccctgttccaaatgttaaagtctactgttgtattctaaaagcagccatggactgaatgtagctgtgttccaataaaacttacacaaaagcaggcagtgggccataatttgcaacacctgattcacagcataattttgtcacaaactgaaagtgttcctcaattaaagtgatttttttttcttgatttttctctgggatttattgtttttcccattccttgctaggatttaactacagaaagacagatagtaatgcactccagcctgggcaacagagtgagactccatcaaaaaaaaaaaaaaaaaggatgtacacatatatacttctgttacagcaaaatatatttaagaatcttcattttcttcaattagtaaaaacgacaaaaatgtaaggataagaaaacagttaagaaacggtaacaggccgggtgcagtggctcacacaaagtgcttgtaatcccagcactttgggaatctgaggcacgtggatcacttgaggccaggagttccagaccagcctgggcaacatggtgaaagtctgtctctact

SEQ ID NO: 8363 - protein, 39 aa, Homo sapiens
MHSSLGNRVRLHQKKKKKGCTHIYFCYSKIYLRIFIFFN

SEQ ID NO: 8364 - DNA, 2096 bp, Homo sapiens
ttgctgtaacagaagtatatatgtgtacatcctttttttttttttttttgatggagtctcactctgttgcccaggctggagtgcagtggcgcggtctcagctcactgcaacctctgcctcccagattcaagcgattctcctgcctcagcctctggagtagctggcattacaggcacctgccaccacacctagctaatttttttgtatttttagtagagacagggttttacaatgttggccaggccggtctccaactcctgacctgaggtgatctgcccaccttggccttccatagtgctgggattacaggcatgacccaccacacccagctgtgcatccttatctttaaaaaaatttacaaaataataaaattgggggtttagagtactgaactcataggaattaactttatttctgtctctcaggaatatataatttcatttttcattgtcatagtgctaaaatcttttccgttcctgttccccaaaatgtcttaaagtgtatatgattacataatttacatatttttggatatacctttattaaaaatacaggttgttttggaattgtttggtattttagtatttttgagccctttggcattcatcagaatgtgtttgactatatttttctatacttgcttttaaaagtcatttagcatcctttcactaggttatagaaacattagtagtcattaattacatatgatagtgtactaattcagtgattatatatatttttttctaaatagggttattggggctgtgccatcggcaaagccaggcaagctgcaaagacggaaatagagaagcttcagatgaaagaaatgacctgccgtgatatcgttaaagaagttgcaaaaatgtaagttgaaatttttcttaccatccacaaaaatatttcatttgacctttgcatatatatattacattaatcctaagaagctgttttcctgtaaaataacttagtgtataatttttagaaggtaaatttaacattctaagaagcctcacgaaggaagaaaatgtttttaagcaatattttttagtagtaatgaataggatgggaaaaatagcttgacaaaataaactcctgttacaggttaaggacatataccattagggtcttaatttgttagctcccaacttctcaaatctcttaagtcctaataatagtaatcttaagattgcctctattgtaagaatgcttacaaactttataggttacaactaattatttcaatacatgatccatgaagctggctcatttatataatctgctatttatttgggaaagatatgtttcactttttcaggtttattataaaagttcctataacaaggtaagaagagcagtattacaaaacatttcaacaaccagcttaagaaaccctgaatagtttattacaggtatataaagtagaatactattaatatgtaacaggtatttggacagtaaacaataaaaaagtcaattaacctgggtagtgatgtttctaaaattttgtgattctctagatcaaagagtgtagacatttggtattacaaaaagattccaacaaaatacgttgtgtagccagctttttagattcaaaagttatggataatcgtaattcataacaactctaagtattccacattagaactacataaacaaggtctagtcaatcacctgtctgtatggtagtgtatcaggttttacatctaacaatacgtggaagaaaaaaattccaatgggctctattgtttaataaacatactatttacatcacactcagagtctcttattaaccggtccatcattactgctactgcctttacccctcttgccacctcctcccctccgccctcctagtttcagttgtgaagcaagcagaagccattctatgattgtcagttaataatggcaacactaggaaccaacatgcagcagagctgctaagaaaggaagtcagatatcttccttgaattgtatagtatgttatcatgatatactctgtttccttcaccgaaccaatcctttgaagtccttctggaaatcagttcttaccatcttttatatttaggtataatggtagtcatctgttaagtgttcca

SEQ ID NO: 8365 - protein, 81 aa, Homo sapiens
MCTSFFFFFLMESHSVAQAGVQWRGLSSLQPLPPRFKRFSCLSLWSSWHYRHLPPHLANFFVFLVETGFYNVGQAGLQLLT

SEQ ID NO: 8366 - DNA, 2217 bp, Homo sapiens
acttattagtgcttggcatttatacaatgctaagttctagaaccccctataaaacctaatttgtttcgtattttagtaaagctgacaaaaggatcttagaggtcatttagcccaagctcaactgcagattaaacacactgcataggaccacagaatcagctggttctgaacagtatccagaccttatgagtcttagacctatgttcttttccattgcacacttactagtatgatgctaggttcctatcttctactcttttccttttgttttcatctctccatactattatatggaaatttgaaaattagaatatttatgtcagttgagggggattacccctgtaatcctaccagtttggtaggccaagttgggaggactgcttgagcccagtagttccaagaccaggctgggcaaaagagtaagaccctatctcccaaaacaaaatgttagcgagtagttgggactacaggcctatggccacctcacctggctaatttttgtatttttagtagagacgtgggttcaccatgttggccaggatggtctcgaactcctgacctcatgatccacccgcctctgcctccccaaagtgctaggattacaggcacgagccaccatgtccagccaattagttggttttaaatatatttaagttaatggacaaaatattctaaaagggcacagttaatgacgcctcttcctagtgaatccgtgttctttatgaggtatcttttatagttgtatctttttttttttctgagatggagtctcgctctactgtagcccaggatggagtgcagtagtgtgatcttggctcactgcaacccctgcctcccgggttcaaggaattctcctgccttagcctcctgagtagctgagattacaggcgcccaccaccacacctggctgatttttgtttcttagtagagacagggtttcaccatgttggccaggctagtctcgaactgacctcaagtgatccatccgccttggtctcccaaagtgttgggattacaggtgtgagccactgtgcccagccaagttatatctctaaagcaatgtgcaaaaataaactgaacttgggttgattaggtatattcaacatttgtcgggagagtagatgtttcattttatttcagtccctgtgtaatttgtcttctctaatgttaaatactatgtagaatgtgtctgtgtaattttatagatacttttattatggatggacattctaatttgtactgactttgggtctgtgaactacttcaatgtttggaggttaccaaaatcttacctttcccttttctattctagaatttacatagtacatgacgaagttaaggataaagcttttgaactagaactcagctgggttggtgaatgtaagttatttttgtacatttatttgccttaggaatgatctgtaccacagctaatttacaactgagtgtcctttctaatataatgaaagctaaagcaaatttactaggttgtctaatgaagggaaagttctgcttaataattgacttaagttgtgaacacgttattttttgaaacatccatttcatggttttaagatactatgctataaattaatgctcaggatttataaatagcataatttactttcatttccataagaacttaatatgtaggcacatataatctcatgtagaagcagcacacaaaaatattcgagtattactcatagtacaactttgcaaccttaggtgagtcagatatgtggattgggtagatcctatggtatactgcaagttacaatatggtactcaatttaaaattcatttacacatgtggcttaatttacagtaactaatggaagacatgaaattgttccaaaagatataagagaagaagcagagaaatatgctaaggtaagccacagcacaaaaacttctcttggccaggtacagtcagggaatcacttagcccaggagtttgagaccagcctgagcagcacagcaagacccccatccctaatttaaaaaaaaaaaaattctctaaccaaaattatgtgttgaataatataaatagactggggtggtttctatgaaataacactgagagttcagttgaactaaagatagaaattttctaggttatctctagtgggtaaagttgccttggttccaaaaaaaaaaaacttgggaggtttagactgcaaagagttttttaggacttttaatactttaaatatt

SEQ ID NO: 8367 - protein, 63 aa, Homo sapiens [sequence omitted]

SEQ ID NO: 8368 - DNA, 2759 bp, Homo sapiens
aaaaaactaatttatgtgcttgcaattattagtggtctcttcaacctatagcttcttggcagtagtctttttaagctccttgtccattttataatggcatatatgccacataacctggccttcacattgtagtaccttacaaattacagcaaagaaggaggcactgtcatgcaacatattaaagtaacataaaaagtatcaagaggccaggtgcggtggttcacatctgtaatcccagcactttgggaggccaaggtgggtggatcacaaggtcaggagttcaagaccagcctggccaagatggtaaagcctgtctctactaaaaatacaaaaattagccaggtgtggtggtgggcgcctgtaatcccagctacttgagaggctgatgcaggagaattgcttgaacacgggaggcggaggttgcagtgagccaagatcgtgccactgccctccagtctggacgacagagtgagactccatctcaaaaaaaaaaaagtatcaaattaagtacagtagcagagtatagctttatctaatactatgcactgagttacataccttactttttggagggtcttctaaaaccttgctataatatgagaggatcttgattttctacaactaagtaaaagataacatgctgctccattttcttaaatgatgaagggatggctttcctaacatggaacacttaacagatgactaccattatacctaaatataaaagatgatataaaaccaaggaaaataacctaaagtctgaaaaagaccagaatcgaagtttcctgattcatattttaatgttttgaaatttatactccaggctgggtgcagtggcttgtgcctgtaatcccagcactttgggaggccgaggcggccggattgcctgaagtcagaagttcgagaccagcctgaccaacatggtgaaaccctgtctctacttaaaaatacaaaagagctgggcatggaggtggtgcgcgcctgtaaccctagctactcgggaggctgaggcctaagaatctcttgaacccaggaggcagaggttgtagtgagccgggatcacgccactgcactctagcctgggcgacagagagagagactgtctaaaaaaggaaaagaaaaaaatttatacgccaaaaaagatattctgagataacctgtagttaccactaactttgtgacaaaattataaaaatccacagccatctatgaatctgtaggcagacctgaagtttgaacgactggtgaagacatctgattttctttatagccaagttaggataacaaaatgcaaacaagtcattaatatttactatatgcaagatacagaaagatgaaggaaggagtaagaagttatccttcgtggaactattcaaagcaaaaatgcaaaataccagggaaagctttgaagaaccaagatttgagcaggttcttagaatatagattggattggatttgatttcaagaaagatgaacgtgtaaagcagaagtgggaagccaaaaacttttttccaaattagaattaagcattctttcaatgaacatttggaaatcaaggtagaaaaatatccctagggcctagctgaggagtctgtatgttgttgggttttgatagtaaccagtccaagattttgttattagacgtgggtttctgaatagacaggcatttctgaacagacatgacaggatcaaaacaatgtttgagcaaactgcccttcatctactgtggatatgttgggggatgatggaatatagtgaaagataatgggtgctcatacagcagtctagacttaaggtgattcaactactatatattaaactagattatcttttattttttaattttgaaatctggatgctcaagctctgcctgcacaaccacatgaggaagaaggaacaatgacaacaaaaataacactaaatttaaatttaagagtactacttttaggaaatagacaaaccattatttgggtacaactaaaggcaactggcatggactcaaatattttggggaagaaaaagactaaaagttctaaggaagaaaatgcgaaccttgatagtttgaaatagttaaaaagacagtgtagaaactgcttaggcagtttgattatggactattagatgatacttgggtctgataatggtataaggagaataaagtatttagggatccaatattacgcctgcagctttttccaaatagttcatgggggagggggatgtgtaagtggttaactgaagtctaactagataggtttgttgtaagcttaggatgtttacagttcttcatgttaagttgagcgtgatgggaagggaaagaatgctgatctttaaatttttgtccttagttaagttctgtatttagtgaattaattgcatcctaaaaagtcaaacttgaaaagcacattttaaatggcaaatctattttttacatgtttgtgaagtttttattttttagtaaacagaccatcagaagagaacaatggtacagagcaggggtcagcagatggattttgtaaagcatcaacttgtaaatattttcaagtttattagctgtatggctctggtttctgttccctgttccaaatgttaaagtctactgttgtattctaaaagcagccatggactgaatgtagctgtgttccaataaaacttacacaaaagcaggcagtgggccataatttgcaacacctgattcacagcataattttgtcacaaactgaaagtgttcctcaattaaagtgatttttttttcttga

SEQ ID NO: 8369 - protein, 56 aa, Homo sapiens [sequence omitted]

SEQ ID NO: 8370 - DNA, 2145 bp, Homo sapiens
gcattttatgtttctggcgagaagggaacggagttttcatcagaataagactgattttatgggaaaattaagcagatgctccagtttgagaaacctggatctgcgatctgtttgtgatataaaaccaaggaaaataacctaaagtctgaaaaagaccagaatcgaagtttcctgattcatattttaatgttttgaaatttatactccaggctgggtgcagtggcttgtgcctgtaatcccagcactttgggaggccgaggcggccggattgcctgaagtcagaagttcgagaccagcctgaccaacatggtgaaaccctgtctctacttaaaaatacaaaagagctgggcatggaggtggtgcgcgcctgtaaccctagctactcgggaggctgaggcctaagaatctcttgaacccaggaggcagaggttgtagtgagccgggatcacgccactgcactctagcctgggcgacagagagagagactgtctaaaaaaggaaaagaaaaaaatttatacgccaaaaaagatattctgagataacctgtagttaccactaactttgtgacaaaattataaaaatccacagccatctatgaatctgtaggcagacctgaagtttgaacgactggtgaagacatctgattttctttatagccaagttaggataacaaaatgcaaacaagtcattaatatttactatatgcaagatacagaaagatgaaggaaggagtaagaagttatccttcgtggaactattcaaagcaaaaatgcaaaataccagggaaagctttgaagaaccaagatttgagcaggttcttagaatatagattggattggatttgatttcaagaaagatgaacgtgtaaagcagaagtgggaagccaaaaacttttttccaaattagaattaagcattctttcaatgaacatttggaaatcaaggtagaaaaatatccctagggcctagctgaggagtctgtatgttgttgggttttgatagtaaccagtccaagattttgttattagacgtgggtttctgaatagacaggcatttctgaacagacatgacaggatcaaaacaatgtttgagcaaactgcccttcatctactgtggatatgttgggggatgatggaatatagtgaaagataatgggtgctcatacagcagtctagacttaaggtgattcaactactatatattaaactagattatcttttattttttaattttgaaatctggatgctcaagctctgcctgcacaaccacatgaggaagaaggaacaatgacaacaaaaataacactaaatttaaatttaagagtactacttttaggaaatagacaaaccattatttgggtacaactaaaggcaactggcatggactcaaatattttggggaagaaaaagactaaaagttctaaggaagaaaatgcgaaccttgatagtttgaaatagttaaaaagacagtgtagaaactgcttaggcagtttgattatggactattagatgatacttgggtctgataatggtataaggagaataaagtatttagggatccaatattacgcctgcagctttttccaaatagttcatgggggagggggatgtgtaagtggttaactgaagtctaactagataggtttgttgtaagcttaggatgtttacagttcttcatgttaagttgagcgtgatgggaagggaaagaatgctgatctttaaatttttgtccttagttaagttctgtatttagtgaattaattgcatcctaaaaagtcaaacttgaaaagcacattttaaatggcaaatctattttttacatgtttgtgaagtttttattttttagtaaacagaccatcagaagagaacaatggtacagagcaggggtcagcagatggattttgtaaagcatcaacttgtaaatattttcaagtttattagctgtatggctctggtttctgttccctgttccaaatgttaaagtctactgttgtattctaaaagcagccatggactgaatgtagctgtgttccaataaaacttacacaaaagcaggcagtgggccataatttgcaacacctgattcacagcataattttgtcacaaactgaaagtgttcctcaattaaagtgatttttttttcttga

SEQ ID NO: 8371 - protein, 44 aa, Homo sapiens
MFLARRERSFHQNKTDFMGKLSRCSSLRNLDLRSVCDIKPRKIT

SEQ ID NO: 8372 - DNA, 2357 bp, Homo sapiens
aaaccagcttgtcggcgccattttgtctcggcagcggtggccgtagctccatcgcattttatgtttctggcgagaagggaacggagttttcatcaggtagattggtttttgtgcggccgtcctccaccgtttcctccaggacagcacctagtcgtggccggaggagtctcagagctgtcagaaagaataagactgattttatgggaaaattaagcagatgctccagtttgagaaacctggatctgcgatctgtttgtggtctctatgaataaagaaaagcaaatagaatcttatcagataagtgcttttataagtctaaatatattctttggaatctctaaagcaaaacttttaaacctgaaaaagaccagaatcgaagtttcctgattcatattttaatgttttgaaatttatactccaggctgggtgcagtggcttgtgcctgtaatcccagcactttgggaggccgaggcggccggattgcctgaagtcagaagttcgagaccagcctgaccaacatggtgaaaccctgtctctacttaaaaatacaaaagagctgggcatggaggtggtgcgcgcctgtaaccctagctactcgggaggctgaggcctaagaatctcttgaacccaggaggcagaggttgtagtgagccgggatcacgccactgcactctagcctgggcgacagagagagagactgtctaaaaaaggaaaagaaaaaaatttatacgccaaaaaagatattctgagataacctgtagttaccactaactttgtgacaaaattataaaaatccacagccatctatgaatctgtaggcagacctgaagtttgaacgactggtgaagacatctgattttctttatagccaagttaggataacaaaatgcaaacaagtcattaatatttactatatgcaagatacagaaagatgaaggaaggagtaagaagttatccttcgtggaactattcaaagcaaaaatgcaaaataccagggaaagctttgaagaaccaagatttgagcaggttcttagaatatagattggattggatttgatttcaagaaagatgaacgtgtaaagcagaagtgggaagccaaaaacttttttccaaattagaattaagcattctttcaatgaacatttggaaatcaaggtagaaaaatatccctagggcctagctgaggagtctgtatgttgttgggttttgatagtaaccagtccaagattttgttattagacgtgggtttctgaatagacaggcatttctgaacagacatgacaggatcaaaacaatgtttgagcaaactgcccttcatctactgtggatatgttgggggatgatggaatatagtgaaagataatgggtgctcatacagcagtctagacttaaggtgattcaactactatatattaaactagattatcttttattttttaattttgaaatctggatgctcaagctctgcctgcacaaccacatgaggaagaaggaacaatgacaacaaaaataacactaaatttaaatttaagagtactacttttaggaaatagacaaaccattatttgggtacaactaaaggcaactggcatggactcaaatattttggggaagaaaaagactaaaagttctaaggaagaaaatgcgaaccttgatagtttgaaatagttaaaaagacagtgtagaaactgcttaggcagtttgattatggactattagatgatacttgggtctgataatggtataaggagaataaagtatttagggatccaatattacgcctgcagctttttccaaatagttcatgggggagggggatgtgtaagtggttaactgaagtctaactagataggtttgttgtaagcttaggatgtttacagttcttcatgttaagttgagcgtgatgggaagggaaagaatgctgatctttaaatttttgtccttagttaagttctgtatttagtgaattaattgcatcctaaaaagtcaaacttgaaaagcacattttaaatggcaaatctattttttacatgtttgtgaagtttttattttttagtaaacagaccatcagaagagaacaatggtacagagcaggggtcagcagatggattttgtaaagcatcaacttgtaaatattttcaagtttattagctgtatggctctggtttctgttccctgttccaaatgttaaagtctactgttgtattctaaaagcagccatggactgaatgtagctgtgttccaataaaacttacacaaaagcaggcagtgggccataatttgcaacacctgattcacagcataattttgtcacaaactgaaagtgttcctcaattaaagtgatttttttttcttga

SEQ ID NO: 8373 - protein, 50 aa, Homo sapiens
MFLARRERSFHQVDWFLCGRPPPFPPGQHLVVAGGVSELSERIRLILWEN

SEQ ID NO: 8374 - DNA, 2485 bp, Homo sapiens
aaaccagcttgtcggcgccattttgtctcggcagcggtggccgtagctccatcgcattttatgtttctggcgagaagggaacggagttttcatcaggtagattggtttttgtgcggccgtcctccaccgtttcctccaggacagcacctagtcgtggccggaggagtctcagagctgtcagaaagaataagactgattttatgggaaaattaagcagatgctccagtttgagaaacctggatctgcgatctgtttgtgagtggtattcagttaagagaacaattatttcgtataagccacatcagagacgactgaagatgaaaaaactaccatccccgtatataactaatttgtgctgtgcaccaacaagaacctgctttaaatttccatggcaatttacaacccccatactgtaccaggcaaggtaccagcatcaagatgatttatggtaataagatataaaaccaaggaaaataacctaaagtctgaaaaagaccagaatcgaagtttcctgattcatattttaatgttttgaaatttatactccaggctgggtgcagtggcttgtgcctgtaatcccagcactttgggaggccgaggcggccggattgcctgaagtcagaagttcgagaccagcctgaccaacatggtgaaaccctgtctctacttaaaaatacaaaagagctgggcatggaggtggtgcgcgcctgtaaccctagctactcgggaggctgaggcctaagaatctcttgaacccaggaggcagaggttgtagtgagccgggatcacgccactgcactctagcctgggcgacagagagagagactgtctaaaaaaggaaaagaaaaaaatttatacgccaaaaaagatattctgagataacctgtagttaccactaactttgtgacaaaattataaaaatccacagccatctatgaatctgtaggcagacctgaagtttgaacgactggtgaagacatctgattttctttatagccaagttaggataacaaaatgcaaacaagtcattaatatttactatatgcaagatacagaaagatgaaggaaggagtaagaagttatccttcgtggaactattcaaagcaaaaatgcaaaataccagggaaagctttgaagaaccaagatttgagcaggttcttagaatatagattggattggatttgatttcaagaaagatgaacgtgtaaagcagaagtgggaagccaaaaacttttttccaaattagaattaagcattctttcaatgaacatttggaaatcaaggtagaaaaatatccctagggcctagctgaggagtctgtatgttgttgggttttgatagtaaccagtccaagattttgttattagacgtgggtttctgaatagacaggcatttctgaacagacatgacaggatcaaaacaatgtttgagcaaactgcccttcatctactgtggatatgttgggggatgatggaatatagtgaaagataatgggtgctcatacagcagtctagacttaaggtgattcaactactatatattaaactagattatcttttattttttaattttgaaatctggatgctcaagctctgcctgcacaaccacatgaggaagaaggaacaatgacaacaaaaataacactaaatttaaatttaagagtactacttttaggaaatagacaaaccattatttgggtacaactaaaggcaactggcatggactcaaatattttggggaagaaaaagactaaaagttctaaggaagaaaatgcgaaccttgatagtttgaaatagttaaaaagacagtgtagaaactgcttaggcagtttgattatggactattagatgatacttgggtctgataatggtataaggagaataaagtatttagggatccaatattacgcctgcagctttttccaaatagttcatgggggagggggatgtgtaagtggttaactgaagtctaactagataggtttgttgtaagcttaggatgtttacagttcttcatgttaagttgagcgtgatgggaagggaaagaatgctgatctttaaatttttgtccttagttaagttctgtatttagtgaattaattgcatcctaaaaagtcaaacttgaaaagcacattttaaatggcaaatctattttttacatgtttgtgaagtttttattttttagtaaacagaccatcagaagagaacaatggtacagagcaggggtcagcagatggattttgtaaagcatcaacttgtaaatattttcaagtttattagctgtatggctctggtttctgttccctgttccaaatgttaaagtctactgttgtattctaaaagcagccatggactgaatgtagctgtgttccaataaaacttacacaaaagcaggcagtgggccataatttgcaacacctgattcacagcataattttgtcacaaactgaaagtgttcctcaattaaagtgatttttttttcttga

SEQ ID NO: 8375 - protein, 83 aa, Homo sapiens
MGKLSRCSSLRNLDLRSVCEWYSVKRTIISYKPHQRRLKMKKLPSPYITNLCCAPTRTCFKFPWQFTTPILYQARYQHQDDLW

SEQ ID NO: 8376 - DNA, 2319 bp, Homo sapiens
aaaccagcttgtcggcgccattttgtctcggcagcggtggccgtagctccatcgcattttatgtttctggcgagaagggaacggagttttcatcaggtagattggtttttgtgcggccgtcctccaccgtttcctccaggacagcacctagtcgtggccggaggagtctcagagctgtcagaaagaataagactgattttatgggaaaattaagcagatgctccagtttgagaaacctggatctgcgatctgtttgtggtaccagcatcaagatgatttatggtaataagatataaaaccaaggaaaataacctaaagtctgaaaaagaccagaatcgaagtttcctgattcatattttaatgttttgaaatttatactccaggctgggtgcagtggcttgtgcctgtaatcccagcactttgggaggccgaggcggccggattgcctgaagtcagaagttcgagaccagcctgaccaacatggtgaaaccctgtctctacttaaaaatacaaaagagctgggcatggaggtggtgcgcgcctgtaaccctagctactcgggaggctgaggcctaagaatctcttgaacccaggaggcagaggttgtagtgagccgggatcacgccactgcactctagcctgggcgacagagagagagactgtctaaaaaaggaaaagaaaaaaatttatacgccaaaaaagatattctgagataacctgtagttaccactaactttgtgacaaaattataaaaatccacagccatctatgaatctgtaggcagacctgaagtttgaacgactggtgaagacatctgattttctttatagccaagttaggataacaaaatgcaaacaagtcattaatatttactatatgcaagatacagaaagatgaaggaaggagtaagaagttatccttcgtggaactattcaaagcaaaaatgcaaaataccagggaaagctttgaagaaccaagatttgagcaggttcttagaatatagattggattggatttgatttcaagaaagatgaacgtgtaaagcagaagtgggaagccaaaaacttttttccaaattagaattaagcattctttcaatgaacatttggaaatcaaggtagaaaaatatccctagggcctagctgaggagtctgtatgttgttgggttttgatagtaaccagtccaagattttgttattagacgtgggtttctgaatagacaggcatttctgaacagacatgacaggatcaaaacaatgtttgagcaaactgcccttcatctactgtggatatgttgggggatgatggaatatagtgaaagataatgggtgctcatacagcagtctagacttaaggtgattcaactactatatattaaactagattatcttttattttttaattttgaaatctggatgctcaagctctgcctgcacaaccacatgaggaagaaggaacaatgacaacaaaaataacactaaatttaaatttaagagtactacttttaggaaatagacaaaccattatttgggtacaactaaaggcaactggcatggactcaaatattttggggaagaaaaagactaaaagttctaaggaagaaaatgcgaaccttgatagtttgaaatagttaaaaagacagtgtagaaactgcttaggcagtttgattatggactattagatgatacttgggtctgataatggtataaggagaataaagtatttagggatccaatattacgcctgcagctttttccaaatagttcatgggggagggggatgtgtaagtggttaactgaagtctaactagataggtttgttgtaagcttaggatgtttacagttcttcatgttaagttgagcgtgatgggaagggaaagaatgctgatctttaaatttttgtccttagttaagttctgtatttagtgaattaattgcatcctaaaaagtcaaacttgaaaagcacattttaaatggcaaatctattttttacatgtttgtgaagtttttattttttagtaaacagaccatcagaagagaacaatggtacagagcaggggtcagcagatggattttgtaaagcatcaacttgtaaatattttcaagtttattagctgtatggctctggtttctgttccctgttccaaatgttaaagtctactgttgtattctaaaagcagccatggactgaatgtagctgtgttccaataaaacttacacaaaagcaggcagtgggccataatttgcaacacctgattcacagcataattttgtcacaaactgaaagtgttcctcaattaaagtgatttttttttcttga

SEQ ID NO: 8377 - protein, 50 aa, Homo sapiens; identical to SEQ ID NO: 8373

SEQ ID NO: 8378 - DNA, 2444 bp, Homo sapiens
aaaccagcttgtcggcgccattttgtctcggcagcggtggccgtagctccatcgcattttatgtttctggcgagaagggaacggagttttcatcaggtagattggtttttgtgcggccgtcctccaccgtttcctccaggacagcacctagtcgtggccggaggagtctcagagctgtcagaaagaataagactgattttatgggaaaattaagcagatgctccagtttgagaaacctggatctgcgatctgtttgtggtctctatgaataaagaaaagcaaatagaatcttatcagataagtgcttttataagtctaaatatattctttggaatctctaaagcaaaacttttaaacttttttttttttttttttttttttaggtaccagcatcaagatgatttatggtaataagatataaaaccaaggaaaataacctaaagtctgaaaaagaccagaatcgaagtttcctgattcatattttaatgttttgaaatttatactccaggctgggtgcagtggcttgtgcctgtaatcccagcactttgggaggccgaggcggccggattgcctgaagtcagaagttcgagaccagcctgaccaacatggtgaaaccctgtctctacttaaaaatacaaaagagctgggcatggaggtggtgcgcgcctgtaaccctagctactcgggaggctgaggcctaagaatctcttgaacccaggaggcagaggttgtagtgagccgggatcacgccactgcactctagcctgggcgacagagagagagactgtctaaaaaaggaaaagaaaaaaatttatacgccaaaaaagatattctgagataacctgtagttaccactaactttgtgacaaaattataaaaatccacagccatctatgaatctgtaggcagacctgaagtttgaacgactggtgaagacatctgattttctttatagccaagttaggataacaaaatgcaaacaagtcattaatatttactatatgcaagatacagaaagatgaaggaaggagtaagaagttatccttcgtggaactattcaaagcaaaaatgcaaaataccagggaaagctttgaagaaccaagatttgagcaggttcttagaatatagattggattggatttgatttcaagaaagatgaacgtgtaaagcagaagtgggaagccaaaaacttttttccaaattagaattaagcattctttcaatgaacatttggaaatcaaggtagaaaaatatccctagggcctagctgaggagtctgtatgttgttgggttttgatagtaaccagtccaagattttgttattagacgtgggtttctgaatagacaggcatttctgaacagacatgacaggatcaaaacaatgtttgagcaaactgcccttcatctactgtggatatgttgggggatgatggaatatagtgaaagataatgggtgctcatacagcagtctagacttaaggtgattcaactactatatattaaactagattatcttttattttttaattttgaaatctggatgctcaagctctgcctgcacaaccacatgaggaagaaggaacaatgacaacaaaaataacactaaatttaaatttaagagtactacttttaggaaatagacaaaccattatttgggtacaactaaaggcaactggcatggactcaaatattttggggaagaaaaagactaaaagttctaaggaagaaaatgcgaaccttgatagtttgaaatagttaaaaagacagtgtagaaactgcttaggcagtttgattatggactattagatgatacttgggtctgataatggtataaggagaataaagtatttagggatccaatattacgcctgcagctttttccaaatagttcatgggggagggggatgtgtaagtggttaactgaagtctaactagataggtttgttgtaagcttaggatgtttacagttcttcatgttaagttgagcgtgatgggaagggaaagaatgctgatctttaaatttttgtccttagttaagttctgtatttagtgaattaattgcatcctaaaaagtcaaacttgaaaagcacattttaaatggcaaatctattttttacatgtttgtgaagtttttattttttagtaaacagaccatcagaagagaacaatggtacagagcaggggtcagcagatggattttgtaaagcatcaacttgtaaatattttcaagtttattagctgtatggctctggtttctgttccctgttccaaatgttaaagtctactgttgtattctaaaagcagccatggactgaatgtagctgtgttccaataaaacttacacaaaagcaggcagtgggccataatttgcaacacctgattcacagcataattttgtcacaaactgaaagtgttcctcaattaaagtgatttttttttcttga

SEQ ID NO: 8379 - protein, 50 aa, Homo sapiens; identical to SEQ ID NO: 8373

SEQ ID NO: 8380 - DNA, 2686 bp, Homo sapiens
aaaaaactaatttatgtgcttgcaattattagtggtctcttcaacctatagcttcttggcagtagtctttttaagctccttgtccattttataatggcatatatgccacataacctggccttcacattgtagtaccttacaaattacagcaaagaaggaggcactgtcatgcaacatattaaagtaacataaaaagtatcaagaggccaggtgcggtggttcacatctgtaatcccagcactttgggaggccaaggtgggtggatcacaaggtcaggagttcaagaccagcctggccaagatggtaaagcctgtctctactaaaaatacaaaaattagccaggtgtggtggtgggcgcctgtaatcccagctacttgagaggctgatgcaggagaattgcttgaacacgggaggcggaggttgcagtgagccaagatcgtgccactgccctccagtctggacgacagagtgagactccatctcaaaaaaaaaaaagtatcaaattaagtacagtagcagagtatagctttatctaatactatgcactgagttacataccttactttttggagggtcttctaaaaccttgctataatatgagaggatcttgattttctacaactaagtaaaagataacatgctgctccattttcttaaatgatgaagggatggctttcctaacatggaacacttaacagatgactaccattatacctaaatataaaagatgatataaaaccaaggaaaataacctaaagtctgaaaaagaccagaatcgaagtttcctgattcatattttaatgttttgaaatttatactccaggctgggtgcagtggcttgtgcctgtaatcccagcactttgggaggccgaggcggccggattgcctgaagtcagaagttcgagaccagcctgaccaacatggtgaaaccctgtctctacttaaaaatacaaaagagctgggcatggaggtggtgcgcgcctgtaaccctagctactcgggaggctgaggcctaagaatctcttgaacccaggaggcagaggttgtagtgagccgggatcacgccactgcactctagcctgggcgacagagagagagactgtctaaaaaaggaaaagaaaaaaatttatacgccaaaaaagatattctgagataacctgtagttaccactaactttgtgacaaaattataaaaatccacagccatctatgaatctgtaggcagacctgaagtttgaacgactggtgaagacatctgattttctttatagccaagttaggataacaaaatgcaaacaagtcattaatatttactatatgcaagatacagaaagatgaaggaaggagtaagaagttatccttcgtggaactattcaaagcaaaaatgcaaaataccagggaaagctttgaagaaccaagatttgagcaggttcttagaatatagattggattggatttgatttcaagaaagatgaacgtgtaaagcagaagtgggaagccaaaaacttttttccaaattagaattaagcattctttcaatgaacatttggaaatcaaggtagaaaaatatccctagggcctagctgaggagtctgtatgttgttgggttttgatagtaaccagtccaagattttgttattagacgtgggtttctgaatagacaggcatttctgaacagacatgacaggatcaaaacaatgtttgagcaaactgcccttcatctactgtggatatgttgggggatgatggaatatagtgaaagataatgggtgctcatacagcagtctagacttaaggtgattcaactactatatattaaactagattatcttttattttttaattttgaaatctggatgctcaagctctgcctgcacaaccacatgaggaagaaggaacaatgacaacaaaaataacactaaatttaaatttaagagtactacttttaggaaatagacaaaccattatttgggtacaactaaaggcaactggcatggactcaaatattttggggaagaaaaagactaaaagttctaaggaagaaaatgcgaaccttgatagtttgaaatagttaaaaagacagtgtagaaactgcttaggcagtttgattatggactattagatgatacttgggtctgataatggtataaggagaataaagtatttagggatccaatattacgcctgcagctttttccaaatagttcatgggggagggggatgtgtaagtggttaactgaagtctaactagataggtttgttgtaagcttaggatgtttacagttcttcatgttaagttgagcgtgatgggaagggaaagaatgctgatctttaaatttttgtccttagttaagttctgtatttagtgaattaattgcatcctaaaaagtcaaacttgaaaagcacattttaaatggcaaatctattttttacatgtttgtgaagtttttattttttagtaaacagaccatcagaagagaacaatggtacagagcaggggtcagcagatggattttgtaaagcatcaacttgtaaatattttcaagtttattagctgtatggctctggtttctgttccctgttccaaatgttaaagtctactgttgtattctaaaagcagccatggactgaatgtagctgtgttccaataaaacttacacaaaagcaggcagtgggccataatttgc

SEQ ID NO: 8381 - protein, 56 aa, Homo sapiens [sequence omitted]

SEQ ID NO: 8382 - DNA, 2072 bp, Homo sapiens
gcattttatgtttctggcgagaagggaacggagttttcatcagaataagactgattttatgggaaaattaagcagatgctccagtttgagaaacctggatctgcgatctgtttgtgatataaaaccaaggaaaataacctaaagtctgaaaaagaccagaatcgaagtttcctgattcatattttaatgttttgaaatttatactccaggctgggtgcagtggcttgtgcctgtaatcccagcactttgggaggccgaggcggccggattgcctgaagtcagaagttcgagaccagcctgaccaacatggtgaaaccctgtctctacttaaaaatacaaaagagctgggcatggaggtggtgcgcgcctgtaaccctagctactcgggaggctgaggcctaagaatctcttgaacccaggaggcagaggttgtagtgagccgggatcacgccactgcactctagcctgggcgacagagagagagactgtctaaaaaaggaaaagaaaaaaatttatacgccaaaaaagatattctgagataacctgtagttaccactaactttgtgacaaaattataaaaatccacagccatctatgaatctgtaggcagacctgaagtttgaacgactggtgaagacatctgattttctttatagccaagttaggataacaaaatgcaaacaagtcattaatatttactatatgcaagatacagaaagatgaaggaaggagtaagaagttatccttcgtggaactattcaaagcaaaaatgcaaaataccagggaaagctttgaagaaccaagatttgagcaggttcttagaatatagattggattggatttgatttcaagaaagatgaacgtgtaaagcagaagtgggaagccaaaaacttttttccaaattagaattaagcattctttcaatgaacatttggaaatcaaggtagaaaaatatccctagggcctagctgaggagtctgtatgttgttgggttttgatagtaaccagtccaagattttgttattagacgtgggtttctgaatagacaggcatttctgaacagacatgacaggatcaaaacaatgtttgagcaaactgcccttcatctactgtggatatgttgggggatgatggaatatagtgaaagataatgggtgctcatacagcagtctagacttaaggtgattcaactactatatattaaactagattatcttttattttttaattttgaaatctggatgctcaagctctgcctgcacaaccacatgaggaagaaggaacaatgacaacaaaaataacactaaatttaaatttaagagtactacttttaggaaatagacaaaccattatttgggtacaactaaaggcaactggcatggactcaaatattttggggaagaaaaagactaaaagttctaaggaagaaaatgcgaaccttgatagtttgaaatagttaaaaagacagtgtagaaactgcttaggcagtttgattatggactattagatgatacttgggtctgataatggtataaggagaataaagtatttagggatccaatattacgcctgcagctttttccaaatagttcatgggggagggggatgtgtaagtggttaactgaagtctaactagataggtttgttgtaagcttaggatgtttacagttcttcatgttaagttgagcgtgatgggaagggaaagaatgctgatctttaaatttttgtccttagttaagttctgtatttagtgaattaattgcatcctaaaaagtcaaacttgaaaagcacattttaaatggcaaatctattttttacatgtttgtgaagtttttattttttagtaaacagaccatcagaagagaacaatggtacagagcaggggtcagcagatggattttgtaaagcatcaacttgtaaatattttcaagtttattagctgtatggctctggtttctgttccctgttccaaatgttaaagtctactgttgtattctaaaagcagccatggactgaatgtagctgtgttccaataaaacttacacaaaagcaggcagtgggccataatttgc

SEQ ID NO: 8383 - protein, 44 aa, Homo sapiens; identical to SEQ ID NO: 8371

SEQ ID NO: 8384 - DNA, 2412 bp, Homo sapiens
aaaccagcttgtcggcgccattttgtctcggcagcggtggccgtagctccatcgcattttatgtttctggcgagaagggaacggagttttcatcaggtagattggtttttgtgcggccgtcctccaccgtttcctccaggacagcacctagtcgtggccggaggagtctcagagctgtcagaaagaataagactgattttatgggaaaattaagcagatgctccagtttgagaaacctggatctgcgatctgtttgtgagtggtattcagttaagagaacaattatttcgtataagccacatcagagacgactgaagatgaaaaaactaccatccccgtatataactaatttgtgctgtgcaccaacaagaacctgctttaaatttccatggcaatttacaacccccatactgtaccaggcaaggtaccagcatcaagatgatttatggtaataagatataaaaccaaggaaaataacctaaagtctgaaaaagaccagaatcgaagtttcctgattcatattttaatgttttgaaatttatactccaggctgggtgcagtggcttgtgcctgtaatcccagcactttgggaggccgaggcggccggattgcctgaagtcagaagttcgagaccagcctgaccaacatggtgaaaccctgtctctacttaaaaatacaaaagagctgggcatggaggtggtgcgcgcctgtaaccctagctactcgggaggctgaggcctaagaatctcttgaacccaggaggcagaggttgtagtgagccgggatcacgccactgcactctagcctgggcgacagagagagagactgtctaaaaaaggaaaagaaaaaaatttatacgccaaaaaagatattctgagataacctgtagttaccactaactttgtgacaaaattataaaaatccacagccatctatgaatctgtaggcagacctgaagtttgaacgactggtgaagacatctgattttctttatagccaagttaggataacaaaatgcaaacaagtcattaatatttactatatgcaagatacagaaagatgaaggaaggagtaagaagttatccttcgtggaactattcaaagcaaaaatgcaaaataccagggaaagctttgaagaaccaagatttgagcaggttcttagaatatagattggattggatttgatttcaagaaagatgaacgtgtaaagcagaagtgggaagccaaaaacttttttccaaattagaattaagcattctttcaatgaacatttggaaatcaaggtagaaaaatatccctagggcctagctgaggagtctgtatgttgttgggttttgatagtaaccagtccaagattttgttattagacgtgggtttctgaatagacaggcatttctgaacagacatgacaggatcaaaacaatgtttgagcaaactgcccttcatctactgtggatatgttgggggatgatggaatatagtgaaagataatgggtgctcatacagcagtctagacttaaggtgattcaactactatatattaaactagattatcttttattttttaattttgaaatctggatgctcaagctctgcctgcacaaccacatgaggaagaaggaacaatgacaacaaaaataacactaaatttaaatttaagagtactacttttaggaaatagacaaaccattatttgggtacaactaaaggcaactggcatggactcaaatattttggggaagaaaaagactaaaagttctaaggaagaaaatgcgaaccttgatagtttgaaatagttaaaaagacagtgtagaaactgcttaggcagtttgattatggactattagatgatacttgggtctgataatggtataaggagaataaagtatttagggatccaatattacgcctgcagctttttccaaatagttcatgggggagggggatgtgtaagtggttaactgaagtctaactagataggtttgttgtaagcttaggatgtttacagttcttcatgttaagttgagcgtgatgggaagggaaagaatgctgatctttaaatttttgtccttagttaagttctgtatttagtgaattaattgcatcctaaaaagtcaaacttgaaaagcacattttaaatggcaaatctattttttacatgtttgtgaagtttttattttttagtaaacagaccatcagaagagaacaatggtacagagcaggggtcagcagatggattttgtaaagcatcaacttgtaaatattttcaagtttattagctgtatggctctggtttctgttccctgttccaaatgttaaagtctactgttgtattctaaaagcagccatggactgaatgtagctgtgttccaataaaacttacacaaaagcaggcagtgggccataatttgc

SEQ ID NO: 8385 - protein, 83 aa, Homo sapiens; identical to SEQ ID NO: 8375

SEQ ID NO: 8386 - DNA, 2246 bp, Homo sapiens
aaaccagcttgtcggcgccattttgtctcggcagcggtggccgtagctccatcgcattttatgtttctggcgagaagggaacggagttttcatcaggtagattggtttttgtgcggccgtcctccaccgtttcctccaggacagcacctagtcgtggccggaggagtctcagagctgtcagaaagaataagactgattttatgggaaaattaagcagatgctccagtttgagaaacctggatctgcgatctgtttgtggtaccagcatcaagatgatttatggtaataagatataaaaccaaggaaaataacctaaagtctgaaaaagaccagaatcgaagtttcctgattcatattttaatgttttgaaatttatactccaggctgggtgcagtggcttgtgcctgtaatcccagcactttgggaggccgaggcggccggattgcctgaagtcagaagttcgagaccagcctgaccaacatggtgaaaccctgtctctacttaaaaatacaaaagagctgggcatggaggtggtgcgcgcctgtaaccctagctactcgggaggctgaggcctaagaatctcttgaacccaggaggcagaggttgtagtgagccgggatcacgccactgcactctagcctgggcgacagagagagagactgtctaaaaaaggaaaagaaaaaaatttatacgccaaaaaagatattctgagataacctgtagttaccactaactttgtgacaaaattataaaaatccacagccatctatgaatctgtaggcagacctgaagtttgaacgactggtgaagacatctgattttctttatagccaagttaggataacaaaatgcaaacaagtcattaatatttactatatgcaagatacagaaagatgaaggaaggagtaagaagttatccttcgtggaactattcaaagcaaaaatgcaaaataccagggaaagctttgaagaaccaagatttgagcaggttcttagaatatagattggattggatttgatttcaagaaagatgaacgtgtaaagcagaagtgggaagccaaaaacttttttccaaattagaattaagcattctttcaatgaacatttggaaatcaaggtagaaaaatatccctagggcctagctgaggagtctgtatgttgttgggttttgatagtaaccagtccaagattttgttattagacgtgggtttctgaatagacaggcatttctgaacagacatgacaggatcaaaacaatgtttgagcaaactgcccttcatctactgtggatatgttgggggatgatggaatatagtgaaagataatgggtgctcatacagcagtctagacttaaggtgattcaactactatatattaaactagattatcttttattttttaattttgaaatctggatgctcaagctctgcctgcacaaccacatgaggaagaaggaacaatgacaacaaaaataacactaaatttaaatttaagagtactacttttaggaaatagacaaaccattatttgggtacaactaaaggcaactggcatggactcaaatattttggggaagaaaaagactaaaagttctaaggaagaaaatgcgaaccttgatagtttgaaatagttaaaaagacagtgtagaaactgcttaggcagtttgattatggactattagatgatacttgggtctgataatggtataaggagaataaagtatttagggatccaatattacgcctgcagctttttccaaatagttcatgggggagggggatgtgtaagtggttaactgaagtctaactagataggtttgttgtaagcttaggatgtttacagttcttcatgttaagttgagcgtgatgggaagggaaagaatgctgatctttaaatttttgtccttagttaagttctgtatttagtgaattaattgcatcctaaaaagtcaaacttgaaaagcacattttaaatggcaaatctattttttacatgtttgtgaagtttttattttttagtaaacagaccatcagaagagaacaatggtacagagcaggggtcagcagatggattttgtaaagcatcaacttgtaaatattttcaagtttattagctgtatggctctggtttctgttccctgttccaaatgttaaagtctactgttgtattctaaaagcagccatggactgaatgtagctgtgttccaataaaacttacacaaaagcaggcagtgggccataatttgc

SEQ ID NO: 8387 - protein, 50 aa, Homo sapiens; identical to SEQ ID NO: 8373

SEQ ID NO: 8388 - DNA, 2284 bp, Homo sapiens
aaaccagcttgtcggcgccattttgtctcggcagcggtggccgtagctccatcgcattttatgtttctggcgagaagggaacggagttttcatcaggtagattggtttttgtgcggccgtcctccaccgtttcctccaggacagcacctagtcgtggccggaggagtctcagagctgtcagaaagaataagactgattttatgggaaaattaagcagatgctccagtttgagaaacctggatctgcgatctgtttgtggtctctatgaataaagaaaagcaaatagaatcttatcagataagtgcttttataagtctaaatatattctttggaatctctaaagcaaaacttttaaacctgaaaaagaccagaatcgaagtttcctgattcatattttaatgttttgaaatttatactccaggctgggtgcagtggcttgtgcctgtaatcccagcactttgggaggccgaggcggccggattgcctgaagtcagaagttcgagaccagcctgaccaacatggtgaaaccctgtctctacttaaaaatacaaaagagctgggcatggaggtggtgcgcgcctgtaaccctagctactcgggaggctgaggcctaagaatctcttgaacccaggaggcagaggttgtagtgagccgggatcacgccactgcactctagcctgggcgacagagagagagactgtctaaaaaaggaaaagaaaaaaatttatacgccaaaaaagatattctgagataacctgtagttaccactaactttgtgacaaaattataaaaatccacagccatctatgaatctgtaggcagacctgaagtttgaacgactggtgaagacatctgattttctttatagccaagttaggataacaaaatgcaaacaagtcattaatatttactatatgcaagatacagaaagatgaaggaaggagtaagaagttatccttcgtggaactattcaaagcaaaaatgcaaaataccagggaaagctttgaagaaccaagatttgagcaggttcttagaatatagattggattggatttgatttcaagaaagatgaacgtgtaaagcagaagtgggaagccaaaaacttttttccaaattagaattaagcattctttcaatgaacatttggaaatcaaggtagaaaaatatccctagggcctagctgaggagtctgtatgttgttgggttttgatagtaaccagtccaagattttgttattagacgtgggtttctgaatagacaggcatttctgaacagacatgacaggatcaaaacaatgtttgagcaaactgcccttcatctactgtggatatgttgggggatgatggaatatagtgaaagataatgggtgctcatacagcagtctagacttaaggtgattcaactactatatattaaactagattatcttttattttttaattttgaaatctggatgctcaagctctgcctgcacaaccacatgaggaagaaggaacaatgacaacaaaaataacactaaatttaaatttaagagtactacttttaggaaatagacaaaccattatttgggtacaactaaaggcaactggcatggactcaaatattttggggaagaaaaagactaaaagttctaaggaagaaaatgcgaaccttgatagtttgaaatagttaaaaagacagtgtagaaactgcttaggcagtttgattatggactattagatgatacttgggtctgataatggtataaggagaataaagtatttagggatccaatattacgcctgcagctttttccaaatagttcatgggggagggggatgtgtaagtggttaactgaagtctaactagataggtttgttgtaagcttaggatgtttacagttcttcatgttaagttgagcgtgatgggaagggaaagaatgctgatctttaaatttttgtccttagttaagttctgtatttagtgaattaattgcatcctaaaaagtcaaacttgaaaagcacattttaaatggcaaatctattttttacatgtttgtgaagtttttattttttagtaaacagaccatcagaagagaacaatggtacagagcaggggtcagcagatggattttgtaaagcatcaacttgtaaatattttcaagtttattagctgtatggctctggtttctgttccctgttccaaatgttaaagtctactgttgtattctaaaagcagccatggactgaatgtagctgtgttccaataaaacttacacaaaagcaggcagtgggccataatttgc

SEQ ID NO: 8389 - protein, 50 aa, Homo sapiens; identical to SEQ ID NO: 8373

SEQ ID NO: 8390 - DNA, 2371 bp, Homo sapiens
aaaccagcttgtcggcgccattttgtctcggcagcggtggccgtagctccatcgcattttatgtttctggcgagaagggaacggagttttcatcaggtagattggtttttgtgcggccgtcctccaccgtttcctccaggacagcacctagtcgtggccggaggagtctcagagctgtcagaaagaataagactgattttatgggaaaattaagcagatgctccagtttgagaaacctggatctgcgatctgtttgtggtctctatgaataaagaaaagcaaatagaatcttatcagataagtgcttttataagtctaaatatattctttggaatctctaaagcaaaacttttaaacttttttttttttttttttttttttaggtaccagcatcaagatgatttatggtaataagatataaaaccaaggaaaataacctaaagtctgaaaaagaccagaatcgaagtttcctgattcatattttaatgttttgaaatttatactccaggctgggtgcagtggcttgtgcctgtaatcccagcactttgggaggccgaggcggccggattgcctgaagtcagaagttcgagaccagcctgaccaacatggtgaaaccctgtctctacttaaaaatacaaaagagctgggcatggaggtggtgcgcgcctgtaaccctagctactcgggaggctgaggcctaagaatctcttgaacccaggaggcagaggttgtagtgagccgggatcacgccactgcactctagcctgggcgacagagagagagactgtctaaaaaaggaaaagaaaaaaatttatacgccaaaaaagatattctgagataacctgtagttaccactaactttgtgacaaaattataaaaatccacagccatctatgaatctgtaggcagacctgaagtttgaacgactggtgaagacatctgattttctttatagccaagttaggataacaaaatgcaaacaagtcattaatatttactatatgcaagatacagaaagatgaaggaaggagtaagaagttatccttcgtggaactattcaaagcaaaaatgcaaaataccagggaaagctttgaagaaccaagatttgagcaggttcttagaatatagattggattggatttgatttcaagaaagatgaacgtgtaaagcagaagtgggaagccaaaaacttttttccaaattagaattaagcattctttcaatgaacatttggaaatcaaggtagaaaaatatccctagggcctagctgaggagtctgtatgttgttgggttttgatagtaaccagtccaagattttgttattagacgtgggtttctgaatagacaggcatttctgaacagacatgacaggatcaaaacaatgtttgagcaaactgcccttcatctactgtggatatgttgggggatgatggaatatagtgaaagataatgggtgctcatacagcagtctagacttaaggtgattcaactactatatattaaactagattatcttttattttttaattttgaaatctggatgctcaagctctgcctgcacaaccacatgaggaagaaggaacaatgacaacaaaaataacactaaatttaaatttaagagtactacttttaggaaatagacaaaccattatttgggtacaactaaaggcaactggcatggactcaaatattttggggaagaaaaagactaaaagttctaaggaagaaaatgcgaaccttgatagtttgaaatagttaaaaagacagtgtagaaactgcttaggcagtttgattatggactattagatgatacttgggtctgataatggtataaggagaataaagtatttagggatccaatattacgcctgcagctttttccaaatagttcatgggggagggggatgtgtaagtggttaactgaagtctaactagataggtttgttgtaagcttaggatgtttacagttcttcatgttaagttgagcgtgatgggaagggaaagaatgctgatctttaaatttttgtccttagttaagttctgtatttagtgaattaattgcatcctaaaaagtcaaacttgaaaagcacattttaaatggcaaatctattttttacatgtttgtgaagtttttattttttagtaaacagaccatcagaagagaacaatggtacagagcaggggtcagcagatggattttgtaaagcatcaacttgtaaatattttcaagtttattagctgtatggctctggtttctgttccctgttccaaatgttaaagtctactgttgtattctaaaagcagccatggactgaatgtagctgtgttccaataaaacttacacaaaagcaggcagtgggccataatttgc

SEQ ID NO: 8391 - protein, 50 aa, Homo sapiens; identical to SEQ ID NO: 8373

SEQ ID NO: 8392 - DNA, 1062 bp, Homo sapiens
ctcgaactcctgacctcatgatccacccgcctctgcctccccaaagtgctaggattacaggcacgagccaccatgtccagccaattagttggttttaaatatatttaagttaatggacaaaatattctaaaagggcacagttaatgacgcctcttcctagtgaatccgtgttctttatgaggtatcttttatagttgtatctttttttttttctgagatggagtctcgctctactgtagcccaggatggagtgcagtagtgtgatcttggctcactgcaacccctgcctcccgggttcaaggaattctcctgccttagcctcctgagtagctgagattacaggcgcccaccaccacacctggctgatttttgtttcttagtagagacagggtttcaccatgttggccaggctagtctcgaactgacctcaagtgatccatccgccttggtctcccaaagtgttgggattacaggtgtgagccactgtgcccagccaagttatatctctaaagcaatgtgcaaaaataaactgaacttgggttgattaggtatattcaacatttgtcgggagagtagatgtttcattttatttcagtccctgtgtaatttgtcttctctaatgttaaatactatgtagaatgtgtctgtgtaattttatagatacttttattatggatggacattctaatttgtactgactttgggtctgtgaactacttcaatgtttggaggttaccaaaatcttacctttcccttttctattctagaatttacatagtacatgacgaagttaaggataaagcttttgaactagaactcagctgggttggtgaattaactaatggaagacatgaaattgttccaaaagatataagagaagaagcagagaaatatgctaaggaatctctgaaggaagaagatgaatcagatgatgataatatgtaacatttactccagcatctattgtattttaaatttctactccagtccaatgtaactatttagccctggattatacatactgtccaattttcattaaatttttgtcttataactattgaa

SEQ ID NO: 8393 - protein, 89 aa, Homo sapiens [sequence omitted]

SEQ ID NO: 8394 - DNA, 4505 bp, Homo sapiens
cggcagcggtggccgtagctccatcgcattttatgtttctggcgagaagggaacggagttttcatcaggtagattggtttttgtgcggccgtcctccaccgtttcctccaggacagcacctagtcgtggccggaggagtctcagagctgtcagaaaggtgagcatttgtacagtgaaacattttgctacacaaaagtgatgtttaggaatactaacaaattattttcaagaataagactgattttatgggaaaattaagcagatgctccagtttgagaaacctggatctgcgatctgtttgtggtctctatgaataaagaaaagcaaatagaatcttatcagataagtaccagcatcaagatgatttatggtaataaggtactcagtctttgcttaaaataaattttacgtttatcaaagtaaaatttaccagctttttttcctaaagaggctagtcatatctcatcagtggttacaaagtatccttacaattgaacctacatttgttaatcctgttcagtgtgtatgaaaatcacttggtggccgggcatggtggctcacgcctgtaatcccagcactttgggaggccaaggcgggcagatcacaaggtcaggagttcgagaccagcctggctaatatagtgaaaccccatttctactaaaaatgcaaacattagtcaggcatggtggcaggtgcctgtagtcccagctacttgggaggctgaggcaggagactctcttcaacccgtgaggcagaggttgcagtgagtcgagatcatgtcactgcacttcagcttaagcaacagagcgagactccatctcaaaaaaagaaaagcacgtcactcgatgttctttctttcataagagttgaagaactaggtatatctgcttatattatggcatctatagtagcttagctgctcatatttgggtctctttagaaccagtgtctttcaaagagggttttaactatgctggtgtaaattttaagaatagatacattcaaagaagaattcaacattcatgtgacattcatactttggaactttgggaaagtataggaatgaccatagattggcttagggatagtcaatttacctgtctgtaaatggatccaatttagtattgttcctgtatttttctaagaccaacacttgtgtcattcacagttaaatatatgagttgtggccaggcccggtggctcatgcctgtaatttcagcattttaggaggctgaggtgaacagattgctcaagtccaggagttcaagaccagcctgggcaacatagtgagatgcggtctctacaaaaaatttttaaaagttagccaagcatggtggtgcttgcctgtggtcccagctacttgggaggctgaggtgggaggattgcttgagccatatgctctaatatattttaaaatacatattttaaatatattttgagtggtaaaatgtagcagataatgttacataaaagaagccatggtaatgacatgacattactggttttgagttgtttgtgtagtagttagctattaatactcaggtataatgatttgctatttaaactacacaaatgctcaaagtccagcgataccctgcacccaaattcagtggctagattaccttcttaggaaagcacaacacttcaatggagtgacactggcatgagtccactagagggtgtgtatacatggcctgagttcaaattgttcctgctgtgagtactgcttttcagcttcaagttattcttatcggccacagtactgtttattccacttagtaacagttctgtttacagagcactttaacataaattctgatttttaacatgaaagctgtctgatgttggtatttttattttaatctttagagatcaagaaatttttttagtgacagaatagggactttattgatccttaaatccgcccctcaccacaataaaggaaaaaagcaaaaacatccttgactcatgtattgaagggtcttttttgagaagggtcagtttttgaaaaattatccaaaactgaaacatctgtcatctgtatcacatctaaagattaacagtgactgatgaccaccagttacttcatatgaaagtgggaaaccgtatcagttatttgtccactaagttggtaggtgctttttgtacaaaagcccaggagaatatgatctgtaaattctagttgagtgatgaagatggggctttgaattaatctacagtcttggaattaattctgcagcattttaaccagggaatttttcagtagtcataaatctatattttaatactgagtaaatgtcctcatttacccccaccaattttgtaaagcagatattaaccaaacttcaatagttataagacaaaaatttaatgaaaattggacagtatgtataatccagggctaaatagttacattggactggagtagaaatttaaaatacaatagatgctggagtaaatgttacatattatcatcatctgattcatcttcttccttcagagattcctgttaagagaaaacaggtgtttaaaattgatttttaaaattgttatatcccacacctgtgggcaagttaagctacaacaacctgaattaagtggttaaattcctctacttgtaactgaatgaacagtttcagaataagatacccaagcaaagttaattaagcaaatgttgctctaacatgcaatgactgtatctttgatagaatatatacttaagaggcctggtgcagtgttcatgcctgtaatcccagcactttacgggggccaaagtaggcagatcacgtgagttcaagagtttgaaactagcctggtgaaaacccgtctctgtattattggtgaagccaaaaatacaaaagtagccaggtatggtggcatgttcctgtaatcccagctacttgggaggcggaggcaggaggatcgcttgaaccctggaggcagaggttgcagtgagcagagatggtgccactgccctccagcctgggtgacagagcaagactccgtctcaaaaaaaaaaaaaaaaaaaagaacaaatatttaaagtattaaaagtcctaaaaaactctttgcagtctaaacctcccaagttttttttttttggaaccaaggcaactttacccactagagataacctagaaaatttctatctttagttcaactgaactctcagtgttatttcatagaaaccaccccagtctatttatattattcaacacataattttggttagagaatttttttttttttaaattagggatgggggtcttgctgtgctgctcaggctggtctcaaactcctgggctaagtgattccctgactgtacctggccaagagaagtttttgtgctgtggcttaccttagcatatttctctgcttcttctcttatatcttttggaacaatttcatgtcttccattagttactgtaaattaagccacatgtgtaaatgaattttaaattgagtaccatattgtaacttgcagtataccataggatctacccaatccacatatctgactcacctaaggttgcaaagttgtactatgagtaatactcgaatatttttgtgtgctgcttctacatgagattatatgtgcctacatattaagttcttatggaaatgaaagtaaattatgctatttataaatcctgagcattaatttatagcatagtatcttaaaaccatgaaatggatgtttcaaaaaataacgtgttcacaacttaagtcaattattaagcagaactttcccttcattagacaacctagtaaatttgctttagctttcattatattagaaaggacactcagttgtaaattagctgtggtacagatcattcctaaggcaaataaatgtacaaaaataacttacattcaccaacccagctgagttctagttcaaaagctttatccttaacttcgtcatgtactatgtaaattctagaatagaaaagggaaaggtaagattttggtaacctccaaacattgaagtagttcacagacccaaagtcagtacaaattagaatgtccatccataataaaagtatctataaaattacacagacacattctacatagtatttaacattagagaagacaaattacacagggactgaaataaaatgaaacatctactctcccgacaaatgttgaatatacctaatcaacccaagttcagtttatttttgcacattgctttagagatataacttggctgggcacagtggctcacacctgtaatcccaacactttgggagaccaaggcggatggatcacttgaggtcagttcgagactagcctggccaacatggtgaaaccctgtctctactaagaaacaaaaatcagccaggtgtggtggtgggcgcctgtaatctcagctactcaggaggctaaggcaggagaattccttgaacccgggaggcaggggttgcagtgagccaagatcacactactgcactccatcctgggctacagtagagcgagactccatctcagaaaaaaaaaaa

SEQ ID NO: 8395 - protein, 42 aa, Homo sapiens
MFLARRERSFHQVDWFLCGRPPPFPPGQHLVVAGGVSELSER

SEQ ID NO: 8396 - DNA, 4417 bp, Homo sapiens
aaaccagcttgtcggcgccattttgtctcggcagcggtggccgtagctccatcgcattttatgtttctggcgagaagggaacggagttttcatcaggtagattggtttttgtgcggccgtcctccaccgtttcctccaggacagcacctagtcgtggccggaggagtctcagagctgtcagaaagaataagactgattttatgggaaaattaagcagatgctccagtttgagaaacctggatctgcgatctgtttgtggtaccagcatcaagatgatttatggtaataaggtactcagtctttgcttaaaataaattttacgtttatcaaagtaaaatttaccagctttttttcctaaagaggctagtcatatctcatcagtggttacaaagtatccttacaattgaacctacatttgttaatcctgttcagtgtgtatgaaaatcacttggtggccgggcatggtggctcacgcctgtaatcccagcactttgggaggccaaggcgggcagatcacaaggtcaggagttcgagaccagcctggctaatatagtgaaaccccatttctactaaaaatgcaaacattagtcaggcatggtggcaggtgcctgtagtcccagctacttgggaggctgaggcaggagactctcttcaacccgtgaggcagaggttgcagtgagtcgagatcatgtcactgcacttcagcttaagcaacagagcgagactccatctcaaaaaaagaaaagcacgtcactcgatgttctttctttcataagagttgaagaactaggtatatctgcttatattatggcatctatagtagcttagctgctcatatttgggtctctttagaaccagtgtctttcaaagagggttttaactatgctggtgtaaattttaagaatagatacattcaaagaagaattcaacattcatgtgacattcatactttggaactttgggaaagtataggaatgaccatagattggcttagggatagtcaatttacctgtctgtaaatggatccaatttagtattgttcctgtatttttctaagaccaacacttgtgtcattcacagttaaatatatgagttgtggccaggcccggtggctcatgcctgtaatttcagcattttaggaggctgaggtgaacagattgctcaagtccaggagttcaagaccagcctgggcaacatagtgagatgcggtctctacaaaaaatttttaaaagttagccaagcatggtggtgcttgcctgtggtcccagctacttgggaggctgaggtgggaggattgcttgagccatatgctctaatatattttaaaatacatattttaaatatattttgagtggtaaaatgtagcagataatgttacataaaagaagccatggtaatgacatgacattactggttttgagttgtttgtgtagtagttagctattaatactcaggtataatgatttgctatttaaactacacaaatgctcaaagtccagcgataccctgcacccaaattcagtggctagattaccttcttaggaaagcacaacacttcaatggagtgacactggcatgagtccactagagggtgtgtatacatggcctgagttcaaattgttcctgctgtgagtactgcttttcagcttcaagttattcttatcggccacagtactgtttattccacttagtaacagttctgtttacagagcactttaacataaattctgatttttaacatgaaagctgtctgatgttggtatttttattttaatctttagagatcaagaaatttttttagtgacagaatagggactttattgatccttaaatccgcccctcaccacaataaaggaaaaaagcaaaaacatccttgactcatgtattgaagggtcttttttgagaagggtcagtttttgaaaaattatccaaaactgaaacatctgtcatctgtatcacatctaaagattaacagtgactgatgaccaccagttacttcatatgaaagtgggaaaccgtatcagttatttgtccactaagttggtaggtgctttttgtacaaaagcccaggagaatatgatctgtaaattctagttgagtgatgaagatggggctttgaattaatctacagtcttggaattaattctgcagcattttaaccagggaatttttcagtagtcataaatctatattttaatactgagtaaatgtcctcatttacccccaccaattttgtaaagcagatattaaccaaacttcaatagttataagacaaaaatttaatgaaaattggacagtatgtataatccagggctaaatagttacattggactggagtagaaatttaaaatacaatagatgctggagtaaatgttacatattatcatcatctgattcatcttcttccttcagagattcctgttaagagaaaacaggtgtttaaaattgatttttaaaattgttatatcccacacctgtgggcaagttaagctacaacaacctgaattaagtggttaaattcctctacttgtaactgaatgaacagtttcagaataagatacccaagcaaagttaattaagcaaatgttgctctaacatgcaatgactgtatctttgatagaatatatacttaagaggcctggtgcagtgttcatgcctgtaatcccagcactttacgggggccaaagtaggcagatcacgtgagttcaagagtttgaaactagcctggtgaaaacccgtctctgtattattggtgaagccaaaaatacaaaagtagccaggtatggtggcatgttcctgtaatcccagctacttgggaggcggaggcaggaggatcgcttgaaccctggaggcagaggttgcagtgagcagagatggtgccactgccctccagcctgggtgacagagcaagactccgtctcaaaaaaaaaaaaaaaaaaaagaacaaatatttaaagtattaaaagtcctaaaaaactctttgcagtctaaacctcccaagttttttttttttggaaccaaggcaactttacccactagagataacctagaaaatttctatctttagttcaactgaactctcagtgttatttcatagaaaccaccccagtctatttatattattcaacacataattttggttagagaatttttttttttttaaattagggatgggggtcttgctgtgctgctcaggctggtctcaaactcctgggctaagtgattccctgactgtacctggccaagagaagtttttgtgctgtggcttaccttagcatatttctctgcttcttctcttatatcttttggaacaatttcatgtcttccattagttactgtaaattaagccacatgtgtaaatgaattttaaattgagtaccatattgtaacttgcagtataccataggatctacccaatccacatatctgactcacctaaggttgcaaagttgtactatgagtaatactcgaatatttttgtgtgctgcttctacatgagattatatgtgcctacatattaagttcttatggaaatgaaagtaaattatgctatttataaatcctgagcattaatttatagcatagtatcttaaaaccatgaaatggatgtttcaaaaaataacgtgttcacaacttaagtcaattattaagcagaactttcccttcattagacaacctagtaaatttgctttagctttcattatattagaaaggacactcagttgtaaattagctgtggtacagatcattcctaaggcaaataaatgtacaaaaataacttacattcaccaacccagctgagttctagttcaaaagctttatccttaacttcgtcatgtactatgtaaattctagaatagaaaagggaaaggtaagattttggtaacctccaaacattgaagtagttcacagacccaaagtcagtacaaattagaatgtccatccataataaaagtatctataaaattacacagacacattctacatagtatttaacattagagaagacaaattacacagggactgaaataaaatgaaacatctactctcccgacaaatgttgaatatacctaatcaacccaagttcagtttatttttgcacattgctttagagatataacttggctgggcacagtggctcacacctgtaatcccaacactttgggagaccaaggcggatggatcacttgaggtcagttcgagactagcctggccaacatggtgaaaccctgtctctactaagaaacaaaaatcagccaggtgtggtggtgggcgcctgtaatctcagctactcaggaggctaaggcaggagaattccttgaacccgggaggcaggggttgcagtgagccaagatcacactactgcactccatcctgggctacagtagagcgagactccatctcagaaaaaaaaaaa

SEQ ID NO: 8397 - protein, 50 aa, Homo sapiens; identical to SEQ ID NO: 8373

SEQ ID NO: 8398 - DNA, 4583 bp, Homo sapiens
aaaccagcttgtcggcgccattttgtctcggcagcggtggccgtagctccatcgcattttatgtttctggcgagaagggaacggagttttcatcaggtagattggtttttgtgcggccgtcctccaccgtttcctccaggacagcacctagtcgtggccggaggagtctcagagctgtcagaaagaataagactgattttatgggaaaattaagcagatgctccagtttgagaaacctggatctgcgatctgtttgtgagtggtattcagttaagagaacaattatttcgtataagccacatcagagacgactgaagatgaaaaaactaccatccccgtatataactaatttgtgctgtgcaccaacaagaacctgctttaaatttccatggcaatttacaacccccatactgtaccaggcaaggtaccagcatcaagatgatttatggtaataaggtactcagtctttgcttaaaataaattttacgtttatcaaagtaaaatttaccagctttttttcctaaagaggctagtcatatctcatcagtggttacaaagtatccttacaattgaacctacatttgttaatcctgttcagtgtgtatgaaaatcacttggtggccgggcatggtggctcacgcctgtaatcccagcactttgggaggccaaggcgggcagatcacaaggtcaggagttcgagaccagcctggctaatatagtgaaaccccatttctactaaaaatgcaaacattagtcaggcatggtggcaggtgcctgtagtcccagctacttgggaggctgaggcaggagactctcttcaacccgtgaggcagaggttgcagtgagtcgagatcatgtcactgcacttcagcttaagcaacagagcgagactccatctcaaaaaaagaaaagcacgtcactcgatgttctttctttcataagagttgaagaactaggtatatctgcttatattatggcatctatagtagcttagctgctcatatttgggtctctttagaaccagtgtctttcaaagagggttttaactatgctggtgtaaattttaagaatagatacattcaaagaagaattcaacattcatgtgacattcatactttggaactttgggaaagtataggaatgaccatagattggcttagggatagtcaatttacctgtctgtaaatggatccaatttagtattgttcctgtatttttctaagaccaacacttgtgtcattcacagttaaatatatgagttgtggccaggcccggtggctcatgcctgtaatttcagcattttaggaggctgaggtgaacagattgctcaagtccaggagttcaagaccagcctgggcaacatagtgagatgcggtctctacaaaaaatttttaaaagttagccaagcatggtggtgcttgcctgtggtcccagctacttgggaggctgaggtgggaggattgcttgagccatatgctctaatatattttaaaatacatattttaaatatattttgagtggtaaaatgtagcagataatgttacataaaagaagccatggtaatgacatgacattactggttttgagttgtttgtgtagtagttagctattaatactcaggtataatgatttgctatttaaactacacaaatgctcaaagtccagcgataccctgcacccaaattcagtggctagattaccttcttaggaaagcacaacacttcaatggagtgacactggcatgagtccactagagggtgtgtatacatggcctgagttcaaattgttcctgctgtgagtactgcttttcagcttcaagttattcttatcggccacagtactgtttattccacttagtaacagttctgtttacagagcactttaacataaattctgatttttaacatgaaagctgtctgatgttggtatttttattttaatctttagagatcaagaaatttttttagtgacagaatagggactttattgatccttaaatccgcccctcaccacaataaaggaaaaaagcaaaaacatccttgactcatgtattgaagggtcttttttgagaagggtcagtttttgaaaaattatccaaaactgaaacatctgtcatctgtatcacatctaaagattaacagtgactgatgaccaccagttacttcatatgaaagtgggaaaccgtatcagttatttgtccactaagttggtaggtgctttttgtacaaaagcccaggagaatatgatctgtaaattctagttgagtgatgaagatggggctttgaattaatctacagtcttggaattaattctgcagcattttaaccagggaatttttcagtagtcataaatctatattttaatactgagtaaatgtcctcatttacccccaccaattttgtaaagcagatattaaccaaacttcaatagttataagacaaaaatttaatgaaaattggacagtatgtataatccagggctaaatagttacattggactggagtagaaatttaaaatacaatagatgctggagtaaatgttacatattatcatcatctgattcatcttcttccttcagagattcctgttaagagaaaacaggtgtttaaaattgatttttaaaattgttatatcccacacctgtgggcaagttaagctacaacaacctgaattaagtggttaaattcctctacttgtaactgaatgaacagtttcagaataagatacccaagcaaagttaattaagcaaatgttgctctaacatgcaatgactgtatctttgatagaatatatacttaagaggcctggtgcagtgttcatgcctgtaatcccagcactttacgggggccaaagtaggcagatcacgtgagttcaagagtttgaaactagcctggtgaaaacccgtctctgtattattggtgaagccaaaaatacaaaagtagccaggtatggtggcatgttcctgtaatcccagctacttgggaggcggaggcaggaggatcgcttgaaccctggaggcagaggttgcagtgagcagagatggtgccactgccctccagcctgggtgacagagcaagactccgtctcaaaaaaaaaaaaaaaaaaaagaacaaatatttaaagtattaaaagtcctaaaaaactctttgcagtctaaacctcccaagttttttttttttggaaccaaggcaactttacccactagagataacctagaaaatttctatctttagttcaactgaactctcagtgttatttcatagaaaccaccccagtctatttatattattcaacacataattttggttagagaatttttttttttttaaattagggatgggggtcttgctgtgctgctcaggctggtctcaaactcctgggctaagtgattccctgactgtacctggccaagagaagtttttgtgctgtggcttaccttagcatatttctctgcttcttctcttatatcttttggaacaatttcatgtcttccattagttactgtaaattaagccacatgtgtaaatgaattttaaattgagtaccatattgtaacttgcagtataccataggatctacccaatccacatatctgactcacctaaggttgcaaagttgtactatgagtaatactcgaatatttttgtgtgctgcttctacatgagattatatgtgcctacatattaagttcttatggaaatgaaagtaaattatgctatttataaatcctgagcattaatttatagcatagtatcttaaaaccatgaaatggatgtttcaaaaaataacgtgttcacaacttaagtcaattattaagcagaactttcccttcattagacaacctagtaaatttgctttagctttcattatattagaaaggacactcagttgtaaattagctgtggtacagatcattcctaaggcaaataaatgtacaaaaataacttacattcaccaacccagctgagttctagttcaaaagctttatccttaacttcgtcatgtactatgtaaattctagaatagaaaagggaaaggtaagattttggtaacctccaaacattgaagtagttcacagacccaaagtcagtacaaattagaatgtccatccataataaaagtatctataaaattacacagacacattctacatagtatttaacattagagaagacaaattacacagggactgaaataaaatgaaacatctactctcccgacaaatgttgaatatacctaatcaacccaagttcagtttatttttgcacattgctttagagatataacttggctgggcacagtggctcacacctgtaatcccaacactttgggagaccaaggcggatggatcacttgaggtcagttcgagactagcctggccaacatggtgaaaccctgtctctactaagaaacaaaaatcagccaggtgtggtggtgggcgcctgtaatctcagctactcaggaggctaaggcaggagaattccttgaacccgggaggcaggggttgcagtgagccaagatcacactactgcactccatcctgggctacagtagagcgagactccatctcagaaaaaaaaaaa

SEQ ID NO: 8399 - protein, 83 aa, Homo sapiens; identical to SEQ ID NO: 8375

SEQ ID NO: 8400 - DNA, 4542 bp, Homo sapiens
aaaccagcttgtcggcgccattttgtctcggcagcggtggccgtagctccatcgcattttatgtttctggcgagaagggaacggagttttcatcaggtagattggtttttgtgcggccgtcctccaccgtttcctccaggacagcacctagtcgtggccggaggagtctcagagctgtcagaaagaataagactgattttatgggaaaattaagcagatgctccagtttgagaaacctggatctgcgatctgtttgtggtctctatgaataaagaaaagcaaatagaatcttatcagataagtgcttttataagtctaaatatattctttggaatctctaaagcaaaacttttaaacttttttttttttttttttttttttaggtaccagcatcaagatgatttatggtaataaggtactcagtctttgcttaaaataaattttacgtttatcaaagtaaaatttaccagctttttttcctaaagaggctagtcatatctcatcagtggttacaaagtatccttacaattgaacctacatttgttaatcctgttcagtgtgtatgaaaatcacttggtggccgggcatggtggctcacgcctgtaatcccagcactttgggaggccaaggcgggcagatcacaaggtcaggagttcgagaccagcctggctaatatagtgaaaccccatttctactaaaaatgcaaacattagtcaggcatggtggcaggtgcctgtagtcccagctacttgggaggctgaggcaggagactctcttcaacccgtgaggcagaggttgcagtgagtcgagatcatgtcactgcacttcagcttaagcaacagagcgagactccatctcaaaaaaagaaaagcacgtcactcgatgttctttctttcataagagttgaagaactaggtatatctgcttatattatggcatctatagtagcttagctgctcatatttgggtctctttagaaccagtgtctttcaaagagggttttaactatgctggtgtaaattttaagaatagatacattcaaagaagaattcaacattcatgtgacattcatactttggaactttgggaaagtataggaatgaccatagattggcttagggatagtcaatttacctgtctgtaaatggatccaatttagtattgttcctgtatttttctaagaccaacacttgtgtcattcacagttaaatatatgagttgtggccaggcccggtggctcatgcctgtaatttcagcattttaggaggctgaggtgaacagattgctcaagtccaggagttcaagaccagcctgggcaacatagtgagatgcggtctctacaaaaaatttttaaaagttagccaagcatggtggtgcttgcctgtggtcccagctacttgggaggctgaggtgggaggattgcttgagccatatgctctaatatattttaaaatacatattttaaatatattttgagtggtaaaatgtagcagataatgttacataaaagaagccatggtaatgacatgacattactggttttgagttgtttgtgtagtagttagctattaatactcaggtataatgatttgctatttaaactacacaaatgctcaaagtccagcgataccctgcacccaaattcagtggctagattaccttcttaggaaagcacaacacttcaatggagtgacactggcatgagtccactagagggtgtgtatacatggcctgagttcaaattgttcctgctgtgagtactgcttttcagcttcaagttattcttatcggccacagtactgtttattccacttagtaacagttctgtttacagagcactttaacataaattctgatttttaacatgaaagctgtctgatgttggtatttttattttaatctttagagatcaagaaatttttttagtgacagaatagggactttattgatccttaaatccgcccctcaccacaataaaggaaaaaagcaaaaacatccttgactcatgtattgaagggtcttttttgagaagggtcagtttttgaaaaattatccaaaactgaaacatctgtcatctgtatcacatctaaagattaacagtgactgatgaccaccagttacttcatatgaaagtgggaaaccgtatcagttatttgtccactaagttggtaggtgctttttgtacaaaagcccaggagaatatgatctgtaaattctagttgagtgatgaagatggggctttgaattaatctacagtcttggaattaattctgcagcattttaaccagggaatttttcagtagtcataaatctatattttaatactgagtaaatgtcctcatttacccccaccaattttgtaaagcagatattaaccaaacttcaatagttataagacaaaaatttaatgaaaattggacagtatgtataatccagggctaaatagttacattggactggagtagaaatttaaaatacaatagatgctggagtaaatgttacatattatcatcatctgattcatcttcttccttcagagattcctgttaagagaaaacaggtgtttaaaattgatttttaaaattgttatatcccacacctgtgggcaagttaagctacaacaacctgaattaagtggttaaattcctctacttgtaactgaatgaacagtttcagaataagatacccaagcaaagttaattaagcaaatgttgctctaacatgcaatgactgtatctttgatagaatatatacttaagaggcctggtgcagtgttcatgcctgtaatcccagcactttacgggggccaaagtaggcagatcacgtgagttcaagagtttgaaactagcctggtgaaaacccgtctctgtattattggtgaagccaaaaatacaaaagtagccaggtatggtggcatgttcctgtaatcccagctacttgggaggcggaggcaggaggatcgcttgaaccctggaggcagaggttgcagtgagcagagatggtgccactgccctccagcctgggtgacagagcaagactccgtctcaaaaaaaaaaaaaaaaaaaagaacaaatatttaaagtattaaaagtcctaaaaaactctttgcagtctaaacctcccaagttttttttttttggaaccaaggcaactttacccactagagataacctagaaaatttctatctttagttcaactgaactctcagtgttatttcatagaaaccaccccagtctatttatattattcaacacataattttggttagagaatttttttttttttaaattagggatgggggtcttgctgtgctgctcaggctggtctcaaactcctgggctaagtgattccctgactgtacctggccaagagaagtttttgtgctgtggcttaccttagcatatttctctgcttcttctcttatatcttttggaacaatttcatgtcttccattagttactgtaaattaagccacatgtgtaaatgaattttaaattgagtaccatattgtaacttgcagtataccataggatctacccaatccacatatctgactcacctaaggttgcaaagttgtactatgagtaatactcgaatatttttgtgtgctgcttctacatgagattatatgtgcctacatattaagttcttatggaaatgaaagtaaattatgctatttataaatcctgagcattaatttatagcatagtatcttaaaaccatgaaatggatgtttcaaaaaataacgtgttcacaacttaagtcaattattaagcagaactttcccttcattagacaacctagtaaatttgctttagctttcattatattagaaaggacactcagttgtaaattagctgtggtacagatcattcctaaggcaaataaatgtacaaaaataacttacattcaccaacccagctgagttctagttcaaaagctttatccttaacttcgtcatgtactatgtaaattctagaatagaaaagggaaaggtaagattttggtaacctccaaacattgaagtagttcacagacccaaagtcagtacaaattagaatgtccatccataataaaagtatctataaaattacacagacacattctacatagtatttaacattagagaagacaaattacacagggactgaaataaaatgaaacatctactctcccgacaaatgttgaatatacctaatcaacccaagttcagtttatttttgcacattgctttagagatataacttggctgggcacagtggctcacacctgtaatcccaacactttgggagaccaaggcggatggatcacttgaggtcagttcgagactagcctggccaacatggtgaaaccctgtctctactaagaaacaaaaatcagccaggtgtggtggtgggcgcctgtaatctcagctactcaggaggctaaggcaggagaattccttgaacccgggaggcaggggttgcagtgagccaagatcacactactgcactccatcctgggctacagtagagcgagactccatctcagaaaaaaaaaaa

SEQ ID NO: 8401 - protein, 50 aa, Homo sapiens; identical to SEQ ID NO: 8373

SEQ ID NO: 8402 - DNA, 4460 bp, Homo sapiens
aaaccagcttgtcggcgccattttgtctcggcagcggtggccgtagctccatcgcattttatgtttctggcgagaagggaacggagttttcatcaggtagattggtttttgtgcggccgtcctccaccgtttcctccaggacagcacctagtcgtggccggaggagtctcagagctgtcagaaagaataagactgattttatgggaaaattaagcagatgctccagtttgagaaacctggatctgcgatctgtttgtggtctctatgaataaagaaaagcaaatagaatcttatcagataagtaccagcatcaagatgatttatggtaataaggtactcagtctttgcttaaaataaattttacgtttatcaaagtaaaatttaccagctttttttcctaaagaggctagtcatatctcatcagtggttacaaagtatccttacaattgaacctacatttgttaatcctgttcagtgtgtatgaaaatcacttggtggccgggcatggtggctcacgcctgtaatcccagcactttgggaggccaaggcgggcagatcacaaggtcaggagttcgagaccagcctggctaatatagtgaaaccccatttctactaaaaatgcaaacattagtcaggcatggtggcaggtgcctgtagtcccagctacttgggaggctgaggcaggagactctcttcaacccgtgaggcagaggttgcagtgagtcgagatcatgtcactgcacttcagcttaagcaacagagcgagactccatctcaaaaaaagaaaagcacgtcactcgatgttctttctttcataagagttgaagaactaggtatatctgcttatattatggcatctatagtagcttagctgctcatatttgggtctctttagaaccagtgtctttcaaagagggttttaactatgctggtgtaaattttaagaatagatacattcaaagaagaattcaacattcatgtgacattcatactttggaactttgggaaagtataggaatgaccatagattggcttagggatagtcaatttacctgtctgtaaatggatccaatttagtattgttcctgtatttttctaagaccaacacttgtgtcattcacagttaaatatatgagttgtggccaggcccggtggctcatgcctgtaatttcagcattttaggaggctgaggtgaacagattgctcaagtccaggagttcaagaccagcctgggcaacatagtgagatgcggtctctacaaaaaatttttaaaagttagccaagcatggtggtgcttgcctgtggtcccagctacttgggaggctgaggtgggaggattgcttgagccatatgctctaatatattttaaaatacatattttaaatatattttgagtggtaaaatgtagcagataatgttacataaaagaagccatggtaatgacatgacattactggttttgagttgtttgtgtagtagttagctattaatactcaggtataatgatttgctatttaaactacacaaatgctcaaagtccagcgataccctgcacccaaattcagtggctagattaccttcttaggaaagcacaacacttcaatggagtgacactggcatgagtccactagagggtgtgtatacatggcctgagttcaaattgttcctgctgtgagtactgcttttcagcttcaagttattcttatcggccacagtactgtttattccacttagtaacagttctgtttacagagcactttaacataaattctgatttttaacatgaaagctgtctgatgttggtatttttattttaatctttagagatcaagaaatttttttagtgacagaatagggactttattgatccttaaatccgcccctcaccacaataaaggaaaaaagcaaaaacatccttgactcatgtattgaagggtcttttttgagaagggtcagtttttgaaaaattatccaaaactgaaacatctgtcatctgtatcacatctaaagattaacagtgactgatgaccaccagttacttcatatgaaagtgggaaaccgtatcagttatttgtccactaagttggtaggtgctttttgtacaaaagcccaggagaatatgatctgtaaattctagttgagtgatgaagatggggctttgaattaatctacagtcttggaattaattctgcagcattttaaccagggaatttttcagtagtcataaatctatattttaatactgagtaaatgtcctcatttacccccaccaattttgtaaagcagatattaaccaaacttcaatagttataagacaaaaatttaatgaaaattggacagtatgtataatccagggctaaatagttacattggactggagtagaaatttaaaatacaatagatgctggagtaaatgttacatattatcatcatctgattcatcttcttccttcagagattcctgttaagagaaaacaggtgtttaaaattgatttttaaaattgttatatcccacacctgtgggcaagttaagctacaacaacctgaattaagtggttaaattcctctacttgtaactgaatgaacagtttcagaataagatacccaagcaaagttaattaagcaaatgttgctctaacatgcaatgactgtatctttgatagaatatatacttaagaggcctggtgcagtgttcatgcctgtaatcccagcactttacgggggccaaagtaggcagatcacgtgagttcaagagtttgaaactagcctggtgaaaacccgtctctgtattattggtgaagccaaaaatacaaaagtagccaggtatggtggcatgttcctgtaatcccagctacttgggaggcggaggcaggaggatcgcttgaaccctggaggcagaggttgcagtgagcagagatggtgccactgccctccagcctgggtgacagagcaagactccgtctcaaaaaaaaaaaaaaaaaaaagaacaaatatttaaagtattaaaagtcctaaaaaactctttgcagtctaaacctcccaagttttttttttttggaaccaaggcaactttacccactagagataacctagaaaatttctatctttagttcaactgaactctcagtgttatttcatagaaaccaccccagtctatttatattattcaacacataattttggttagagaatttttttttttttaaattagggatgggggtcttgctgtgctgctcaggctggtctcaaactcctgggctaagtgattccctgactgtacctggccaagagaagtttttgtgctgtggcttaccttagcatatttctctgcttcttctcttatatcttttggaacaatttcatgtcttccattagttactgtaaattaagccacatgtgtaaatgaattttaaattgagtaccatattgtaacttgcagtataccataggatctacccaatccacatatctgactcacctaaggttgcaaagttgtactatgagtaatactcgaatatttttgtgtgctgcttctacatgagattatatgtgcctacatattaagttcttatggaaatgaaagtaaattatgctatttataaatcctgagcattaatttatagcatagtatcttaaaaccatgaaatggatgtttcaaaaaataacgtgttcacaacttaagtcaattattaagcagaactttcccttcattagacaacctagtaaatttgctttagctttcattatattagaaaggacactcagttgtaaattagctgtggtacagatcattcctaaggcaaataaatgtacaaaaataacttacattcaccaacccagctgagttctagttcaaaagctttatccttaacttcgtcatgtactatgtaaattctagaatagaaaagggaaaggtaagattttggtaacctccaaacattgaagtagttcacagacccaaagtcagtacaaattagaatgtccatccataataaaagtatctataaaattacacagacacattctacatagtatttaacattagagaagacaaattacacagggactgaaataaaatgaaacatctactctcccgacaaatgttgaatatacctaatcaacccaagttcagtttatttttgcacattgctttagagatataacttggctgggcacagtggctcacacctgtaatcccaacactttgggagaccaaggcggatggatcacttgaggtcagttcgagactagcctggccaacatggtgaaaccctgtctctactaagaaacaaaaatcagccaggtgtggtggtgggcgcctgtaatctcagctactcaggaggctaaggcaggagaattccttgaacccgggaggcaggggttgcagtgagccaagatcacactactgcactccatcctgggctacagtagagcgagactccatctcagaaaaaaaaaaa

SEQ ID NO: 8403 - protein, 50 aa, Homo sapiens; identical to SEQ ID NO: 8373

SEQ ID NO: 8404 - DNA, 1577 bp, Homo sapiens
gttgcacaggctggagtgcagtggcgtggtctcggctcactgcatcctccgcttcccaggttcaagtgattctcctgcctcagcctcctgagtagctgggattacaggcgcctgccatcacgcctggctaatttttatatttttagtagagacggggtttcatcatgttggccaggctggtcttgaactcctgacctcaggtgaccaacccatcttggccttccaaagtgctgggattacaggcgtgagccatcacaccctgccctaagtgtcatcactttaaaagtaaccttttctcttaccctattctccttttagtaacctgtttccaaatcagtgattctcaaattttagagtgttaataagaattacctcagatacttattgaaaatacagattcctgggtccctcttcctacctagtgagttcaaatctgtagaattctgacttaggtgatcttcgaaccacactttgagaaagttgtctgttgcatgcattcccactatcatgtaaattctgtccttcatatttttacataatctactttgttttaattactggaatctcagaagttttttactcataattattgataagctttttctcctgaattcactcattggaggggtcttccactaggtgtccaggaaatgttcccaaattcccttccatatttgtcagaatttatgttctctcctccccaaagcacatgtttatagttcagtgtagacatacaagtatatgtatacacatctcttttttactttttttttgaggcagggtctcactctgttacctacactggataagccaagatcgtgccactgcactccagcctgggcaagaagagcaaaattctgtctggggggcagggggaagaggtatattttttggattaaaatggaatgctttcctcaaactgttaaaattaggtagtgttacaagtttaaagaataggtttagccagtgtgattattgcagtgtaataaaaaggatcccaggtggcacacatgctagtgtggtgcccagatgctcaactgaagtgaaggataacatgcgtttcaacattttctatatactaggcagtttttcttaagtcttggtttattgtgatataatacagtaaaatttactctttatacgtatgattccattaatattaacaaatttaaacagtcttacagctaaatacaatcaagatacagaacatttccatcactacaggaagttgttttttgctaatttaactaaacttcttaccatgctcaaccccccacccccaccctgagaaccactgctttgtttttctgatcatatagtttggccttttcaaaaatgtcatacagttggaatcatatagtatgcatgaatcatgtagctgaagttttcatttcacttaggtaaacacctaggaataggagtgctgggttatactctaagtgttaaacttcataagaagctgctaaactgttttccaaagcatctgtaccattttcctttcccaccagcaataaagcattcattagtctacgtactcaccagtgctagtgtggtcagaatgtatagttttaattata

SEQ ID NO: 8405 - protein, 64 aa, Homo sapiens [sequence omitted]

SEQ ID NO: 8406 - DNA, 507 bp, Homo sapiens
cttgtcggcgccattttgtctcggcagcggtggccgtagctccatcgcattttatgtttctggcgagaagggaacggagttttcatcaggtagattggtttttgtgcggccgtcctccaccgtttcctccaggacagcacctagtcgtggccggaggagtctcagagctgtcagaaagaaataatcggctgggcgtggtggctcatgcctgtaatctcagcaccttgggaggccgaggcgggtggatcacctgaggtcgagagttcaagaccagcctgaccaacatggagaaaccccgtctctactaaaaatacagaattagccgggcgtggtggcgcatgcctgtaattccagctaattgggaggctgaggcaggagaatcgcttaaacctggaagatggaggttgcgaataagactgattttatgggaaaattaagcagatgctccagtttgagaaacctggatctgcgatctgtttgtgagtggtattcagttaagagaacaat

SEQ ID NO: 8407 - protein, 66 aa, Homo sapiens
MFLARRERSFHQVDWFLCGRPPPFPPGQHLVVAGGVSELSERNNRLGVVAHACNLSTLGGRGGWIT

SEQ ID NO: 8408 - DNA, 1154 bp, Homo sapiens
aaaccagcttgtcggcgccattttgtctcggcagcggtggccgtagctccatcgcattttatgtttctggcgagaagggaacggagttttcatcaggtagattggtttttgtgcggccgtcctccaccgtttcctccaggacagcacctagtcgtggccggaggagtctcagagctgtcagaaagaataagactgattttatgggaaaattaagcagatgctccagtttgagaaacctggatctgcgatctgtttgtggcacagcactttgggaggctgaggcgggcgtgagattgggagtttgagaccagcctgaccaacatggagaaaccgcatctctactaaaaatacaaaattagcctggcgtggtggcgcatgcctgtaatcccagctactctggaggctgaggcaggagaaccgcttgaatccgggaggcgaaggtcacggtgagccaagattgcaccattgtactccagcctggccaacaagagcgaaactcccatctcaaaaaaaaaaagccgggtgtggtggcccacacctgtaatcccagcactttgggaggccgaggcaggcagatcacctgaggtcaggagttcaagaccagcctggccaacatggtgaaaccccatctctactaaaaatataaaacttagctgggtgtggtttcaggcagctgtaatcccagctgtttgggaggctgaggcaggagaattgcttgaacccaggaggcggaagttgcagtgagccgagatggcaccactgcattccagcctgggcaacagagcaagacccgtctcaaaaaaaaaaaaaaatgttttatttgctgctctctttcctgattttgttttagaaaaaagccagtcttttacattatcaattacataccaatcacaatattaaatatacatactttttcttgttgattccactttttagtctgcttttatgaaacctaacttttttggagttttccttttgggatggtatgtgagcttatgaaatttgagctatttttttatatttatcaagacagtctttgatttgatttaaatatgtacttaaaagtttttccattgtagtgctagctttgagttaaaaagatacctgtgttcagattcaggaaaaaatcagtatatttaaaaacctaacatttg

SEQ ID NO: 8409 - protein, 50 aa, Homo sapiens; identical to SEQ ID NO: 8373

SEQ ID NO: 8410 - DNA, 597 bp, Homo sapiens
ggcgccattttgtctcggcagcggtggccgtagctccatcgcattttatgtttctggcgagaagggaacggagttttcatcaggtagattggtttttgtgcggccgtcctccaccgtttcctccaggacagcacctagtcgtggccggaggagtctcagagctgtcagaaagtgcaagaaatcagccagcgtggtggcgtgcacctgtgttccccgctaatcaagaggctgaggtgggatgatcacctgagtccaggagatcaaggctccagtgaaccatgattgtgccactgaactccagcctgggtgacagacttcatctcaaatatataggtgtgtgtgtgtgtgtgtatatgtgtatgtatatatatatgaatagattatgtatttaaggctagggatgcttgtatagtccattagaaagcttttttttcttaactgcacttagatttgttgtcctttttattactgccccgccccccccaaaaaatttctggtctgtctttagcttcatttctgaacattttatcctggacctctctttcttcaagtagaaataatcggctgggcgtggtggctcatgcctgtaatctcagc

SEQ ID NO: 8411 - protein, 64 aa, Homo sapiens
MFLARRERSFHQVDWFLCGRPPPFPPGQHLVVAGGVSELSESARNQPAWWRAPVFPANQEAEVG

SEQ ID NO: 8412 - DNA, 5042 bp, Homo sapiens
taagtggaagatgtcctacctgctgtttttctcaccaatccatgaagtttcacagctacatccaatgaggacggcaggtagcgaggtcctatccgaagctcttcggcgtcatgagcagccaataggagttcgtgtagaagcgagtctgctcaacagcttgttatttggtggattgtggcagtaaatcggggcgagtggggaacccggcgcaggaactgcagccgcggctgggagtggtgctgcccggacgggggcccacggaggtcagaggggaggaggactctggagctgacagcgcgcacttcacccgcagttgttctagcgactgcgaagatagctcgctgagctggaaccccacagatcaccaacaaaaatgaaggcggcagatgagcctgcctacctgacagtgggaaccgatgtcagtgccaagtaccgaggtgccttctgtgaggcaaagattaagactgtgaaaaggctggtgaaagttaaggtactcctgaaacaggataataccacacaattggtacaagatgaccaagtaaagggtcctttaagagttggagctattgttgaaacaaggacatctgatggatcttttcaggaagctattatcagcaagttgacagatgctagttggtataccgtggtgtttgatgatggtgatgagcgaacattgagacgtacctcactttgtctgaaaggagagagacattttgcagagagtgagacacttgaccagcttccattaacaaatccagagcattttggaactccagtaattgcaaagaagacgaacagaggaaggagatcttctcttcctgttactgaagatgaaaaggaagaagaaagcagtgaagaggaagatgaagacaagcgccgtctcaatgatgaattactaggaaaagttgtaagtgtggtgtctgcaacggagaggactgaatggtatcctgctttggtaatatctcccagctgtaatgatgacatcacagtgaaaaaggatcagtgtttagttcgatcatttattgattctaaattttactctatagcaagaaaggacattaaggaagtagacattctcaatctaccggaatctgagctctccactaaaccagggcttcagaaagcaagcatcttcttaaaaactagagttgttcctgataattggaaaatggatataagtgaaatccttgagtcatccagtagtgatgatgaagatggcccagctgaagaaaatgatgaagagaaggaaaaggaggccaaaaagacagaagaagaggtgcctgaggaagaacttgatcctgaagagagggacaacttcctccagcagctttataagtttatggaagacagaggtactccaatcaacaaaccacctgttttgggctataaagatctcaatctcttcaaactcttcagactggtttatcatcagggtggatgtgacaatattgatagtggtgctgtatggaagcaaatttatatggaccttggcattcctattttgaattcagctgcttcctacaatgtaaaaactgcttatagaaagtatctctatggttttgaggagtactgccgttcggcaaatattcagttcagaactgttcatcaccatgaaccaaaagtaaaagaggaaaaaaaagacttagaagaatcaatggaagaggctctcaaattagatcaagaaatgcctttaacagaagtgaagagtgaacctgaggaaaatatcgattcaaacagtgaaagtgaaagagaagagatagaattaaaatctccgaggggacgaaggagaattgctcgagatgtaaattctattaaaaaggaaattgaagaagagaaaacagaagacaaattaaaagataatgatacagaaaataaggatgtagatgatgactatgaaactgcagagaaaaaagaaaatgagctactactggggagaaaaaatacaccaaagcaaaaagagaagaaaattaaaaaacaggaggattctgacaaagactcagatgaagaggaagagaaaagccaagagagggaagaaactgaaagcaaatgtgactctgaaggagaggaagatgaggaagacatggaaccctgcctaacaggaaccaaagtgaaagtaaaatatggacgagggaagactcagaaaatttatgaagccagtattaaaagcactgaaattgatgacggagaagttttatatttggtacattactatggatggaatgtcaggtatgatgagtgggtgaaggctgacaggataatctggcctttggacaaaggtggaccaaagaaaaaacagaagaaaaaagctaaaaataaagaagatagtgaaaaggacgaaaagagagatgaggagaggcagaagtcaaaacggggacgacctcctttaaaatcaaccctctcatcaaacatgccgtatggcttatctaagacagcaaacagtgaaggaaaatcagactcttgttcatctgatagtgaaacagaagatgctttagaaaagaatttaataaatgaagaactttctcttaaagatgaactagaaaaaaatgaaaatttgaatgatgataagctagatgaagaaaatccaaagatttctgcacatatattaaaagaaaatgataggactcaaatgcagcctttagaaaccctgaagttagaagttggagagaatgaacaaatagtacagatttttgggaacaaaatggaaaaaacagaagaagttaagaaagaagccgaaaaatctccaaaaggaaagggaagacgaagcaagacaaaagatctttctttagaaattataaagatttcatcatttggccagaatgaagcaggaagtgaacctcatatagaagctcatagtcttgaattgtcttcattagacaataaaaacttttcttctgctacagaagatgaaattgaccaatgtgtgaaagaaaagaagttgaaacggaaaatactaggacaatcatcgccagagaaaaaaataagaattgagaatggaatggaaatgacaaatactgtatctcaagaaaggaccagtgattgtattggatctgagggaatgaaaaacttaaattttgaacagcactttgaaagagaaaatgaaggaatgccatcattgatagcagagtcaaaccaatgcatccaacaactgactagtgaaagatttgatagtccagctgaagaaactgtaaatattccactaaaagaagatgaggatgcaatgcctctgatcgggcctgaaaccttggtttgccatgaagtagatttggatgatttggatgaaaaggataagaccagcattgaggatgtagcagttgaaagctctgagtctaactctcttgtttctattccacctgccctacctcctgtagtccaacataacttttcagtagcttcaccacttactcttagtcaagatgagtctcgaagcgtaaaaagtgagagtgatataacgattgaagttgatagtattgctgaagaatctcaagaaggtctctgtgagagggaatcggcaaatggatttgaaactaatgttgcctctggtacctgtagtataattgtacaagagagagagagcagagagaagggtcagaagaggccaagtgatggaaatagtggattaatggcaaaaaagcaaaagcgtaccccaaagcgaacaagtgctgcagccaaaaatgaaaagaatggaacaggacaaagcagtgatagtgaagatcttcctgtcctagacaattcaagtaaatgtaccccagtaaagcatcttaatgtatctaagccacagaaacttgcacgatctcctgcaagaatatccccgcacatcaaagatggagagaaagataaacacagagaaaaacatccgaattcatcccctaggacatataaatggagctttcagctcaatgaattagataatatgaacagtacagagagaatctcatttctccaagaaaaactacaggaaatcagaaaatattatatgtctttgaagtctgaagttgcaaccatagacaggaggagaaaaagattaaaaaagaaagacagggaagtgtctcatgcgggagcctccatgtcatctgcttcatcagacactggaatgagtccctcatcatcatctcccccacaaaatgtacttgctgtagaatgcaggtgataaacattttctctaccttcccagcagtttgctgccatggacataaatccccaaaccctgaattacaaccacagaaagcactcaactggtttgacattgctaagtatatcctgtatacttttccaggctggattgtatctattcccctctctcttcttttttcttgttgcaaaaaataagctgattaataagtgaaggttaagcagcctgccatatttgtcataatttttcctctttacttttgtttttcgtttgttgtgatatagaacaaagggcacttagcaaatttgaatttgtataataaagctttcaggtgttacagaaatcgtagacaagcaagtgcacatgataaacatcaaaatattacccagctgaatagttactgctgcactttcactaagatgtatttgaacacttggtgagtagggggtttatgttgtgttttttttcattatcgttttttttatttttgtggaagcacttgctatttagaactgccaaagtatatgttcagcagtgtgcccaggattgaaggtgtaaatgggacaaaataaattgtgaaaggaagtgtagttgactgaaaactacagttgtaataagtcttccactttttataggatttttgagcacaaaattatgcaaatattttaatgtttattaatgtttacagtggaattgtgaataagttttcagtggactatcttatcccttgacaaaaatattttgtcttttttctatgtaatttcagagtttttattttgttacaaaaagacaaaaatgaaatatataacaacaatgaagttatttaacaagatttctaaagctgaaatttttgtgtaaaataaggtattatcttgcaacttgttaaatatatttattcagacattggatgttg

SEQ ID NO: 8413 - protein, 1257 aa, Homo sapiens; identical to SEQ ID NO: 1216

SEQ ID NO: 8414 - DNA, 4871 bp, Homo sapiens
taagtggaagatgtcctacctgctgtttttctcaccaatccatgaagtttcacagctacatccaatgaggacggcaggtagcgaggtcctatccgaagctcttcggcgtcatgagcagccaataggagttcgtgtagaagcgagtctgctcaacagcttgttatttggtggattgtggcagtaaatcggggcgagtggggaacccggcgcaggaactgcagccgcggctgggagtggtgctgcccggacgggggcccacggaggtcagaggggaggaggactctggagctgacagcgcgcacttcacccgcagttgttctagcgactgcgaagatagctcgctgagctggaaccccacagatcaccaacaaaaatgaaggcggcagatgagcctgcctacctgacagtgggaaccgatgtcagtgccaagtaccgaggtgccttctgtgaggcaaagattaagactgtgaaaaggctggtgaaagttaaggtactcctgaaacaggataataccacacaattggtacaagatgaccaagtaaagggtcctttaagagttggagctattgttgaaacaaggacatctgatggatcttttcaggaagctattatcagcaagttgacagatgctagttggtataccgtggtgtttgatgatggtgatgagcgaacattgagacgtacctcactttgtctgaaaggagagagacattttgcagagagtgagacacttgaccagcttccattaacaaatccagagcattttggaactccagtaattgcaaagaagacgaacagaggaaggagatcttctcttcctgttactgaagatgaaaaggaagaagaaagcagtgaagaggaagatgaagacaagcgccgtctcaatgatgaattactaggaaaagttgtaagtgtggtgtctgcaacggagaggactgaatggtatcctgctttggtaatatctcccagctgtaatgatgacatcacagtgaaaaaggatcagtgtttagttcgatcatttattgattctaaattttactctatagcaagaaaggacattaaggaagtagacattctcaatctaccggaatctgagctctccactaaaccagggcttcagaaagcaagcatcttcttaaaaactagagttgttcctgataattggaaaatggatataagtgaaatccttgagtcatccagtagtgatgatgaagatggcccagctgaagaaaatgatgaagagaaggaaaaggaggccaaaaagacagaagaagaggtgcctgaggaagaacttgatcctgaagagagggacaacttcctccagcagctttataagtttatggaagacagaggtactccaatcaacaaaccacctgttttgggctataaagatctcaatctcttcaaactcttcagactggtttatcatcagggtggatgtgacaatattgatagtggtgctgtatggaagcaaatttatatggaccttggcattcctattttgaattcagctgcttcctacaatgtaaaaactgcttatagaaagtatctctatggttttgaggagtactgccgttcggcaaatattcagttcagaactgttcatcaccatgaaccaaaagtaaaagaggaaaaaaaagacttagaagaatcaatggaagaggctctcaaattagatcaagaaatgcctttaacagaagtgaagagtgaacctgaggaaaatatcgattcaaacagtgaaagtgaaagagaagagatagaattaaaatctccgaggggacgaaggagaattgctcgagatgtaaattctattaaaaaggaaattgaagaagagaaaacagaagacaaattaaaagataatgatacagaaaataaggatgtagatgatgactatgaaactgcagagaaaaaagaaaatgagctactactggggagaaaaaatacaccaaagcaaaaagagaagaaaattaaaaaacaggaggattctgacaaagactcagatgaagaggaagagaaaagccaagagagggaagaaactgaaagcaaatgtgactctgaaggagaggaagatgaggaagacatggaaccctgcctaacaggaaccaaagtgaaagtaaaatatggacgagggaagactcagaaaatttatgaagccagtattaaaagcactgaaattgatgacggagaagttttatatttggtacattactatggatggaatgtcaggtatgatgagtgggtgaaggctgacaggataatctggcctttggacaaaggtggaccaaagaaaaaacagaagaaaaaagctaaaaataaagaagatagtgaaaaggacgaaaagagagatgaggagaggcagaagtcaaaacggggacgacctcctttaaaatcaaccctctcatcaaacatgccgtatggcttatctaagacagcaaacagtgaaggaaaatcagactcttgttcatctgatagtgaaacagaagatgctttagaaaagaatttaataaatgaagaactttctcttaaagatgaactagaaaaaaatgaaaatttgaatgatgataagctagatgaagaaaatccaaagatttctgcacatatattaaaagaaaatgataggactcaaatgcagcctttagaaaccctgaagttagaagttggagagaatgaacaaatagtacagatttttgggaacaaaatggaaaaaacagaagaagttaagaaagaagccgaaaaatctccaaaaggaaagggaagacgaagcaagacaaaagatctttctttagaaattataaagatttcatcatttggccagaatgaagcaggaagtgaacctcatatagaagctcatagtcttgaattgtcttcattagacaataaaaacttttcttctgctacagaagatgaaattgaccaatgtgtgaaagaaaagaagttgaaacggaaaatactaggacaatcatcgccagagaaaaaaataagaattgagaatggaatggaaatgacaaatactgtatctcaagaaaggaccagtgattgtattggatctgagggaatgaaaaacttaaattttgaacagcactttgaaagagaaaatgaaggaatgccatcattgatagcagagtcaaaccaatgcatccaacaactgactagtgaaagatttgatagtccagctgaagaaactgtaaatattccactaaaagaagatgaggatgcaatgcctctgatcgggcctgaaaccttggtttgccatgaagtagatttggatgatttggatgaaaaggataagaccagcattgaggatgtagcagttgaaagctctgagtctaactctcttgtttctattccacctgccctacctcctgtagtccaacataacttttcagtagcttcaccacttactcttagtcaagatgagtctcgaagcgtaaaaagtgagagtgatataacgattgaagttgatagtattgctgaagaatctcaagaaggtctctgtgagagggaatcggcaaatggatttgaaactaatgttgcctctggtacctgtagtataattgtacaagagagagagagcagagagaagggtcagaagaggccaagtgatggaaatagtggattaatggcaaaaaagcaaaagcgtaccccaaagcgaacaagtgctgcagccaaaaatgaaaagaatggaacagatgaattagataatatgaacagtacagagagaatctcatttctccaagaaaaactacaggaaatcagaaaatattatatgtctttgaagtctgaagttgcaaccatagacaggaggagaaaaagattaaaaaagaaagacagggaagtgtctcatgcgggagcctccatgtcatctgcttcatcagacactggaatgagtccctcatcatcatctcccccacaaaatgtacttgctgtagaatgcaggtgataaacattttctctaccttcccagcagtttgctgccatggacataaatccccaaaccctgaattacaaccacagaaagcactcaactggtttgacattgctaagtatatcctgtatacttttccaggctggattgtatctattcccctctctcttcttttttcttgttgcaaaaaataagctgattaataagtgaaggttaagcagcctgccatatttgtcataatttttcctctttacttttgtttttcgtttgttgtgatatagaacaaagggcacttagcaaatttgaatttgtataataaagctttcaggtgttacagaaatcgtagacaagcaagtgcacatgataaacatcaaaatattacccagctgaatagttactgctgcactttcactaagatgtatttgaacacttggtgagtagggggtttatgttgtgttttttttcattatcgttttttttatttttgtggaagcacttgctatttagaactgccaaagtatatgttcagcagtgtgcccaggattgaaggtgtaaatgggacaaaataaattgtgaaaggaagtgtagttgactgaaaactacagttgtaataagtcttccactttttataggatttttgagcacaaaattatgcaaatattttaatgtttattaatgtttacagtggaattgtgaataagttttcagtggactatcttatcccttgacaaaaatattttgtcttttttctatgtaatttcagagtttttattttgttacaaaaagacaaaaatgaaatatataacaacaatgaagttatttaacaagatttctaaagctgaaatttttgtgtaaaataaggtattatcttgcaacttgttaaatatatttattcagacattggatgttgtatttttatgtattttttaaaatattaataaaattt

SEQ ID NO: 8415 - protein, 1188 aa, Homo sapiens; identical to SEQ ID NO: 1220

SEQ ID NO: 8416 - DNA, 5078 bp, Homo sapiens
taagtggaagatgtcctacctgctgtttttctcaccaatccatgaagtttcacagctacatccaatgaggacggcaggtagcgaggtcctatccgaagctcttcggcgtcatgagcagccaataggagttcgtgtagaagcgagtctgctcaacagcttgttatttggtggattgtggcagtaaatcggggcgagtggggaacccggcgcaggaactgcagccgcggctgggagtggtgctgcccggacgggggcccacggaggtcagaggggaggaggactctggagctgacagcgcgcacttcacccgcagttgttctagcgactgcgaagatagctcgctgagctggaaccccacagatcaccaacaaaaatgaaggcggcagatgagcctgcctacctgacagtgggaaccgatgtcagtgccaagtaccgaggtgccttctgtgaggcaaagattaagactgtgaaaaggctggtgaaagttaaggtactcctgaaacaggataataccacacaattggtacaagatgaccaagtaaagggtcctttaagagttggagctattgttgaaacaaggacatctgatggatcttttcaggaagctattatcagcaagttgacagatgctagttggtataccgtggtgtttgatgatggtgatgagcgaacattgagacgtacctcactttgtctgaaaggagagagacattttgcagagagtgagacacttgaccagcttccattaacaaatccagagcattttggaactccagtaattgcaaagaagacgaacagaggaaggagatcttctcttcctgttactgaagatgaaaaggaagaagaaagcagtgaagaggaagatgaagacaagcgccgtctcaatgatgaattactaggaaaagttgtaagtgtggtgtctgcaacggagaggactgaatggtatcctgctttggtaatatctcccagctgtaatgatgacatcacagtgaaaaaggatcagtgtttagttcgatcatttattgattctaaattttactctatagcaagaaaggacattaaggaagtagacattctcaatctaccggaatctgagctctccactaaaccagggcttcagaaagcaagcatcttcttaaaaactagagttgttcctgataattggaaaatggatataagtgaaatccttgagtcatccagtagtgatgatgaagatggcccagctgaagaaaatgatgaagagaaggaaaaggaggccaaaaagacagaagaagaggtgcctgaggaagaacttgatcctgaagagagggacaacttcctccagcagctttataagtttatggaagacagaggtactccaatcaacaaaccacctgttttgggctataaagatctcaatctcttcaaactcttcagactggtttatcatcagggtggatgtgacaatattgatagtggtgctgtatggaagcaaatttatatggaccttggcattcctattttgaattcagctgcttcctacaatgtaaaaactgcttatagaaagtatctctatggttttgaggagtactgccgttcggcaaatattcagttcagaactgttcatcaccatgaaccaaaagtaaaagaggaaaaaaaagacttagaagaatcaatggaagaggctctcaaattagatcaagaaatgcctttaacagaagtgaagagtgaacctgaggaaaatatcgattcaaacagtgaaagtgaaagagaagagatagaattaaaatctccgaggggacgaaggagaattgctcgagatgtaaattctattaaaaaggaaattgaagaagagaaaacagaagacaaattaaaagataatgatacagaaaataaggatgtagatgatgactatgaaactgcagagaaaaaagaaaatgagctactactggggagaaaaaatacaccaaagcaaaaagagaagaaaattaaaaaacaggaggattctgacaaagactcagatgaagaggaagagaaaagccaagagagggaagaaactgaaagcaaatgtgactctgaaggagaggaagatgaggaagacatggaaccctgcctaacaggaaccaaagtgaaagtaaaatatggacgagggaagactcagaaaatttatgaagccagtattaaaagcactgaaattgatgacggagaagttttatatttggtacattactatggatggaatgtcaggtatgatgagtgggtgaaggctgacaggataatctggcctttggacaaaggtggaccaaagaaaaaacagaagaaaaaagctaaaaataaagaagatagtgaaaaggacgaaaagagagatgaggagaggcagaagtcaaaacggggacgacctcctttaaaatcaaccctctcatcaaacatgccgtatggcttatctaagacagcaaacagtgaaggaaaatcagactcttgttcatctgatagtgaaacagaagatgctttagaaaagaatttaataaatgaagaactttctcttaaagatgaactagaaaaaaatgaaaatttgaatgatgataagctagatgaagaaaatccaaagatttctgcacatatattaaaagaaaatgataggactcaaatgcagcctttagaaaccctgaagttagaagttggagagaatgaacaaatagtacagatttttgggaacaaaatggaaaaaacagaagaagttaagaaagaagccgaaaaatctccaaaaggaaagggaagacgaagcaagacaaaagatctttctttagaaattataaagatttcatcatttggccagaatgaagcaggaagtgaacctcatatagaagctcatagtcttgaattgtcttcattagacaataaaaacttttcttctgctacagaagatgaaattgaccaatgtgtgaaagaaaagaagttgaaacggaaaatactaggacaatcatcgccagagaaaaaaataagaattgagaatggaatggaaatgacaaatactgtatctcaagaaaggaccagtgattgtattggatctgagggaatgaaaaacttaaattttgaacagcactttgaaagagaaaatgaaggaatgccatcattgatagcagagtcaaaccaatgcatccaacaactgactagtgaaagatttgatagtccagctgaagaaactgtaaatattccactaaaagaagatgaggatgcaatgcctctgatcgggcctgaaaccttggtttgccatgaagtagatttggatgatttggatgaaaaggataagaccagcattgaggatgtagcagttgaaagctctgagtctaactctcttgtttctattccacctgccctacctcctgtagtccaacataacttttcagtagcttcaccacttactcttagtcaagatgagtctcgaagcgtaaaaagtgagagtgatataacgattgaagttgatagtattgctgaagaatctcaagaaggtctctgtgagagggaatcggcaaatggatttgaaactaatgttgcctctggtacctgtagtataattgtacaagagagagagagcagagagaagggtcagaagaggccaagtgatggaaatagtggattaatggcaaaaaagcaaaagcgtaccccaaagcgaacaagtgctgcagccaaaaatgaaaagaatggaacaggacaaagcagtgatagtgaagatcttcctgtcctagacaattcaagtaaatgtaccccagtaaagcatcttaatgtatctaagccacagaaacttgcacgatctcctgcaagaatatccccgcacatcaaagatggagagaaagataaacacagagaaaaacatccgaattcatcccctaggacatataaatggagctttcagctcaatgaattagataatatgaacagtacagagagaatctcatttctccaagaaaaactacaggaaatcagaaaatattatatgtctttgaagtctgaagttgcaaccatagacaggaggagaaaaagattaaaaaagaaagacagggaagtgtctcatgcgggagcctccatgtcatctgcttcatcagacactggaatgagtccctcatcatcatctcccccacaaaatgtacttgctgtagaatgcaggtgataaacattttctctaccttcccagcagtttgctgccatggacataaatccccaaaccctgaattacaaccacagaaagcactcaactggtttgacattgctaagtatatcctgtatacttttccaggctggattgtatctattcccctctctcttcttttttcttgttgcaaaaaataagctgattaataagtgaaggttaagcagcctgccatatttgtcataatttttcctctttacttttgtttttcgtttgttgtgatatagaacaaagggcacttagcaaatttgaatttgtataataaagctttcaggtgttacagaaatcgtagacaagcaagtgcacatgataaacatcaaaatattacccagctgaatagttactgctgcactttcactaagatgtatttgaacacttggtgagtagggggtttatgttgtgttttttttcattatcgttttttttatttttgtggaagcacttgctatttagaactgccaaagtatatgttcagcagtgtgcccaggattgaaggtgtaaatgggacaaaataaattgtgaaaggaagtgtagttgactgaaaactacagttgtaataagtcttccactttttataggatttttgagcacaaaattatgcaaatattttaatgtttattaatgtttacagtggaattgtgaataagttttcagtggactatcttatcccttgacaaaaatattttgtcttttttctatgtaatttcagagtttttattttgttacaaaaagacaaaaatgaaatatataacaacaatgaagttatttaacaagatttctaaagctgaaatttttgtgtaaaataaggtattatcttgcaacttgttaaatatatttattcagacattggatgttgtatttttatgtattttttaaaatattaataaaattt

SEQ ID NO: 8417 - protein, 1257 aa, Homo sapiens; identical to SEQ ID NO: 1216

SEQ ID NO: 8418 - DNA, 4916 bp, Homo sapiens
taagtggaagatgtcctacctgctgtttttctcaccaatccatgaagtttcacagctacatccaatgaggacggcaggtagcgaggtcctatccgaagctcttcggcgtcatgagcagccaataggagttcgtgtagaagcgagtctgctcaacagcttgttatttggtggattgtggcagtaaatcggggcgagtggggaacccggcgcaggaactgcagccgcggctgggagtggtgctgcccggacgggggcccacggaggtcagaggggaggaggactctggagctgacagcgcgcacttcacccgcagttgttctagcgactgcgaagatagctcgctgagctggaaccccacagatcaccaacaaaaatgaaggcggcagatgagcctgcctacctgacagtgggaaccgatgtcagtgccaagtaccgaggtgccttctgtgaggcaaagattaagactgtgaaaaggctggtgaaagttaaggtactcctgaaacaggataataccacacaattggtacaagatgaccaagtaaagggtcctttaagagttggagctattgttgaaacaaggacatctgatggatcttttcaggaagctattatcagcaagttgacagatgctagttggtataccgtggtgtttgatgatggtgatgagcgaacattgagacgtacctcactttgtctgaaaggagagagacattttgcagagagtgagacacttgaccagcttccattaacaaatccagagcattttggaactccagtaattgcaaagaagacgaacagaggaaggagatcttctcttcctgttactgaagatgaaaaggaagaagaaagcagtgaagaggaagatgaagacaagcgccgtctcaatgatgaattactaggaaaagttgtaagtgtggtgtctgcaacggagaggactgaatggtatcctgctttggtaatatctcccagctgtaatgatgacatcacagtgaaaaaggatcagtgtttagttcgatcatttattgattctaaattttactctatagcaagaaaggacattaaggaagtagacattctcaatctaccggaatctgagctctccactaaaccagggcttcagaaagcaagcatcttcttaaaaactagagttgttcctgataattggaaaatggatataagtgaaatccttgagtcatccagtagtgatgatgaagatggcccagctgaagaaaatgatgaagagaaggaaaaggaggccaaaaagacagaagaagaggtgcctgaggaagaacttgatcctgaagagagggacaacttcctccagcagctttataagtttatggaagacagaggtactccaatcaacaaaccacctgttttgggctataaagatctcaatctcttcaaactcttcagactggtttatcatcagggtggatgtgacaatattgatagtggtgctgtatggaagcaaatttatatggaccttggcattcctattttgaattcagctgcttcctacaatgtaaaaactgcttatagaaagtatctctatggttttgaggagtactgccgttcggcaaatattcagttcagaactgttcatcaccatgaaccaaaagtaaaagaggaaaaaaaagacttagaagaatcaatggaagaggctctcaaattagatcaagaaatgcctttaacagaagtgaagagtgaacctgaggaaaatatcgattcaaacagtgaaagtgaaagagaagagatagaattaaaatctccgaggggacgaaggagaattgctcgagatgtaaattctattaaaaaggaaattgaagaagagaaaacagaagacaaattaaaagataatgatacagaaaataaggatgtagatgatgactatgaaactgcagagaaaaaagaaaatgagctactactggggagaaaaaatacaccaaagcaaaaagagaagaaaattaaaaaacaggaggattctgacaaagactcagatgaagaggaagagaaaagccaagagagggaagaaactgaaagcaaatgtgactctgaaggagaggaagatgaggaagacatggaaccctgcctaacaggaaccaaagtgaaagtaaaatatggacgagggaagactcagaaaatttatgaagccagtattaaaagcactgaaattgatgacggagaagttttatatttggtacattactatggatggaatgtcaggtatgatgagtgggtgaaggctgacaggataatctggcctttggacaaaggtggaccaaagaaaaaacagaagaaaaaagctaaaaataaagaagatagtgaaaaggacgaaaagagagatgaggagaggcagaagtcaaaacggggacgacctcctttaaaatcaaccctctcatcaaacatgccgtatggcttatctaagacagcaaacagtgaaggaaaatcagactcttgttcatctgatagtgaaacagaagatgctttagaaaagaatttaataaatgaagaactttctcttaaagatgaactagaaaaaaatgaaaatttgaatgatgataagctagatgaagaaaatccaaagatttctgcacatatattaaaagaaaatgataggactcaaatgcagcctttagaaaccctgaagttagaagttggagagaatgaacaaatagtacagatttttgggaacaaaatggaaaaaacagaagaagttaagaaagaagccgaaaaatctccaaaaggaaagggaagacgaagcaagacaaaagatctttctttagaaattataaagatttcatcatttggccagaatgaagcaggaagtgaacctcatatagaagctcatagtcttgaattgtcttcattagacaataaaaacttttcttctgctacagaagatgaaattgaccaatgtgtgaaagaaaagaagttgaaacggaaaatactaggacaatcatcgccagagaaaaaaataagaattgagaatggaatggaaatgacaaatactgtatctcaagaaaggaccagtgattgtattggatctgagggaatgaaaaacttaaattttgaacagcactttgaaagagaaaatgaaggaatgccatcattgatagcagagtcaaaccaatgcatccaacaactgactagtgaaagatttgatagtccagctgaagaaactgtaaatattccactaaaagaagatgaggatgcaatgcctctgatcgggcctgaaaccttggtttgccatgaagtagatttggatgatttggatgaaaaggataagaccagcattgaggatgtagcagttgaaagctctgagtctaactctcttgtttctattccacctgccctacctcctgtagtccaacataacttttcagtagcttcaccacttactcttagtcaagatgagtctcgaagcgtaaaaagtgagagtgatataacgattgaagttgatagtattgctgaagaatctcaagaaggtctctgtgagagggaatcggcaaatggatttgaaactaatgttgcctctggtacctgtagtataattgtacaagagagagagagcagagagaagggtcagaagaggccaagtgatggaaatagtggattaatggcaaaaaagcaaaagcgtaccccaaagcgaacaagtgctgcagccaaaaatgaaaagaatggaacaggacaaagcagtgatagtgaagatcttcctgtcctagacaattcaaatgaattagataatatgaacagtacagagagaatctcatttctccaagaaaaactacaggaaatcagaaaatattatatgtctttgaagtctgaagttgcaaccatagacaggaggagaaaaagattaaaaaagaaagacagggaagtgtctcatgcgggagcctccatgtcatctgcttcatcagacactggaatgagtccctcatcatcatctcccccacaaaatgtacttgctgtagaatgcaggtgataaacattttctctaccttcccagcagtttgctgccatggacataaatccccaaaccctgaattacaaccacagaaagcactcaactggtttgacattgctaagtatatcctgtatacttttccaggctggattgtatctattcccctctctcttcttttttcttgttgcaaaaaataagctgattaataagtgaaggttaagcagcctgccatatttgtcataatttttcctctttacttttgtttttcgtttgttgtgatatagaacaaagggcacttagcaaatttgaatttgtataataaagctttcaggtgttacagaaatcgtagacaagcaagtgcacatgataaacatcaaaatattacccagctgaatagttactgctgcactttcactaagatgtatttgaacacttggtgagtagggggtttatgttgtgttttttttcattatcgttttttttatttttgtggaagcacttgctatttagaactgccaaagtatatgttcagcagtgtgcccaggattgaaggtgtaaatgggacaaaataaattgtgaaaggaagtgtagttgactgaaaactacagttgtaataagtcttccactttttataggatttttgagcacaaaattatgcaaatattttaatgtttattaatgtttacagtggaattgtgaataagttttcagtggactatcttatcccttgacaaaaatattttgtcttttttctatgtaatttcagagtttttattttgttacaaaaagacaaaaatgaaatatataacaacaatgaagttatttaacaagatttctaaagctgaaatttttgtgtaaaataaggtattatcttgcaacttgttaaatatatttattcagacattggatgttgtatttttatgtattttttaaaatattaataaaattt

SEQ ID NO: 8419 - protein, 1203 aa, Homo sapiens; identical to SEQ ID NO: 1218

SEQ ID NO: 8420 - DNA, 714 bp, Homo sapiens
aacagcttgttatttggtggattgtggcagtaaatcggggcgagtggggaacccggcgcaggaactgcagccgcggctgggagtggtgctgcccggacgggggcccacggaggtcagaggggaggaggactctggagctgacagcgcgcacttcacccgcagttgttctagcgactgcgaagatagctcgctgagctggaaccccacagatcaccaacaaaaatgaaggcggcagatgagcctgcctacctgacagtgggaaccgatgtcagtgccaagtaccgaggtgccttctgtgaggcaaagattaagactgtgaaaaggctggtgaaagttaagaattaagcaccataaaaggaggaaacgtctgacttgttctatgcccaacacatagagtagtgcctgatacatagtggaccctcaaaatttgttgaatgaatcagtgaactagagcagtgattcctaaagggtccctccagaccagcagcatcagccttacttgggaacttgttccaaatgcaaattttccccaccccagatctacttcatcagaaactctgggggtactcctgaaacaggataataccacacaattggtacaagatgaccaagtaaagggtcctttaagagttggagctattgttgaaacaaggacatctgatggatcttttcaggaagctattatcagcaagttgacagatgctagttggtata

SEQ ID NO: 8421 - protein, 40 aa, Homo sapiens
MKAADEPAYLTVGTDVSAKYRGAFCEAKIKTVKRLVKVKN

SEQ ID NO: 8422 - DNA, 619 bp, Homo sapiens
tgaagaggaagagaaaagccaagagaggtacattatcttatgtttgttctccagaagcacctgtctggggtacaacagcgctttgttcctgcttagagattcaggtttgagggaatgttttcttattgggacttccgttcctcttgtctaatgaaggtgagacacattgtgaagatgatgtgtattgcctttcggaattggagaatatactggtcgcaccattttaatagcacttgtgccctaaacagtggcctcaaagaaggctgcgccacccagtcaaaagaaaggtcctgcagttgacagcagggaagggagctggagaaaaatggaggaagtggacaagaggaaacagcgacagcaaaaattccattttaaaaaagggaagaaactgaaagcaaatgtgactctgaaggagaggaagatgaggaagacatggaaccctgcctaacaggaaccaaagtgaaagtaaaatatggacgagggaagactcagaaaatttatgaagccagtattaaaagcactgaaattgatgacggagaagttttatatttggtacattactatggatggaatgtcaggtatgatgagtgggtgaaggctgacaggataatctggcctt

SEQ ID NO: 8423 - protein, 61 aa, Homo sapiens
MEPCLTGTKVKVKYGRGKTQKIYEASIKSTEIDDGEVLYLVHYYGWNVRYDEWVKADRIIW

SEQ ID NO: 8424 - DNA, 399 bp, Homo sapiens
gctttactgggagccagtggtcgtttaggtctctgttccctcacctgcaaaattaagttgactctaaggtcaactttggtcacctcctagttcacattgtctaacagtagcccgtactccccaatctggtatcctttgtctcctgaaaggacccagcagtccaaggtccaagggaggaattcagaagcaacactgtttaatctagaaaaatacgttaaattgctgggctgagactgacagtcaaaggtcccaaagcaaaaacaactgagagtcccatgatactggcctagctgcttttctaatatttgccttactcagcggacacagcagaaagaaagaaggaattaaaaactgctggacttggagcacaatggtcaaggccacacatgacacgtcact

SEQ ID NO: 8425 - protein, 46 aa, Homo sapiens
FTLSNSSPYSPIWYPLSPERTQQSKVQGRNSEATLFNLEKYVKLLG

SEQ ID NO: 8426 - DNA, 1076 bp, Homo sapiens
caacgctcggcttgtgggacgcccgcggtcggatgccctccgtccgctccctcctccgcctcttggccgccgcggcggcctgtggcgccttcgccttcctgggctattgtatttacctcaaccggaagcggcgcggggaccccgcgttcaagcgccgcctgcgggacaaaagaagagcagagcctcaaaaggctgaggagcagggcacgcagttgtgggatccaacgaagaataaaaagttgcaagaacttttcttgcaagaggtacggatgggagaactttggttatctagaggagagcacagaatggggattcaacacctcggcaatgcccttttagtgtgcgagcaaccacgggaacttctgaaagttttcaaacacactctccctcccaaggtatttgagatgctgttgcacaaaattccccttatttgccagcaatttgaggcagacatgaatgaacaggactgcttggaggatgatcctgattgaaaaacatttcaacgtatccacagtccagtgagaatactatggtaccatacagtataaacaactgctcagtgatatttccatttattttactttgagtaataaaaatttttctatctcatacatgatcgaacacataagttgctttaaaattaacagtcacaattgaagaaacaatggtttatttttctaatcaagtgaccaagctgctgaatcataaggcctcaacaaatgttgcatcttattatttcactgaacaataagaccttctattgtgattattcctggtaaatagcaattttgtttctccagcggtttccatttgccaaacagtcatgacagatggttgaacatggtggctactgctttcaggggattctatcagatgagtcctcatttccaataaagcagctgttggcaatctttcatcaaaagttcatccatcaggacttctctatcgtggttggccaaggagtcctgctttggctgccagggcttcattctgctgaatatgatattcctgaaatctcatggatattctttgtgtcatttttaaatatttctgtaagcaatgttctgaacaggtgg

SEQ ID NO: 8427 - protein, 152 aa, Homo sapiens; identical to SEQ ID NO: 1222

SEQ ID NO: 8428 - DNA, 3613 bp, Homo sapiens
aaattaatgcgcaaaatggcggttgcacgtctgtttccccaccccggcgcacaatcctgaggaaggacgtcacgtcaccagggcaacgacgctcttgcgtaaaggcccggcccaagggaacgttcagggcgtctcggctttccccgctgctgcttctgctaggcccagtgcgagaccagagcacgagcgactcccgtcgtccccggccaggcagatgttggcctagtcctggcgcgaacgaagcgcgctatttccctgcttcctctaggccaagcctgctttacggcagggcccgcctcgggagcgagcacagaccggggcagcgaggccagccaggcgccgacgaggtccccgaacgcgcacgcgctccgttcagctccgggtggcggccgccggagtagacgttagccatggaaaccgagagctggcccgggcggggccgcggtgagctcgttattcggccgccgcagcttttctgcctccgcattcgggcactaaccaacctcccggcgggagcgcccagcccgagtttacctgcaaaaatgcggtccctgggatgccttcgcgtcttctcttccctcgggtgacttgaggtttgtggtaaatatgccagctctagaacacatgaatcagattttacacatcttgtttgtatttttaccctttctgtgggcacttgggactctgcccccacccgatgcacttctcttatgggcaatggagcaggttttagagttcggccttggaggctcatctatgtcaacccacttacggttattagtaatgttcatcatgtctgctggaacagctatagcatcatatttcattccaagcactgttggtgtggttcttttcatgactggatttggtttcttgctgagtctgaacttaagtgatatgggtcacaaaattggaaccaaatctaaggatttacccagtggtccggaaaaacatttttcatggaaggaatgccttttctacatcattatattagtcttggctcttttagaaactagcttgcttcatcactttgctggcttctcacagatttctaaaagcaattcccaggctattgtgggctatggtttgatgatattacttataatactgtggatacttagagaaattcaaagcgtatatatcattggaattttccgaaatcccttttatccgaaggatgtgcaaactgtgactgtattctttgagaagcaaactaggctcatgaagattggtattgtcagacggattttgctaactttagtatcaccttttgccatgatagcatttctttcattggacagttccttacaagggctccactcagtgtctgtctgtattggattcacaagagcctttagaatggtatggcagaatacagaaaatgctttattggagacagtcattgtatcaacagtacacttgatctccagtacagacatatggtggaacagaagcctggatacaggactcagactcttactggttggtatcatacgtgatcgtttgattcagttcatctctaaattgcagtttgccgtgactgtgcttttgacatcatggacagagaaaaaacaacgtcgaaaaacaactgccactttatgtatactcaacattgtcttttctccattcgtgttggtcatcatagttttttctacactactctcttctcccttactccctcttttcacccttcctgtgttcttggtggggtttccccgacctattcagagttggccaggagcagcaggcaccacagcctgtgtgtgtgcagatacagtgtactactaccaaatggtgcccaggttgactgctgtactgcagactgcaatggcagctggaagtttaggtctcctcctacctggatctcattacttgggccgttttcaggatcgtttaatgtggataatgattctggaatgtggctatacttactgctctattaacattaaggggttagaattgcaggaaacatcctgtcatactgcagaagctcgcagagttgatgaagtttttgaagatgcttttgagcaagaatacacaagagtatgttcccttaatgaacactttggaaatgtcttgacaccctgtactgttttgcctgtgaaattgtattctgatgccaggaatgttctatcaggcataattgattctcatgaaaacttaaaagaatttaaaggtgacctcattaaagtacttgtgtggatacttgttcaatactgctccaaaaggcctggcatgaaagagaatgttcacaacactgaaaataaagggaaagcacctctaatgttgcctgctttgaacactttgccacctcccaaatccccagaagacatagacagtttaaattcagaaacttttaatgactggtctgatgataatatttttgatgatgagccaactatcaaaaaagtaatagaagaaaaacatcagttgaaagatttgccaggtacaaatttgtttattccaggatcagtagaatcacagagggttggtgatcattctacaggcactgttcctgaaaacgatctttacaaagcagttctattaggataccctgctgttgacaaaggaaaacaagaggacatgccatatattcctctcatggagttcagttgttcacattctcacttagtatgcttacccgcagagtggaggactagctgtatgcccagttccaaaatgaaggagatgagctcgttatttccagaagactggtaccaatttgttctaaggcagttggaatgttatcattcagaagagaaggcctcaaatgtactggaagaaattgccaaggacaaagttttaaaagacttttatgttcatacagtaatgacttgttattttagtttatttggaatagacaatatggctcctagtcctggtcatatattgagagtttacggtggtgttttgccttggtctgttgctttggactggctcacagaaaagccagaactgtttcaactagcactgaaagcattcaggtatactctgaaactaatgattgataaagcaagtttaggtccaatagaagactttagagaactgattaagtaccttgaagaatatgaacgtgactggtacattggtttggtatctgatgaaaagtggaaggaagcaattttacaagaaaagccatacttgttttctctggggtatgattctaatatgccaggaccagccttggagataagcagagtgaacagaaatttatggtctcagatttaagaaaaacaaaattctttcttgcttcttaaatcatactccatcccattggcttgcaaacatgctgacactcctcataatttcactcttcataaaccaaagcataaggtcagaggagaacttgacatattagaacacttaggcattgaaagtggttagtctaactaacccattgaagttttggagaacctgggactcaaattttggaagatgtgacagatgatatgttaacatacattgcaccgaggctgaagtgggaggattgcttgagactgcctggaaggcagaagttgcagtgagccgagactgatggtgtcactgcactccagcctgggcaacagagcaagaccctgtcttaaaaaaacaaaacaaacaaacaaaagaaacc

SEQ ID NO: 8429 - protein, 873 aa, Homo sapiens
MPALEHMNQILHILFVFLPFLWALGTLPPPDALLLWAMEQVLEFGLGGSSMSTHLRLLVMFIMSAGTAIASYFIPSTVGVVLFMTGFGFLLSLNLSDMGHKIGTKSKDLPSGPEKHFSWKECLFYIIILVLALLETSLLHHFAGFSQISKSNSQAIVGYGLMILLIILWILREIQSVYIIGIFRNPFYPKDVQTVTVFFEKQTRLMKIGIVRRILLTLVSPFAMIAFLSLDSSLQGLHSVSVCIGFTRAFRMVWQNTENALLETVIVSTVHLISSTDIWWNRSLDTGLRLLLVGIIRDRLIQFISKLQFAVTVLLTSWTEKKQRRKTTATLCILNIVFSPFVLVIIVFSTLLSSPLLPLFTLPVFLVGFPRPIQSWPGAAGTTACVCADTVYYYQMVPRLTAVLQTAMAAGSLGLLLPGSHYLGRFQDRLMWIMILECGYTYCSINIKGLELQETSCHTAEARRVDEVFEDAFEQEYTRVCSLNEHFGNVLTPCTVLPVKLYSDARNVLSGIIDSHENLKEFKGDLIKVLVWILVQYCSKRPGMKENVHNTENKGKAPLMLPALNTLPPPKSPEDIDSLNSETFNDWSDDNIFDDEPTIKKVIEEKHQLKDLPGTNLFIPGSVESQRVGDHSTGTVPENDLYKAVLLGYPAVDKGKQEDMPYIPLMEFSCSHSHLVCLPAEWRTSCMPSSKMKEMSSLFPEDWYQFVLRQLECYHSEEKASNVLEEIAKDKVLKDFYVHTVMTCYFSLFGIDNMAPSPGHILRVYGGVLPWSVALDWLTEKPELFQLALKAFRYTLKLMIDKASLGPIEDFRELIKYLEEYERDWYIGLVSDEKWKEAILQEKPYLFSLGYDSNMPGPALEISRVNRNLWSQI

SEQ ID NO: 8430 - DNA, 2265 bp, Homo sapiens
atgcactctaactgggtccctctgaggcttgtgaatggaaaaccctcttgctttcaaatgcttgaaaacaagaaagatgctactattgatgcctcaaatacatacacagggtttcctcatgttgcccaggctggtctcggacacttgaattcaagcaatctgccggccccgccgggtgtgccgcatgagggcgcgggccgcccaaggaccgcgagtggggccgcgagtgctgagcccggcgcgcccgagccgctcctcctcccggcctgctccctgggcggagccggggcagtgcggctctgggctggccgaaggggtggcgctgcgatcccgcagggcagcgacgcgactctggtgcgggccgtcttcttccccccgagctgggcgtgcgcggccgcaatgaactgggagctgctgctgtggctgctggtgctgtgcgcgctgctcctgctcttggtgcagctgctgcgcttcctgagggctgacggcgacctgacgctactatgggccgagtggcagggacgacgcccagaatgggagctgactgatatggtggtgtgggtgactggagcctcgagtggaattggtgaggagctggcttaccagttgtctaaactaggagtttctcttgtgctgtcagccagaagagtgcatgagctggaaagggtgaaaagaagatgcctagagaatggcaatttaaaagaaaaagatatacttgttttgccccttgacctgaccgacactggttcccatgaagcggctaccaaagctgttctccaggagtttggtagaatcgacattctggtcaacaatggtggaatgtcccagcgttctctgtgcatggataccagcttggatgtctacagaaagctaatagagcttaactacttagggacggtgtccttgacaaaatgtgttctgcctcacatgatcgagaggaagcaaggaaagattgttactgtgaatagcatcctgggtatcatatctgtacctctttccattggatactgtgctagcaagcatgctctccggggtttttttaatggccttcgaacagaacttgccacatacccaggtataatagtttctaacatttgcccaggacctgtgcaatcaaatattgtggagaattccctagctggagaagtcacaaagactataggcaataatggagaccagtcccacaagatgacaaccagtcgttgtgtgcggctgatgttaatcagcatggccaatgatttgaaagaagtttggatctcagaacaacctttcttgttagtaacatatttgtggcaatacatgccaacctgggcctggtggataaccaacaagatggggaagaaaaggattgagaactttaagagtggtgtggatgcagactcttcttattttaaaatctttaagacaaaacatgactgaaaagagcacctgtacttttcaagccactggagggagaaatggaaaacatgaaaacagcaatcttcttatgcttctgaataatcaaagactaatttgtgattttactttttaatagatatgactttgcttccaacatggaatgaaataaaaaataaataataaaagattgccatgaatcttgcaaaaaaggtattaactcatactatattcttggataaaataaccttttaaaatactttagcacatatgcttaaaatctaagttaacagatttgtcttagtccatttgtgctgctataacaaaataccacagatttggtaatttataaacaacagaaatctgtttttcctggctcttgaggctgggaattccaagaccaatgcaccagcagaattagtgtctggtgaaggctgatctctgcttccaagatggcacctcattgctgcatcctccacagtggaggaatgtatgtcctcacatggtggaagggacagaagggaaagaggagcaaaatgctttcaaaagagcatttaatctcattcattactcagtcacctcttaaaggccacatcctttaatactgttgctttggggattaagtttcgacatgaattttggaggggacaaaaacatccaaaccatagcaacataaatgtatagaatatttcacacaaagcagagtgctgggtaatgaccagatataaagaagtatttgaaatgaccttacctccaagatgcttatactcttagaaaagttgacaggtacagatggctgtaatttgaagcagcaggtaggattcattgcacctattattcattaaacacctgttgtatgtcttctactgt

SEQ ID NO: 8431 - protein, 472 aa, Homo sapiens
MHSNWVPLRLVNGKPSCFQMLENKKDATIDASNTYTGFPHVAQAGLGHLNSSNLPAPPGVPHEGAGRPRTASGAASAEPGAPEPLLLPACSLGGAGAVRLWAGRRGGAAIPQGSDATLVRAVFFPPSWACAAAMNWELLLWLLVLCALLLLLVQLLRFLRADGDLTLLWAEWQGRRPEWELTDMVVWVTGASSGIGEELAYQLSKLGVSLVLSARRVHELERVKRRCLENGNLKEKDILVLPLDLTDTGSHEAATKAVLQEFGRIDILVNNGGMSQRSLCMDTSLDVYRKLIELNYLGTVSLTKCVLPHMIERKQGKIVTVNSILGIISVPLSIGYCASKHALRGFFNGLRTELATYPGIIVSNICPGPVQSNIVENSLAGEVTKTIGNNGDQSHKMTTSRCVRLMLISMANDLKEVWISEQPFLLVTYLWQYMPTWAWWITNKMGKKRIENFKSGVDADSSYFKIFKTKHD

SEQ ID NO: 8432 - DNA, 2322 bp, Homo sapiens
gcaatccaagactgcttagggttcggaattacaaaaccaaattccctgctaaggctaaagttgatctgaacaaaagtaagggcaaggcaaagagaatagacattagacagggacctgaaaggatccagaaatgggactttacatcccacagaggaaacagacacagggtttcctcatgttgcccaggctggtctcggacacttgaattcaagcaatctgccggccccgccgggtgtgccgcatgagggcgcgggccgcccaaggaccgcgagtggggccgcgagtgctgagcccggcgcgcccgagccgctcctcctcccggcctgctccctgggcggagccggggcagtgcggctctgggctggccgaaggggtggcgctgcgatcccgcagggcagcgacgcgactctggtgcgggccgtcttcttccccccgagctgggcgtgcgcggccgcaatgaactgggagctgctgctgtggctgctggtgctgtgcgcgctgctcctgctcttggtgcagctgctgcgcttcctgagggctgacggcgacctgacgctactatgggccgagtggcagggacgacgcccagaatgggagctgactgatatggtggtgtgggtgactggagcctcgagtggaattggtgaggagctggcttaccagttgtctaaactaggagtttctcttgtgctgtcagccagaagagtgcatgagctggaaagggtgaaaagaagatgcctagagaatggcaatttaaaagaaaaagatatacttgttttgccccttgacctgaccgacactggttcccatgaagcggctaccaaagctgttctccaggagtttggtagaatcgacattctggtcaacaatggtggaatgtcccagcgttctctgtgcatggataccagcttggatgtctacagaaagctaatagagcttaactacttagggacggtgtccttgacaaaatgtgttctgcctcacatgatcgagaggaagcaaggaaagattgttactgtgaatagcatcctgggtatcatatctgtacctctttccattggatactgtgctagcaagcatgctctccggggtttttttaatggccttcgaacagaacttgccacatacccaggtataatagtttctaacatttgcccaggacctgtgcaatcaaatattgtggagaattccctagctggagaagtcacaaagactataggcaataatggagaccagtcccacaagatgacaaccagtcgttgtgtgcggctgatgttaatcagcatggccaatgatttgaaagaagtttggatctcagaacaacctttcttgttagtaacatatttgtggcaatacatgccaacctgggcctggtggataaccaacaagatggggaagaaaaggattgagaactttaagagtggtgtggatgcagactcttcttattttaaaatctttaagacaaaacatgactgaaaagagcacctgtacttttcaagccactggagggagaaatggaaaacatgaaaacagcaatcttcttatgcttctgaataatcaaagactaatttgtgattttactttttaatagatatgactttgcttccaacatggaatgaaataaaaaataaataataaaagattgccatgaatcttgcaaaaaaggtattaactcatactatattcttggataaaataaccttttaaaatactttagcacatatgcttaaaatctaagttaacagatttgtcttagtccatttgtgctgctataacaaaataccacagatttggtaatttataaacaacagaaatctgtttttcctggctcttgaggctgggaattccaagaccaatgcaccagcagaattagtgtctggtgaaggctgatctctgcttccaagatggcacctcattgctgcatcctccacagtggaggaatgtatgtcctcacatggtggaagggacagaagggaaagaggagcaaaatgctttcaaaagagcatttaatctcattcattactcagtcacctcttaaaggccacatcctttaatactgttgctttggggattaagtttcgacatgaattttggaggggacaaaaacatccaaaccatagcaacataaatgtatagaatatttcacacaaagcagagtgctgggtaatgaccagatataaagaagtatttgaaatgaccttacctccaagatgcttatactcttagaaaagttgacaggtacagatggctgtaatttgaagcagcaggtaggattcattgcacctattattcattaaacacctgttgtatgtcttctactgt

SEQ ID NO: 8433 - protein, 339 aa, Homo sapiens; identical to SEQ ID NO: 1224

SEQ ID NO: 8434 - DNA, 1901 bp, Homo sapiens
agcagacagcaatccaagactgcttagggttcggaattacaaaaccaaattccctgctaaggctaaagttgatctgaacaaaagtaagggcaaggcaaagagaatagacattagacagggacctgaaaggatccagaaatgggactttacatcccacagaggaaacagaatgggagctgactgatatggtggtgtgggtgactggagcctcgagtggaattggtgaggagctggcttaccagttgtctaaactaggagtttctcttgtgctgtcagccagaagagtgcatgagctggaaagggtgaaaagaagatgcctagagaatggcaatttaaaagaaaaagatatacttgttttgccccttgacctgaccgacactggttcccatgaagcggctaccaaagctgttctccaggagtttggtagaatcgacattctggtcaacaatggtggaatgtcccagcgttctctgtgcatggataccagcttggatgtctacagaaagctaatagagcttaactacttagggacggtgtccttgacaaaatgtgttctgcctcacatgatcgagaggaagcaaggaaagattgttactgtgaatagcatcctgggtatcatatctgtacctctttccattggatactgtgctagcaagcatgctctccggggtttttttaatggccttcgaacagaacttgccacatacccaggtataatagtttctaacatttgcccaggacctgtgcaatcaaatattgtggagaattccctagctggagaagtcacaaagactataggcaataatggagaccagtcccacaagatgacaaccagtcgttgtgtgcggctgatgttaatcagcatggccaatgatttgaaagaagtttggatctcagaacaacctttcttgttagtaacatatttgtggcaatacatgccaacctgggcctggtggataaccaacaagatggggaagaaaaggattgagaactttaagagtggtgtggatgcagactcttcttattttaaaatctttaagacaaaacatgactgaaaagagcacctgtacttttcaagccactggagggagaaatggaaaacatgaaaacagcaatcttcttatgcttctgaataatcaaagactaatttgtgattttactttttaatagatatgactttgcttccaacatggaatgaaataaaaaataaataataaaagattgccatgaatcttgcaaaaaaggtattaactcatactatattcttggataaaataaccttttaaaatactttagcacatatgcttaaaatctaagttaacagatttgtcttagtccatttgtgctgctataacaaaataccacagatttggtaatttataaacaacagaaatctgtttttcctggctcttgaggctgggaattccaagaccaatgcaccagcagaattagtgtctggtgaaggctgatctctgcttccaagatggcacctcattgctgcatcctccacagtggaggaatgtatgtcctcacatggtggaagggacagaagggaaagaggagcaaaatgctttcaaaagagcatttaatctcattcattactcagtcacctcttaaaggccacatcctttaatactgttgctttggggattaagtttcgacatgaattttggaggggacaaaaacatccaaaccatagcaacataaatgtatagaatatttcacacaaagcagagtgctgggtaatgaccagatataaagaagtatttgaaatgaccttacctccaagatgcttatactcttagaaaagttgacaggtacagatggctgtaatttgaagcagcaggtaggattcattgcacctattattcattaaacacctgttgtatgtcttctactgt

SEQ ID NO: 8435 - protein, 289 aa, Homo sapiens
MVVWVTGASSGIGEELAYQLSKLGVSLVLSARRVHELERVKRRCLENGNLKEKDILVLPLDLTDTGSHEAATKAVLQEFGRIDILVNNGGMSQRSLCMDTSLDVYRKLIELNYLGTVSLTKCVLPHMIERKQGKIVTVNSILGIISVPLSIGYCASKHALRGFFNGLRTELATYPGIIVSNICPGPVQSNIVENSLAGEVTKTIGNNGDQSHKMTTSRCVRLMLISMANDLKEVWISEQPFLLVTYLWQYMPTWAWWITNKMGKKRIENFKSGVDADSSYFKIFKTKHD

SEQ ID NO: 8436 - DNA, 1610 bp, Homo sapiens
atgcactctaactgggtccctctgaggcttgtgaatggaaaaccctcttgctttcaaatgcttgaaaacaagaaagatgctactattgatgcctcaaatacatacacagggtttcctcatgttgcccaggctggtctcggacacttgaattcaagcaatctgccggccccgccgggtgtgccgcatgagggcgcgggccgcccaaggaccgcgagtggggccgcgagtgctgagcccggcgcgcccgagccgctcctcctcccggcctgctccctgggcggagccggggcagtgcggctctgggctggccgaaggggtggcgctgcgatcccgcagggcagcgacgcgactctggtgcgggccgtcttcttccccccgagctgggcgtgcgcggccgcaatgaactgggagctgctgctgtggctgctggtgctgtgcgcgctgctcctgctcttggtgcagctgctgcgcttcctgagggctgacggcgacctgacgctactatgggccgagtggcagggacgacgcccagaatgggagctgactgatatggtggtgtgggtgactggagcctcgagtggaattggtgaggagctggcttaccagttgtctaaactaggagtttctcttgtgctgtcagccagaagagtgcatgagctggaaagggtgaaaagaagatgcctagagaatggcaatttaaaagaaaaagatatacttgttttgccccttgacctgaccgacactggttcccatgaagcggctaccaaagctgttctccaggagtttggtagaatcgacattctggtcaacaatggtggaatgtcccagcgttctctgtgcatggataccagcttggatgtctacagaaagctaatagagcttaactacttagggacggtgtccttgacaaaatgtgttctgcctcacatgatcgagaggaagcaaggaaagattgttactgtgaatagcatcctgggtatcatatctgtacctctttccattggatactgtgctagcaagcatgctctccggggtttttttaatggccttcgaacagaacttgccacatacccaggtataatagtttctaacatttgcccaggacctgtgcaatcaaatattgtggagaattccctagctggagaagtcacaaagactataggcaataatggagaccagtcccacaagatgacaaccagtcgttgtgtgcggctgatgttaatcagcatggccaatgatttgaaagaagtttggatctcagaacaacctttcttgttagtaacatatttgtggcaatacatgccaacctgggcctggtggataaccaacaagatggggaagaaaaggattgagaactttaagagtggtgtggatgcagactcttcttattttaaaatctttaagacaaaacatgactgaaaagagcacctgtacttttcaagccactggagggagaaatggaaaacatgaaaacagcaatcttcttatgcttctgaataatcaaagactaatttgtgattttactttttaatagatatgactttgcttccaacatggaatgaaataaaaaataaataataaaagattgccatgaatcttgcaaaaaaggt

SEQ ID NO: 8437 - protein, 472 aa, Homo sapiens; identical to SEQ ID NO: 8431

SEQ ID NO: 8438 - DNA, 1667 bp, Homo sapiens
gcaatccaagactgcttagggttcggaattacaaaaccaaattccctgctaaggctaaagttgatctgaacaaaagtaagggcaaggcaaagagaatagacattagacagggacctgaaaggatccagaaatgggactttacatcccacagaggaaacagacacagggtttcctcatgttgcccaggctggtctcggacacttgaattcaagcaatctgccggccccgccgggtgtgccgcatgagggcgcgggccgcccaaggaccgcgagtggggccgcgagtgctgagcccggcgcgcccgagccgctcctcctcccggcctgctccctgggcggagccggggcagtgcggctctgggctggccgaaggggtggcgctgcgatcccgcagggcagcgacgcgactctggtgcgggccgtcttcttccccccgagctgggcgtgcgcggccgcaatgaactgggagctgctgctgtggctgctggtgctgtgcgcgctgctcctgctcttggtgcagctgctgcgcttcctgagggctgacggcgacctgacgctactatgggccgagtggcagggacgacgcccagaatgggagctgactgatatggtggtgtgggtgactggagcctcgagtggaattggtgaggagctggcttaccagttgtctaaactaggagtttctcttgtgctgtcagccagaagagtgcatgagctggaaagggtgaaaagaagatgcctagagaatggcaatttaaaagaaaaagatatacttgttttgccccttgacctgaccgacactggttcccatgaagcggctaccaaagctgttctccaggagtttggtagaatcgacattctggtcaacaatggtggaatgtcccagcgttctctgtgcatggataccagcttggatgtctacagaaagctaatagagcttaactacttagggacggtgtccttgacaaaatgtgttctgcctcacatgatcgagaggaagcaaggaaagattgttactgtgaatagcatcctgggtatcatatctgtacctctttccattggatactgtgctagcaagcatgctctccggggtttttttaatggccttcgaacagaacttgccacatacccaggtataatagtttctaacatttgcccaggacctgtgcaatcaaatattgtggagaattccctagctggagaagtcacaaagactataggcaataatggagaccagtcccacaagatgacaaccagtcgttgtgtgcggctgatgttaatcagcatggccaatgatttgaaagaagtttggatctcagaacaacctttcttgttagtaacatatttgtggcaatacatgccaacctgggcctggtggataaccaacaagatggggaagaaaaggattgagaactttaagagtggtgtggatgcagactcttcttattttaaaatctttaagacaaaacatgactgaaaagagcacctgtacttttcaagccactggagggagaaatggaaaacatgaaaacagcaatcttcttatgcttctgaataatcaaagactaatttgtgattttactttttaatagatatgactttgcttccaacatggaatgaaataaaaaataaataataaaagattgccatgaatcttgcaaaaaaggt

SEQ ID NO: 8439 - protein, 339 aa, Homo sapiens; identical to SEQ ID NO: 1224

SEQ ID NO: 8440 - DNA, 1246 bp, Homo sapiens
agcagacagcaatccaagactgcttagggttcggaattacaaaaccaaattccctgctaaggctaaagttgatctgaacaaaagtaagggcaaggcaaagagaatagacattagacagggacctgaaaggatccagaaatgggactttacatcccacagaggaaacagaatgggagctgactgatatggtggtgtgggtgactggagcctcgagtggaattggtgaggagctggcttaccagttgtctaaactaggagtttctcttgtgctgtcagccagaagagtgcatgagctggaaagggtgaaaagaagatgcctagagaatggcaatttaaaagaaaaagatatacttgttttgccccttgacctgaccgacactggttcccatgaagcggctaccaaagctgttctccaggagtttggtagaatcgacattctggtcaacaatggtggaatgtcccagcgttctctgtgcatggataccagcttggatgtctacagaaagctaatagagcttaactacttagggacggtgtccttgacaaaatgtgttctgcctcacatgatcgagaggaagcaaggaaagattgttactgtgaatagcatcctgggtatcatatctgtacctctttccattggatactgtgctagcaagcatgctctccggggtttttttaatggccttcgaacagaacttgccacatacccaggtataatagtttctaacatttgcccaggacctgtgcaatcaaatattgtggagaattccctagctggagaagtcacaaagactataggcaataatggagaccagtcccacaagatgacaaccagtcgttgtgtgcggctgatgttaatcagcatggccaatgatttgaaagaagtttggatctcagaacaacctttcttgttagtaacatatttgtggcaatacatgccaacctgggcctggtggataaccaacaagatggggaagaaaaggattgagaactttaagagtggtgtggatgcagactcttcttattttaaaatctttaagacaaaacatgactgaaaagagcacctgtacttttcaagccactggagggagaaatggaaaacatgaaaacagcaatcttcttatgcttctgaataatcaaagactaatttgtgattttactttttaatagatatgactttgcttccaacatggaatgaaataaaaaataaataataaaagattgccatgaatcttgcaaaaaaggt

SEQ ID NO: 8441 - protein, 289 aa, Homo sapiens; identical to SEQ ID NO: 8435

SEQ ID NO: 8442 - DNA, 541 bp, Homo sapiens
ggtgactacagttaataatactgtatagcatatttgaaatttgctaagaagattttaagtgttctcaccacacacaaaaaaagccaggaccagccttggagataagcagagtgaacagaaatttatggtctcagatttaagaaaaacaaaattctttcttgcttcttaaatcatactccatcccattggcttgcaaacatgctgacactcctcataatttcactcttcataaaccaaagcataaggtcagaggagaacttgacatattagaacacttaggcattgaaagtggttagtctaactaacccattgaagttttggagaacctgggactcaaattttggaagatgtgacagatgatatgttaacatacattgcaccgaggctgaagtgggaggattgcttgagactgcctggaaggcagaagttgcagtgagccgagactgatggtgtcactgcactccagcctgggcaacagagcaagaccctgtcttaaaaaaacaaaacaaacaaacaaaagaaaccaaaaaaaaaaaaaaaa

SEQ ID NO: 8443 - protein, 30 aa, Homo sapiens
MVSLHSSLGNRARPCLKKTKQTNKRNQKKK

SEQ ID NO: 8444 - DNA, 2855 bp, Homo sapiens
agaggggagcagccagcagtcttatgctaccactgtggctcatcctgcgacctgagagaaacctgggcaactgtgagcaccagaggccaagtcctggacagtctttaggccatgttggaactacatttggaaaggtggttgttaaacatttcccagcacacacctggatctgcatctgctgtgtcaattgaaccactcactggttctgtgacctcaggcaagtcatttaaattataagccttggttttatcctccacagaatacttcctcctaaaatgtgttgtgaaaattagaatagatgaaggcacccttgaaaagatgactgatgcggttggttgccccaccacttcctactacttggcagagcctcctcgttggcagatccttctctcactagagcatgtatatggatgcatgctctctcaccctcccttgtagcttagagcagagcataccaatctatgtgccagcataccctggtatgtctcagatgggtcatagatgtgataaggtatggatcccttaagcccttgggacattcaagtgaggctgagctgctgaagccctgggatggtatgactggccacaagcaacattacccaggtacccctctgtgtcacaaaaacgttatctttgtatttgtgtcatggtgtgaaaaaattgagaagcactgcctggggacatagtgaggtagcccaattctggataaaggaaattgagaagtcttgagggggtagagaggttttcttccctaataagaagaatcacaggagagaaaatgccttcctcagccatatgttgttatttctatatgtgagcctggaatttcaaggttatcttgcaaagaaccaaggcaatgtagagaaaagaattgatagcaagtggctggatctttcacattgtaaagccattgagccatccgtgcaattgcccaccttgggaatttatttttaagagtgataataaatgctcctcattgtttaaactactttgatttttgtatttggttattcataattaaaaacacccaaatacagtagaagaactggtacatccctgacacctaatgagtgctcaatatggttagttaatcaccaaattagatcctttgcctttagaaaagctgccatggtcaaatgtgtgttgatcttatttttcgtaaatatttaagaaatttgttcagtaactagcttaacttttaatatttatcttgagtctcttctaaatatgtttttactgtataataaaagcaataattgaaaaatgacatcattttaagcttgagagcaactagatacaaagatgttgatatgcattttctcttcttgaaggatctagacaaactggagcaccattacatgaaaaaggttaaagaatcaatgttttgcaaaatagaactggaattaattcatgggaattacagagaagatcatattagttcaatataaaaagagggcctagaatgtgccaagctccatacaatgcccctcatgagtgttatttaattctcacaacaactttgcaaaaaagaaactatttttttttccattttacaaaggaggaagctaaggctgtgaaaaagagctcttttgcaagcctaggacctgattccaaaattcccactctttctgttgcaaattctggctaagctttccagagatgacttgctttccccttgaggccctttcagtgcattgtgccatggaaaacaaaaagcccaacaatgacatctttaccaaagatgccttggggagatgggagaagagttacaatgcacattacacagcaaaatcttttttaagctccaagtaaaattggttttttcttagagttttgcttccagcagtcacttcctccattctcctgctctctccacgtgaggaaaacttctatcctgccttctcctaatacactttcctgttttttttttcctgcacatttcttaaaaatcccacataaggcaaaagccaagacaatatccatcaacacctccacccccaccgcatgtccatggagagcttcaagtcatcctgccgctggtacaaacacggcagaggcctctttgtaaagaagtggtaggtagaattcaggttagcaccagaatctgaaaactccagctcctttgactgggaccaggctggtaatataaatgttagatcaggctgggtctgacacaatggggatcagtagagcatacttgtcacatttgaaggcattcagaaaaataataaccttaaaacattctaaacatgttgcaatcaaagaggataccccttgaccactgcacgaattggagttcaaagatcatctctcttttgcctaggctgtagactagttatttaacctctctcagacttggtttcctcttctggaacagggtatatcaactaccttgcagaaataaatgacatcctgtacacaatgcacctaccacgttgcctgacccaataatgtgtacatacataagaaaatgttcatgccctttgctcactttaaaatttttttttcttgtatatttgtttaagttcttcgtagactctggaatggagctggaagctgtcatcctcagcacactaacgcaggaacagaaaaccaagcactgcatgttcccacttataagtgagagctgaacgagcagaacacatggacatatgaaggggaacaacacactctggggcctgtgaggtgcagggagagcatcaagaagaacagctaatgggtgctgggcttaatacctgggtgatgggttgatctgtgcggcaaaccaccatggcacacatttacctatgtaacaaaccttgacatcctgcacatgtaccccggaacttaaaaataaaagttgacaaaaagaaaac

SEQ ID NO: 8445 - protein, 55 aa, Homo sapiens
MLPLWLILRPERNLGNCEHQRPSPGQSLGHVGTTFGKVVVKHFPAHTWICICCVN

SEQ ID NO: 8446 - DNA, 553 bp, Homo sapiens
acctgcctgcagatacaaaccccactccctgcgaagatggtgtacacgcagccccgagcacagacccgaagctgtccacccttcttgggcgccgtcgcggtctggccgctgcccttcgaacccatgccatgttggaactacatttggaaaggtggttgttaaacatttcccagcacacacctggatctgcatctgctgtgtcaattgaaccactcactggttctgtgacctcagttcttcgtagactctggaatggagctggaagctgtcatcctcagcacactaacgcaggaacagaaaaccaagcactgcatgttcccacttataagtgagagctgaacgagcagaacacatggacatatgaaggggaacaacacactctggggcctgtgaggtgcagggagagcatcaagaagaacagctaatgggtgctgggcttaatacctgggtgatgggttgatctgtgcggcaaaccaccatggcacacatttacctatgtaacaaaccttgacatcctgcacatgtaccccggaacttaaaaataaaagttgac

SEQ ID NO: 8447 - protein, 67 aa, Homo sapiens
MLELHLERWLLNISQHTPGSASAVSIEPLTGSVTSVLRRLWNGAGSCHPQHTNAGTENQALHVPTYK

SEQ ID NO: 8448 - DNA, 2359 bp, Homo sapiens
aagcagctaagtttctcataatgtattatgatgtaggggagggaggaaggagggccagggtagggggcacaccctctccctgaatgaaattcatttaggggcactgtctgctcgcatgttctgttctgggagaaaatgggtagcagaagctacaatttgtactaagctaatgaaaagagagaaaagaagaatggggaagagaagggcaaagaaggcaaaaagagaagagaagaaaaagggaggagagagaaggagaaatgagaaaagaggaaaccaaatgaagaggatgtgtgagagaaaaaaatatgaaacagacctagaggatcaagacataatgggagcatttttagacaagccaaagatggaaaagcataatgcccaggggcagggtaatgggttgcgatatgggctaagcagcatgcaaggctggcgtgttgaaatggaggatgcacatacggctgtgatcggtttgccaagtggacttgaatcgtggtcattctttgctgtgtatgatgggcatgctggttctcaggttgccaaatactgctgtgagcatttgttagatcacatcaccaataaccaggattttaaagggtctgcaggagcaccttctgtggaaaatgtaaagaatggaatcagaacaggttttctggagattgatgaacacatgagagttatgtcagagaagaaacatggtgcagatagaagtgggtcaacagctgtaggtgtcttaatttctccccaacatacttatttcattaactgtggagactcaagaggtttactttgtaggaacaggaaagttcatttcttcacacaagatcacaaaccaagtaatccgctggagaaagaacgaattcagaatgcaggtggctctgtaatgattcagcgtgtgaatggctctctggctgtatcgagggcccttggggattttgattacaaatgtgtccatggaaaaggtcctactgagcagcttgtctcaccagagcctgaagtccatgatattgaaagatctgaagaagatgatcagttcattatccttgcatgtgatggtatctgggatgttatgggaaatgaagagctctgtgattttgtaagatccagacttgaagtcactgatgaccttgagaaagtttgcaatgaagtagtcgacacctgtttgtataagggaagtcgagacaacatgagtgtgattttgatctgttttccaaatgcacccaaagtatcgccagaagcagtgaagaaggaggcagagttggacaagtacctggaatgcagagtagaagaaatcataaagaagcagggggaaggcgtccccgacttagtccatgtgatgcgcacattagcgagtgagaacatccccagcctcccaccagggggtgaattggcaagcaagaggaatgttattgaagccgtttacaatagactgaatccttacaaaaatgacgacactgactctacatcaacagatgatatgtggtaaaactgctcatctagccatggagtttaccttcacctccaaaggagagtacagctcaactttgttgaaacttttaacatccatcctcaactttaaggaaggggatatgacatgggtgagaatgattacatcagagaacttcagcagtacaacagctagcccagaactgatttttttttttttttttgtaaatttgagacttatgtaagcgtgatttcaaaccataattcgtgttgtaaatcagactccagcaatttttgttgtatgattttgtttttttgtaaagtgtaattgtccttgtacaaaatgctcatatttaattatgaactgctttaaatcactatcaaagttacaagaaatgtttggcttattgtgtgatgcaacagatatatagccctttcaagtcatgttgtgtttggacttggggttggaacagggagagcagcagccatgtcagctacacgctcaaatgtgcagatgattatggaaaataacctcaaaatcttacaaagctgaacatccaaggagttattgaaaactatcttaaatgttcttggtaggggagttggcattgttgataaagccagtcccttcatttaactgtctttcaggatgttccttcgttgtttccatgagtattgcaggtaataatacagtgtattcataagaatctcaatcttggggctaaatgccttgtttctttgcacctcttttcaagtccttacatttaattactaattgataagcagcagcttcctacatatagtaggaaactgccacatttttgctatcatgattggctgggcctgctgctgttcctagtaagatattctgaattccattttatcaataaagcttgatttaacaaacaagaaactt

SEQ ID NO: 8449 - protein, 455 aa, Homo sapiens
MFCSGRKWVAEATICTKLMKREKRRMGKRRAKKAKREEKKKGGERRRNEKRGNQMKRMCERKKYETDLEDQDIMGAFLDKPKMEKHNAQGQGNGLRYGLSSMQGWRVEMEDAHTAVIGLPSGLESWSFFAVYDGHAGSQVAKYCCEHLLDHITNNQDFKGSAGAPSVENVKNGIRTGFLEIDEHMRVMSEKKHGADRSGSTAVGVLISPQHTYFINCGDSRGLLCRNRKVHFFTQDHKPSNPLEKERIQNAGGSVMIQRVNGSLAVSRALGDFDYKCVHGKGPTEQLVSPEPEVHDIERSEEDDQFIILACDGIWDVMGNEELCDFVRSRLEVTDDLEKVCNEVVDTCLYKGSRDNMSVILICFPNAPKVSPEAVKKEAELDKYLECRVEEIIKKQGEGVPDLVHVMRTLASENIPSLPPGGELASKRNVIEAVYNRLNPYKNDDTDSTSTDDMW

SEQ ID NO: 8450 - DNA, 8090 bp, Homo sapiens
aagcagctaagtttctcataatgtattatgatgtaggggagggaggaaggagggccagggtagggggcacaccctctccctgaatgaaattcatttaggggcactgtctgctcgcatgttctgttctgggagaaaatgggtagcagaagctacaatttgtactaagctaatgaaaagagagaaaagaagaatggggaagagaagggcaaagaaggcaaaaagagaagagaagaaaaagggaggagagagaaggagaaatgagaaaagaggaaaccaaatgaagaggatgtgtgagagaaaaaaatatgaaacagacctagaggatcaagacataatgggagcatttttagacaagccaaagatggaaaagcataatgcccaggggcagggtaatgggttgcgatatgggctaagcagcatgcaaggctggcgtgttgaaatggaggatgcacatacggctgtgatcggtttgccaagtggacttgaatcgtggtcattctttgctgtgtatgatgggcatgctggttctcaggttgccaaatactgctgtgagcatttgttagatcacatcaccaataaccaggattttaaagggtctgcaggagcaccttctgtggaaaatgtaaagaatggaatcagaacaggttttctggagattgatgaacacatgagagttatgtcagagaagaaacatggtgcagatagaagtgggtcaacagctgtaggtgtcttaatttctccccaacatacttatttcattaactgtggagactcaagaggtttactttgtaggaacaggaaagttcatttcttcacacaagatcacaaaccaagtaatccgctggagaaagaacgaattcagaatgcaggtggctctgtaatgattcagcgtgtgaatggctctctggctgtatcgagggcccttggggattttgattacaaatgtgtccatggaaaaggtcctactgagcagcttgtctcaccagagcctgaagtccatgatattgaaagatctgaagaagatgatcagttcattatccttgcatgtgatggtatctgggatgttatgggaaatgaagagctctgtgattttgtaagatccagacttgaagtcactgatgaccttgagaaagtttgcaatgaagtagtcgacacctgtttgtataagggaagtcgagacaacatgagtgtgattttgatctgttttccaaatgcacccaaagtatcgccagaagcagtgaagaaggaggcagagttggacaagtacctggaatgcagagtagaagaaatcataaagaagcagggggaaggcgtccccgacttagtccatgtgatgcgcacattagcgagtgagaacatccccagcctcccaccagggggtgaattggcaagcaagaggaatgttattgaagccgtttacaatagactgaatccttacaaaaatgacgacactgactctacatcaacagatgatatgtggtaaaactgctcatctagccatggagtttaccttcacctccaaaggagagtacagctcaactttgttgaaacttttaacatccatcctcaactttaaggaaggggatatgacatgggtgagaatgattacatcagagaacttcagcagtacaacagctagcccagaactgatttttttttttttttttgtaaatttgagacttatgtaagcgtgatttcaaaccataattcgtgttgtaaatcagactccagcaatttttgttgtatgattttgtttttttgtaaagtgtaattgtccttgtacaaaatgctcatatttaattatgaactgctttaaatcactatcaaagttacaagaaatgtttggcttattgtgtgatgcaacagatatatagccctttcaagtcatgttgtgtttggacttggggttggaacagggagagcagcagccatgtcagctacacgctcaaatgtgcagatgattatggaaaataacctcaaaatcttacaaagctgaacatccaaggagttattgaaaactatcttaaatgttcttggtaggggagttggcattgttgataaagccagtcccttcatttaactgtctttcaggatgttccttcgttgtttccatgagtattgcaggtaataatacagtgtattcataagaatctcaatcttggggctaaatgccttgtttctttgcacctcttttcaagtccttacatttaattactaattgataagcagcagcttcctacatatagtaggaaactgccacatttttgctatcatgattggctgggcctgctgctgttcctagtaagatattctgaattccattttatcaataaagcttgatttaacaaacaagaaacttaatcatgtatgtgtaattcctcttttaccctggccttttaaaacactgtgccgttgtaatgagacgtttctcatagggaaagatgttagtctcttttaattggacaacactgtcactcaaggcatagatgaaactttccttccattagaaagactaaaagatttaattcttggttgtaccttaatctattttttaaataggtttctttcaggctgcttatttttcattaagatgtgtatcagcttggatttgcctactgtttaattaaaatatttattgtcaaagtttgacaatctaacactctatggtaggggtgtgtgtgtgtgtgtttgtgagtgtgtgtttgcctgtgatttttaattggcccatgtctttagaatccaagtggttaagatgtatttgtgatttgaaatatagcatgttgataatatttagctgttggcctttacaaataactttcaaagcttaaggaattgtagatataaaaataacctaatttaatttaggcttaaattcctctgattaagcatgtgaaagtaagttttaaaatctgtcgcattgaaaagattactgttccgtgcccttctgtatttttgtctctttaggttgaatattgtatttatcaccatgtaatcattcagtaggcagattcccactagaaaactgttgaaatgtaagactaaaatacaacattgaatacaaaatcaaaattttgtgtataaaaaccagtatagtccattttgttatatttgttttttccctaacttggaaatatacatatttgtatatatagccttaaaattaatgtaaagttaggggagtagtggggaaagtaatgtgaaatgtctcagatttaagtagttaaataccagcaaaatcttttcattatccctcttattttgtgaggtgattaaatgtaacttaattgtatttaatttatatcttattccagcatgaatgaggaaaaactgaagtactatttatatttagaaattcatatcagttgaaattacagaaccaattccatacttacaataaatacttaatgtctaaatctgtggtagagtgcgaagtatgataatgttctaagttatggctttgcaagcatctaaatgtgcatttaatgaataccagtgcttctagtatagactaattaccagacatactggtactgaaagctaaatccctattataacaaaccagttccttaatattttaagtagactgacaactttagttccagaaattgcaaaactttgaactggactgtgtaatcttttgagatgcaaaacttaagtcacaagtagagtatgtgatggaaagctgtatttcaaaccataacagcatatttagagccttttttttttgagtctttaaacaagagaaaattaaaatattcctgtcaaaattattagtattgaaattaggcttggacacgagagagaaccgtatttgagtgatgtgagaagactaaatcttttccacatgagtcagcactgccatactaataatttttttactataaaaatacaggaaggaagtatacattataacagcagactgtgtgtgttcctgattcctggaggtaatagtggggggaaaccaaccatactttttaaaggcacttttgcacctctattgtgcacttcattcttgtaccacttaaattcttcacccccatcccctttttttgtgctaattagcatctcagggcaatgcctcaaaaatgtttgatgtgttctgttctttggagggaaaaagttcttatgtgatgataatatagtactcaaaatatacttttatcatttaaatgtcttatttgctgctatgaataggaaataacattttgtatagcaggctctgttttaccctaacattaaaaaatttcactgatctttctttcattaacagggtagaatctcctaatttccactttcttgggaatatacttttatagacaatagaagcagttctcaatattagcatatactttaaaaaatcaaagtgataacttaattcagctttggaagtatctcaaacatatttttactttatagtgcattaacttgcttctagagtacttaatgcaactgctctagccacttaattttttatactaatctcaacattaagaaatttggattaagtaataaattagttatgtaattcaagtaatctgaattacagcagtacttttagtgatcattcataggactatatattaacccagctaataactcagtttttttacaaaatgtttcgagtattattggtaaaacactgttctaggctaagcacattgggactgtaaagaaatgagtagatccttggcttcaagtttacatctggacaatttataatctagtgtatgttagtattataactggatcactcatcaaaaaatatatatatatatctattgcccacctgctatctaccaggtacttagctgatcaaggcaggcccctgccctaaagaccttgtttatacttcctttactcacctgaaaactgttctccagtttattttcttctctctaaagttaaagagtaattcagaagaaaattttgcttagcataagaataaaattggactgaagaggcttaagcccattcagtatccttgattgcatttatccaacggcctttattcttcctgctgacagcagtaactcagaggaataggtagtagatttctgaaaattatccagccatggaaatgtaggtggggtttgagtttaaggcatttaaaaatgtaaatatctctagctaaatttatcttaagtagaactctgtgtttttgtaacacactgccagtgttaatatcaaattttagccaaattattactatgtgttttaatattttaaaataatttcactgcccatctttactggacaaactcatttggagttcaacttgtgatttctgaaagaactgatgaaattgggtactgctttttttctccatttttcgttttgttttaattttgaatttcatggtatatacttttagttcaaactcagctgtttgtacagtattgtattaggatttggtattagaaaagatgtgtaaatatcttagtatataattgtttctcatttgaggtttttcttctaagggaccttaaagagttttatatacttttgctcacagaaactgctggtgagattaccattttttgagtatctagtcttctagtttttcttttaggcattaggaagccttctttagagttcaaaattttagaagcctaatttgctcttacttccttcaattatgtgccatgtgttttggtttgtatatgttttaaattgtatatttccttggaatatgcttgaaatatttaagaatacattttcaaaatgtataatactgtattgttttgttgatcagaataataagtctcagttaaatgtttgttattactgatagtcaaaatgctcaatagaaatgatgagaggcattggttccaattcattgtcaaatgaacgttttctaattttgttcacagattctttccctttcgattgttctgtatgttaagatagtggcttctgctctcactgttttcctatttatattactagcaggtaggagtgctaattagaaaaacttagatggtattgaaattacagttgacaacttatatttttatgagatggagaaaaaagattaagttgatataacaacaaagtggactttttttcttccttatcctgcacgaaatattgcccttgtttcctctactttcctcttggtgttttctctttttttcaaacagaaacaggccaattccattttcttgagcaagaaagcttagtgtgttacttcatcaaggccagctaatactgtgttaaaccgggctgaaaatgagaaaacttgggagatggaggaatggggaaatggcagtgggataggtagggaaggattactcttaattgttttaaaagccataggaaagtcttccttgtacgtggctgtaaatttataagaactattgtgtcacataaaccaacaagaatgaacctttgctgcttcagataatttgatttttccagcaaggaaattaataagttactgattcttcagcatagaaacaactgagaagaattaatgcaatgtttcttcactagaaaacccaacccttcatttcttttcattgctccaaaacccagttttcaactaatggttttctcattaaactaaatgtttagaaaagttgtttagagtttttctttttcttttacatagtcctcctgatccagtataagactatttagtaacgtgcatttgtatggtactatctaaagtaagttagattgatgtaagagatcgggtagctgcggaacaaaattagttatatcctaattaggtacagtgaatgacacaaaatcattttagcaatgcttcttaaccttttggggtcacaggcgttttgagactgatgaatcctagggacttatttacccaggaaaatgcgtatataacatacatatctccctaaagtttacaatattgtagtggttcatgggccccctggttaagagcccattctaaagtacaatagggcatcatcccttttcctgcaaagcccaaaagtatatttctagggcatgaaaataacttgagtctattttaaggaattgtttcactctagaggtagataggggacctggctagaatctgacattaaaatatactttttaaaaaatattatatttggggtggggaaagtgattaaaaggtgaaaaaaaaacatagtattcagaagttttggaggttaatgtctttctctaagatttgccactttagaaattcaacagaaaagaggtaaaacagaaatggaatgtatctggaacatttttggcctccatagtgcagatatactatattaacaagtaatacatttatttacctgtcagatctccaggttttaagattttgagctttctagtattaggattcattaaatgttcaattcatttcatattctaaggaattaggttatttacttactaattcaggatgttaaaataacatccaagtcggacaaccaccaccaatgcacacagttaatgagatttctaaaatataataagtacaatgtaacaaacgtatagaattttgcatttgttgccaaaattagatgtttaatgacagcttatttaattcccatttgtgggacttctggaacatagaaaccattatcttacctggttatcccttgactaaatagcatatctgcaggaaaatatcttgtttgtagtgatatgccccaatagtgattgatttcactcttgaaatgagttatatcacttaatttgtataaatgttatgagtggagagacatgtacatgttaaaagcatgttgcattatatattcattttttaaactctataaatgttaagaataatataattgcagaaatatttttcttaaatacaatgtgtaacaaaattctccgtagcaactcacccactttgcagtttatgtgatccacacttttaaagaaattccataaatgtatattttgtattatgtattatttcctggtccaaagaaaatatgtgaattcagttctaactttaagaatgtactgtttgttttcaagttcattgaaaaattgcattcagcctgcgaatggttgcagattgtatgttagatgaaaagtagaaataatttctagtttggaaaactggtgccactaaataaacaggcaattacataatg

SEQ ID NO: 8451 - protein, 455 aa, Homo sapiens; identical to SEQ ID NO: 8449

SEQ ID NO: 8452 - DNA, 4321 bp, Homo sapiens
ggcgctagggacgggagcgcgcgcgggagctagagagcagtggtctcggcgctcgtccggcccgcagcttcgggtcctcaggcggctgttgctccggaacgggtggttggggaggggggggtggggggactctagacagctgaggcgcgaaagcgatgagtcctcggctcttcctcctccttctccgggacccgctctctgcctccctctccaacgcccggatgatctgagccgcgagggcgccgacagccgggggcccggacgcagcccggctcctcccctcctccgccccttccccagcctgacctggcccgccgctgcagcggtgacccctcccccggctgccgccgtcgccgccgcggtgaccccctccccggctgccgccgccgccgcctcggccgaccagggacctgcccgcctgcggctgctccggattttaaataaacttggagccttttcttgaaagacagctggctgtggagagccttctaccaactgcagttttagatacgttttgaaaatttcatcacctgagacctagaggatcaagacataatgggagcatttttagacaagccaaagatggaaaagcataatgcccaggggcagggtaatgggttgcgatatgggctaagcagcatgcaaggctggcgtgttgaaatggaggatgcacatacggctgtgatcggtttgccaagtggacttgaatcgtggtcattctttgctgtgtatgatgggcatgctggttctcaggttgccaaatactgctgtgagcatttgttagatcacatcaccaataaccaggattttaaagggtctgcaggagcaccttctgtggaaaatgtaaagaatggaatcagaacaggttttctggagattgatgaacacatgagagttatgtcagagaagaaacatggtgcagatagaagtgggtcaacagctgtaggtgtcttaatttctccccaacatacttatttcattaactgtggagactcaagaggtttactttgtaggaacaggaaagttcatttcttcacacaagatcacaaaccaagtaatccgctggagaaagaacgaattcagaatgcaggtggctctgtaatgattcagcgtgtgaatggctctctggctgtatcgagggcccttggggattttgattacaaatgtgtccatggaaaaggtcctactgagcagcttgtctcaccagagcctgaagtccatgatattgaaagatctgaagaagatgatcagttcattatccttgcatgtgatggtatctgggatgttatgggaaatgaagagctctgtgattttgtaagatccagacttgaagtcactgatgaccttgagaaagtttgcaatgaagtagtcgacacctgtttgtataagggaagtcgagacaacatgagtgtgattttgatctgttttccaaatgcacccaaagtatcgccagaagcagtgaagaaggaggcagagttggacaagtacctggaatgcagagtagaaggtggatcatttaacaaaaaataagtagctttattaaagaaaaatcttcaacacaatcaaactttaacattttagcttttagatttttatgtgtctttgacagctagtgtctagtgtatgaaagtggaaaaggacatttctgtagtagctgttaagatgtatgcagttgtcctatcacagttatattagaaataacaactagtgtggaaagtaacccacattctgttcaggatacttttgttttaaaaggctaaaatgtttgtgtgctttaaaattcttaatgaattcactggcatgagtaattttatgccgggaaaatctgatttgtggtctatttaattacaaagagattgtgatggtgataatttgaataccatctttctatgaaaagctgtgtatattaattttaatctctagggccttttttcaataacttgaaaatcacagcctcatcattagcaactttatatacacagctttaaaaaatttgctttaaactgtttcagagcttcttccctaagccataaactgtctcacctaaacaagatagacctcaataaaagacataatatttctccacctggcagaaaagtaactgccaagtaagattaagaaataagttgagcatttctggagtatatttctcataattctgcagagacttccagtttattgcatatatgcagtaaagtgtatatattatgcagtttctctaagtggaaaaacttgacatgactttaatagtgttaaaacatgaaaatgctggtgagctgaggtagaaaaaaaacaagaaaaaaattttaaaaatagcgttaaaatgcattttaggctcctaatgtcgttaatttgcacgttaaagacctctaatcgcatgcaagcattgacctaccacacctacatcccactgtgcctgcattattgaaattactactcactttaattttttttcccctttttactgtttgataccaatcataatcagtctgatactagaatcatgattggttttgttctttagtactgtctagagctactattttgtttttattgctgtccgccacttgatagtcatacatctagtatgtgtttgtactatttagtattgcattcattggacgtactattcaacgaatttgtctccttactgttaccaagggtcttggaatttttatattttaaattaatcattcaatataagttatttataggtatagtacaattttaaaatatttagaatgctacaatcattggttcaaactattgattcatgggaaaatttaaattcataagaataatatgtatagggataagttgatatttaatgtattggcactttaacttgggcagacatgttttcttattggtttaaagaagtaataagtattttaatatttttactatgaaatgggatccaattttagaaatgaattgctacttttctctttagtgtgtacactttaagttttagatggaattatgaaatattcactttacgttattttgttacaataataagttttatatttcttattatcaagcaagagttgccacctggacagagtttacattgatactcaatatttttgatatgttaaagtgttattatacttgtaccattcaattggagattgtcataaattaaatatggtattttttactcagatttgatgagactgcaactagagaataaatattacattaaaattgctgctattttaaaacatagaatgtaactgtttgtattgtaaaagttgtgtgtcctcagtgaaaaatactgccttcagcttccaaagcaggcacctgaatgcctttttcttttctctctctcttctttctttaaatacatgccttcactagattgctgtgacctactaaacctcattttatttgcttggaacatttttggcttctctgtccacaccatagaaaaggacaaaggccttccagctctccttttctcttatttgttcccttctaaatacttgactctctgggggtgtgaaaagattcagctcataatttatactactattaattttgtggtccttctaagccaatttaaaattatacttttgtgtatatattttcaaaatctttgctactgactaccttagctttaaagttgctaatttggagatgactgatagaatccctgaaacttggtggaggggagtggaaaggagcagaatgtgtttgtgtatatgtatgtgaaacatggatcttctatatataaatattctttagaaaaagcgttcagtctttttacaattctaagtaaaacgtataggtcaacagaaattaaaggaatatttcttaaaattcatttatttttcttttttgaaagcagacagaagcaaggctagtatagtatgaatggtcaggtagtttaaatgcgttgtcccacgtggaacaggagatattaactgtttttaaagctttacattatttttttacaagaatttgttttcctgtaattttcttcacagttaaaatatcctaatttatattttaacaaaagagatgtaagatacatcaaatatagatgattcaaggtaatgttttttagacctgaaactattgattcaatttatcatcagtgtttatttctattgtatctagttatctatccaaataattgtattggcttagcggagactgtatgttaagtgtattagttttagattgtgaaattgtgcagtttaggtaaacatcaaatccctttatttttgtacagcagatttccagcattagaaccatgtagaacaaatatactagatgttaaagattacacaataaaggaacttggcaaaccaaa

SEQ ID NO: 8453 - protein, 324 aa, Homo sapiens; identical to SEQ ID NO: 1228

SEQ ID NO: 8454 - DNA, 2478 bp, Homo sapiens
ggcgctagggacgggagcgcgcgcgggagctagagagcagtggtctcggcgctcgtccggcccgcagcttcgggtcctcaggcggctgttgctccggaacgggtggttggggaggggggggtggggggactctagacagctgaggcgcgaaagcgatgagtcctcggctcttcctcctccttctccgggacccgctctctgcctccctctccaacgcccggatgatctgagccgcgagggcgccgacagccgggggcccggacgcagcccggctcctcccctcctccgccccttccccagcctgacctggcccgccgctgcagcggtgacccctcccccggctgccgccgtcgccgccgcggtgaccccctccccggctgccgccgccgccgcctcggccgaccagggacctgcccgcctgcggctgctccggacctagaggatcaagacataatgggagcatttttagacaagccaaagatggaaaagcataatgcccaggggcagggtaatgggttgcgatatgggctaagcagcatgcaaggctggcgtgttgaaatggaggatgcacatacggctgtgatcggtttgccaagtggacttgaatcgtggtcattctttgctgtgtatgatgggcatgctggttctcaggttgccaaatactgctgtgagcatttgttagatcacatcaccaataaccaggattttaaagggtctgcaggagcaccttctgtggaaaatgtaaagaatggaatcagaacaggttttctggagattgatgaacacatgagagttatgtcagagaagaaacatggtgcagatagaagtgggtcaacagctgtaggtgtcttaatttctccccaacatacttatttcattaactgtggagactcaagaggtttactttgtaggaacaggaaagttcatttcttcacacaagatcacaaaccaagtaatccgctggagaaagaacgaattcagaatgcaggtggctctgtaatgattcagcgtgtgaatggctctctggctgtatcgagggcccttggggattttgattacaaatgtgtccatggaaaaggtcctactgagcagcttgtctcaccagagcctgaagtccatgatattgaaagatctgaagaagatgatcagttcattatccttgcatgtgatggtatctgggatgttatgggaaatgaagagctctgtgattttgtaagatccagacttgaagtcactgatgaccttgagaaagtttgcaatgaagtagtcgacacctgtttgtataagggaagtcgagacaacatgagtgtgattttgatctgttttccaaatgcacccaaagtatcgccagaagcagtgaagaaggaggcagagttggacaagtacctggaatgcagagtagaagaaatcataaagaagcagggggaaggcgtccccgacttagtccatgtgatgcgcacattagcgagtgagaacatccccagcctcccaccagggggtgaattggcaagcaagaggaatgttattgaagccgtttacaatagactgaatccttacaaaaatgacgacactgactctacatcaacagatgatatgtggtaaaactgctcatctagccatggagtttaccttcacctccaaaggagagtacagctcaactttgttgaaacttttaacatccatcctcaactttaaggaaggggatatgacatgggtgagaatgattacatcagagaacttcagcagtacaacagctagcccagaactgatttttttttttttttttgtaaatttgagacttatgtaagcgtgatttcaaaccataattcgtgttgtaaatcagactccagcaatttttgttgtatgattttgtttttttgtaaagtgtaattgtccttgtacaaaatgctcatatttaattatgaactgctttaaatcactatcaaagttacaagaaatgtttggcttattgtgtgatgcaacagatatatagccctttcaagtcatgttgtgtttggacttggggttggaacagggagagcagcagccatgtcagctacacgctcaaatgtgcagatgattatggaaaataacctcaaaatcttacaaagctgaacatccaaggagttattgaaaactatcttaaatgttcttggtaggggagttggcattgttgataaagccagtcccttcatttaactgtctttcaggatgttccttcgttgtttccatgagtattgcaggtaataatacagtgtattcataagaatctcaatcttggggctaaatgccttgtttctttgcacctcttttcaagtccttacatttaattactaattgataagcagcagcttcctacatatagtaggaaactgccacatttttgctatcatgattggctgggcctgctgctgttcctagtaagatattctgaattccattttatcaataaagcttgatttaacaaacaagaaactt

SEQ ID NO: 8455 - protein, 382 aa, Homo sapiens; identical to SEQ ID NO: 1226

SEQ ID NO: 8456 - DNA, 8209 bp, Homo sapiens
ggcgctagggacgggagcgcgcgcgggagctagagagcagtggtctcggcgctcgtccggcccgcagcttcgggtcctcaggcggctgttgctccggaacgggtggttggggaggggggggtggggggactctagacagctgaggcgcgaaagcgatgagtcctcggctcttcctcctccttctccgggacccgctctctgcctccctctccaacgcccggatgatctgagccgcgagggcgccgacagccgggggcccggacgcagcccggctcctcccctcctccgccccttccccagcctgacctggcccgccgctgcagcggtgacccctcccccggctgccgccgtcgccgccgcggtgaccccctccccggctgccgccgccgccgcctcggccgaccagggacctgcccgcctgcggctgctccggacctagaggatcaagacataatgggagcatttttagacaagccaaagatggaaaagcataatgcccaggggcagggtaatgggttgcgatatgggctaagcagcatgcaaggctggcgtgttgaaatggaggatgcacatacggctgtgatcggtttgccaagtggacttgaatcgtggtcattctttgctgtgtatgatgggcatgctggttctcaggttgccaaatactgctgtgagcatttgttagatcacatcaccaataaccaggattttaaagggtctgcaggagcaccttctgtggaaaatgtaaagaatggaatcagaacaggttttctggagattgatgaacacatgagagttatgtcagagaagaaacatggtgcagatagaagtgggtcaacagctgtaggtgtcttaatttctccccaacatacttatttcattaactgtggagactcaagaggtttactttgtaggaacaggaaagttcatttcttcacacaagatcacaaaccaagtaatccgctggagaaagaacgaattcagaatgcaggtggctctgtaatgattcagcgtgtgaatggctctctggctgtatcgagggcccttggggattttgattacaaatgtgtccatggaaaaggtcctactgagcagcttgtctcaccagagcctgaagtccatgatattgaaagatctgaagaagatgatcagttcattatccttgcatgtgatggtatctgggatgttatgggaaatgaagagctctgtgattttgtaagatccagacttgaagtcactgatgaccttgagaaagtttgcaatgaagtagtcgacacctgtttgtataagggaagtcgagacaacatgagtgtgattttgatctgttttccaaatgcacccaaagtatcgccagaagcagtgaagaaggaggcagagttggacaagtacctggaatgcagagtagaagaaatcataaagaagcagggggaaggcgtccccgacttagtccatgtgatgcgcacattagcgagtgagaacatccccagcctcccaccagggggtgaattggcaagcaagaggaatgttattgaagccgtttacaatagactgaatccttacaaaaatgacgacactgactctacatcaacagatgatatgtggtaaaactgctcatctagccatggagtttaccttcacctccaaaggagagtacagctcaactttgttgaaacttttaacatccatcctcaactttaaggaaggggatatgacatgggtgagaatgattacatcagagaacttcagcagtacaacagctagcccagaactgatttttttttttttttttgtaaatttgagacttatgtaagcgtgatttcaaaccataattcgtgttgtaaatcagactccagcaatttttgttgtatgattttgtttttttgtaaagtgtaattgtccttgtacaaaatgctcatatttaattatgaactgctttaaatcactatcaaagttacaagaaatgtttggcttattgtgtgatgcaacagatatatagccctttcaagtcatgttgtgtttggacttggggttggaacagggagagcagcagccatgtcagctacacgctcaaatgtgcagatgattatggaaaataacctcaaaatcttacaaagctgaacatccaaggagttattgaaaactatcttaaatgttcttggtaggggagttggcattgttgataaagccagtcccttcatttaactgtctttcaggatgttccttcgttgtttccatgagtattgcaggtaataatacagtgtattcataagaatctcaatcttggggctaaatgccttgtttctttgcacctcttttcaagtccttacatttaattactaattgataagcagcagcttcctacatatagtaggaaactgccacatttttgctatcatgattggctgggcctgctgctgttcctagtaagatattctgaattccattttatcaataaagcttgatttaacaaacaagaaacttaatcatgtatgtgtaattcctcttttaccctggccttttaaaacactgtgccgttgtaatgagacgtttctcatagggaaagatgttagtctcttttaattggacaacactgtcactcaaggcatagatgaaactttccttccattagaaagactaaaagatttaattcttggttgtaccttaatctattttttaaataggtttctttcaggctgcttatttttcattaagatgtgtatcagcttggatttgcctactgtttaattaaaatatttattgtcaaagtttgacaatctaacactctatggtaggggtgtgtgtgtgtgtgtttgtgagtgtgtgtttgcctgtgatttttaattggcccatgtctttagaatccaagtggttaagatgtatttgtgatttgaaatatagcatgttgataatatttagctgttggcctttacaaataactttcaaagcttaaggaattgtagatataaaaataacctaatttaatttaggcttaaattcctctgattaagcatgtgaaagtaagttttaaaatctgtcgcattgaaaagattactgttccgtgcccttctgtatttttgtctctttaggttgaatattgtatttatcaccatgtaatcattcagtaggcagattcccactagaaaactgttgaaatgtaagactaaaatacaacattgaatacaaaatcaaaattttgtgtataaaaaccagtatagtccattttgttatatttgttttttccctaacttggaaatatacatatttgtatatatagccttaaaattaatgtaaagttaggggagtagtggggaaagtaatgtgaaatgtctcagatttaagtagttaaataccagcaaaatcttttcattatccctcttattttgtgaggtgattaaatgtaacttaattgtatttaatttatatcttattccagcatgaatgaggaaaaactgaagtactatttatatttagaaattcatatcagttgaaattacagaaccaattccatacttacaataaatacttaatgtctaaatctgtggtagagtgcgaagtatgataatgttctaagttatggctttgcaagcatctaaatgtgcatttaatgaataccagtgcttctagtatagactaattaccagacatactggtactgaaagctaaatccctattataacaaaccagttccttaatattttaagtagactgacaactttagttccagaaattgcaaaactttgaactggactgtgtaatcttttgagatgcaaaacttaagtcacaagtagagtatgtgatggaaagctgtatttcaaaccataacagcatatttagagccttttttttttgagtctttaaacaagagaaaattaaaatattcctgtcaaaattattagtattgaaattaggcttggacacgagagagaaccgtatttgagtgatgtgagaagactaaatcttttccacatgagtcagcactgccatactaataatttttttactataaaaatacaggaaggaagtatacattataacagcagactgtgtgtgttcctgattcctggaggtaatagtggggggaaaccaaccatactttttaaaggcacttttgcacctctattgtgcacttcattcttgtaccacttaaattcttcacccccatcccctttttttgtgctaattagcatctcagggcaatgcctcaaaaatgtttgatgtgttctgttctttggagggaaaaagttcttatgtgatgataatatagtactcaaaatatacttttatcatttaaatgtcttatttgctgctatgaataggaaataacattttgtatagcaggctctgttttaccctaacattaaaaaatttcactgatctttctttcattaacagggtagaatctcctaatttccactttcttgggaatatacttttatagacaatagaagcagttctcaatattagcatatactttaaaaaatcaaagtgataacttaattcagctttggaagtatctcaaacatatttttactttatagtgcattaacttgcttctagagtacttaatgcaactgctctagccacttaattttttatactaatctcaacattaagaaatttggattaagtaataaattagttatgtaattcaagtaatctgaattacagcagtacttttagtgatcattcataggactatatattaacccagctaataactcagtttttttacaaaatgtttcgagtattattggtaaaacactgttctaggctaagcacattgggactgtaaagaaatgagtagatccttggcttcaagtttacatctggacaatttataatctagtgtatgttagtattataactggatcactcatcaaaaaatatatatatatatctattgcccacctgctatctaccaggtacttagctgatcaaggcaggcccctgccctaaagaccttgtttatacttcctttactcacctgaaaactgttctccagtttattttcttctctctaaagttaaagagtaattcagaagaaaattttgcttagcataagaataaaattggactgaagaggcttaagcccattcagtatccttgattgcatttatccaacggcctttattcttcctgctgacagcagtaactcagaggaataggtagtagatttctgaaaattatccagccatggaaatgtaggtggggtttgagtttaaggcatttaaaaatgtaaatatctctagctaaatttatcttaagtagaactctgtgtttttgtaacacactgccagtgttaatatcaaattttagccaaattattactatgtgttttaatattttaaaataatttcactgcccatctttactggacaaactcatttggagttcaacttgtgatttctgaaagaactgatgaaattgggtactgctttttttctccatttttcgttttgttttaattttgaatttcatggtatatacttttagttcaaactcagctgtttgtacagtattgtattaggatttggtattagaaaagatgtgtaaatatcttagtatataattgtttctcatttgaggtttttcttctaagggaccttaaagagttttatatacttttgctcacagaaactgctggtgagattaccattttttgagtatctagtcttctagtttttcttttaggcattaggaagccttctttagagttcaaaattttagaagcctaatttgctcttacttccttcaattatgtgccatgtgttttggtttgtatatgttttaaattgtatatttccttggaatatgcttgaaatatttaagaatacattttcaaaatgtataatactgtattgttttgttgatcagaataataagtctcagttaaatgtttgttattactgatagtcaaaatgctcaatagaaatgatgagaggcattggttccaattcattgtcaaatgaacgttttctaattttgttcacagattctttccctttcgattgttctgtatgttaagatagtggcttctgctctcactgttttcctatttatattactagcaggtaggagtgctaattagaaaaacttagatggtattgaaattacagttgacaacttatatttttatgagatggagaaaaaagattaagttgatataacaacaaagtggactttttttcttccttatcctgcacgaaatattgcccttgtttcctctactttcctcttggtgttttctctttttttcaaacagaaacaggccaattccattttcttgagcaagaaagcttagtgtgttacttcatcaaggccagctaatactgtgttaaaccgggctgaaaatgagaaaacttgggagatggaggaatggggaaatggcagtgggataggtagggaaggattactcttaattgttttaaaagccataggaaagtcttccttgtacgtggctgtaaatttataagaactattgtgtcacataaaccaacaagaatgaacctttgctgcttcagataatttgatttttccagcaaggaaattaataagttactgattcttcagcatagaaacaactgagaagaattaatgcaatgtttcttcactagaaaacccaacccttcatttcttttcattgctccaaaacccagttttcaactaatggttttctcattaaactaaatgtttagaaaagttgtttagagtttttctttttcttttacatagtcctcctgatccagtataagactatttagtaacgtgcatttgtatggtactatctaaagtaagttagattgatgtaagagatcgggtagctgcggaacaaaattagttatatcctaattaggtacagtgaatgacacaaaatcattttagcaatgcttcttaaccttttggggtcacaggcgttttgagactgatgaatcctagggacttatttacccaggaaaatgcgtatataacatacatatctccctaaagtttacaatattgtagtggttcatgggccccctggttaagagcccattctaaagtacaatagggcatcatcccttttcctgcaaagcccaaaagtatatttctagggcatgaaaataacttgagtctattttaaggaattgtttcactctagaggtagataggggacctggctagaatctgacattaaaatatactttttaaaaaatattatatttggggtggggaaagtgattaaaaggtgaaaaaaaaacatagtattcagaagttttggaggttaatgtctttctctaagatttgccactttagaaattcaacagaaaagaggtaaaacagaaatggaatgtatctggaacatttttggcctccatagtgcagatatactatattaacaagtaatacatttatttacctgtcagatctccaggttttaagattttgagctttctagtattaggattcattaaatgttcaattcatttcatattctaaggaattaggttatttacttactaattcaggatgttaaaataacatccaagtcggacaaccaccaccaatgcacacagttaatgagatttctaaaatataataagtacaatgtaacaaacgtatagaattttgcatttgttgccaaaattagatgtttaatgacagcttatttaattcccatttgtgggacttctggaacatagaaaccattatcttacctggttatcccttgactaaatagcatatctgcaggaaaatatcttgtttgtagtgatatgccccaatagtgattgatttcactcttgaaatgagttatatcacttaatttgtataaatgttatgagtggagagacatgtacatgttaaaagcatgttgcattatatattcattttttaaactctataaatgttaagaataatataattgcagaaatatttttcttaaatacaatgtgtaacaaaattctccgtagcaactcacccactttgcagtttatgtgatccacacttttaaagaaattccataaatgtatattttgtattatgtattatttcctggtccaaagaaaatatgtgaattcagttctaactttaagaatgtactgtttgttttcaagttcattgaaaaattgcattcagcctgcgaatggttgcagattgtatgttagatgaaaagtagaaataatttctagtttggaaaactggtgccactaaataaacaggcaattacataatg

SEQ ID NO: 8457 - protein, 382 aa, Homo sapiens; identical to SEQ ID NO: 1226

SEQ ID NO: 8458 - DNA, 377 bp, Homo sapiens
gtccagatcagcttcttccacatgggagggaaaatggctgctgacggctcccaagcctcaatcccttcacccttgccactggcaaactgcggtttaggttgctgccttggcagtcctggctgtcctcacggaagagcatgtgaaccacggacctggctgtctttttcattgggttggctctgcggtgcaggctggcagatgagcatgtgatgagcccgcccttgctggccgtgcaattcggctcctgtcatgctcttggccattgaatcggcctaatgcagcccctcagcagccagcctggtgttccctggggctgaggatctaatgtcagcagggcatgattcgattcacattaaagatggatattaagtcttttt

SEQ ID NO: 8459 - protein, 62 aa, Homo sapiens
MGGKMAADGSQASIPSPLPLANCGLGCCLGSPGCPHGRACEPRTWLSFSLGWLCGAGWQMSM

SEQ ID NO: 8460 - DNA, 3132 bp, Homo sapiens
gggtctgaggttgtaactttaacaggtgtaagtatttctttcctctgtttcagctggaagttttgagagtgaaatattcacagccattaagagacctccaaattaatttctcaacatgcttattctatagttcacattcaatccagagcactgaaggaactgaacaactggacactgtagacatcagatagctggccatggtgttggccatggcgtctcaggatgttcagaacttcttccagcctttctcttcctggatatctcgggtttatgaagctctccagcaagcaggagatatgttatctgcttcgctggttaacataagcaaacaagactctaaattgagtgacaaactagatcaggacttagataatattcagattcaggaaacgtactttgaagatgaagaacaagacaatgattggagtcaagaggatgcaaattccttgtttcttgaagtggatcatttctcatgttgtaatagtgatttgcaggactctgcccaaaattcaagcccaagccttagccaacatgcaaaggactcatgttccacaatgtcccagtggcccaattgggccagtgatgaccgcaagttaccacatgtgctttcttctattgcggaggaagagcatcaccttgaaaagcaaagaagtggccttcaacatggctttgacagccagctccctggtactttagaaactgttaatggaaaaaagcaagtcaacagctttggggatgacgaagagctgtccacatcttctgacagtgacgaggaggtgatcaaacaatttgagatttccgtgtcccggtcccagagtttccgttcagtgacatctgagaaaggaaagcagacaggattggagcagaaaccaaaattcagccgttcgttgttgacacacggagaagatggcacagaagtatctgcctgcgaagatttggatggagccagccaacggcgttattctgagaatctctcctacggtgaagatgaccacatccctgctcactcacagtccccatgtgaaagaggggatgccaaacaccacggcacatctcaccaagagtccagtgtggtccaaagcctcaggcgccaatccacagagggcagcttggagatggagacagcttttaatagccggggatttgaagattcctatgccactgacagctcctccatgtggagtccagaggcaagacaggaccaatttgcaggtgccatccggggtctcagagcccatctcaaagtgtggtgacctagatgtcatctttgaatatagagccgccagccagaagctcacagtgaccattgtgagggcacagggcctcccagataaggaccgaagtggtgtcaactcctggcaagttcatgtagtgctgctgcctggtaagaaacacaggggcaggacgaacatacagagagggcccaaccccgtcttcagggagaaggtcacctttgccaagctggagcccagagatgtggctgcctgtgctgtccgcttccgcctgtacgctgcccggaagatgacccgagagagaatgatgggagagaaactattctatctcagccacctgcacccagaaggggaaatgaaagtgactctggttctggagccaagaagtaatataagcagtggagggtctccgctcagcccatctgcggtttctcacagtgatagtacttcatccacgcagtcgctgtctcatggaggggcgccagagctgttggtggggctctcgtacaatgccacaacggggcgattatctgtggaaatgatcaaaggcagccatttccgaaacctcgctgttaaccgagcacctgatacatatggaaaactctttctcctcaattctgtgggtcaagagatgtcccgttgcaagacgtccattcggcgtggtcagcccaatcctgtctataaggagacctttgttttccaggtggccctctttcagctgtctgatgtcacgttgatgatttccgtttataacaggcgtactatgaagcgtaaagagatgattggctggattgccctgggccagaacagcagtggagaggaggaacaagatcactgggaggagatgaaggaaaccaaaggccagcagatctgcagatggcacactttgctggaatcctaggtttgctaacctgcatttgtgtgctgtgtccaccttggttacctgtgttgctgtctactgacactaagtgtcctggcaagggtttcagggtttcaaaaacagattccactaacccctaggacattgtgagtgggagttttgggtttctcaatggtctgatttggatttaaatattgtaattttaaaaacacacatacacagtgaagtgtccgtatggaaaatattataccacaattaagaccactgatgagttaatttgtgccaatagatcattgagttttagttcagggtatggggtgaagcttcttctgctgtctctgtttgcttgaagagtaacctgagattgcaagggagctgttaattgttactatttgcaaccatttaggtggatgaatcagaattttcttaatatggtacaaaaaactccaaaatatagatatgaatcagatgctgagcctcataaaagaatcaaactctaatccataaactcttatttcacatttttctctttatcaaagaaacctatttacctaacgagtaaatattataaacttgcacttttaaaataaatttgtattaattaaatacctcttttatcttatattttgtggtttctatgagatttggttagatgaatcattttgaagcaagaaaagagttcagaaactactgttttaagacaacttgtctccttttgaatatgtaagatttcaaacttgtgactttcaaggtttttatgctgtctttctcacccaataagttcttacagaataagaaaacaaaaaacaagactactgcagtcatagatttattgattttttctgcttctggtgttcttttggattatcctttttctatgttcaattatatatactcatatatgaatattttgaatgtactgcatgtaaaccatgctctttttaaactgagtattttccatcactagagcatagtaaattgtacacagtgagtccttaataaatattgatttgattgact

SEQ ID NO: 8461 - protein, 408 aa, Homo sapiens
MAQKYLPAKIWMEPANGVILRISPTVKMTTSLLTHSPHVKEGMPNTTAHLTKSPVWSKASGANPQRAAWRWRQLLIAGDLKIPMPLTAPPCGVQRQDRTNLQVPSGVSEPISKCGDLDVIFEYRAASQKLTVTIVRAQGLPDKDRSGVNSWQVHVVLLPGKKHRGRTNIQRGPNPVFREKVTFAKLEPRDVAACAVRFRLYAARKMTRERMMGEKLFYLSHLHPEGEMKVTLVLEPRSNISSGGSPLSPSAVSHSDSTSSTQSLSHGGAPELLVGLSYNATTGRLSVEMIKGSHFRNLAVNRAPDTYGKLFLLNSVGQEMSRCKTSIRRGQPNPVYKETFVFQVALFQLSDVTLMISVYNRRTMKRKEMIGWIALGQNSSGEEEQDHWEEMKETKGQQICRWHTLLES

SEQ ID NO: 8462 - DNA, 1876 bp, Homo sapiens
atggtgttggccatggcgtctcaggatgttcagaacttcttccagcctttctcttcctggatatctcgggtttatgaagctctccagcaagcaggagatatgttatctgcttcgctggttaacataagcaaacaagactctaaattgagtgacaaactagatcaggacttagataatattcagattcaggaaacgtactttgaagatgaagaacaagacaatgattggagtcaagaggatgcaaattccttgtttcttgaagtggatcatttctcatgttgtaatagtgatttgcaggactctgcccaaaattcaagcccaagccttagccaacatgcaaaggactcatgttccacaatgtcccagtggcccaattgggccagtgatgaccgcaagttaccacatgtgctttcttctattgcggaggaagagcatcaccttgaaaagcaaagaagtggccttcaacatggctttgacagccagctccctggtactttagaaactgttaatggaaaaaagcaagtcaacagctttggggatgacgaagagctgtccacatcttctgacagtgacgaggaggtgatcaaacaatttgagatttccgtgtcccggtcccagagtttccgttcagtgacatctgagaaaggaaagcagacaggattggagcagaaaccaaaattcagccgttcgttgttgacacacggagaagatggcacagaagtatctgcctgcgaagatttggatggagccagccaacggcgttattctgagaatctctcctacggtgaagatgaccacatccctgctcactcacagtccccatgtgaaagaggggatgccaaacaccacggcacatctcaccaagagtccagtgtggtccaaagcctcaggcgccaatccacagagggcagcttggagatggagacagcttttaatagacaggaccaatttgcaggtgccatccggggtctcagagcccatctcaaagtgtggtgacctagatgtcatctttgaatatagagccgccagccagaagctcacagtgaccattgtgagggcacagggcctcccagataaggaccgaagtggtgtcaactcctggcaagttcatgtagtgctgctgcctggtaagaaacacaggggcaggacgaacatacagagagggcccaaccccgtcttcagggagaaggtcacctttgccaagctggagcccagagatgtggctgcctgtgctgtccgcttccgcctgtacgctgcccggaagatgacccgagagagaatgatgggagagaaactattctatctcagccacctgcacccagaaggggaaatgaaagtgactctggttctggagccaagaagtaatataagcagtggagggtctccgctcagcccatctgcggtttctcacagtgatagtacttcatccacgcagtcgctgtctcatggaggggcgccagagctgttggtggggctctcgtacaatgccacaacggggcgattatctgtggaaatgatcaaaggcagccatttccgaaacctcgctgttaaccgagcacctgatacatatggaaaactctttctcctcaattctgtgggtcaagagatgtcccgttgcaagacgtccattcggcgtggtcagcccaatcctgtctataaggagacctttgttttccaggtggccctctttcagctgtctgatgtcacgttgatgatttccgtttataacaggcgtactatgaagcgtaaagagatgattggctggattgccctgggccagaacagcagtggagaggaggaacaagatcactgggaggagatgaaggaaaccaaaggccagcagatctgcagatggcacactttgctggaatcctag

SEQ ID NO: 8463 - protein, 388 aa, Homo sapiens
MAQKYLPAKIWMEPANGVILRISPTVKMTTSLLTHSPHVKEGMPNTTAHLTKSPVWSKASGANPQRAAWRWRQLLIDRTNLQVPSGVSEPISKCGDLDVIFEYRAASQKLTVTIVRAQGLPDKDRSGVNSWQVHVVLLPGKKHRGRTNIQRGPNPVFREKVTFAKLEPRDVAACAVRFRLYAARKMTRERMMGEKLFYLSHLHPEGEMKVTLVLEPRSNISSGGSPLSPSAVSHSDSTSSTQSLSHGGAPELLVGLSYNATTGRLSVEMIKGSHFRNLAVNRAPDTYGKLFLLNSVGQEMSRCKTSIRRGQPNPVYKETFVFQVALFQLSDVTLMISVYNRRTMKRKEMIGWIALGQNSSGEEEQDHWEEMKETKGQQICRWHTLLES

SEQ ID NO: 8464 - DNA, 308 bp, Homo sapiens
gtacaggcggaagcggacagcacaggcagccacatctctgggctccagcttggcaaaggcaactgaaggagctcctcacttgggtactgttaataccactaatccatctgaccttcctgcaagatgtcactgaacggaaactctgggaccgggacacggaaatctcaaattgtttgatcacctcctcgtcactgtcagaagatgtggacagctcttcgtcatccccaaagctgttgactgggagtaaacaagagccatgagtctcctgtgtggcctatatgctcgaatacagagatagactctccagg

SEQ ID NO: 8465 - protein, 85 aa, Homo sapiens
TGGSGQHRQPHLWAPAWQRQLKELLTWVLLIPLIHLTFLQDVTERKLWDRDTEISNCLITSSSLSEDVDSSSSSPKLLTGSKQEP

SEQ ID NO: 8466 - DNA, 2029 bp, Homo sapiens
tgaatcttaaaagaaaaggatatttattagatgtctactgtctgtcaagtcctctactttttacaacatccctacacagaaggaacaggacaggaccaatttgcaggtgccatccggggtctcagagcccatctcaaagtgtggtgacctagatgtcatctttgaatatagagccgccagccagaagctcacagtgaccattgtgagggcacagggcctcccagataaggaccgaagtggtgtcaactcctggcaagttcatgtagtgctgctgcctggtaagaaacacaggggcaggacgaacatacagagagggcccaaccccgtcttcagggagaaggtcacctttgccaagctggagcccagagatgtggctgcctgtgctgtccgcttccgcctgtacgctgcccggaagatgacccgagagagaatgatgggagagaaactattctatctcagccacctgcacccagaaggggaaatgaaagtgactctggttctggagccaagaagtaatataagcagtggagggtctccgctcagcccatctgcggtttctcacagtgatagtacttcatccacgcagtcgctgtctcatggaggggcgccagagctgttggtggggctctcgtacaatgccacaacggggcgattatctgtggaaatgatcaaaggcagccatttccgaaacctcgctgttaaccgagcacctgatacatatggaaaactctttctcctcaattctgtgggtcaagagatgtcccgttgcaagacgtccattcggcgtggtcagcccaatcctgtctataaggagacctttgttttccaggtggccctctttcagctgtctgatgtcacgttgatgatttccgtttataacaggcgtactatgaagcgtaaagagatgattggctggattgccctgggccagaacagcagtggagaggaggaacaagatcactgggaggagatgaaggaaaccaaaggccagcagatctgcagatggcacactttgctggaatcctaggtttgctaacctgcatttgtgtgctgtgtccaccttggttacctgtgttgctgtctactgacactaagtgtcctggcaagggtttcagggtttcaaaaacagattccactaacccctaggacattgtgagtgggagttttgggtttctcaatggtctgatttggatttaaatattgtaattttaaaaacacacatacacagtgaagtgtccgtatggaaaatattataccacaattaagaccactgatgagttaatttgtgccaatagatcattgagttttagttcagggtatggggtgaagcttcttctgctgtctctgtttgcttgaagagtaacctgagattgcaagggagctgttaattgttactatttgcaaccatttaggtggatgaatcagaattttcttaatatggtacaaaaaactccaaaatatagatatgaatcagatgctgagcctcataaaagaatcaaactctaatccataaactcttatttcacatttttctctttatcaaagaaacctatttacctaacgagtaaatattataaacttgcacttttaaaataaatttgtattaattaaatacctcttttatcttatattttgtggtttctatgagatttggttagatgaatcattttgaagcaagaaaagagttcagaaactactgttttaagacaacttgtctccttttgaatatgtaagatttcaaacttgtgactttcaaggtttttatgctgtctttctcacccaataagttcttacagaataagaaaacaaaaaacaagactactgcagtcatagatttattgattttttctgcttctggtgttcttttggattatcctttttctatgttcaattatatatactcatatatgaatattttgaatgtactgcatgtaaaccatgctctttttaaactgagtattttccatcactagagcatagtaaattgtacacagtgagtccttaataaatattgatttgattgactctt

SEQ ID NO: 8467 - protein, 203 aa, Homo sapiens
MTRERMMGEKLFYLSHLHPEGEMKVTLVLEPRSNISSGGSPLSPSAVSHSDSTSSTQSLSHGGAPELLVGLSYNATTGRLSVEMIKGSHFRNLAVNRAPDTYGKLFLLNSVGQEMSRCKTSIRRGQPNPVYKETFVFQVALFQLSDVTLMISVYNRRTMKRKEMIGWIALGQNSSGEEEQDHWEEMKETKGQQICRWHTLLES

SEQ ID NO: 8468 - DNA, 1117 bp, Homo sapiens
cagaagggtcccgactgcgctcgcctaagttggggccggcagagtgggttgggaggctggggctgggcgagactcgcgggcccggtttaaatcaacaaataattgccaagtcccctcctcctctgggactacctcaagatataacagatgttggaagacacgaaagaaaggtcaaggtaatccaagatcacaggattccttgatggcataactggaattagaaaacaggcatgactgtaaggaggaactacggaatgctaactacatgcccggctctatgctaggcacattacatctgtgatttcactgatatcttttaagacacctaatgaggtggaatgccacatccaaagacattacaaattcttcttatgttagggaaggcaagacacccccacctccaacagttatgcagcatcagcaaaaacagagtccaaaacaactgtgcatcacactgggagccagtgaaggagagggaacggagagcaggtgttcggctgcctggtgaatggtccatttaaaaattcaacaatagtcagaggggagtagagagtacaacagccaccaccgtaattggtgaaatcaggatttctcaattcagtgtaaactcacaccctaaaagaaggcacactataaagcagatttccataaacccagcgcatcatttactcttaacgatattattttaaaagcatgctcttcaggcaaaatcgctgaaagacctactcaagcaacaaaaaccagtgctgcttcaatgtcaaatctccctatgagatattaatcattagctggaagaaataggcaaaagcagttttttactgcagaaccaactaattatctttcataactcttttgaaaaccaaatgtaaaagctcaagtgaaaaacatgttaaatgcatttgtgtctagactttgccaagaaaataagggagtttaagtgcacaaaatcaaaagatcttactaaactagaatttcaaataaaggtaaaaaaaatcagccacatattgttatatatcttgtcttcagcacttaaatgtatacaatcagctgagggtgaatgttgctgtatattcaagatgtacatgcatcctatttggtgagtagcaccaacatagta

SEQ ID NO: 8469 - protein, 59 aa, Homo sapiens
MRWNATSKDITNSSYVREGKTPPPPTVMQHQQKQSPKQLCITLGASEGEGTESRCSAAW

SEQ ID NO: 8470 - DNA, 526 bp, Homo sapiens
tcagtaaacagataagaagtaggagacaggattggcattatatctatggtcatgtcgaggagggacaagattgagtggtgagaagattagaatttggatagattctaaggccctggcatgactctacagggaaccagggaagtgatgtgtctcttcttcagtgcgattctctctccgaagatagctttggcagcccccgccggcgcactcgacctacaggaaagttgctcccgagctgtggaggggcgtcatcgcctcctagcaacgctcctagcaaccgggtaacatctgctccctgtggtccaatgcgagctgagaacagctgcgcgcccgcctagcgctgcgaacccggagtgagaggcgcttcagagactggagggacggacctgcaggagccagggctgcccgccgagctgcagttgccgctactgccgctgtcagcgcccgactgaagagtgacagccgcaaaagcaggagtgagcaccgaaccccgcgcttctacctaacaggtgcatgcgccgatctg

SEQ ID NO: 8471 - protein, 55 aa, Homo sapiens
MTLQGTREVMCLFFSAILSPKIALAAPAGALDLQESCSRAVEGRHRLLATLLATG

SEQ ID NO: 8472 - DNA, 3901 bp, Homo sapiens
ggccccctgccagtaggcagccacagacaacgccaaaaggaattagactctgggctgatttttatggattagttaacatatccctcctcagaatctatcaagtgctcaaacctgcagacacaaacacgaacacactagggaggagagtcccagaaggcggaagatcccgtactgctcatccccaaacgcctcaccccgggtcacacccacgaactcatccggttctcccttctcagggtcctactccaaggcgaagagggacaccgagccaaggcctgcagcgagtgacctgcccggggaggcgcgggaccgaggctcacctacccgggcccgcgagtctcgcccagccccagcctcccaacccactctgccggccccaacttaggcgagcgcagtcgggacccttctgtcggggctctttgttcgccgcccctcggcgttccagctctcaaccttgctcccagcagcccccgccggcgcactcgacctacaggaaactgcgcgcccgcctagcgctgcgaacccggagtgagaggcgcttcagagactggagggacggacctgcaggagccagggctgcccgccgagctgcagttgccgctactgccgctgtcagcgcccgactgaagagtgacagccgcaaaagcaggagtgagcaccgaaccccgcgcttctacctaacaggtgcatgcgccgatctggtgagtggacccagctcacaagatctcaggtaaccattcatgagcctgaggctgtgagaaatgctcgctgtgcaaaggggaactctcaccagattttctgaaactgttctagaaatacacttttcggattgattcagcattaccagcttatccaacaaaagtattaacatatacattaacaacgtcgaaagtagcctactttaagagaaaatatgcagaagaagaagatttacatcaagattaccatgggtattttccaaaacacctgatattacctgaggacagaacttgcattctcaaactttctctggagaagctcaggtttcttgaagacccagaaacctacttaagaaggtctgtgttaattaacaatttgctgaggaagatacatctagagacggagaaagagagctatgaatactttaaagaagctccctgttataagactgcatattctgatacaagaaaacggctgaagtttatggtacaggaatgctgttctcagtctctctattatgaagagctgcattcgtatcatattgtgccttatgcttcggagaatgccatttatgaaatgggctacactagcagccacttggagcaaaattctcagttgcttatttataaaatgaattaaagtaactgttaagtccattgatactttgtttctaaatgcttgaactgtttatagtgaagatgttaatataaggcactcattaccagtgcacttgatatcaaagatgagatgcatgctgaactgattggagagagcaatggttattactcagcagtccttagaatcatcaaattgaatagaaaatatgttcacatatgataaagcggtcaattagtgctttagaagcaaagattttttttaaacataagatgtgtaggaaggggcctacgttaaacaattacacagatgaaaaattttcttttatgccttgatttccaaattctgccactcttactggaaagtaatgaaagtaacagattaaattgataatgccatgtccctgaggatgaagggtggaacacatttaattttctgtaaatgatatgaggaagggctggttctttctgaagtgctttgacttgtcaagcattgtgccaaataattgacaccattctccttttaccattagtagcaattcgagatggggcaaagacactgcaactaaactgctgaatgtaacaaccagattactccaaactgatccattgtactattttgcggggagggcttagacttttctctttaaaagtgaattttaacgaaatagccttgcagatgggcttatctataagttctacaggttggttaaaatttgtggtgggcctttagttagccgtttacattttatttgtttttttttataggctgtgaagctcaggaaaagggtaggcaggtaaaatttgtttttaatgagttgatactttttagaaaccttatctgcaaaaattaatgagaacaacaaattccacatgatgttatttcttcatctagctaagagtacatttaaggctgcctggatgaaactttgcactgatttttgtataatagttgatcattcactatttgacaaattgtttcagaatgcctttggtggtgaagtttagataagtccctatgttttgcaattttacagataattatttaacaagttggatagattcatgaaattgtttgaagtggttcatactgttctttcaggtttgagtgagatgtcagatttcagtgtctgaagttttgtcctatggagcatatcatttaaagaattgtcattaactgataaaacagattggaaaaactaggtgccaaaggtgtatttaagaaaataccaaagactcaaagatgagtgttaggaagactatgataatgaagataagaatctaaagtaaggattgcataggacatagaagaacattgttaaaggggtttggaatgatttgcttactaatgtactttcagaacactttatacataataatggtaatcaagggcactgctttaaatgaagatactacagacctttaggaatcatatgccttggaaaacaatctatgtatggtgacttgtcaacaaagtatcttccctagttggatgccaacttgtaaccaagaagactttcttctattcaagagaaatttggttttagttttgatttaatacttggtccctctaattaatcactggggtgattaacatgaattctgttggtataaagagtattggttccctaattagcctgcattgttgaagaccacatagatgtattactgataagactatgaggctcatgtttaattactcaatcaaaattaggaagaaatgctttggaagaaactaaaaaattacaatttaggttaatttttaaaggcaatttagtatacatgatgagctagctttgaaatacagatttaaatgtttaaaaattaatttgagggcaagatttggtaccaaagtttcaaaaattttatttcactgcttataaaatactttatcagaacacttattttaaaaaataacatcttatttgaaaaactccaaatttgatgggatagttacaccatcatacaattttaaaggtagaattagctttctaatactttaaaatattttctgaaatgaacatttcacttggtttaggaccgtgtctgtaagtaaaagacaccaatgctaatagatatgacttacaaaaatgccacatatcgaaattgattgaggattgaaatatatatactttggcattgagaagagaggaagagaaaaaaataaaaaaagtgtgacattgtaatatttattgtatttaataaatcttgaagaaagaactcttgagcaatgaaccagtgacagatataaaagcctgttttatttgatgacatcattaactgagttttctcatctatacattcatacatcgagaaggaactgtcttaaaaaccagtgtttctttttttttttaagttctagcgtacatgtgcagaatgtgcaggtttgttatataggtatacacgtgccatggtggtttgctgcacccatcaacctgtcatctacattaggtatttctcctaatgctatccctccccagtgatatttgttaatatgcttttttaaaaaagtgtctgccttgaaactggtaattaaaaaatatctcctagggcatttaattatttttcccaataaacaactcatagat

SEQ ID NO: 8473 - protein, 37 aa, Homo sapiens
MRRSGEWTQLTRSQVTIHEPEAVRNARCAKGNSHQIF

SEQ ID NO: 8474 - DNA, 7124 bp, Homo sapiens
ggccccctgccagtaggcagccacagacaacgccaaaaggaattagactctgggctgatttttatggattagttaacatatccctcctcagaatctatcaagtgctcaaacctgcagacacaaacacgaacacactagggaggagagtcccagaaggcggaagatcccgtactgctcatccccaaacgcctcaccccgggtcacacccacgaactcatccggttctcccttctcagggtcctactccaaggcgaagagggacaccgagccaaggcctgcagcgagtgacctgcccggggaggcgcgggaccgaggctcacctacccgggcccgcgagtctcgcccagccccagcctcccaacccactctgccggccccaacttaggcgagcgcagtcgggacccttctgtcggggctctttgttcgccgcccctcggcgttccagctctcaaccttgctcccagcagcccccgccggcgcactcgacctacaggaaactgcgcgcccgcctagcgctgcgaacccggagtgagaggcgcttcagagactggagggacggacctgcaggagccagggctgcccgccgagctgcagttgccgctactgccgctgtcagcgcccgactgaagagtgacagccgcaaaagcaggagtgagcaccgaaccccgcgcttctacctaacaggtgcatgcgccgatctggtgagtggacccagctcacaagatctcaggtaaccattcatgagcctgaggctgtgagaaatgctcgctgtgcaaaggggaactctcaccagattttctgaaactgttctagaaatacacttttcggattgattcagcattaccagcttatccaacaaaagtattaacatatacattaacaacgtcgaaagtagcctactttaagagaaaatatgcagaagaagaagatttacatcaagattaccatgggtattttccaaaacacctgatattacctgaggacagaacttgcattctcaaactttctctggagaagctcaggtttcttgaagacccagaaacctacttaagaaggtctgtgttaattaacaatttgctgaggaagatacatctagagacggagaaagagagctatgaatactttaaagaagctccctgttataagactgcatattctgatacaagaaaacggctgaagtttatggtacaggaatgctgttctcagtctctctattatgaagagctgcattcgtatcatattgtgccttatgcttcggagaatgccatttatgaaatgggctacactagcagccacttggagcaaaattctcagttgcttatttataaaatgaattaaagtaactgttaagtccattgatactttgtttctaaatgcttgaactgtttatagtgaagatgttaatataaggcactcattaccagtgcacttgatatcaaagatgagatgcatgctgaactgattggagagagcaatggttattactcagcagtccttagaatcatcaaattgaatagaaaatatgttcacatatgataaagcggtcaattagtgctttagaagcaaagattttttttaaacataagatgtgtaggaaggggcctacgttaaacaattacacagatgaaaaattttcttttatgccttgatttccaaattctgccactcttactggaaagtaatgaaagtaacagattaaattgataatgccatgtccctgaggatgaagggtggaacacatttaattttctgtaaatgatatgaggaagggctggttctttctgaagtgctttgacttgtcaagcattgtgccaaataattgacaccattctccttttaccattagtagcaattcgagatggggcaaagacactgcaactaaactgctgaatgtaacaaccagattactccaaactgatccattgtactattttgcggggagggcttagacttttctctttaaaagtgaattttaacgaaatagccttgcagatgggcttatctataagttctacaggttggttaaaatttgtggtgggcctttagttagccgtttacattttatttgtttttttttataggctgtgaagctcaggaaaagggtaggcaggtaaaatttgtttttaatgagttgatactttttagaaaccttatctgcaaaaattaatgagaacaacaaattccacatgatgttatttcttcatctagctaagagtacatttaaggctgcctggatgaaactttgcactgatttttgtataatagttgatcattcactatttgacaaattgtttcagaatgcctttggtggtgaagtttagataagtccctatgttttgcaattttacagataattatttaacaagttggatagattcatgaaattgtttgaagtggttcatactgttctttcaggtttgagtgagatgtcagatttcagtgtctgaagttttgtcctatggagcatatcatttaaagaattgtcattaactgataaaacagattggaaaaactaggtgccaaaggtgtatttaagaaaataccaaagactcaaagatgagtgttaggaagactatgataatgaagataagaatctaaagtaaggattgcataggacatagaagaacattgttaaaggggtttggaatgatttgcttactaatgtactttcagaacactttatacataataatggtaatcaagggcactgctttaaatgaagatactacagacctttaggaatcatatgccttggaaaacaatctatgtatggtgacttgtcaacaaagtatcttccctagttggatgccaacttgtaaccaagaagactttcttctattcaagagaaatttggttttagttttgatttaatacttggtccctctaattaatcactggggtgattaacatgaattctgttggtataaagagtattggttccctaattagcctgcattgttgaagaccacatagatgtattactgataagactatgaggctcatgtttaattactcaatcaaaattaggaagaaatgctttggaagaaactaaaaaattacaatttaggttaatttttaaaggcaatttagtatacatgatgagctagctttgaaatacagatttaaatgtttaaaaattaatttgagggcaagatttggtaccaaagtttcaaaaattttatttcactgcttataaaatactttatcagaacacttattttaaaaaataacatcttatttgaaaaactccaaatttgatgggatagttacaccatcatacaattttaaaggtagaattagctttctaatactttaaaatattttctgaaatgaacatttcacttggtttaggaccgtgtctgtaagtaaaagacaccaatgctaatagatatgacttacaaaaatgccacatatcgaaattgattgaggattgaaatatatatactttggcattgagaagagaggaagagaaaaaaataaaaaaagtgtgacattgtaatatttattgtatttaataaatcttgaagaaagaactcttgagcaatgaaccagtgacagatataaaagcctgttttatttgatgacatcattaactgagttttctcatctatacattcatacatcgagaaggaactgtcttaaaaaccagtgtttctttttttttttaagttctagcgtacatgtgcagaatgtgcaggtttgttatataggtatacacgtgccatggtggtttgctgcacccatcaacctgtcatctacattaggtatttctcctaatgctatccctccccagtgatatttgttaatatgcttttttaaaaaagtgtctgccttgaaactggtaattaaaaaatatctcctagggcatttaattatttttcccaataaacaactcatagataacgggttgactaatgttatctttatttagaaaatttgtatgtaaactgtgtaaacttgtctgagttaaccaatagactaccggggttttagcatggtaaactgatatacagggagacccaaatacaggcttgctttgctgactacccagcgtgctttattacaggagatgcaaaaggtggaagaccagttacacctttttttttttttttttaaaacctggacatcctttctctggtgacaagagccatccttatggtaaggaaggtgagatagaaaatggagaacctttggtaatgttgatctttcttgtgggtgtccacctagcctaaaagccaagtgaagaagaacataaaaaagcagaagaggaaaaatgaagaaaagaggaaaaagagggtggggccagagaaataaagagtaggattagtaagtgaaagaaaaagttgctttgttgtgtggggggggtgttcttgcttgctatactcaattttgctttcccgtgtctgctgtacacaaaacacctgatctctgcaatgtattgctcctttctttcattcacctgtgatgcataagactagattattttcggcatatctactgtttgcaaagtgttactactgaaaaatatccctgaaactgagctctttgggtggataagcaaaggaaaaatagaaaataattaaggtaagggaaaggctaaaggataagcctgtgtataaatgggaaatggataagctcaaatgcattatctggtttcaatgtaacacccaagatttaacaaactcagtgctagaagacttgaaaataagtgtaatttaccaccatctattgagcagctattatgagccaggcactgtgctagggctggggatacataagtgaataatgcacagtcccagaactcagattatttggttttgttttaccaaatccaaatgcagtacctgcatttctcttttccaaactgagatggctatcaaacatgtctttcagaaagtgtttgcaggtgagaagatgcgcaaggtgaaggaaagttttcctgacccagatcttagaaggaaaggagaggatacattttgctttgtggcatatttattgtgggcaaaaagctactattgcctaagggaagtacggctgaccttagcccatccctggggcatatcttgtgcgtgtggtggggagacaaatcaggtagggaacaattccttctcgccttacctctctagcttccatgttcttttatggaacaaatcagattaatactaatgttaaggagagctttaaaggagaaagagaatcaataaatcacagcctgaaagttgtgtatgttgtgtgcaagctcagaggggcagtcttcttcaatttgccttgtgctggtgaattgcttgaatgaacttcggtatttcttaacaccaggtactggagcccaccttctttctctccctctggtttcctctttaaatcacagcctgaccccagtctttatagtccattgtaagtggaagttatagctctattcttcacccacaccttgctccctatcattgatacttagaagaaagtaacaatttgcagtactggctgaactcctttgggaaagtttctggagtgtatcaaataagaattcatcatagtaacatggtcgttactggctgaacaaaattctttttgagactattgtacttagtcattaaataattgtttactaaggcaattttcatgtttctggaattcagtgtaatagttaacagctgtatatgtctcacaaaagaaactacttaggttggaaacaatggaaggttgtgtataattaattcaatcaggtcatgaatatttatgtaacatatggcattttaatttatatgttcccattctcatacttcattactatacagcagcaacaagataaatttcaggttttttgtttttttattaagtgggccatgtctaaaagttgtcacattcctggttgaatattatggacaaaatttccccattaaagtagttttgtctttctcaaggattatcctttagggttgggtggattaaaaacattacattagtgcttcttgagcatacaagtcactagggatcttgtgaaaatacagattccttttagtaggtttgggatgaggaatgaaggtcttcatctctcaaatctcccaggtgatgtggatgctgccagtccatcgaccacactttgagttgggagattctacatcttttgagaaatatccacactgaagcctatactcttaaactttcaaagactctgtgttcatgtctgtgttctgcaagaattttttcttttaagaaataaactgcataaagtaaaatcagaaaaccataacactggttttccaaatttgccacaaatactgtaatactctgtagagtaaaatgcaaagattattcctgttacaagttttctctgtatcaagtgcaggaaaggaacatgggtagagtcatgtaccattcttatcagtcaggagatgacacgtggtaaatttctcttcttgattttcctcttgattatactcacataagggagctccatttggtaacaaagatgaaattctgttcacagttaacaagaatttagcaacttcttgcttggcaaaatctgagacaaccttacaaaaacatcctacattaaattcagaattttgggtagctgcataagctgaagattatggaaaacctgagctgaaaatggcacctggatctgtaacttcttgtcttgaactcttttttgagctttattctgtgagagatcttcccctacagtgattttttctgtttctcctcagtcgctggggtctcagtaaggggtggaggattggtgtaaatgagacagtcacataaattgtctaatttgagcatgccaagtgatttttgtcagcctcttttggtcataaaattttggtatagctattgtgaaatatagtgtcataaatttgtcataagccattaatgaaggaagagaagcagaaatttatttctgtgggaatgcactcaaatatcaagcagatggtgttctacaacatttatttgggaaaatgtgtatctgttacataatctgaaatatgtctttttcacatttaaaaatatttgggtcatgatttagagtttttattggattgttttttaaactgagaggaagaagaaaggtaattgtattttaaaacatttgacatgttactaataaaattttatttctggtg

SEQ ID NO: 8475 - protein, 37 aa, Homo sapiens; identical to SEQ ID NO: 8473

SEQ ID NO: 8476 - DNA, 874 bp, Homo sapiens
ctgcgcgcccgcctagcgctgcgaacccggagtgagaggcgcttcagagactggagggacggacctgcaggagccagggctgcccgccgagctgcagttgccgctactgccgctgtcagcgcccgactgaagagtgacagccgcaaaagcaggagtgagcaccgaaccccgcgcttctacctaacaggtgcatgcgccgatctggtgagtggacccagctcacaagatctcaggtaaccattcatgagcctgaggctgtgagaaatgctcgctgtgcaaaggggaactctcaccagattttctgaaactgttctagaaatacacttttcggattgattcagcattaccagcttatccaacaaaagtattaacatatacattaacaacgtcgaaagtagcctactttaagagaaaatatgcagaagaagaagatttacatcaagattaccatgggtattttccaaaacacctgatattacctgaggacagaacttgcattctcaaactttctctggagaagctcaggtttcttgaagacccagaaacctacttaagaaggtctgtgttaattaacaatttgctgaggaagatacatctagagacggagaaagagagctatgaatactttaaagaagctccctgttataagactgcatattctgatacaagaaaacggctgaagtttatggtacaggaatgctgttctcagtctctctattatgaagagctgcattcgtatcatattgtgccttatgcttcggagaatgccatttatgaaatgggctacactagcagccacttggagcaaaattctcagttgcttatttataaaatgaattaaagtaactgttaagtccattgatactttgtttct

SEQ ID NO: 8477 - protein, 37 aa, Homo sapiens; identical to SEQ ID NO: 8473

SEQ ID NO: 8478 - DNA, 797 bp, Homo sapiens
agaagatgatgagatccgtaagcatacatccatgtagaaaaggtgcagttaaacatggccctttaaagaaatgctgtcttcaaagaaaaagtagcatttggcgatttcaaatcttgtgagaaagaatgtgcattccaaagaaagacgggatctcaggtaaccattcatgagcctgaggctgtgagaaatgctcgctgtgcaaaggggaactctcaccagattttctgaaactgttctagaaatacacttttcggattgattcagcattaccagcttatccaacaaaagtattaacatatacattaacaacgtcgaaagtagcctactttaagagaaaatatgcagaagaagaagatttacatcaagattaccatgggtattttccaaaacacctgatattacctgaggacagaacttgcattctcaaactttctctggagaagctcaggtttcttgaagacccagaaacctacttaagaaggtctgtgttaattaacaatttgctgaggaagatacatctagagacggagaaagagagctatgaatactttaaagaagctccctgttataagactgcatattctgatacaagaaaacggctgaagtttatggtacaggaatgctgttctcagtctctctattatgaagagctgcattcgtatcatattgtgccttatgcttcggagaatgccatttatgaaatgggctacactagcagccacttggagcaaaattctcagttgcttatttataaaatgaattaaagtaactgttaagtccattgatactttgtttct

SEQ ID NO: 8479 - protein, 51 aa, Homo sapiens
MVQECCSQSLYYEELHSYHIVPYASENAIYEMGYTSSHLEQNSQLLIYKMN

SEQ ID NO: 8480 - DNA, 3327 bp, Homo sapiens
agaagatgatgagatccgtaagcatacatccatgtagaaaaggtgcagttaaacatggccctttaaagaaatgctgtcttcaaagaaaaagtagcatttggcgatttcaaatcttgtgagaaagaatgtgcattccaaagaaagacgggatctcaggtaaccattcatgagcctgaggctgtgagaaatgctcgctgtgcaaaggggaactctcaccagattttctgaaactgttctagaaatacacttttcggattgattcagcattaccagcttatccaacaaaagtattaacatatacattaacaacgtcgaaagtagcctactttaagagaaaatatgcagaagaagaagatttacatcaagattaccatgggtattttccaaaacacctgatattacctgaggacagaacttgcattctcaaactttctctggagaagctcaggtttcttgaagacccagaaacctacttaagaaggtctgtgttaattaacaatttgctgaggaagatacatctagagacggagaaagagagctatgaatactttaaagaagctccctgttataagactgcatattctgatacaagaaaacggctgaagtttatggtacaggaatgctgttctcagtctctctattatgaagagctgcattcgtatcatattgtgccttatgcttcggagaatgccatttatgaaatgggctacactagcagccacttggagcaaaattctcagttgcttatttataaaatgaattaaagtaactgttaagtccattgatactttgtttctaaatgcttgaactgtttatagtgaagatgttaatataaggcactcattaccagtgcacttgatatcaaagatgagatgcatgctgaactgattggagagagcaatggttattactcagcagtccttagaatcatcaaattgaatagaaaatatgttcacatatgataaagcggtcaattagtgctttagaagcaaagattttttttaaacataagatgtgtaggaaggggcctacgttaaacaattacacagatgaaaaattttcttttatgccttgatttccaaattctgccactcttactggaaagtaatgaaagtaacagattaaattgataatgccatgtccctgaggatgaagggtggaacacatttaattttctgtaaatgatatgaggaagggctggttctttctgaagtgctttgacttgtcaagcattgtgccaaataattgacaccattctccttttaccattagtagcaattcgagatggggcaaagacactgcaactaaactgctgaatgtaacaaccagattactccaaactgatccattgtactattttgcggggagggcttagacttttctctttaaaagtgaattttaacgaaatagccttgcagatgggcttatctataagttctacaggttggttaaaatttgtggtgggcctttagttagccgtttacattttatttgtttttttttataggctgtgaagctcaggaaaagggtaggcaggtaaaatttgtttttaatgagttgatactttttagaaaccttatctgcaaaaattaatgagaacaacaaattccacatgatgttatttcttcatctagctaagagtacatttaaggctgcctggatgaaactttgcactgatttttgtataatagttgatcattcactatttgacaaattgtttcagaatgcctttggtggtgaagtttagataagtccctatgttttgcaattttacagataattatttaacaagttggatagattcatgaaattgtttgaagtggttcatactgttctttcaggtttgagtgagatgtcagatttcagtgtctgaagttttgtcctatggagcatatcatttaaagaattgtcattaactgataaaacagattggaaaaactaggtgccaaaggtgtatttaagaaaataccaaagactcaaagatgagtgttaggaagactatgataatgaagataagaatctaaagtaaggattgcataggacatagaagaacattgttaaaggggtttggaatgatttgcttactaatgtactttcagaacactttatacataataatggtaatcaagggcactgctttaaatgaagatactacagacctttaggaatcatatgccttggaaaacaatctatgtatggtgacttgtcaacaaagtatcttccctagttggatgccaacttgtaaccaagaagactttcttctattcaagagaaatttggttttagttttgatttaatacttggtccctctaattaatcactggggtgattaacatgaattctgttggtataaagagtattggttccctaattagcctgcattgttgaagaccacatagatgtattactgataagactatgaggctcatgtttaattactcaatcaaaattaggaagaaatgctttggaagaaactaaaaaattacaatttaggttaatttttaaaggcaatttagtatacatgatgagctagctttgaaatacagatttaaatgtttaaaaattaatttgagggcaagatttggtaccaaagtttcaaaaattttatttcactgcttataaaatactttatcagaacacttattttaaaaaataacatcttatttgaaaaactccaaatttgatgggatagttacaccatcatacaattttaaaggtagaattagctttctaatactttaaaatattttctgaaatgaacatttcacttggtttaggaccgtgtctgtaagtaaaagacaccaatgctaatagatatgacttacaaaaatgccacatatcgaaattgattgaggattgaaatatatatactttggcattgagaagagaggaagagaaaaaaataaaaaaagtgtgacattgtaatatttattgtatttaataaatcttgaagaaagaactcttgagcaatgaaccagtgacagatataaaagcctgttttatttgatgacatcattaactgagttttctcatctatacattcatacatcgagaaggaactgtcttaaaaaccagtgtttctttttttttttaagttctagcgtacatgtgcagaatgtgcaggtttgttatataggtatacacgtgccatggtggtttgctgcacccatcaacctgtcatctacattaggtatttctcctaatgctatccctccccagtgatatttgttaatatgcttttttaaaaaagtgtctgccttgaaactggtaattaaaaaatatctcctagggcatttaattatttttcccaataaacaactcatagat

SEQ ID NO: 8481 - protein, 71 aa, Homo sapiens
MTSLTEFSHLYIHTSRRNCLKNQCFFFFLSSSVHVQNVQVCYIGIHVPWWFAAPINLSSTLGISPNAIPPQ

SEQ ID NO: 8482 - DNA, 6550 bp, Homo sapiens
agaagatgatgagatccgtaagcatacatccatgtagaaaaggtgcagttaaacatggccctttaaagaaatgctgtcttcaaagaaaaagtagcatttggcgatttcaaatcttgtgagaaagaatgtgcattccaaagaaagacgggatctcaggtaaccattcatgagcctgaggctgtgagaaatgctcgctgtgcaaaggggaactctcaccagattttctgaaactgttctagaaatacacttttcggattgattcagcattaccagcttatccaacaaaagtattaacatatacattaacaacgtcgaaagtagcctactttaagagaaaatatgcagaagaagaagatttacatcaagattaccatgggtattttccaaaacacctgatattacctgaggacagaacttgcattctcaaactttctctggagaagctcaggtttcttgaagacccagaaacctacttaagaaggtctgtgttaattaacaatttgctgaggaagatacatctagagacggagaaagagagctatgaatactttaaagaagctccctgttataagactgcatattctgatacaagaaaacggctgaagtttatggtacaggaatgctgttctcagtctctctattatgaagagctgcattcgtatcatattgtgccttatgcttcggagaatgccatttatgaaatgggctacactagcagccacttggagcaaaattctcagttgcttatttataaaatgaattaaagtaactgttaagtccattgatactttgtttctaaatgcttgaactgtttatagtgaagatgttaatataaggcactcattaccagtgcacttgatatcaaagatgagatgcatgctgaactgattggagagagcaatggttattactcagcagtccttagaatcatcaaattgaatagaaaatatgttcacatatgataaagcggtcaattagtgctttagaagcaaagattttttttaaacataagatgtgtaggaaggggcctacgttaaacaattacacagatgaaaaattttcttttatgccttgatttccaaattctgccactcttactggaaagtaatgaaagtaacagattaaattgataatgccatgtccctgaggatgaagggtggaacacatttaattttctgtaaatgatatgaggaagggctggttctttctgaagtgctttgacttgtcaagcattgtgccaaataattgacaccattctccttttaccattagtagcaattcgagatggggcaaagacactgcaactaaactgctgaatgtaacaaccagattactccaaactgatccattgtactattttgcggggagggcttagacttttctctttaaaagtgaattttaacgaaatagccttgcagatgggcttatctataagttctacaggttggttaaaatttgtggtgggcctttagttagccgtttacattttatttgtttttttttataggctgtgaagctcaggaaaagggtaggcaggtaaaatttgtttttaatgagttgatactttttagaaaccttatctgcaaaaattaatgagaacaacaaattccacatgatgttatttcttcatctagctaagagtacatttaaggctgcctggatgaaactttgcactgatttttgtataatagttgatcattcactatttgacaaattgtttcagaatgcctttggtggtgaagtttagataagtccctatgttttgcaattttacagataattatttaacaagttggatagattcatgaaattgtttgaagtggttcatactgttctttcaggtttgagtgagatgtcagatttcagtgtctgaagttttgtcctatggagcatatcatttaaagaattgtcattaactgataaaacagattggaaaaactaggtgccaaaggtgtatttaagaaaataccaaagactcaaagatgagtgttaggaagactatgataatgaagataagaatctaaagtaaggattgcataggacatagaagaacattgttaaaggggtttggaatgatttgcttactaatgtactttcagaacactttatacataataatggtaatcaagggcactgctttaaatgaagatactacagacctttaggaatcatatgccttggaaaacaatctatgtatggtgacttgtcaacaaagtatcttccctagttggatgccaacttgtaaccaagaagactttcttctattcaagagaaatttggttttagttttgatttaatacttggtccctctaattaatcactggggtgattaacatgaattctgttggtataaagagtattggttccctaattagcctgcattgttgaagaccacatagatgtattactgataagactatgaggctcatgtttaattactcaatcaaaattaggaagaaatgctttggaagaaactaaaaaattacaatttaggttaatttttaaaggcaatttagtatacatgatgagctagctttgaaatacagatttaaatgtttaaaaattaatttgagggcaagatttggtaccaaagtttcaaaaattttatttcactgcttataaaatactttatcagaacacttattttaaaaaataacatcttatttgaaaaactccaaatttgatgggatagttacaccatcatacaattttaaaggtagaattagctttctaatactttaaaatattttctgaaatgaacatttcacttggtttaggaccgtgtctgtaagtaaaagacaccaatgctaatagatatgacttacaaaaatgccacatatcgaaattgattgaggattgaaatatatatactttggcattgagaagagaggaagagaaaaaaataaaaaaagtgtgacattgtaatatttattgtatttaataaatcttgaagaaagaactcttgagcaatgaaccagtgacagatataaaagcctgttttatttgatgacatcattaactgagttttctcatctatacattcatacatcgagaaggaactgtcttaaaaaccagtgtttctttttttttttaagttctagcgtacatgtgcagaatgtgcaggtttgttatataggtatacacgtgccatggtggtttgctgcacccatcaacctgtcatctacattaggtatttctcctaatgctatccctccccagtgatatttgttaatatgcttttttaaaaaagtgtctgccttgaaactggtaattaaaaaatatctcctagggcatttaattatttttcccaataaacaactcatagataacgggttgactaatgttatctttatttagaaaatttgtatgtaaactgtgtaaacttgtctgagttaaccaatagactaccggggttttagcatggtaaactgatatacagggagacccaaatacaggcttgctttgctgactacccagcgtgctttattacaggagatgcaaaaggtggaagaccagttacacctttttttttttttttttaaaacctggacatcctttctctggtgacaagagccatccttatggtaaggaaggtgagatagaaaatggagaacctttggtaatgttgatctttcttgtgggtgtccacctagcctaaaagccaagtgaagaagaacataaaaaagcagaagaggaaaaatgaagaaaagaggaaaaagagggtggggccagagaaataaagagtaggattagtaagtgaaagaaaaagttgctttgttgtgtggggggggtgttcttgcttgctatactcaattttgctttcccgtgtctgctgtacacaaaacacctgatctctgcaatgtattgctcctttctttcattcacctgtgatgcataagactagattattttcggcatatctactgtttgcaaagtgttactactgaaaaatatccctgaaactgagctctttgggtggataagcaaaggaaaaatagaaaataattaaggtaagggaaaggctaaaggataagcctgtgtataaatgggaaatggataagctcaaatgcattatctggtttcaatgtaacacccaagatttaacaaactcagtgctagaagacttgaaaataagtgtaatttaccaccatctattgagcagctattatgagccaggcactgtgctagggctggggatacataagtgaataatgcacagtcccagaactcagattatttggttttgttttaccaaatccaaatgcagtacctgcatttctcttttccaaactgagatggctatcaaacatgtctttcagaaagtgtttgcaggtgagaagatgcgcaaggtgaaggaaagttttcctgacccagatcttagaaggaaaggagaggatacattttgctttgtggcatatttattgtgggcaaaaagctactattgcctaagggaagtacggctgaccttagcccatccctggggcatatcttgtgcgtgtggtggggagacaaatcaggtagggaacaattccttctcgccttacctctctagcttccatgttcttttatggaacaaatcagattaatactaatgttaaggagagctttaaaggagaaagagaatcaataaatcacagcctgaaagttgtgtatgttgtgtgcaagctcagaggggcagtcttcttcaatttgccttgtgctggtgaattgcttgaatgaacttcggtatttcttaacaccaggtactggagcccaccttctttctctccctctggtttcctctttaaatcacagcctgaccccagtctttatagtccattgtaagtggaagttatagctctattcttcacccacaccttgctccctatcattgatacttagaagaaagtaacaatttgcagtactggctgaactcctttgggaaagtttctggagtgtatcaaataagaattcatcatagtaacatggtcgttactggctgaacaaaattctttttgagactattgtacttagtcattaaataattgtttactaaggcaattttcatgtttctggaattcagtgtaatagttaacagctgtatatgtctcacaaaagaaactacttaggttggaaacaatggaaggttgtgtataattaattcaatcaggtcatgaatatttatgtaacatatggcattttaatttatatgttcccattctcatacttcattactatacagcagcaacaagataaatttcaggttttttgtttttttattaagtgggccatgtctaaaagttgtcacattcctggttgaatattatggacaaaatttccccattaaagtagttttgtctttctcaaggattatcctttagggttgggtggattaaaaacattacattagtgcttcttgagcatacaagtcactagggatcttgtgaaaatacagattccttttagtaggtttgggatgaggaatgaaggtcttcatctctcaaatctcccaggtgatgtggatgctgccagtccatcgaccacactttgagttgggagattctacatcttttgagaaatatccacactgaagcctatactcttaaactttcaaagactctgtgttcatgtctgtgttctgcaagaattttttcttttaagaaataaactgcataaagtaaaatcagaaaaccataacactggttttccaaatttgccacaaatactgtaatactctgtagagtaaaatgcaaagattattcctgttacaagttttctctgtatcaagtgcaggaaaggaacatgggtagagtcatgtaccattcttatcagtcaggagatgacacgtggtaaatttctcttcttgattttcctcttgattatactcacataagggagctccatttggtaacaaagatgaaattctgttcacagttaacaagaatttagcaacttcttgcttggcaaaatctgagacaaccttacaaaaacatcctacattaaattcagaattttgggtagctgcataagctgaagattatggaaaacctgagctgaaaatggcacctggatctgtaacttcttgtcttgaactcttttttgagctttattctgtgagagatcttcccctacagtgattttttctgtttctcctcagtcgctggggtctcagtaaggggtggaggattggtgtaaatgagacagtcacataaattgtctaatttgagcatgccaagtgatttttgtcagcctcttttggtcataaaattttggtatagctattgtgaaatatagtgtcataaatttgtcataagccattaatgaaggaagagaagcagaaatttatttctgtgggaatgcactcaaatatcaagcagatggtgttctacaacatttatttgggaaaatgtgtatctgttacataatctgaaatatgtctttttcacatttaaaaatatttgggtcatgatttagagtttttattggattgttttttaaactgagaggaagaagaaaggtaattgtattttaaaacatttgacatgttactaataaaattttatttctggtg

SEQ ID NO: 8483 - protein, 124 aa, Homo sapiens
MHSPRTQIIWFCFTKSKCSTCISLFQTEMAIKHVFQKVFAGEKMRKVKESFPDPDLRRKGEDTFCFVAYLLWAKSYYCLREVRLTLAHPWGISCACGGETNQVGNNSFSPYLSSFHVLLWNKSD

SEQ ID NO: 8484 - DNA, 937 bp, Homo sapiens
agcatacatccatgtagaaaaggtgcagttaaacatggccctttaaagaaatgctgtcttcaaagaaaaagtagcatttggcgatttcaaatcttgtgagaaagaatgtgcattccaaagaaagacggggttcgtgttttgagctaactgctggtttgttactttagagggaatacttcctgaaattatataaaatctggcattaaaacttaagaatgactctgatttttttaaaaaaatatcagcctactgataatcttccaaaaataatctcccaagtaaataactgatctcaggtaaccattcatgagcctgaggctgtgagaaatgctcgctgtgcaaaggggaactctcaccagattttctgaaactgttctagaaatacacttttcggattgattcagcattaccagcttatccaacaaaagtattaacatatacattaacaacgtcgaaagtagcctactttaagagaaaatatgcagaagaagaagatttacatcaagattaccatgggtattttccaaaacacctgatattacctgaggacagaacttgcattctcaaactttctctggagaagctcaggtttcttgaagacccagaaacctacttaagaaggtctgtgttaattaacaatttgctgaggaagatacatctagagacggagaaagagagctatgaatactttaaagaagctccctgttataagactgcatattctgatacaagaaaacggctgaagtttatggtacaggaatgctgttctcagtctctctattatgaagagctgcattcgtatcatattgtgccttatgcttcggagaatgccatttatgaaatgggctacactagcagccacttggagcaaaattctcagttgcttatttataaaatgaattaaagtaactgttaagtccattgatactttgtttct

SEQ ID NO: 8485 - protein, 51 aa, Homo sapiens; identical to SEQ ID NO: 8479

SEQ ID NO: 8486 - DNA, 3467 bp, Homo sapiens
agcatacatccatgtagaaaaggtgcagttaaacatggccctttaaagaaatgctgtcttcaaagaaaaagtagcatttggcgatttcaaatcttgtgagaaagaatgtgcattccaaagaaagacggggttcgtgttttgagctaactgctggtttgttactttagagggaatacttcctgaaattatataaaatctggcattaaaacttaagaatgactctgatttttttaaaaaaatatcagcctactgataatcttccaaaaataatctcccaagtaaataactgatctcaggtaaccattcatgagcctgaggctgtgagaaatgctcgctgtgcaaaggggaactctcaccagattttctgaaactgttctagaaatacacttttcggattgattcagcattaccagcttatccaacaaaagtattaacatatacattaacaacgtcgaaagtagcctactttaagagaaaatatgcagaagaagaagatttacatcaagattaccatgggtattttccaaaacacctgatattacctgaggacagaacttgcattctcaaactttctctggagaagctcaggtttcttgaagacccagaaacctacttaagaaggtctgtgttaattaacaatttgctgaggaagatacatctagagacggagaaagagagctatgaatactttaaagaagctccctgttataagactgcatattctgatacaagaaaacggctgaagtttatggtacaggaatgctgttctcagtctctctattatgaagagctgcattcgtatcatattgtgccttatgcttcggagaatgccatttatgaaatgggctacactagcagccacttggagcaaaattctcagttgcttatttataaaatgaattaaagtaactgttaagtccattgatactttgtttctaaatgcttgaactgtttatagtgaagatgttaatataaggcactcattaccagtgcacttgatatcaaagatgagatgcatgctgaactgattggagagagcaatggttattactcagcagtccttagaatcatcaaattgaatagaaaatatgttcacatatgataaagcggtcaattagtgctttagaagcaaagattttttttaaacataagatgtgtaggaaggggcctacgttaaacaattacacagatgaaaaattttcttttatgccttgatttccaaattctgccactcttactggaaagtaatgaaagtaacagattaaattgataatgccatgtccctgaggatgaagggtggaacacatttaattttctgtaaatgatatgaggaagggctggttctttctgaagtgctttgacttgtcaagcattgtgccaaataattgacaccattctccttttaccattagtagcaattcgagatggggcaaagacactgcaactaaactgctgaatgtaacaaccagattactccaaactgatccattgtactattttgcggggagggcttagacttttctctttaaaagtgaattttaacgaaatagccttgcagatgggcttatctataagttctacaggttggttaaaatttgtggtgggcctttagttagccgtttacattttatttgtttttttttataggctgtgaagctcaggaaaagggtaggcaggtaaaatttgtttttaatgagttgatactttttagaaaccttatctgcaaaaattaatgagaacaacaaattccacatgatgttatttcttcatctagctaagagtacatttaaggctgcctggatgaaactttgcactgatttttgtataatagttgatcattcactatttgacaaattgtttcagaatgcctttggtggtgaagtttagataagtccctatgttttgcaattttacagataattatttaacaagttggatagattcatgaaattgtttgaagtggttcatactgttctttcaggtttgagtgagatgtcagatttcagtgtctgaagttttgtcctatggagcatatcatttaaagaattgtcattaactgataaaacagattggaaaaactaggtgccaaaggtgtatttaagaaaataccaaagactcaaagatgagtgttaggaagactatgataatgaagataagaatctaaagtaaggattgcataggacatagaagaacattgttaaaggggtttggaatgatttgcttactaatgtactttcagaacactttatacataataatggtaatcaagggcactgctttaaatgaagatactacagacctttaggaatcatatgccttggaaaacaatctatgtatggtgacttgtcaacaaagtatcttccctagttggatgccaacttgtaaccaagaagactttcttctattcaagagaaatttggttttagttttgatttaatacttggtccctctaattaatcactggggtgattaacatgaattctgttggtataaagagtattggttccctaattagcctgcattgttgaagaccacatagatgtattactgataagactatgaggctcatgtttaattactcaatcaaaattaggaagaaatgctttggaagaaactaaaaaattacaatttaggttaatttttaaaggcaatttagtatacatgatgagctagctttgaaatacagatttaaatgtttaaaaattaatttgagggcaagatttggtaccaaagtttcaaaaattttatttcactgcttataaaatactttatcagaacacttattttaaaaaataacatcttatttgaaaaactccaaatttgatgggatagttacaccatcatacaattttaaaggtagaattagctttctaatactttaaaatattttctgaaatgaacatttcacttggtttaggaccgtgtctgtaagtaaaagacaccaatgctaatagatatgacttacaaaaatgccacatatcgaaattgattgaggattgaaatatatatactttggcattgagaagagaggaagagaaaaaaataaaaaaagtgtgacattgtaatatttattgtatttaataaatcttgaagaaagaactcttgagcaatgaaccagtgacagatataaaagcctgttttatttgatgacatcattaactgagttttctcatctatacattcatacatcgagaaggaactgtcttaaaaaccagtgtttctttttttttttaagttctagcgtacatgtgcagaatgtgcaggtttgttatataggtatacacgtgccatggtggtttgctgcacccatcaacctgtcatctacattaggtatttctcctaatgctatccctccccagtgatatttgttaatatgcttttttaaaaaagtgtctgccttgaaactggtaattaaaaaatatctcctagggcatttaattatttttcccaataaacaactcatagat

SEQ ID NO: 8487 - protein, 71 aa, Homo sapiens; identical to SEQ ID NO: 8481

SEQ ID NO: 8488 - DNA, 6690 bp, Homo sapiens
agcatacatccatgtagaaaaggtgcagttaaacatggccctttaaagaaatgctgtcttcaaagaaaaagtagcatttggcgatttcaaatcttgtgagaaagaatgtgcattccaaagaaagacggggttcgtgttttgagctaactgctggtttgttactttagagggaatacttcctgaaattatataaaatctggcattaaaacttaagaatgactctgatttttttaaaaaaatatcagcctactgataatcttccaaaaataatctcccaagtaaataactgatctcaggtaaccattcatgagcctgaggctgtgagaaatgctcgctgtgcaaaggggaactctcaccagattttctgaaactgttctagaaatacacttttcggattgattcagcattaccagcttatccaacaaaagtattaacatatacattaacaacgtcgaaagtagcctactttaagagaaaatatgcagaagaagaagatttacatcaagattaccatgggtattttccaaaacacctgatattacctgaggacagaacttgcattctcaaactttctctggagaagctcaggtttcttgaagacccagaaacctacttaagaaggtctgtgttaattaacaatttgctgaggaagatacatctagagacggagaaagagagctatgaatactttaaagaagctccctgttataagactgcatattctgatacaagaaaacggctgaagtttatggtacaggaatgctgttctcagtctctctattatgaagagctgcattcgtatcatattgtgccttatgcttcggagaatgccatttatgaaatgggctacactagcagccacttggagcaaaattctcagttgcttatttataaaatgaattaaagtaactgttaagtccattgatactttgtttctaaatgcttgaactgtttatagtgaagatgttaatataaggcactcattaccagtgcacttgatatcaaagatgagatgcatgctgaactgattggagagagcaatggttattactcagcagtccttagaatcatcaaattgaatagaaaatatgttcacatatgataaagcggtcaattagtgctttagaagcaaagattttttttaaacataagatgtgtaggaaggggcctacgttaaacaattacacagatgaaaaattttcttttatgccttgatttccaaattctgccactcttactggaaagtaatgaaagtaacagattaaattgataatgccatgtccctgaggatgaagggtggaacacatttaattttctgtaaatgatatgaggaagggctggttctttctgaagtgctttgacttgtcaagcattgtgccaaataattgacaccattctccttttaccattagtagcaattcgagatggggcaaagacactgcaactaaactgctgaatgtaacaaccagattactccaaactgatccattgtactattttgcggggagggcttagacttttctctttaaaagtgaattttaacgaaatagccttgcagatgggcttatctataagttctacaggttggttaaaatttgtggtgggcctttagttagccgtttacattttatttgtttttttttataggctgtgaagctcaggaaaagggtaggcaggtaaaatttgtttttaatgagttgatactttttagaaaccttatctgcaaaaattaatgagaacaacaaattccacatgatgttatttcttcatctagctaagagtacatttaaggctgcctggatgaaactttgcactgatttttgtataatagttgatcattcactatttgacaaattgtttcagaatgcctttggtggtgaagtttagataagtccctatgttttgcaattttacagataattatttaacaagttggatagattcatgaaattgtttgaagtggttcatactgttctttcaggtttgagtgagatgtcagatttcagtgtctgaagttttgtcctatggagcatatcatttaaagaattgtcattaactgataaaacagattggaaaaactaggtgccaaaggtgtatttaagaaaataccaaagactcaaagatgagtgttaggaagactatgataatgaagataagaatctaaagtaaggattgcataggacatagaagaacattgttaaaggggtttggaatgatttgcttactaatgtactttcagaacactttatacataataatggtaatcaagggcactgctttaaatgaagatactacagacctttaggaatcatatgccttggaaaacaatctatgtatggtgacttgtcaacaaagtatcttccctagttggatgccaacttgtaaccaagaagactttcttctattcaagagaaatttggttttagttttgatttaatacttggtccctctaattaatcactggggtgattaacatgaattctgttggtataaagagtattggttccctaattagcctgcattgttgaagaccacatagatgtattactgataagactatgaggctcatgtttaattactcaatcaaaattaggaagaaatgctttggaagaaactaaaaaattacaatttaggttaatttttaaaggcaatttagtatacatgatgagctagctttgaaatacagatttaaatgtttaaaaattaatttgagggcaagatttggtaccaaagtttcaaaaattttatttcactgcttataaaatactttatcagaacacttattttaaaaaataacatcttatttgaaaaactccaaatttgatgggatagttacaccatcatacaattttaaaggtagaattagctttctaatactttaaaatattttctgaaatgaacatttcacttggtttaggaccgtgtctgtaagtaaaagacaccaatgctaatagatatgacttacaaaaatgccacatatcgaaattgattgaggattgaaatatatatactttggcattgagaagagaggaagagaaaaaaataaaaaaagtgtgacattgtaatatttattgtatttaataaatcttgaagaaagaactcttgagcaatgaaccagtgacagatataaaagcctgttttatttgatgacatcattaactgagttttctcatctatacattcatacatcgagaaggaactgtcttaaaaaccagtgtttctttttttttttaagttctagcgtacatgtgcagaatgtgcaggtttgttatataggtatacacgtgccatggtggtttgctgcacccatcaacctgtcatctacattaggtatttctcctaatgctatccctccccagtgatatttgttaatatgcttttttaaaaaagtgtctgccttgaaactggtaattaaaaaatatctcctagggcatttaattatttttcccaataaacaactcatagataacgggttgactaatgttatctttatttagaaaatttgtatgtaaactgtgtaaacttgtctgagttaaccaatagactaccggggttttagcatggtaaactgatatacagggagacccaaatacaggcttgctttgctgactacccagcgtgctttattacaggagatgcaaaaggtggaagaccagttacacctttttttttttttttttaaaacctggacatcctttctctggtgacaagagccatccttatggtaaggaaggtgagatagaaaatggagaacctttggtaatgttgatctttcttgtgggtgtccacctagcctaaaagccaagtgaagaagaacataaaaaagcagaagaggaaaaatgaagaaaagaggaaaaagagggtggggccagagaaataaagagtaggattagtaagtgaaagaaaaagttgctttgttgtgtggggggggtgttcttgcttgctatactcaattttgctttcccgtgtctgctgtacacaaaacacctgatctctgcaatgtattgctcctttctttcattcacctgtgatgcataagactagattattttcggcatatctactgtttgcaaagtgttactactgaaaaatatccctgaaactgagctctttgggtggataagcaaaggaaaaatagaaaataattaaggtaagggaaaggctaaaggataagcctgtgtataaatgggaaatggataagctcaaatgcattatctggtttcaatgtaacacccaagatttaacaaactcagtgctagaagacttgaaaataagtgtaatttaccaccatctattgagcagctattatgagccaggcactgtgctagggctggggatacataagtgaataatgcacagtcccagaactcagattatttggttttgttttaccaaatccaaatgcagtacctgcatttctcttttccaaactgagatggctatcaaacatgtctttcagaaagtgtttgcaggtgagaagatgcgcaaggtgaaggaaagttttcctgacccagatcttagaaggaaaggagaggatacattttgctttgtggcatatttattgtgggcaaaaagctactattgcctaagggaagtacggctgaccttagcccatccctggggcatatcttgtgcgtgtggtggggagacaaatcaggtagggaacaattccttctcgccttacctctctagcttccatgttcttttatggaacaaatcagattaatactaatgttaaggagagctttaaaggagaaagagaatcaataaatcacagcctgaaagttgtgtatgttgtgtgcaagctcagaggggcagtcttcttcaatttgccttgtgctggtgaattgcttgaatgaacttcggtatttcttaacaccaggtactggagcccaccttctttctctccctctggtttcctctttaaatcacagcctgaccccagtctttatagtccattgtaagtggaagttatagctctattcttcacccacaccttgctccctatcattgatacttagaagaaagtaacaatttgcagtactggctgaactcctttgggaaagtttctggagtgtatcaaataagaattcatcatagtaacatggtcgttactggctgaacaaaattctttttgagactattgtacttagtcattaaataattgtttactaaggcaattttcatgtttctggaattcagtgtaatagttaacagctgtatatgtctcacaaaagaaactacttaggttggaaacaatggaaggttgtgtataattaattcaatcaggtcatgaatatttatgtaacatatggcattttaatttatatgttcccattctcatacttcattactatacagcagcaacaagataaatttcaggttttttgtttttttattaagtgggccatgtctaaaagttgtcacattcctggttgaatattatggacaaaatttccccattaaagtagttttgtctttctcaaggattatcctttagggttgggtggattaaaaacattacattagtgcttcttgagcatacaagtcactagggatcttgtgaaaatacagattccttttagtaggtttgggatgaggaatgaaggtcttcatctctcaaatctcccaggtgatgtggatgctgccagtccatcgaccacactttgagttgggagattctacatcttttgagaaatatccacactgaagcctatactcttaaactttcaaagactctgtgttcatgtctgtgttctgcaagaattttttcttttaagaaataaactgcataaagtaaaatcagaaaaccataacactggttttccaaatttgccacaaatactgtaatactctgtagagtaaaatgcaaagattattcctgttacaagttttctctgtatcaagtgcaggaaaggaacatgggtagagtcatgtaccattcttatcagtcaggagatgacacgtggtaaatttctcttcttgattttcctcttgattatactcacataagggagctccatttggtaacaaagatgaaattctgttcacagttaacaagaatttagcaacttcttgcttggcaaaatctgagacaaccttacaaaaacatcctacattaaattcagaattttgggtagctgcataagctgaagattatggaaaacctgagctgaaaatggcacctggatctgtaacttcttgtcttgaactcttttttgagctttattctgtgagagatcttcccctacagtgattttttctgtttctcctcagtcgctggggtctcagtaaggggtggaggattggtgtaaatgagacagtcacataaattgtctaatttgagcatgccaagtgatttttgtcagcctcttttggtcataaaattttggtatagctattgtgaaatatagtgtcataaatttgtcataagccattaatgaaggaagagaagcagaaatttatttctgtgggaatgcactcaaatatcaagcagatggtgttctacaacatttatttgggaaaatgtgtatctgttacataatctgaaatatgtctttttcacatttaaaaatatttgggtcatgatttagagtttttattggattgttttttaaactgagaggaagaagaaaggtaattgtattttaaaacatttgacatgttactaataaaattttatttctggtg

SEQ ID NO: 8489 - protein, 124 aa, Homo sapiens; identical to SEQ ID NO: 8483

SEQ ID NO: 8490 - DNA, 702 bp, Homo sapiens
gaaccagttcatgtcagtgcagtcctgactcgcccgatgttatttgtgtctgtctccttgtttcaagatctcaggtaaccattcatgagcctgaggctgtgagaaatgctcgctgtgcaaaggggaactctcaccagattttctgaaactgttctagaaatacacttttcggattgattcagcattaccagcttatccaacaaaagtattaacatatacattaacaacgtcgaaagtagcctactttaagagaaaatatgcagaagaagaagatttacatcaagattaccatgggtattttccaaaacacctgatattacctgaggacagaacttgcattctcaaactttctctggagaagctcaggtttcttgaagacccagaaacctacttaagaaggtctgtgttaattaacaatttgctgaggaagatacatctagagacggagaaagagagctatgaatactttaaagaagctccctgttataagactgcatattctgatacaagaaaacggctgaagtttatggtacaggaatgctgttctcagtctctctattatgaagagctgcattcgtatcatattgtgccttatgcttcggagaatgccatttatgaaatgggctacactagcagccacttggagcaaaattctcagttgcttatttataaaatgaattaaagtaactgttaagtccattg

SEQ ID NO: 8491 - protein, 51 aa, Homo sapiens; identical to SEQ ID NO: 8479

SEQ ID NO: 8492 - DNA, 3245 bp, Homo sapiens
gaaccagttcatgtcagtgcagtcctgactcgcccgatgttatttgtgtctgtctccttgtttcaagatctcaggtaaccattcatgagcctgaggctgtgagaaatgctcgctgtgcaaaggggaactctcaccagattttctgaaactgttctagaaatacacttttcggattgattcagcattaccagcttatccaacaaaagtattaacatatacattaacaacgtcgaaagtagcctactttaagagaaaatatgcagaagaagaagatttacatcaagattaccatgggtattttccaaaacacctgatattacctgaggacagaacttgcattctcaaactttctctggagaagctcaggtttcttgaagacccagaaacctacttaagaaggtctgtgttaattaacaatttgctgaggaagatacatctagagacggagaaagagagctatgaatactttaaagaagctccctgttataagactgcatattctgatacaagaaaacggctgaagtttatggtacaggaatgctgttctcagtctctctattatgaagagctgcattcgtatcatattgtgccttatgcttcggagaatgccatttatgaaatgggctacactagcagccacttggagcaaaattctcagttgcttatttataaaatgaattaaagtaactgttaagtccattgatactttgtttctaaatgcttgaactgtttatagtgaagatgttaatataaggcactcattaccagtgcacttgatatcaaagatgagatgcatgctgaactgattggagagagcaatggttattactcagcagtccttagaatcatcaaattgaatagaaaatatgttcacatatgataaagcggtcaattagtgctttagaagcaaagattttttttaaacataagatgtgtaggaaggggcctacgttaaacaattacacagatgaaaaattttcttttatgccttgatttccaaattctgccactcttactggaaagtaatgaaagtaacagattaaattgataatgccatgtccctgaggatgaagggtggaacacatttaattttctgtaaatgatatgaggaagggctggttctttctgaagtgctttgacttgtcaagcattgtgccaaataattgacaccattctccttttaccattagtagcaattcgagatggggcaaagacactgcaactaaactgctgaatgtaacaaccagattactccaaactgatccattgtactattttgcggggagggcttagacttttctctttaaaagtgaattttaacgaaatagccttgcagatgggcttatctataagttctacaggttggttaaaatttgtggtgggcctttagttagccgtttacattttatttgtttttttttataggctgtgaagctcaggaaaagggtaggcaggtaaaatttgtttttaatgagttgatactttttagaaaccttatctgcaaaaattaatgagaacaacaaattccacatgatgttatttcttcatctagctaagagtacatttaaggctgcctggatgaaactttgcactgatttttgtataatagttgatcattcactatttgacaaattgtttcagaatgcctttggtggtgaagtttagataagtccctatgttttgcaattttacagataattatttaacaagttggatagattcatgaaattgtttgaagtggttcatactgttctttcaggtttgagtgagatgtcagatttcagtgtctgaagttttgtcctatggagcatatcatttaaagaattgtcattaactgataaaacagattggaaaaactaggtgccaaaggtgtatttaagaaaataccaaagactcaaagatgagtgttaggaagactatgataatgaagataagaatctaaagtaaggattgcataggacatagaagaacattgttaaaggggtttggaatgatttgcttactaatgtactttcagaacactttatacataataatggtaatcaagggcactgctttaaatgaagatactacagacctttaggaatcatatgccttggaaaacaatctatgtatggtgacttgtcaacaaagtatcttccctagttggatgccaacttgtaaccaagaagactttcttctattcaagagaaatttggttttagttttgatttaatacttggtccctctaattaatcactggggtgattaacatgaattctgttggtataaagagtattggttccctaattagcctgcattgttgaagaccacatagatgtattactgataagactatgaggctcatgtttaattactcaatcaaaattaggaagaaatgctttggaagaaactaaaaaattacaatttaggttaatttttaaaggcaatttagtatacatgatgagctagctttgaaatacagatttaaatgtttaaaaattaatttgagggcaagatttggtaccaaagtttcaaaaattttatttcactgcttataaaatactttatcagaacacttattttaaaaaataacatcttatttgaaaaactccaaatttgatgggatagttacaccatcatacaattttaaaggtagaattagctttctaatactttaaaatattttctgaaatgaacatttcacttggtttaggaccgtgtctgtaagtaaaagacaccaatgctaatagatatgacttacaaaaatgccacatatcgaaattgattgaggattgaaatatatatactttggcattgagaagagaggaagagaaaaaaataaaaaaagtgtgacattgtaatatttattgtatttaataaatcttgaagaaagaactcttgagcaatgaaccagtgacagatataaaagcctgttttatttgatgacatcattaactgagttttctcatctatacattcatacatcgagaaggaactgtcttaaaaaccagtgtttctttttttttttaagttctagcgtacatgtgcagaatgtgcaggtttgttatataggtatacacgtgccatggtggtttgctgcacccatcaacctgtcatctacattaggtatttctcctaatgctatccctccccagtgatatttgttaatatgcttttttaaaaaagtgtctgccttgaaactggtaattaaaaaatatctcctagggcatttaattatttttcccaataaacaactcatagat

SEQ ID NO: 8493 - protein, 71 aa, Homo sapiens; identical to SEQ ID NO: 8481

SEQ ID NO: 8494 - DNA, 6468 bp, Homo sapiens
gaaccagttcatgtcagtgcagtcctgactcgcccgatgttatttgtgtctgtctccttgtttcaagatctcaggtaaccattcatgagcctgaggctgtgagaaatgctcgctgtgcaaaggggaactctcaccagattttctgaaactgttctagaaatacacttttcggattgattcagcattaccagcttatccaacaaaagtattaacatatacattaacaacgtcgaaagtagcctactttaagagaaaatatgcagaagaagaagatttacatcaagattaccatgggtattttccaaaacacctgatattacctgaggacagaacttgcattctcaaactttctctggagaagctcaggtttcttgaagacccagaaacctacttaagaaggtctgtgttaattaacaatttgctgaggaagatacatctagagacggagaaagagagctatgaatactttaaagaagctccctgttataagactgcatattctgatacaagaaaacggctgaagtttatggtacaggaatgctgttctcagtctctctattatgaagagctgcattcgtatcatattgtgccttatgcttcggagaatgccatttatgaaatgggctacactagcagccacttggagcaaaattctcagttgcttatttataaaatgaattaaagtaactgttaagtccattgatactttgtttctaaatgcttgaactgtttatagtgaagatgttaatataaggcactcattaccagtgcacttgatatcaaagatgagatgcatgctgaactgattggagagagcaatggttattactcagcagtccttagaatcatcaaattgaatagaaaatatgttcacatatgataaagcggtcaattagtgctttagaagcaaagattttttttaaacataagatgtgtaggaaggggcctacgttaaacaattacacagatgaaaaattttcttttatgccttgatttccaaattctgccactcttactggaaagtaatgaaagtaacagattaaattgataatgccatgtccctgaggatgaagggtggaacacatttaattttctgtaaatgatatgaggaagggctggttctttctgaagtgctttgacttgtcaagcattgtgccaaataattgacaccattctccttttaccattagtagcaattcgagatggggcaaagacactgcaactaaactgctgaatgtaacaaccagattactccaaactgatccattgtactattttgcggggagggcttagacttttctctttaaaagtgaattttaacgaaatagccttgcagatgggcttatctataagttctacaggttggttaaaatttgtggtgggcctttagttagccgtttacattttatttgtttttttttataggctgtgaagctcaggaaaagggtaggcaggtaaaatttgtttttaatgagttgatactttttagaaaccttatctgcaaaaattaatgagaacaacaaattccacatgatgttatttcttcatctagctaagagtacatttaaggctgcctggatgaaactttgcactgatttttgtataatagttgatcattcactatttgacaaattgtttcagaatgcctttggtggtgaagtttagataagtccctatgttttgcaattttacagataattatttaacaagttggatagattcatgaaattgtttgaagtggttcatactgttctttcaggtttgagtgagatgtcagatttcagtgtctgaagttttgtcctatggagcatatcatttaaagaattgtcattaactgataaaacagattggaaaaactaggtgccaaaggtgtatttaagaaaataccaaagactcaaagatgagtgttaggaagactatgataatgaagataagaatctaaagtaaggattgcataggacatagaagaacattgttaaaggggtttggaatgatttgcttactaatgtactttcagaacactttatacataataatggtaatcaagggcactgctttaaatgaagatactacagacctttaggaatcatatgccttggaaaacaatctatgtatggtgacttgtcaacaaagtatcttccctagttggatgccaacttgtaaccaagaagactttcttctattcaagagaaatttggttttagttttgatttaatacttggtccctctaattaatcactggggtgattaacatgaattctgttggtataaagagtattggttccctaattagcctgcattgttgaagaccacatagatgtattactgataagactatgaggctcatgtttaattactcaatcaaaattaggaagaaatgctttggaagaaactaaaaaattacaatttaggttaatttttaaaggcaatttagtatacatgatgagctagctttgaaatacagatttaaatgtttaaaaattaatttgagggcaagatttggtaccaaagtttcaaaaattttatttcactgcttataaaatactttatcagaacacttattttaaaaaataacatcttatttgaaaaactccaaatttgatgggatagttacaccatcatacaattttaaaggtagaattagctttctaatactttaaaatattttctgaaatgaacatttcacttggtttaggaccgtgtctgtaagtaaaagacaccaatgctaatagatatgacttacaaaaatgccacatatcgaaattgattgaggattgaaatatatatactttggcattgagaagagaggaagagaaaaaaataaaaaaagtgtgacattgtaatatttattgtatttaataaatcttgaagaaagaactcttgagcaatgaaccagtgacagatataaaagcctgttttatttgatgacatcattaactgagttttctcatctatacattcatacatcgagaaggaactgtcttaaaaaccagtgtttctttttttttttaagttctagcgtacatgtgcagaatgtgcaggtttgttatataggtatacacgtgccatggtggtttgctgcacccatcaacctgtcatctacattaggtatttctcctaatgctatccctccccagtgatatttgttaatatgcttttttaaaaaagtgtctgccttgaaactggtaattaaaaaatatctcctagggcatttaattatttttcccaataaacaactcatagataacgggttgactaatgttatctttatttagaaaatttgtatgtaaactgtgtaaacttgtctgagttaaccaatagactaccggggttttagcatggtaaactgatatacagggagacccaaatacaggcttgctttgctgactacccagcgtgctttattacaggagatgcaaaaggtggaagaccagttacacctttttttttttttttttaaaacctggacatcctttctctggtgacaagagccatccttatggtaaggaaggtgagatagaaaatggagaacctttggtaatgttgatctttcttgtgggtgtccacctagcctaaaagccaagtgaagaagaacataaaaaagcagaagaggaaaaatgaagaaaagaggaaaaagagggtggggccagagaaataaagagtaggattagtaagtgaaagaaaaagttgctttgttgtgtggggggggtgttcttgcttgctatactcaattttgctttcccgtgtctgctgtacacaaaacacctgatctctgcaatgtattgctcctttctttcattcacctgtgatgcataagactagattattttcggcatatctactgtttgcaaagtgttactactgaaaaatatccctgaaactgagctctttgggtggataagcaaaggaaaaatagaaaataattaaggtaagggaaaggctaaaggataagcctgtgtataaatgggaaatggataagctcaaatgcattatctggtttcaatgtaacacccaagatttaacaaactcagtgctagaagacttgaaaataagtgtaatttaccaccatctattgagcagctattatgagccaggcactgtgctagggctggggatacataagtgaataatgcacagtcccagaactcagattatttggttttgttttaccaaatccaaatgcagtacctgcatttctcttttccaaactgagatggctatcaaacatgtctttcagaaagtgtttgcaggtgagaagatgcgcaaggtgaaggaaagttttcctgacccagatcttagaaggaaaggagaggatacattttgctttgtggcatatttattgtgggcaaaaagctactattgcctaagggaagtacggctgaccttagcccatccctggggcatatcttgtgcgtgtggtggggagacaaatcaggtagggaacaattccttctcgccttacctctctagcttccatgttcttttatggaacaaatcagattaatactaatgttaaggagagctttaaaggagaaagagaatcaataaatcacagcctgaaagttgtgtatgttgtgtgcaagctcagaggggcagtcttcttcaatttgccttgtgctggtgaattgcttgaatgaacttcggtatttcttaacaccaggtactggagcccaccttctttctctccctctggtttcctctttaaatcacagcctgaccccagtctttatagtccattgtaagtggaagttatagctctattcttcacccacaccttgctccctatcattgatacttagaagaaagtaacaatttgcagtactggctgaactcctttgggaaagtttctggagtgtatcaaataagaattcatcatagtaacatggtcgttactggctgaacaaaattctttttgagactattgtacttagtcattaaataattgtttactaaggcaattttcatgtttctggaattcagtgtaatagttaacagctgtatatgtctcacaaaagaaactacttaggttggaaacaatggaaggttgtgtataattaattcaatcaggtcatgaatatttatgtaacatatggcattttaatttatatgttcccattctcatacttcattactatacagcagcaacaagataaatttcaggttttttgtttttttattaagtgggccatgtctaaaagttgtcacattcctggttgaatattatggacaaaatttccccattaaagtagttttgtctttctcaaggattatcctttagggttgggtggattaaaaacattacattagtgcttcttgagcatacaagtcactagggatcttgtgaaaatacagattccttttagtaggtttgggatgaggaatgaaggtcttcatctctcaaatctcccaggtgatgtggatgctgccagtccatcgaccacactttgagttgggagattctacatcttttgagaaatatccacactgaagcctatactcttaaactttcaaagactctgtgttcatgtctgtgttctgcaagaattttttcttttaagaaataaactgcataaagtaaaatcagaaaaccataacactggttttccaaatttgccacaaatactgtaatactctgtagagtaaaatgcaaagattattcctgttacaagttttctctgtatcaagtgcaggaaaggaacatgggtagagtcatgtaccattcttatcagtcaggagatgacacgtggtaaatttctcttcttgattttcctcttgattatactcacataagggagctccatttggtaacaaagatgaaattctgttcacagttaacaagaatttagcaacttcttgcttggcaaaatctgagacaaccttacaaaaacatcctacattaaattcagaattttgggtagctgcataagctgaagattatggaaaacctgagctgaaaatggcacctggatctgtaacttcttgtcttgaactcttttttgagctttattctgtgagagatcttcccctacagtgattttttctgtttctcctcagtcgctggggtctcagtaaggggtggaggattggtgtaaatgagacagtcacataaattgtctaatttgagcatgccaagtgatttttgtcagcctcttttggtcataaaattttggtatagctattgtgaaatatagtgtcataaatttgtcataagccattaatgaaggaagagaagcagaaatttatttctgtgggaatgcactcaaatatcaagcagatggtgttctacaacatttatttgggaaaatgtgtatctgttacataatctgaaatatgtctttttcacatttaaaaatatttgggtcatgatttagagtttttattggattgttttttaaactgagaggaagaagaaaggtaattgtattttaaaacatttgacatgttactaataaaattttatttctggtg

SEQ ID NO: 8495 - protein, 124 aa, Homo sapiens; identical to SEQ ID NO: 8483

SEQ ID NO: 8496 - DNA, 1066 bp, Homo sapiens
gttacctaaatctttcatttacttagaacaccattaaaccatgtgttaggacgatggctacaccataatcatatcatagagtgttttgtctacagatacaccattatttctttaaagtgtaattgggctgccaactattttatgccagtttgattaacctagtgacactaaatgatctctctgtattaggcagtttaactaaaagaatgatgaaaaatttcttttctcctcccattacattccatttcaaatttgggtgtgttttgacattaaatggcatgaaataaaatagtatattggtatttgacttctgaggggctgcataaggaaataaacatgagtatcctatctagaacatctgttttgggtctgaatggtggtattttcctgcctgcaggcttttcaatccagggcagttgtcactgcttcaccacgttgaagggagaataccaatttccaggatcaccagtttatttttatagataaaagttatattataagatactatttgccacaataaaatctaacctttccccaattattttatttgtttagcttatccaacaaaagtattaacatatacattaacaacgtcgaaagtagcctactttaagagaaaatatgcagaagaagaagatttacatcaagattaccatgggtattttccaaaacacctgatattacctgaggacagaacttgcattctcaaactttctctggagaagctcaggtttcttgaagacccagaaacctacttaagaaggtctgtgttaattaacaatttgctgaggaagatacatctagagacggagaaagagagctatgaatactttaaagaagctccctgttataagactgcatattctgatacaagaaaacggctgaagtttatggtacaggaatgctgttctcagtctctctattatgaagagctgcattcgtatcatattgtgccttatgcttcggagaatgccatttatgaaatgggctacactagcagccacttggagcaaaattctcagttgcttatttataaaatgaattaaagtaactgttaagtccattg

SEQ ID NO: 8497 - protein, 51 aa, Homo sapiens; identical to SEQ ID NO: 8479

SEQ ID NO: 8498 - DNA, 3609 bp, Homo sapiens
gttacctaaatctttcatttacttagaacaccattaaaccatgtgttaggacgatggctacaccataatcatatcatagagtgttttgtctacagatacaccattatttctttaaagtgtaattgggctgccaactattttatgccagtttgattaacctagtgacactaaatgatctctctgtattaggcagtttaactaaaagaatgatgaaaaatttcttttctcctcccattacattccatttcaaatttgggtgtgttttgacattaaatggcatgaaataaaatagtatattggtatttgacttctgaggggctgcataaggaaataaacatgagtatcctatctagaacatctgttttgggtctgaatggtggtattttcctgcctgcaggcttttcaatccagggcagttgtcactgcttcaccacgttgaagggagaataccaatttccaggatcaccagtttatttttatagataaaagttatattataagatactatttgccacaataaaatctaacctttccccaattattttatttgtttagcttatccaacaaaagtattaacatatacattaacaacgtcgaaagtagcctactttaagagaaaatatgcagaagaagaagatttacatcaagattaccatgggtattttccaaaacacctgatattacctgaggacagaacttgcattctcaaactttctctggagaagctcaggtttcttgaagacccagaaacctacttaagaaggtctgtgttaattaacaatttgctgaggaagatacatctagagacggagaaagagagctatgaatactttaaagaagctccctgttataagactgcatattctgatacaagaaaacggctgaagtttatggtacaggaatgctgttctcagtctctctattatgaagagctgcattcgtatcatattgtgccttatgcttcggagaatgccatttatgaaatgggctacactagcagccacttggagcaaaattctcagttgcttatttataaaatgaattaaagtaactgttaagtccattgatactttgtttctaaatgcttgaactgtttatagtgaagatgttaatataaggcactcattaccagtgcacttgatatcaaagatgagatgcatgctgaactgattggagagagcaatggttattactcagcagtccttagaatcatcaaattgaatagaaaatatgttcacatatgataaagcggtcaattagtgctttagaagcaaagattttttttaaacataagatgtgtaggaaggggcctacgttaaacaattacacagatgaaaaattttcttttatgccttgatttccaaattctgccactcttactggaaagtaatgaaagtaacagattaaattgataatgccatgtccctgaggatgaagggtggaacacatttaattttctgtaaatgatatgaggaagggctggttctttctgaagtgctttgacttgtcaagcattgtgccaaataattgacaccattctccttttaccattagtagcaattcgagatggggcaaagacactgcaactaaactgctgaatgtaacaaccagattactccaaactgatccattgtactattttgcggggagggcttagacttttctctttaaaagtgaattttaacgaaatagccttgcagatgggcttatctataagttctacaggttggttaaaatttgtggtgggcctttagttagccgtttacattttatttgtttttttttataggctgtgaagctcaggaaaagggtaggcaggtaaaatttgtttttaatgagttgatactttttagaaaccttatctgcaaaaattaatgagaacaacaaattccacatgatgttatttcttcatctagctaagagtacatttaaggctgcctggatgaaactttgcactgatttttgtataatagttgatcattcactatttgacaaattgtttcagaatgcctttggtggtgaagtttagataagtccctatgttttgcaattttacagataattatttaacaagttggatagattcatgaaattgtttgaagtggttcatactgttctttcaggtttgagtgagatgtcagatttcagtgtctgaagttttgtcctatggagcatatcatttaaagaattgtcattaactgataaaacagattggaaaaactaggtgccaaaggtgtatttaagaaaataccaaagactcaaagatgagtgttaggaagactatgataatgaagataagaatctaaagtaaggattgcataggacatagaagaacattgttaaaggggtttggaatgatttgcttactaatgtactttcagaacactttatacataataatggtaatcaagggcactgctttaaatgaagatactacagacctttaggaatcatatgccttggaaaacaatctatgtatggtgacttgtcaacaaagtatcttccctagttggatgccaacttgtaaccaagaagactttcttctattcaagagaaatttggttttagttttgatttaatacttggtccctctaattaatcactggggtgattaacatgaattctgttggtataaagagtattggttccctaattagcctgcattgttgaagaccacatagatgtattactgataagactatgaggctcatgtttaattactcaatcaaaattaggaagaaatgctttggaagaaactaaaaaattacaatttaggttaatttttaaaggcaatttagtatacatgatgagctagctttgaaatacagatttaaatgtttaaaaattaatttgagggcaagatttggtaccaaagtttcaaaaattttatttcactgcttataaaatactttatcagaacacttattttaaaaaataacatcttatttgaaaaactccaaatttgatgggatagttacaccatcatacaattttaaaggtagaattagctttctaatactttaaaatattttctgaaatgaacatttcacttggtttaggaccgtgtctgtaagtaaaagacaccaatgctaatagatatgacttacaaaaatgccacatatcgaaattgattgaggattgaaatatatatactttggcattgagaagagaggaagagaaaaaaataaaaaaagtgtgacattgtaatatttattgtatttaataaatcttgaagaaagaactcttgagcaatgaaccagtgacagatataaaagcctgttttatttgatgacatcattaactgagttttctcatctatacattcatacatcgagaaggaactgtcttaaaaaccagtgtttctttttttttttaagttctagcgtacatgtgcagaatgtgcaggtttgttatataggtatacacgtgccatggtggtttgctgcacccatcaacctgtcatctacattaggtatttctcctaatgctatccctccccagtgatatttgttaatatgcttttttaaaaaagtgtctgccttgaaactggtaattaaaaaatatctcctagggcatttaattatttttcccaataaacaactcatagat

SEQ ID NO: 8499 - protein, 71 aa, Homo sapiens; identical to SEQ ID NO: 8481

SEQ ID NO: 8500 - DNA, 6832 bp, Homo sapiens
gttacctaaatctttcatttacttagaacaccattaaaccatgtgttaggacgatggctacaccataatcatatcatagagtgttttgtctacagatacaccattatttctttaaagtgtaattgggctgccaactattttatgccagtttgattaacctagtgacactaaatgatctctctgtattaggcagtttaactaaaagaatgatgaaaaatttcttttctcctcccattacattccatttcaaatttgggtgtgttttgacattaaatggcatgaaataaaatagtatattggtatttgacttctgaggggctgcataaggaaataaacatgagtatcctatctagaacatctgttttgggtctgaatggtggtattttcctgcctgcaggcttttcaatccagggcagttgtcactgcttcaccacgttgaagggagaataccaatttccaggatcaccagtttatttttatagataaaagttatattataagatactatttgccacaataaaatctaacctttccccaattattttatttgtttagcttatccaacaaaagtattaacatatacattaacaacgtcgaaagtagcctactttaagagaaaatatgcagaagaagaagatttacatcaagattaccatgggtattttccaaaacacctgatattacctgaggacagaacttgcattctcaaactttctctggagaagctcaggtttcttgaagacccagaaacctacttaagaaggtctgtgttaattaacaatttgctgaggaagatacatctagagacggagaaagagagctatgaatactttaaagaagctccctgttataagactgcatattctgatacaagaaaacggctgaagtttatggtacaggaatgctgttctcagtctctctattatgaagagctgcattcgtatcatattgtgccttatgcttcggagaatgccatttatgaaatgggctacactagcagccacttggagcaaaattctcagttgcttatttataaaatgaattaaagtaactgttaagtccattgatactttgtttctaaatgcttgaactgtttatagtgaagatgttaatataaggcactcattaccagtgcacttgatatcaaagatgagatgcatgctgaactgattggagagagcaatggttattactcagcagtccttagaatcatcaaattgaatagaaaatatgttcacatatgataaagcggtcaattagtgctttagaagcaaagattttttttaaacataagatgtgtaggaaggggcctacgttaaacaattacacagatgaaaaattttcttttatgccttgatttccaaattctgccactcttactggaaagtaatgaaagtaacagattaaattgataatgccatgtccctgaggatgaagggtggaacacatttaattttctgtaaatgatatgaggaagggctggttctttctgaagtgctttgacttgtcaagcattgtgccaaataattgacaccattctccttttaccattagtagcaattcgagatggggcaaagacactgcaactaaactgctgaatgtaacaaccagattactccaaactgatccattgtactattttgcggggagggcttagacttttctctttaaaagtgaattttaacgaaatagccttgcagatgggcttatctataagttctacaggttggttaaaatttgtggtgggcctttagttagccgtttacattttatttgtttttttttataggctgtgaagctcaggaaaagggtaggcaggtaaaatttgtttttaatgagttgatactttttagaaaccttatctgcaaaaattaatgagaacaacaaattccacatgatgttatttcttcatctagctaagagtacatttaaggctgcctggatgaaactttgcactgatttttgtataatagttgatcattcactatttgacaaattgtttcagaatgcctttggtggtgaagtttagataagtccctatgttttgcaattttacagataattatttaacaagttggatagattcatgaaattgtttgaagtggttcatactgttctttcaggtttgagtgagatgtcagatttcagtgtctgaagttttgtcctatggagcatatcatttaaagaattgtcattaactgataaaacagattggaaaaactaggtgccaaaggtgtatttaagaaaataccaaagactcaaagatgagtgttaggaagactatgataatgaagataagaatctaaagtaaggattgcataggacatagaagaacattgttaaaggggtttggaatgatttgcttactaatgtactttcagaacactttatacataataatggtaatcaagggcactgctttaaatgaagatactacagacctttaggaatcatatgccttggaaaacaatctatgtatggtgacttgtcaacaaagtatcttccctagttggatgccaacttgtaaccaagaagactttcttctattcaagagaaatttggttttagttttgatttaatacttggtccctctaattaatcactggggtgattaacatgaattctgttggtataaagagtattggttccctaattagcctgcattgttgaagaccacatagatgtattactgataagactatgaggctcatgtttaattactcaatcaaaattaggaagaaatgctttggaagaaactaaaaaattacaatttaggttaatttttaaaggcaatttagtatacatgatgagctagctttgaaatacagatttaaatgtttaaaaattaatttgagggcaagatttggtaccaaagtttcaaaaattttatttcactgcttataaaatactttatcagaacacttattttaaaaaataacatcttatttgaaaaactccaaatttgatgggatagttacaccatcatacaattttaaaggtagaattagctttctaatactttaaaatattttctgaaatgaacatttcacttggtttaggaccgtgtctgtaagtaaaagacaccaatgctaatagatatgacttacaaaaatgccacatatcgaaattgattgaggattgaaatatatatactttggcattgagaagagaggaagagaaaaaaataaaaaaagtgtgacattgtaatatttattgtatttaataaatcttgaagaaagaactcttgagcaatgaaccagtgacagatataaaagcctgttttatttgatgacatcattaactgagttttctcatctatacattcatacatcgagaaggaactgtcttaaaaaccagtgtttctttttttttttaagttctagcgtacatgtgcagaatgtgcaggtttgttatataggtatacacgtgccatggtggtttgctgcacccatcaacctgtcatctacattaggtatttctcctaatgctatccctccccagtgatatttgttaatatgcttttttaaaaaagtgtctgccttgaaactggtaattaaaaaatatctcctagggcatttaattatttttcccaataaacaactcatagataacgggttgactaatgttatctttatttagaaaatttgtatgtaaactgtgtaaacttgtctgagttaaccaatagactaccggggttttagcatggtaaactgatatacagggagacccaaatacaggcttgctttgctgactacccagcgtgctttattacaggagatgcaaaaggtggaagaccagttacacctttttttttttttttttaaaacctggacatcctttctctggtgacaagagccatccttatggtaaggaaggtgagatagaaaatggagaacctttggtaatgttgatctttcttgtgggtgtccacctagcctaaaagccaagtgaagaagaacataaaaaagcagaagaggaaaaatgaagaaaagaggaaaaagagggtggggccagagaaataaagagtaggattagtaagtgaaagaaaaagttgctttgttgtgtggggggggtgttcttgcttgctatactcaattttgctttcccgtgtctgctgtacacaaaacacctgatctctgcaatgtattgctcctttctttcattcacctgtgatgcataagactagattattttcggcatatctactgtttgcaaagtgttactactgaaaaatatccctgaaactgagctctttgggtggataagcaaaggaaaaatagaaaataattaaggtaagggaaaggctaaaggataagcctgtgtataaatgggaaatggataagctcaaatgcattatctggtttcaatgtaacacccaagatttaacaaactcagtgctagaagacttgaaaataagtgtaatttaccaccatctattgagcagctattatgagccaggcactgtgctagggctggggatacataagtgaataatgcacagtcccagaactcagattatttggttttgttttaccaaatccaaatgcagtacctgcatttctcttttccaaactgagatggctatcaaacatgtctttcagaaagtgtttgcaggtgagaagatgcgcaaggtgaaggaaagttttcctgacccagatcttagaaggaaaggagaggatacattttgctttgtggcatatttattgtgggcaaaaagctactattgcctaagggaagtacggctgaccttagcccatccctggggcatatcttgtgcgtgtggtggggagacaaatcaggtagggaacaattccttctcgccttacctctctagcttccatgttcttttatggaacaaatcagattaatactaatgttaaggagagctttaaaggagaaagagaatcaataaatcacagcctgaaagttgtgtatgttgtgtgcaagctcagaggggcagtcttcttcaatttgccttgtgctggtgaattgcttgaatgaacttcggtatttcttaacaccaggtactggagcccaccttctttctctccctctggtttcctctttaaatcacagcctgaccccagtctttatagtccattgtaagtggaagttatagctctattcttcacccacaccttgctccctatcattgatacttagaagaaagtaacaatttgcagtactggctgaactcctttgggaaagtttctggagtgtatcaaataagaattcatcatagtaacatggtcgttactggctgaacaaaattctttttgagactattgtacttagtcattaaataattgtttactaaggcaattttcatgtttctggaattcagtgtaatagttaacagctgtatatgtctcacaaaagaaactacttaggttggaaacaatggaaggttgtgtataattaattcaatcaggtcatgaatatttatgtaacatatggcattttaatttatatgttcccattctcatacttcattactatacagcagcaacaagataaatttcaggttttttgtttttttattaagtgggccatgtctaaaagttgtcacattcctggttgaatattatggacaaaatttccccattaaagtagttttgtctttctcaaggattatcctttagggttgggtggattaaaaacattacattagtgcttcttgagcatacaagtcactagggatcttgtgaaaatacagattccttttagtaggtttgggatgaggaatgaaggtcttcatctctcaaatctcccaggtgatgtggatgctgccagtccatcgaccacactttgagttgggagattctacatcttttgagaaatatccacactgaagcctatactcttaaactttcaaagactctgtgttcatgtctgtgttctgcaagaattttttcttttaagaaataaactgcataaagtaaaatcagaaaaccataacactggttttccaaatttgccacaaatactgtaatactctgtagagtaaaatgcaaagattattcctgttacaagttttctctgtatcaagtgcaggaaaggaacatgggtagagtcatgtaccattcttatcagtcaggagatgacacgtggtaaatttctcttcttgattttcctcttgattatactcacataagggagctccatttggtaacaaagatgaaattctgttcacagttaacaagaatttagcaacttcttgcttggcaaaatctgagacaaccttacaaaaacatcctacattaaattcagaattttgggtagctgcataagctgaagattatggaaaacctgagctgaaaatggcacctggatctgtaacttcttgtcttgaactcttttttgagctttattctgtgagagatcttcccctacagtgattttttctgtttctcctcagtcgctggggtctcagtaaggggtggaggattggtgtaaatgagacagtcacataaattgtctaatttgagcatgccaagtgatttttgtcagcctcttttggtcataaaattttggtatagctattgtgaaatatagtgtcataaatttgtcataagccattaatgaaggaagagaagcagaaatttatttctgtgggaatgcactcaaatatcaagcagatggtgttctacaacatttatttgggaaaatgtgtatctgttacataatctgaaatatgtctttttcacatttaaaaatatttgggtcatgatttagagtttttattggattgttttttaaactgagaggaagaagaaaggtaattgtattttaaaacatttgacatgttactaataaaattttatttctggtg

SEQ ID NO: 8501 - protein, 124 aa, Homo sapiens; identical to SEQ ID NO: 8483

SEQ ID NO: 8502 - DNA, 2927 bp, Homo sapiens
tgttgatctttcttgtgggtgtccacctagcctaaaagccaagtgaagaagaacataaaaaagcagaagaggaaaaatgaagaaaagaggaaaaagagggtggggccagagaaataaagagtaggattagtaagtgaaagaaaaagttgctttgttgtgtggggggggtgttcttgcttgctatactcaattttgctttcccgtgtctgctgtacacaaaacacctgatctctgcaatgtattgctcctttctttcattcacctgtgatgcataagactagattattttcggcatatctactgtttgcaaagtgttactactgaaaaatatccctgaaactgagctctttgggtggataagcaaaggaaaaatagaaaataattaaggtaagggaaaggctaaaggataagcctgtgtataaatgggaaatggataagctcaaatgcattatctggtttcaatgtaacacccaagatttaacaaactcagtgctagaagacttgaaaataagtgtaatttaccaccatctattgagcagctattatgagccaggcactgtgctagggctggggatacataagtgaataatgcacagtcccagaactcagattatttggttttgttttaccaaatccaaatgcagtacctgcatttctcttttccaaactgagatggctatcaaacatgtctttcagaaagtgtttgcaggtgagaagatgcgcaaggtgaaggaaagttttcctgacccagatcttagaaggaaaggagaggatacattttgctttgtggcatatttattgtgggcaaaaagctactattgcctaagggaagtacggctgaccttagcccatccctggggcatatcttgtgcgtgtggtggggagacaaatcaggtagggaacaattccttctcgccttacctctctagcttccatgttcttttatggaacaaatcagattaatactaatgttaaggagagctttaaaggagaaagagaatcaataaatcacagcctgaaagttgtgtatgttgtgtgcaagctcagaggggcagtcttcttcaatttgccttgtgctggtgaattgcttgaatgaacttcggtatttcttaacaccaggtactggagcccaccttctttctctccctctggtttcctctttaaatcacagcctgaccccagtctttatagtccattgtaagtggaagttatagctctattcttcacccacaccttgctccctatcattgatacttagaagaaagtaacaatttgcagtactggctgaactcctttgggaaagtttctggagtgtatcaaataagaattcatcatagtaacatggtcgttactggctgaacaaaattctttttgagactattgtacttagtcattaaataattgtttactaaggcaattttcatgtttctggaattcagtgtaatagttaacagctgtatatgtctcacaaaagaaactacttaggttggaaacaatggaaggttgtgtataattaattcaatcaggtcatgaatatttatgtaacatatggcattttaatttatatgttcccattctcatacttcattactatacagcagcaacaagataaatttcaggttttttgtttttttattaagtgggccatgtctaaaagttgtcacattcctggttgaatattatggacaaaatttccccattaaagtagttttgtctttctcaaggattatcctttagggttgggtggattaaaaacattacattagtgcttcttgagcatacaagtcactagggatcttgtgaaaatacagattccttttagtaggtttgggatgaggaatgaaggtcttcatctctcaaatctcccaggtgatgtggatgctgccagtccatcgaccacactttgagttgggagattctacatcttttgagaaatatccacactgaagcctatactcttaaactttcaaagactctgtgttcatgtctgtgttctgcaagaattttttcttttaagaaataaactgcataaagtaaaatcagaaaaccataacactggttttccaaatttgccacaaatactgtaatactctgtagagtaaaatgcaaagattattcctgttacaagttttctctgtatcaagtgcaggaaaggaacatgggtagagtcatgtaccattcttatcagtcaggagatgacacgtggtaaatttctcttcttgattttcctcttgattatactcacataagggagctccatttggtaacaaagatgaaattctgttcacagttaacaagaatttagcaacttcttgcttggcaaaatctgagacaaccttacaaaaacatcctacattaaattcagaattttgggtagctgcataagctgaagattatggaaaacctgagctgaaaatggcacctggatctgtaacttcttgtcttgaactcttttttgagctttattctgtgagagatcttcccctacagtgattttttctgtttctcctcagtcgctggggtctcagtaaggggtggaggattggtgtaaatgagacagtcacataaattgtctaatttgagcatgccaagtgatttttgtcagcctcttttggtcataaaattttggtatagctattgtgaaatatagtgtcataaatttgtcataagccattaatgaaggaagagaagcagaaatttatttctgtgggaatgcactcaaatatcaagcagatggtgttctacaacatttatttgggaaaatgtgtatctgttacataatctgaaatatgtctttttcacatttaaaaatatttgggtcatgatttagagtttttattggattgttttttaaactgagaggaagaagaaaggtaattgtattttaaaacatttgacatgttactaataaaattttatttctggtg

SEQ ID NO: 8503 - protein, 124 aa, Homo sapiens; identical to SEQ ID NO: 8483

SEQ ID NO: 8504 - DNA, 3948 bp, Homo sapiens
gcatccccccctcccccgccgcggatcctggccgctgctctccagacccaggatgccggggggcaagagagggctggtggcaccgcagaacacatttttggagaacatcgtcaggcgctccagtgaatcaagtttcttactgggaaatgcccagattgtggattggcctgtagtttatagtaatgacggtttttgtaaactctctggatatcatcgagctgacgtcatgcagaaaagcagcacttgcagttttatgtatggggaattgactgacaagaagaccattgagaaagtcaggcaaacttttgacaactacgaatcaaactgctttgaagttcttctgtacaagaaaaacagaacccctgtttggttttatatgcaaattgcaccaataagaaatgaacatgaaaaggtggtcttgttcctgtgtactttcaaggatattacgttgttcaaacagccaatagaggatgattcaacaaaaggttggacgaaatttgcccgattgacacgggctttgacaaatagccgaagtgttttgcagcagctcacgccaatgaataaaacagaggtggtccataaacattcaagactagctgaagttcttcagctgggatcagatatccttcctcagtataaacaagaagcgccaaagacgccaccacacattattttacattattgtgcttttaaaactacttgggattgggtgattttaattcttaccttctacaccgccattatggttccttataatgtttccttcaaaacaaagcagaacaacatagcctggctggtactggatagtgtggtggacgttatttttctggttgacatcgttttaaattttcacacgactttcgtggggcccggtggagaggtcatttctgaccctaagctcataaggatgaactatctgaaaacttggtttgtgatcgatctgctgtcttgtttaccttatgacatcatcaatgcctttgaaaatgtggatgagggaatcagcagtctcttcagttctttaaaagtggtgcgtctcttacgactgggccgtgtggctaggaaactggaccattacctagaatatggagcagcagtcctcgtgctcctggtgtgtgtgtttggactggtggcccactggctggcctgcatatggtatagcatcggagactacgaggtcattgatgaagtcactaacaccatccaaatagacagttggctctaccagctggctttgagcattgggactccatatcgctacaataccagtgctgggatatgggaaggaggacccagcaaggattcattgtacgtgtcctctctctactttaccatgacaagccttacaaccataggatttggaaacatagctcctaccacagatgtggagaagatgttttcggtggctatgatgatggttggctctcttctttatgcaactatttttggaaatgttacaacaattttccagcaaatgtatgccaacaccaaccgataccatgagatgctgaataatgtacgggacttcctaaaactctatcaggtcccaaaaggccttagtgagcgagtcatggattatattgtctcaacatggtccatgtcaaaaggcattgatacagaaaaggtcctctccatctgtcccaaggacatgagagctgatatctgtgttcatctaaaccggaaggtttttaatgaacatcctgcttttcgattggccagcgatgggtgtctgcgcgccttggcggtagagttccaaaccattcactgtgctcccggggacctcatttaccatgctggagaaagtgtggatgccctctgctttgtggtgtcaggatccttggaagtcatccaggatgatgaggtggtggctattttagggaagggtgatgtatttggagacatcttctggaaggaaaccacccttgcccatgcatgtgcgaacgtccgggcactgacgtactgtgacctacacatcatcaagcgggaagccttgctcaaagtcctggacttttatacagcttttgcaaactccttctcaaggaatctcactcttacttgcaatctgaggaaacggatcatctttcgtaagatcagtgatgtgaagaaagaggaggaggagcgcctccggcagaagaatgaggtgaccctcagcattcccgtggaccacccagtcagaaagctcttccagaagttcaagcagcagaaggagctgcggaatcagggctcaacacagggtgaccctgagaggaaccaactccaggtagagagccgctccttacagaatggagcctccatcaccggaaccagcgtggtgactgtgtcacagattactcccattcagacgtctctggcctatgtgaaaaccagtgaatcccttaagcagaacaaccgtgatgccatggaactcaagcccaacggcggtgctgaccaaaaatgtctcaaagtcaacagcccaataagaatgaagaatggaaatggaaaagggtggctgcgactcaagaataatatgggagcccatgaggagaaaaaggaagactggaataatgtcactaaagctgagtcaatggggctattgtctgaggaccccaagagcagtgattcagagaacagtgtgaccaaaaacccactaagaaaaacagattcttgtgacagtggaattacaaaaagtgaccttcgtttggataaggctggggaggcccgaagtccgctagagcacagtcccatccaggctgatgccaagcaccccttttatcccatccccgagcaggccttacagaccacactgcaggaagtcaaacacgaactcaaagaggacatccagctgctcagctgcagaatgactgccctagaaaagcaggtggcagaaattttaaaaatactgtcggaaaaaagcgtaccccaggcctcatctcccaaatcccaaatgccactccaagtacccccccagataccatgtcaggatatttttagtgtctcaaggcctgaatcacctgaatctgacaaagatgaaatccacttttaatatatatacatatatatttgttaatatattaaaacagtatatacatatgtgtgtatatacagtatatacatatatatattttcacttgctttcaagatgatgaccacacatggattttgatatgtaaatattgcatgtccagctggattctggcctgccaaagaagatgatgattaaaaacatagatattgcttgtatattatgcagttgactgcatgcacactttacatttatttataatctctattctataataaaagagtatgatttttgttacccaaggcaatgtaatatttgaagaatcagggtccaacctgccaatgttgccatgacaaatttgatctcaggctgagtatgtatatcgagctatcattttctcactgttctgttaagttaaaagtatagattaatgccaaggaagagttcagtcttttaaactattagtaccatgttatgatctctttccataggatatttttctgtaacttagtgttaggttcttttcccctacaggcagtgtttgctccatttaaatgactgtttagttgcctaagtcagataagagtgtgggatattgaaaacttattgctatgggttttgtgcatgaattacatttttgatcaactatacctctcgttttttaacattatacttagatagtaatcattagctcttatgtaaggaaatccctactccctccttcttggagaacagctgccatcttgtaagctgacattatcaacatcataaatactaaactattaatatagagtatgttattatagaaacactgcaccacagggtataagggccttttgacaattcatgtaagagatgctgaatttccaaagctgataaatgctctaaatttgtatttccaaaacatgttcaagagtgacattgaaaggcttgttagcaaagaaacatac

SEQ ID NO: 8505 - protein, 988 aa, Homo sapiens; identical to SEQ ID NO: 1234

SEQ ID NO: 8506 - DNA, 3100 bp, Homo sapiens
catccccccctcccccgccgcggatcctggccgctgctctccagacccaggatgccggggggcaagagagggctggtggcaccgcagaacacatttttggagaacatcgtcaggcgctccagtgaatcaagtttcttactgggaaatgcccagattgtggattggcctgtagtttatagtaatgacggtttttgtaaactctctggatatcatcgagctgacgtcatgcagaaaagcagcacttgcagttttatgtatggggaattgactgacaagaagaccattgagaaagtcaggcaaacttttgacaactacgaatcaaactgctttgaagttcttctgtacaagaaaaacagaacccctgtttggttttatatgcaaattgcaccaataagaaatgaacatgaaaaggtggtcttgttcctgtgtactttcaaggatattacgttgttcaaacagccaatagaggatgattcaacaaaaggttggacgaaatttgcccgattgacacgggctttgacaaatagccgaagtgttttgcagcagctcacgccaatgaataaaacagaggtggtccataaacattcaagactagctgaagttcttcagctgggatcagatatccttcctcagtataaacaagaagcgccaaagacgccaccacacattattttacattattgtgcttttaaaactacttgggattgggtgattttaattcttaccttctacaccgccattatggttccttataatgtttccttcaaaacaaagcagaacaacatagcctggctggtactggatagtgtggtggacgttatttttctggttgacatcgttttaaattttcacacgactttcgtggggcccggtggagaggtcatttctgaccctaagctcataaggatgaactatctgaaaacttggtttgtgatcgatctgctgtcttgtttaccttatgacatcatcaatgcctttgaaaatgtggatgagggaatcagcagtctcttcagttctttaaaagtggtgcgtctcttacgactgggccgtgtggctaggaaactggaccattacctagaatatggagcagcagtcctcgtgctcctggtgtgtgtgtttggactggtggcccactggctggcctgcatatggtatagcatcggagactacgaggtcattgatgaagtcactaacaccatccaaatagacagttggctctaccagctggctttgagcattgggactccatatcgctacaataccagtgctgggatatgggaaggaggacccagcaaggattcattgtacgtgtcctctctctactttaccatgacaagccttacaaccataggatttggaaacatagctcctaccacagatgtggagaagatgttttcggtggctatgatgatggttggctctcttctttatgcaactatttttggaaatgttacaacaattttccagcaaatgtatgccaacaccaaccgataccatgagatgctgaataatgtacgggacttcctaaaactctatcaggtcccaaaaggccttagtgagcgagtcatggattatattgtctcaacatggtccatgtcaaaaggcattgatacagaaaaggtcctctccatctgtcccaaggacatgagagctgatatctgtgttcatctaaaccggaaggtttttaatgaacatcctgcttttcgattggccagcgatgggtgtctgcgcgccttggcggtagagttccaaaccattcactgtgctcccggggacctcatttaccatgctggagaaagtgtggatgccctctgctttgtggtgtcaggatccttggaagtcatccaggatgatgaggtggtggctattttagatcatctttcgtaagatcagtgatgtgaagaaagaggaggaggagcgcctccggcagaagaatgaggtgaccctcagcattcccgtggaccacccagtcagaaagctcttccagaagttcaagcagcagaaggagctgcggaatcagggctcaacacagggtgaccctgagaggaaccaactccaggtagagagccgctccttacagaatggagcctccatcaccggaaccagcgtggtgactgtgtcacagattactcccattcagacgtctctggcctatgtgaaaaccagtgaatcccttaagcagaacaaccgtgatgccatggaactcaagcccaacggcggtgctgaccaaaaatgtctcaaagtcaacagcccaataagaatgaagaatggaaatggaaaagggtggctgcgactcaagaataatatgggagcccatgaggagaaaaaggaagactggaataatgtcactaaagctgagtcaatggggctattgtctgaggaccccaagagcagtgattcagagaacagtgtgaccaaaaacccactaagaaaaacagattcttgtgacagtggaattacaaaaagtgaccttcgtttggataaggctggggaggcccgaagtccgctagagcacagtcccatccaggctgatgccaagcaccccttttatcccatccccgagcaggccttacagaccacactgcaggaagtcaaacacgaactcaaagaggacatccagctgctcagctgcagaatgactgccctagaaaagcaggtggcagaaattttaaaaatactgtcggaaaaaagcgtaccccaggcctcatctcccaaatcccaaatgccactccaagtacccccccagataccatgtcaggatatttttagtgtctcaaggcctgaatcacctgaatctgacaaagatgaaatccacttttaatatatatacatatatatttgttaatatattaaaacagtatatacatatgtgtgtatatacagtatatacatatatatattttcacttgctttcaagatgatgaccacacatggattttgatatgtaaatattgcatgtccagctggattctggcctgccaaagaagatgatgattaaaaacatagatattgcttgtatattatgcagttgactgcatgcacactttacatttatttataatctctattctataataaaagagtatgatttttgttaccc

SEQ ID NO: 8507 - protein, 611 aa, Homo sapiens; identical to SEQ ID NO: 1236

SEQ ID NO: 8508 - DNA, 3297 bp, Homo sapiens
catccccccctcccccgccgcggatcctggccgctgctctccagacccaggatgccggggggcaagagagggctggtggcaccgcagaacacatttttggagaacatcgtcaggcgctccagtgaatcaagtttcttactgggaaatgcccagattgtggattggcctgtagtttatagtaatgacggtttttgtaaactctctggatatcatcgagctgacgtcatgcagaaaagcagcacttgcagttttatgtatggggaattgactgacaagaagaccattgagaaagtcaggcaaacttttgacaactacgaatcaaactgctttgaagttcttctgtacaagaaaaacagaacccctgtttggttttatatgcaaattgcaccaataagaaatgaacatgaaaaggtggtcttgttcctgtgtactttcaaggatattacgttgttcaaacagccaatagaggatgattcaacaaaaggttggacgaaatttgcccgattgacacgggctttgacaaatagccgaagtgttttgcagcagctcacgccaatgaataaaacagaggtggtccataaacattcaagactagctgaagttcttcagctgggatcagatatccttcctcagtataaacaagaagcgccaaagacgccaccacacattattttacattattgtgcttttaaaactacttgggattgggtgattttaattcttaccttctacaccgccattatggttccttataatgtttccttcaaaacaaagcagaacaacatagcctggctggtactggatagtgtggtggacgttatttttctggttgacatcgttttaaattttcacacgactttcgtggggcccggtggagaggtcatttctgaccctaagctcataaggatgaactatctgaaaacttggtttgtgatcgatctgctgtcttgtttaccttatgacatcatcaatgcctttgaaaatgtggatgagggaatcagcagtctcttcagttctttaaaagtggtgcgtctcttacgactgggccgtgtggctaggaaactggaccattacctagaatatggagcagcagtcctcgtgctcctggtgtgtgtgtttggactggtggcccactggctggcctgcatatggtatagcatcggagactacgaggtcattgatgaagtcactaacaccatccaaatagacagttggctctaccagctggctttgagcattgggactccatatcgctacaataccagtgctgggatatgggaaggaggacccagcaaggattcattgtacgtgtcctctctctactttaccatgacaagccttacaaccataggatttggaaacatagctcctaccacagatgtggagaagatgttttcggtggctatgatgatggttggctctcttctttatgcaactatttttggaaatgttacaacaattttccagcaaatgtatgccaacaccaaccgataccatgagatgctgaataatgtacgggacttcctaaaactctatcaggtcccaaaaggccttagtgagcgagtcatggattatattgtctcaacatggtccatgtcaaaaggcattgatacagaaaaggtcctctccatctgtcccaaggacatgagagctgatatctgtgttcatctaaaccggaaggtttttaatgaacatcctgcttttcgattggccagcgatgggtgtctgcgcgccttggcggtagagttccaaaccattcactgtgctcccggggacctcatttaccatgctggagaaagtgtggatgccctctgctttgtggtgtcaggatccttggaagtcatccaggatgatgaggtggtggctattttagggaagggtgatgtatttggagacatcttctggaaggaaaccacccttgcccatgcatgtgcgaacgtccgggcactgacgtactgtgacctacacatcatcaagcgggaagccttgctcaaagtcctggacttttatacagcttttgcaaactccttctcaaggaatctcactcttacttgcaatctgaggaaacggatcatctttcgtaagatcagtgatgtgaagaaagaggaggaggagcgcctccggcagaagaatgaggtgaccctcagcattcccgtggaccacccagtcagaaagctcttccagaagttcaagcagcagaaggagctgcggaatcagggctcaacacagggtgaccctgagaggaaccaactccaggtagagagccgctccttacagaatggagcctccatcaccggaaccagcgtggtgactgtgtcacagattactcccattcagacgtctctggcctatgtgaaaaccagtgaatcccttaagcagaacaaccgtgatgccatggaactcaagcccaacggcggtgctgaccaaaaatgtctcaaagtcaacagcccaataagaatgaagaatggaaatggaaaagggtggctgcgactcaagaataatatgggagcccatgaggagaaaaaggaagactggaataatgtcactaaagctgagtcaatggggctattgtctgaggaccccaagagcagtgattcagagaacagtgtgaccaaaaacccactaagaaaaacagattcttgtgacagtggaattacaaaaagtgaccttcgtttggataaggctggggaggcccgaagtccgctagagcacagtcccatccaggctgatgccaagcaccccttttatcccatccccgagcaggccttacagaccacactgcaggaagtcaaacacgaactcaaagaggacatccagctgctcagctgcagaatgactgccctagaaaagcaggtggcagaaattttaaaaatactgtcggaaaaaagcgtaccccaggcctcatctcccaaatcccaaatgccactccaagtacccccccagataccatgtcaggatatttttagtgtctcaaggcctgaatcacctgaatctgacaaagatgaaatccacttttaatatatatacatatatatttgttaatatattaaaacagtatatacatatgtgtgtatatacagtatatacatatatatattttcacttgctttcaagatgatgaccacacatggattttgatatgtaaatattgcatgtccagctggattctggcctgccaaagaagatgatgattaaaaacatagatattgcttgtatattatgcagttgactgcatgcacactttacatttatttataatctctattctataataaaagagtatgatttttgttaccc

SEQ ID NO: 8509 - protein, 988 aa, Homo sapiens; identical to SEQ ID NO: 1234

SEQ ID NO: 8510 - DNA, 2490 bp, Homo sapiens
tgagcaaatgaaagacaccaacaaaatccaacacataaagattcacacttgaaacagattaatcaggaatcaagtttcttactgggaaatgcccagattgtggattggcctgtagtttatagtaatgacggtttttgtaaactctctggatatcatcgagctgacgtcatgcagaaaagcagcacttgcagttttatgtatggggaattgactgacaagaagaccattgagaaagtcaggcaaacttttgacaactacgaatcaaactgctttgaagttcttctgtacaagaaaaacagaacccctgtttggttttatatgcaaattgcaccaataagaaatgaacatgaaaaggtggtcttgttcctgtgtactttcaaggatattacgttgttcaaacagccaatagaggatgattcaacaaaaggttggacgaaatttgcccgattgacacgggctttgacaaatagccgaagtgttttgcagcagctcacgccaatgaataaaacagaggtggtccataaacattcaagactagctgaagttcttcagctgggatcagatatccttcctcagtataaacaagaagcgccaaagacgccaccacacattattttacattattgtgcttttaaaactacttgggattgggtgattttaattcttaccttctacaccgccattatggttccttataatgtttccttcaaaacaaagcagaacaacatagcctggctggtactggatagtgtggtggacgttatttttctggttgacatcgttttaaattttcacacgactttcgtggggcccggtggagaggtcatttctgaccctaagctcataaggatgaactatctgaaaacttggtttgtgatcgatctgctgtcttgtttaccttatgacatcatcaatgcctttgaaaatgtggatgagggaatcagcagtctcttcagttctttaaaagtggtgcgtctcttacgactgggccgtgtggctaggaaactggaccattacctagaatatggagcagcagtcctcgtgctcctggtgtgtgtgtttggactggtggcccactggctggcctgcatatggtatagcatcggagactacgaggtcattgatgaagtcactaacaccatccaaatagacagttggctctaccagctggctttgagcattgggactccatatcgctacaataccagtgctgggatatgggaaggaggacccagcaaggattcattgtacgtgtcctctctctactttaccatgacaagccttacaaccataggatttggaaacatagctcctaccacagatgtggagaagatgttttcggtggctatgatgatggttggctctcttctttatgcaactatttttggaaatgttacaacaattttccagcaaatgtatgccaacaccaaccgataccatgagatgctgaataatgtacgggacttcctaaaactctatcaggtcccaaaaggccttagtgagcgagtcatggattatattgtctcaacatggtccatgtcaaaaggcattgatacagaaaaggtcctctccatctgtcccaaggacatgagagctgatatctgtgttcatctaaaccggaaggtttttaatgaacatcctgcttttcgattggccagcgatgggtgtctgcgcgccttggcggtagagttccaaaccattcactgtgctcccggggacctcatttaccatgctggagaaagtgtggatgccctctgctttgtggtgtcaggatccttggaagtcatccaggatgatgaggtggtggctattttagggaagggtgatgtatttggagacatcttctggaaggaaaccacccttgcccatgcatgtgcgaacgtccgggcactgacgtactgtgacctacacatcatcaagcgggaagccttgctcaaagtcctggacttttatacagcttttgcaaactccttctcaaggaatctcactcttacttgcaatctgaggaaacggggatggttctccatggcaaacgctctgtgaagggtgacctgctgggtgtgaaactgctgcacgacttcctacttcacccattcatctatccgagttttcacggagtccaggagaaagtataaaagttaccttgaggagcaggagagtggaatggttaagactgtttggaatctgaccccttggatttgcatcctggacacacagttgtgtgacctaagggaaaccacttaaactctttatgcctcaatttgcttctctgtgataaaagaataatatgacctgtgtcctacagtagagaataataggtcctagctcgtaaaatgttctcattccatgacacttaaatgagaaaatacgtgtgtggaagtgaccactttgctatatacagatattttattatcattttacaatgccattattttgttccatagtcaaaagtaaaataaaacaaatgtcaatttgtcttattctaatcct

SEQ ID NO: 8511 - protein, 624 aa, Homo sapiens; identical to SEQ ID NO: 1238

SEQ ID NO: 8512 - DNA, 3582 bp, Homo sapiens
attccccctgcttctgtggcaggcagtaatccccgctttccatcctctagtcagcttcttcccagccagccacaagcgaacaggctcgcaagcagcggatgaaacaggaagtctgacagcttgagtctgcagtgggacccctagtgttttcccactccatgtcctggcatcgttccccagaagtacaaacacacacacacagagctcccattgttgcagccttcctcagcccactgatcctaatatggaattcagcaggaaacccatgatttcctgacactcggcaagctggaggaagcaaagggaaaaaaactccattaaaaagcccagctttcctccatgttagatgtgacttggaaaatgagaaagatttagcaaaattccaccgtatcttttgccaggctagagacagggagagcagagtaaaaccctcaggctgctgaaatttctaggctgttaggaagcccctcgaattctgtgaaaatgagggtttcttaactcacactgagagcggaaaggggcagacccttttcataactccctcaagtgtgtgttacctttctttaccagcatggtaagcaacaggacatatcccagcctcggacatgtctgtatgatccaaggtacccaaagtcagacagagtaaactcaagcctggcactggctttctgccgcttcatgtgctttggaaaaagcaggagaagcaatagcagcaggagtccccagcagctggagccgcaagaatgaactgcaaagagggaactgacagcagctgcggctgcaggggcaacgacgagaagaagatgttgaagtgtgtggtggtgggggacggtgccgtggggaaaacctgcctgctgatgagctacgccaacgacgccttcccagaggaatacgtgcccactgtgtttgaccactatgcagttactgtgactgtgggaggcaagcaacacttgctcggactgtatgacaccgcgggacaggaggactacaaccagctgaggccactctcctaccccaacacggatgtgtttttgatctgcttctctgtcgtaaaccctgcctcttaccacaatgtccaggaggaatgggtccccgagctcaaggactgcatgcctcacgtgccttatgtcctcatagggacccagattgatctccgtgatgacccaaaaaccttggcccgtttgctgtatatgaaagagaaacctctcacttacgagcatggtgtgaagctcgcaaaagcgatcggagcacagtgctacttggaatgttcagctctgactcagaaaggtctcaaagcggtttttgatgaagcaatcctcaccattttccaccccaagaaaaagaagaaacgctgttctgagggtcacagctgctgttcaattatctgaggttgtctgggacctgcctccaccccatccagggatgagaatggcagccaatctctgtggccaagctccagccaaaaaggagggcacgaccagaaaggaactccctttgcacggaggcttgccccatcaccctctgagccctcccaacacagcacactagtcagcccactgccacgacctccctgccagccagaagcatccgtactgcacgctgtctgagaatgctgggcctggattgcagacagtgccgctgctgatcgcatcaaaaacaaagtcaaaggccatctcacattttacaaatccccagctcatgaacgtgaagctgataggaaatcaccccagggaacccgaaaaagaaacttgattcctctattgctggccttacttgatgtcttttataaaacttgggactacaatactaacctttttttctgaatctgctgttctacccatgtgtctcacattcatttgtattatttcaagaaatgtactaatttccagttcactcaggccttactaatccataccaaattagcctaaagacaaggcattttatattcatttctattttcagcatgtttctaccaaagctattagaaccaacacgtacctctgaatgcccgattataagaagacatgagaagactttaaaagttttggaaatttacagagccatgatttttgaacctaattgaaagaaaaccatctgaattgttgcaggtccacatttttgccaaagatacactctatagatgcttagtagtggcctgatttttttccatgtattgccacgacaaactaaaaatgaactgtgtttaagaatgtagtatttctgtttttcatccaagttgattgggggaagaatatggcaggatccatcttttacagtattttgtattcagtaaagtggacattcctgctcctcccttcccccattgcatgccctcttcctcccttgatttcactttctctcatgcccggatccttttattctccccagttataacccagttataaaagaaagatctgagcataaagatacgtgtttaaaaataactaaaagtaaaggaaagtgccttaatttttctatttgcttcaactgaaagtgcttctcagctcgccccatgtaagttctcattccatgtaaatgacattttccagttacaactggtactgagattttgcctctctctttccttactcatcctcccaaatgtctttgtgggagccatatcagtggataccaagctctgtatccatttgtcccctgccctccacaatgtgtgacatagaacagggactttggccctgggaaagcaaaagctcccagtaaggaatcctgtgcccaatgatgtaaaacaattccaaacatccaggaatttttgtatcatagagcgaattacttcctatcttttcattagaggctatgaggacttctaattagtcttagttgcttataagtgccctggaatcacccaggtaggcacttaatttttttttcagttgcatgagcaaagtgcttcttagtagtgtgaaattacaacaactttaagactttccagattcaagctcccactgttggaaaaagccagcctttctaatctcttctgctactggaataagcacttaagaattgcgtgatagccaggcaccgtggctcatgcctgtaatcccaacacttagggaggctgaggtgggtgggccgcttgagctcaggagttcaagaccagcctgggtaatatagtgagatcctgtgtctctataaaaaaattaaaaattagtcagttgtagtgacacatacctgtagtcccagctactcaggaggctgaggtggaaggatcacttgagcccagaaggtaaggctgcagtgagctgtgactgtgccactacactccagcctgagtgacagagaaagaacctgtcaaaaaaaaaaaaaaaacaacctacatttcaagtactatttcccttctctcccatctaattgctaaagattttctttcatacgcacacactccagtgactggaaaaacgggagttttcagtcaaagcttgacatttagagaaaacaaggactttctgcctttataaatggaaatcaactgtgtatgaactataactctgcagaggttatgaattcatcctttacaaacaataatgaacttttagtcctgtaataaatgaaatgttattaggc

SEQ ID NO: 8513 - protein, 214 aa, Homo sapiens
MNCKEGTDSSCGCRGNDEKKMLKCVVVGDGAVGKTCLLMSYANDAFPEEYVPTVFDHYAVTVTVGGKQHLLGLYDTAGQEDYNQLRPLSYPNTDVFLICFSVVNPASYHNVQEEWVPELKDCMPHVPYVLIGTQIDLRDDPKTLARLLYMKEKPLTYEHGVKLAKAIGAQCYLECSALTQKGLKAVFDEAILTIFHPKKKKKRCSEGHSCCSII

SEQ ID NO: 8514 - DNA, 2811 bp, Homo sapiens
attccccctgcttctgtggcaggcagtaatccccgctttccatcctctagtcagcttcttcccagccagccacaagcgaacaggctcgcaagcagcggatgaaacaggaagtctgacagcttgagtctgcagtgggacccctagtgttttcccactccatgtcctggcatcgttccccagaagtacaaacacacacacacagagctcccattgttgcagccttcctcagcccactgatcctaatatggaattcagcaggaaacccatgatttcctgacactcggcaagctggaggaagcaaagggaaaaaaactccattaaaaagcccagctttcctccatgttagatgtgacttggaaaatgagaaagatttagcaaaattccaccgtatcttttgccaggctagagacagggagagcagagtaaaaccctcaggctgctgaaatttctaggctgttaggaagcccctcgaattctgtgaaaatgagggtttcttaactcacactgagagcggaaaggggcagacccttttcataactccctcaagtgtgtgttacctttctttaccagcatggtaagcaacaggacatatcccagcctcggacatgtctgtatgatccaaggtacccaaagtcagacagagtaaactcaagcctggcactggctttctgccgcttcatgtgctttggaaaaagcaggagaagcaatagcagcaggagtccccagcagctggagccgcaagaatgaactgcaaagagggaactgacagcagactagtcagcccactgccacgacctccctgccagccagaagcatccgtactgcacgctgtctgagaatgctgggcctggattgcagacagtgccgctgctgatcgcatcaaaaacaaagtcaaaggccatctcacattttacaaatccccagctcatgaacgtgaagctgataggaaatcaccccagggaacccgaaaaagaaacttgattcctctattgctggccttacttgatgtcttttataaaacttgggactacaatactaacctttttttctgaatctgctgttctacccatgtgtctcacattcatttgtattatttcaagaaatgtactaatttccagttcactcaggccttactaatccataccaaattagcctaaagacaaggcattttatattcatttctattttcagcatgtttctaccaaagctattagaaccaacacgtacctctgaatgcccgattataagaagacatgagaagactttaaaagttttggaaatttacagagccatgatttttgaacctaattgaaagaaaaccatctgaattgttgcaggtccacatttttgccaaagatacactctatagatgcttagtagtggcctgatttttttccatgtattgccacgacaaactaaaaatgaactgtgtttaagaatgtagtatttctgtttttcatccaagttgattgggggaagaatatggcaggatccatcttttacagtattttgtattcagtaaagtggacattcctgctcctcccttcccccattgcatgccctcttcctcccttgatttcactttctctcatgcccggatccttttattctccccagttataacccagttataaaagaaagatctgagcataaagatacgtgtttaaaaataactaaaagtaaaggaaagtgccttaatttttctatttgcttcaactgaaagtgcttctcagctcgccccatgtaagttctcattccatgtaaatgacattttccagttacaactggtactgagattttgcctctctctttccttactcatcctcccaaatgtctttgtgggagccatatcagtggataccaagctctgtatccatttgtcccctgccctccacaatgtgtgacatagaacagggactttggccctgggaaagcaaaagctcccagtaaggaatcctgtgcccaatgatgtaaaacaattccaaacatccaggaatttttgtatcatagagcgaattacttcctatcttttcattagaggctatgaggacttctaattagtcttagttgcttataagtgccctggaatcacccaggtaggcacttaatttttttttcagttgcatgagcaaagtgcttcttagtagtgtgaaattacaacaactttaagactttccagattcaagctcccactgttggaaaaagccagcctttctaatctcttctgctactggaataagcacttaagaattgcgtgatagccaggcaccgtggctcatgcctgtaatcccaacacttagggaggctgaggtgggtgggccgcttgagctcaggagttcaagaccagcctgggtaatatagtgagatcctgtgtctctataaaaaaattaaaaattagtcagttgtagtgacacatacctgtagtcccagctactcaggaggctgaggtggaaggatcacttgagcccagaaggtaaggctgcagtgagctgtgactgtgccactacactccagcctgagtgacagagaaagaacctgtcaaaaaaaaaaaaaaaacaacctacatttcaagtactatttcccttctctcccatctaattgctaaagattttctttcatacgcacacactccagtgactggaaaaacgggagttttcagtcaaagcttgacatttagagaaaacaaggactttctgcctttataaatggaaatcaactgtgtatgaactataactctgcagaggttatgaattcatcctttacaaacaataatgaacttttagtcctgtaataaatgaaatgttattaggc

SEQ ID NO: 8515 - protein, 30 aa, Homo sapiens
MNCKEGTDSRLVSPLPRPPCQPEASVLHAV

SEQ ID NO: 8516 - DNA, 1966 bp, Homo sapiens
attccccctgcttctgtggcaggcagtaatccccgctttccatcctctagtcagcttcttcccagccagccacaagcgaacaggctcgcaagcagcggatgaaacaggaagtctgacagcttgagtctgcagtgggacccctagtgttttcccactccatgtcctggcatcgttccccagaagtacaaacacacacacacagagctcccattgttgcagccttcctcagcccactgatcctaatatggaattcagcaggaaacccatgatttcctgacactcggcaagctggaggaagcaaagggaaaaaaactccattaaaaagcccagctttcctccatgttagatgtgacttggaaaatgagaaagatttagcaaaattccaccgtatcttttgccaggctagagacagggagagcagagtaaaaccctcaggctgctgaaatttctaggctgttaggaagcccctcgaattctgtgaaaatgagggtttcttaactcacactgagagcggaaaggggcagacccttttcataactccctcaagtgtgtgttacctttctttaccagcatggtaagcaacaggacatatcccagcctcggacatgtctgtatgatccaaggtacccaaagtcagacagagtaaactcaagcctggcactggctttctgccgcttcatgtgctttggaaaaagcaggagaagcaatagcagcaggagtccccagcagctggagccgcaagaatgaactgcaaagagggaactgacagcagctgcggctgcaggggcaacgacgagaagaagatgttgaagtgtgtggtggtgggggacggtgccgtggggaaaacctgcctgctgatgagctacgccaacgacgccttcccagaggaatacgtgcccactgtgtttgaccactatgcagttactgtgactgtgggaggcaagcaacacttgctcggactgtatgacaccgcgggacaggaggactacaaccagctgaggccactctcctaccccaacacggatgtgtttttgatctgcttctctgtcgtaaaccctgcctcttaccacaatgtccagattgatctccgtgatgacccaaaaaccttggcccgtttgctgtatatgaaagagaaacctctcacttacgagcatggtgtgaagctcgcaaaagcgatcggagcacagtgctacttggaatgttcagctctgactcagaaaggtctcaaagcggtttttgatgaagcaatcctcaccattttccaccccaagaaaaagaagaaacgctgttctgagggtcacagctgctgttcaattatctgaggttgtctgggacctgcctccaccccatccagggatgagaatggcagccaatctctgtggccaagctccagccaaaaaggagggcacgaccagaaagcaacctacatttcaagtactatttcccttctctcccatctaattgctaaagattttctttcatacgcacacactccagtgactggaaaaacgggagttttcagtcaaagcttgacatttagagaaaacaaggactttctgcctttataaatggaaatcaactgtgtatgaactataactctgcagaggttatgaattcatcctttacaaacaataatgaacttttagtcctgtaataaatgaaatgttattaggcagctttgttgcatgattgcatagttatatcttgctaacgggccactcatttctcactgatgtggatgaaaaaatgagagcagtatgtttccaggtgtgtgcactcaacaggcaaatagctcccgaggtcaccacttccctaatgggccacaggaagtaagttgatcttgatggggagatcacgtcacccagaaccagcaactggatagagactgttgttagtgtctgggtagagcacaggctcccaggggtcttaagagctaattactgaataaaacaatctagaacaaagc

SEQ ID NO: 8517 - protein, 192 aa, Homo sapiens
MNCKEGTDSSCGCRGNDEKKMLKCVVVGDGAVGKTCLLMSYANDAFPEEYVPTVFDHYAVTVTVGGKQHLLGLYDTAGQEDYNQLRPLSYPNTDVFLICFSVVNPASYHNVQIDLRDDPKTLARLLYMKEKPLTYEHGVKLAKAIGAQCYLECSALTQKGLKAVFDEAILTIFHPKKKKKRCSEGHSCCSII

SEQ ID NO: 8518 - DNA, 3874 bp, Homo sapiens
attccccctgcttctgtggcaggcagtaatccccgctttccatcctctagtcagcttcttcccagccagccacaagcgaacaggctcgcaagcagcggatgaaacaggaagtctgacagcttgagtctgcagtgggacccctagtgttttcccactccatgtcctggcatcgttccccagaagtacaaacacacacacacagagctcccattgttgcagccttcctcagcccactgatcctaatatggaattcagcaggaaacccatgatttcctgacactcggcaagctggaggaagcaaagggaaaaaaactccattaaaaagcccagctttcctccatgttagatgtgacttggaaaatgagaaagatttagcaaaattccaccgtatcttttgccaggctagagacagggagagcagagtaaaaccctcaggctgctgaaatttctaggctgttaggaagcccctcgaattctgtgaaaatgagggtttcttaactcacactgagagcggaaaggggcagacccttttcataactccctcaagtgtgtgttacctttctttaccagcatggtaagcaacaggacatatcccagcctcggacatgtctgtatgatccaaggtacccaaagtcagacagagtaaactcaagcctggcactggctttctgccgcttcatgtgctttggaaaaagcaggagaagcaatagcagcaggagtccccagcagctggagccgcaagaatgaactgcaaagagggaactgacagcagctgcggctgcaggggcaacgacgagaagaagatgttgaagtgtgtggtggtgggggacggtgccgtggggaaaacctgcctgctgatgagctacgccaacgacgccttcccagaggaatacgtgcccactgtgtttgaccactatgcagttactgtgactgtgggaggcaagcaacacttgctcggactgtatgacaccgcgggacaggaggactacaaccagctgaggccactctcctaccccaacacggatgtgtttttgatctgcttctctgtcgtaaaccctgcctcttaccacaatgtccaggaggaatgggtccccgagctcaaggactgcatgcctcacgtgccttatgtcctcatagggacccagattgatctccgtgatgacccaaaaaccttggcccgtttgctgtatatgaaagagaaacctctcacttacgagcatggtgtgaagctcgcaaaagcgatcggagcacagtgctacttggaatgttcagctctgactcagaaaggtctcaaagcggtttttgatgaagcaatcctcaccattttccaccccaagaaaaagaagaaacgctgttctgagggtcacagctgctgttcaattatctgaggttgtctgggacctgcctccaccccatccagggatgagaatggcagccaatctctgtggccaagctccagccaaaaaggagggcacgaccagaaaggaactccctttgcacggaggcttgccccatcaccctctgagccctcccaacacagcacactagtcagcccactgccacgacctccctgccagccagaagcatccgtactgcacgctgtctgagaatgctgggcctggattgcagacagtgccgctgctgatcgcatcaaaaacaaagtcaaaggccatctcacattttacaaatccccagctcatgaacgtgaagctgataggaaatcaccccagggaacccgaaaaagaaacttgattcctctattgctggccttacttgatgtcttttataaaacttgggactacaatactaacctttttttctgaatctgctgttctacccatgtgtctcacattcatttgtattatttcaagaaatgtactaatttccagttcactcaggccttactaatccataccaaattagcctaaagacaaggcattttatattcatttctattttcagcatgtttctaccaaagctattagaaccaacacgtacctctgaatgcccgattataagaagacatgagaagactttaaaagttttggaaatttacagagccatgatttttgaacctaattgaaagaaaaccatctgaattgttgcaggtccacatttttgccaaagatacactctatagatgcttagtagtggcctgatttttttccatgtattgccacgacaaactaaaaatgaactgtgtttaagaatgtagtatttctgtttttcatccaagttgattgggggaagaatatggcaggatccatcttttacagtattttgtattcagtaaagtggacattcctgctcctcccttcccccattgcatgccctcttcctcccttgatttcactttctctcatgcccggatccttttattctccccagttataacccagttataaaagaaagatctgagcataaagatacgtgtttaaaaataactaaaagtaaaggaaagtgccttaatttttctatttgcttcaactgaaagtgcttctcagctcgccccatgtaagttctcattccatgtaaatgacattttccagttacaactggtactgagattttgcctctctctttccttactcatcctcccaaatgtctttgtgggagccatatcagtggataccaagctctgtatccatttgtcccctgccctccacaatgtgtgacatagaacagggactttggccctgggaaagcaaaagctcccagtaaggaatcctgtgcccaatgatgtaaaacaattccaaacatccaggaatttttgtatcatagagcgaattacttcctatcttttcattagaggctatgaggacttctaattagtcttagttgcttataagtgccctggaatcacccaggtaggcacttaatttttttttcagttgcatgagcaaagtgcttcttagtagtgtgaaattacaacaactttaagactttccagattcaagctcccactgttggaaaaagccagcctttctaatctcttctgctactggaataagcacttaagaattgcgtgatagccaggcaccgtggctcatgcctgtaatcccaacacttagggaggctgaggtgggtgggccgcttgagctcaggagttcaagaccagcctgggtaatatagtgagatcctgtgtctctataaaaaaattaaaaattagtcagttgtagtgacacatacctgtagtcccagctactcaggaggctgaggtggaaggatcacttgagcccagaaggtaaggctgcagtgagctgtgactgtgccactacactccagcctgagtgacagagaaagaacctgtcaaaaaaaaaaaaaaaacaacctacatttcaagtactatttcccttctctcccatctaattgctaaagattttctttcatacgcacacactccagtgactggaaaaacgggagttttcagtcaaagcttgacatttagagaaaacaaggactttctgcctttataaatggaaatcaactgtgtatgaactataactctgcagaggttatgaattcatcctttacaaacaataatgaacttttagtcctgtaataaatgaaatgttattaggcagctttgttgcatgattgcatagttatatcttgctaacgggccactcatttctcactgatgtggatgaaaaaatgagagcagtatgtttccaggtgtgtgcactcaacaggcaaatagctcccgaggtcaccacttccctaatgggccacaggaagtaagttgatcttgatggggagatcacgtcacccagaaccagcaactggatagagactgttgttagtgtctgggtagagcacaggctcccaggggtcttaagagctaattactgaataaaacaatctagaacaaagc

SEQ ID NO: 8519 - protein, 214 aa, Homo sapiens; identical to SEQ ID NO: 8513

SEQ ID NO: 8520 - DNA, 3103 bp, Homo sapiens
attccccctgcttctgtggcaggcagtaatccccgctttccatcctctagtcagcttcttcccagccagccacaagcgaacaggctcgcaagcagcggatgaaacaggaagtctgacagcttgagtctgcagtgggacccctagtgttttcccactccatgtcctggcatcgttccccagaagtacaaacacacacacacagagctcccattgttgcagccttcctcagcccactgatcctaatatggaattcagcaggaaacccatgatttcctgacactcggcaagctggaggaagcaaagggaaaaaaactccattaaaaagcccagctttcctccatgttagatgtgacttggaaaatgagaaagatttagcaaaattccaccgtatcttttgccaggctagagacagggagagcagagtaaaaccctcaggctgctgaaatttctaggctgttaggaagcccctcgaattctgtgaaaatgagggtttcttaactcacactgagagcggaaaggggcagacccttttcataactccctcaagtgtgtgttacctttctttaccagcatggtaagcaacaggacatatcccagcctcggacatgtctgtatgatccaaggtacccaaagtcagacagagtaaactcaagcctggcactggctttctgccgcttcatgtgctttggaaaaagcaggagaagcaatagcagcaggagtccccagcagctggagccgcaagaatgaactgcaaagagggaactgacagcagactagtcagcccactgccacgacctccctgccagccagaagcatccgtactgcacgctgtctgagaatgctgggcctggattgcagacagtgccgctgctgatcgcatcaaaaacaaagtcaaaggccatctcacattttacaaatccccagctcatgaacgtgaagctgataggaaatcaccccagggaacccgaaaaagaaacttgattcctctattgctggccttacttgatgtcttttataaaacttgggactacaatactaacctttttttctgaatctgctgttctacccatgtgtctcacattcatttgtattatttcaagaaatgtactaatttccagttcactcaggccttactaatccataccaaattagcctaaagacaaggcattttatattcatttctattttcagcatgtttctaccaaagctattagaaccaacacgtacctctgaatgcccgattataagaagacatgagaagactttaaaagttttggaaatttacagagccatgatttttgaacctaattgaaagaaaaccatctgaattgttgcaggtccacatttttgccaaagatacactctatagatgcttagtagtggcctgatttttttccatgtattgccacgacaaactaaaaatgaactgtgtttaagaatgtagtatttctgtttttcatccaagttgattgggggaagaatatggcaggatccatcttttacagtattttgtattcagtaaagtggacattcctgctcctcccttcccccattgcatgccctcttcctcccttgatttcactttctctcatgcccggatccttttattctccccagttataacccagttataaaagaaagatctgagcataaagatacgtgtttaaaaataactaaaagtaaaggaaagtgccttaatttttctatttgcttcaactgaaagtgcttctcagctcgccccatgtaagttctcattccatgtaaatgacattttccagttacaactggtactgagattttgcctctctctttccttactcatcctcccaaatgtctttgtgggagccatatcagtggataccaagctctgtatccatttgtcccctgccctccacaatgtgtgacatagaacagggactttggccctgggaaagcaaaagctcccagtaaggaatcctgtgcccaatgatgtaaaacaattccaaacatccaggaatttttgtatcatagagcgaattacttcctatcttttcattagaggctatgaggacttctaattagtcttagttgcttataagtgccctggaatcacccaggtaggcacttaatttttttttcagttgcatgagcaaagtgcttcttagtagtgtgaaattacaacaactttaagactttccagattcaagctcccactgttggaaaaagccagcctttctaatctcttctgctactggaataagcacttaagaattgcgtgatagccaggcaccgtggctcatgcctgtaatcccaacacttagggaggctgaggtgggtgggccgcttgagctcaggagttcaagaccagcctgggtaatatagtgagatcctgtgtctctataaaaaaattaaaaattagtcagttgtagtgacacatacctgtagtcccagctactcaggaggctgaggtggaaggatcacttgagcccagaaggtaaggctgcagtgagctgtgactgtgccactacactccagcctgagtgacagagaaagaacctgtcaaaaaaaaaaaaaaaacaacctacatttcaagtactatttcccttctctcccatctaattgctaaagattttctttcatacgcacacactccagtgactggaaaaacgggagttttcagtcaaagcttgacatttagagaaaacaaggactttctgcctttataaatggaaatcaactgtgtatgaactataactctgcagaggttatgaattcatcctttacaaacaataatgaacttttagtcctgtaataaatgaaatgttattaggcagctttgttgcatgattgcatagttatatcttgctaacgggccactcatttctcactgatgtggatgaaaaaatgagagcagtatgtttccaggtgtgtgcactcaacaggcaaatagctcccgaggtcaccacttccctaatgggccacaggaagtaagttgatcttgatggggagatcacgtcacccagaaccagcaactggatagagactgttgttagtgtctgggtagagcacaggctcccaggggtcttaagagctaattactgaataaaacaatctagaacaaagc

SEQ ID NO: 8521 - protein, 30 aa, Homo sapiens; identical to SEQ ID NO: 8515

SEQ ID NO: 8522 - DNA, 542 bp, Homo sapiens
tgaaatcttagtgcaagtttcagctctaaaagaagagtgggctcctgcaagattagcatgaagctggcattcctcttccttggccccatggccctcctccttctggctggctatggctgtgtcctcggtgcctccagtgggaacctgcgcacctttgtgggctgtgccgtgagggagtttactttcctggccaagaagccaggctgcaggggcttcggatcaccacggatgcctgctggggtcgctgtgagacctgggagaaacccattctggaacccccctatattgaagcccatcatcgagtctgtacctacaacgagaccaaacaggtgactgtcaagctgcccaactgtgccccgggagtcgaccccttctacacctatcccgtggccatccgctgtgactgcggagcctgctccactgccaccacggagtgtgagaccatctgaggccgctagctgctctctgcagacccacctgtgtgagcagcacatgcagttatacttcctggatgcaagactgtttaatttcgaccacaccca

SEQ ID NO: 8523 - protein, 91 aa, Homo sapiens; identical to SEQ ID NO: 1240

SEQ ID NO: 8524 - DNA, 9130 bp, Homo sapiens
agtctcaggctcagcgctcagccctacacatcgcctcttgcatgcaactcacagagagggagaggcaacctgtcctcccctctctcagcctcggcatctccagccaccaaggacctgcttttcgcacctccaacaacccctcccttctaccctgccactccctcccagagagaaaggaaaaggagagagaaagattctggaatttgaacctacccaaagaggaaacatacccagcaaactcagttgattaaacatcaaacagacatacagacagatcccaaatcttctgttcaactggaaaggtcttttctctggagtcctgggaggcaagttatgggcagcactgcttctggccgcaccatgaagcctgagtctgcttgcgctctgcccagggccctgctctgtctgagcattgggcttctagctgcccccctccccacagcctgccgctgctaggaggtagaactttaggagtggtccttggcctgtttctacctgtcacctggctcacctcaccactcactcctcctccatcacagcaccccggccctccctgtccctggcctccctggctggggcatttgggggtccgctgggaggagtgcatcgctgaaggcttcttcctactctcctgcaccttctcctccttgagtcaaggcctccggatccacatggatagctgagatcttttcttggagaaagacgctttcctctttactccagtccctcacttccccacctgattttcctcctcttctgctggtcctgtctttttctactgcctctttattcaatttcttgcttgtgtgcccctctgggactctcttgtacactttcctccatctccactatctcaggatctgtgtgtgtgctgccttcctcctgtgtgctttctgtccccccatctctgtcttgtctttcccacttctattgccaaagggagagatcctctccgggctgttccctggcctgtctgctcctccgggctctgtcccagcagcgacaatgagctccacactccactcggttttcttcaccctgaaggtcagcatcctgctggggtccctgctggggctctgcctgggccttgagttcatgggcctccccaaccagtgggcccgctacctccgctgggatgccagcacacgcagtgacctgagtttccagttcaagaccaacgtctctacggggctgctcctctacctggatgatggcggcgtctgcgacttcctatgcctctccctggtggatggccgcgttcagctccgcttcagcatggactgtgccgagactgccgtgctgtccaacaagcaggtgaatgacagcagctggcacttcctcatggtgagccgtgaccgcctgcgcacggtgctgatgcttgatggcgagggccagtctggggagctgcagccccagcggccctacatggatgtggtcagtgacttgttccttggtggagtccctactgacatacgaccttctgccctgacccttgatggagttcaggccatgcccggcttcaaggggttaattctggatctcaagtatggaaactcggagcctcggcttctggggagccggggtgtccagatggatgccgagggaccctgtggtgagcgtccctgtgaaaatggtgggatctgctttctcctggacggccaccccacctgtgactgttctaccactggctatggtggcaagctctgctcagaaggcctctcccacctcatgatgagtgaacaaggtagaagtaaagctcgagaggagaatgtggccactttccgaggctcagagtatctgtgctacgacctgtctcagaacccgatccagagcagcagtgatgaaatcaccctctcctttaagacctggcagcgtaacggcctcatcctgcacacgggcaagtcggctgactatgtcaacctggctctgaaggatggtgcggtctccttggtcattaacctggggtccggggcctttgaggccattgtggagccagtgaatggaaaattcaacgacaacgcctggcatgatgtcaaagtgacacgcaacctccggcaggtgacaatctctgtggatggcattcttaccacgacgggctacactcaagaggactataccatgctgggctcggacgacttcttctatgtaggaggaagcccaagtaccgctgacttgcctggctcccctgtcagcaacaacttcatgggctgccttaaagaggttgtttataagaataatgacatccgtctggagctgtctcgcctggcccggattgcggacaccaagatgaaaatctatggcgaagttgtgtttaagtgtgagaatgtggccacactggaccccatcaactttgagaccccagaggcttacatcagcttgcccaagtggaacactaaacgtatgggctccatctcctttgacttccgcaccacagagcccaatggcctgatcctcttcactcatggaaagccccaagagaggaaggatgctcggagccagaagaatacaaaagtagacttctttgccgtggaactcctcgatggcaacctgtacttgctgcttgacatgggctctggcaccatcaaagtgaaagccactcagaagaaagccaatgatggggaatggtaccatgtggacattcagcgagatggcagatcaggtactatatcagtgaacagcaggcgcacgccattcaccgccagtggggagagcgagatcctggacctggaaggagacatgtacctgggagggctgccggagaaccgtgctggccttattctccccaccgagctgtggactgccatgctcaactatggctacgtgggctgcatccgcgacctattcattgatgggcgcagcaagaacattcgacagctggcagagatgcagaatgctgcgggtgtcaagtcctcctgttcacggatgagtgccaagcagtgtgacagctacccctgcaagaataatgctgtgtgcaaggacggctggaaccgcttcatctgcgactgcaccggcaccggatactggggaagaacctgcgaaagggaggcatccatcctgagctatgatggtagcatgtacatgaagatcatcatgcccatggtcatgcatactgaggcagaggatgtgtccttccgcttcatgtcccagcgagcttatgggctgctggtggctacgacctccagggactctgccgacaccctgcgtctggagctggatggggggcgtgtcaagctcatggttaacttaggcaaaggaccagagaccttgtatgcagggcagaagctcaatgacaacgagtggcacaccgttcgggtggtgcggagaggaaaaagccttaagttaaccgtggatgatgatgtggctgagggtacaatggtgggagaccatacccgtttggagttccacaacattgaaacgggaatcatgactgagaaacgctacatctccgttgtcccctccagctttattggccatctgcagagcctcatgtttaatggccttctctacattgacttgtgcaaaaatggtgacattgattattgtgagctgaaggctcgttttggactgaggaacatcatcgctgaccctgtcacctttaagaccaagagcagctacctgagccttgccactcttcaggcttacacctccatgcacctcttcttccagttcaagaccacctcaccagatggcttcattctcttcaatagtggtgatggcaatgacttcattgcagtcgagcttgtcaaggggtatatacactacgtttttgacctcggaaacggtcccaatgtgatcaaaggcaacagtgaccgccccctgaatgacaaccagtggcacaatgtcgtcatcactcgggacaatagtaacactcatagcctgaaagtggacaccaaagtggtcactcaggttatcaatggtgccaaaaatctggatttgaaaggtgatctctatatggctggtctggcccaaggcatgtacagcaacctcccaaagctcgtggcctctcgagatggctttcagggctgtctagcatcagtggacttgaatggacgcctgccagacctcatcaatgatgctcttcatcggagcggacagatcgagcgtggctgtgaaggacccagtaccacctgccaggaagattcatgtgccaaccagggggtctgcatgcaacaatgggagggcttcacctgtgattgttctatgacctcttattctggaaaccagtgcaatgatcctggcgctacgtacatctttgggaaaagtggtgggcttatcctctacacctggccagccaatgacaggcccagcacgcggtctgaccgccttgccgtgggcttcagcaccactgtgaaggatggcatcttggtccgcatcgacagtgctccaggacttggtgacttcctccagcttcacatagaacaggggaaaattggagttgtcttcaacattggcacagttgacatctccatcaaagaggagagaacccctgtaaatgacggcaaataccatgtggtacgcttcaccaggaacggcggcaacgccaccctgcaggtggacaactggccagtgaatgaacattatcctacaggcaacactgataatgaacgcttccaaatggtaaaacagaaaatccccttcaaatataatcggcctgtagaggagtggctgcaggaaaaaggccggcagttaaccatcttcaacactcaggcgcaaatagccattggtggaaaggacaaaggacgcctcttccaaggccaactctctgggctctattatgatggtttgaaagtactgaacatggcggctgagaacaaccccaatattaaaatcaatggaagtgttcggctggttggagaagtcccatcaattttgggaacaacacagacgacctccatgccaccagaaatgtctactactgtcatggaaaccactactacaatggcgactaccacaacccgtaagaatcgctctacagccagcattcagccaacatcagatgatcttgtttcatctgctgaatgttcaagtgatgatgaagactttgttgaatgtgagccgagtacaggtaggtcagccagaagctctaatgcagctagatcactccgtgccgcccttacatggacatggcgactcacttacacatttactcctatcatcttcatctcctgtgtagttcactcatagatatgaccctccccttcctgcatctttccttcccattctccccctttctttagcattgttaaaatttatgtgctgtcatccatctccctaaattaaagaaagcctaaaatttgtcaaaaagacaaaaaaatatatatatctgaaaacttataaatgcagaaattcattcaaaacccgttagagtcatagaattttttgaaaggcaaattataaaagtaaacaggtttttttgtttggtttttcaatcatagcaatcggaattattttaaattcaaaaattgatgccctcccaaaccccccaaagtaaaaatttgttaaagtgcagattttttttttctttttatgttatgtggtgtggatgtatgtgttgttgcctccctgtatcatcctctgttgtaaattattatatttgaaaaattagacattttgctcaaaagtttttaagaaatgacaacaaaaaaagcaagttacaagaatgtggcaattctatttgtccaagagcattcttacacaactttcttttgtaaatttttctttcatgccaaaaaacatgcgggcaatttgttgatgaggtgaattagttatccctcttcttgtagaagaccctttagctacccctcctattgctactcgtgcaccttccattacactcccccctacctttcgccccctcctcaccattattgagaccaccaaagattccctgtccatgacctctgaggcggggttaccttgcttgtcggaccaaggcagcgatggttgtgatgatgatggcttggtgatatctgggtatggctcaggggaaacctttgactctaacctgccccctactgatgatgaagatttttacaccaccttctccttggtaacagataagagtctttccacttcaatcttcgaaggtggctacaaagcacatgcgcccaagtgggaatccaaggactttagacctaacaaagtctccgaaactagtaggactactaccacatctttatcccctgagctgatccgcttcacagcttcctcctcgtctgggatggtgcccaaattgccagctggcaaaatgaataaccgtgatctcaaaccccagcctgatatagtcttgcttccgttgcccactgcctatgagctagacagcaccaaactgaagagcccactaattacttcccccatgttccgtaatgtgcccacagcaaaccccacggagccgggaatcagacgggttccgggggcctcagaggtgatccgggagtcgagcagcacaacagggatggtcgtcggcattgtggctgctgccgccctctgcatcttgatcctcctgtacgccatgtacaagtacaggaacagggacgaggggtcctatcaagtggacgagacgcggaactacatcagcaactccgcccagagcaacggcacgctcatgaaggagaagcagcagagctcgaagagcggccacaagaaacagaaaaacaaggacagggagtattacgtgtaaacatgcgaacactgctcacacgcgagttttcacagttatttctatccacgcctatgaatctttggacggtgagatctcacagatgtcagaactgctggaactatgaaatggggtatataaccacgactctggtggggaaaaccgttttttaaaggacacacacacacacagcgatgcatctctctctaaagctcagccacggctgcggcaaggtcccagcggtcgctgggagacagaaggttttgtgccctgctgtatcataaagcacacacttagcgctctggagccggacggtggctccaccacttccgcaggcctggaaacttccttctccggaggaccttttactaaaaggtagaagacttcatggcttacttgttccataactccaagtgagtctgtaatgtttgtgaagcttgactgtaaccatgttttttctgtttaattatgtaaaaaacaaaactacaacaacaaaaaaagaaaaaagttaaaaaagaaaaaaacaccaaaaaacaaaaacaaacaaaaaaaaaaacccacaacccttatctggttctgaccagtgtgcgtgtaactttatgatctgaggggaaaaatggcttttgggtttttgtttatttttttgataatgactggacatcagaagaggaaaaaaactcaaaacaaaagcgagagagactattgccatatgaactcaaaagctatcatggtgttcactctacatatcaggttatggtgtctctagaatctgttgtttgtttcctataagatgctttgctgaacacatagcaaaattcatgtgacggatgataaattgattcgaaaagctggtcccccaggatctaatttcagaatttaccacccaaacccggaacagatgggtttagggctggtgttatcagagctattggctttacgtaacaatattgttcctgtccattcacccagccaaattgtgttaaagaggaaagccccacaaactaaaacagcctttcctagggaagaggaaggggaggtgggctggatctgtgactgattgaaatgcatgcaaataaaaaagacaatattaaagtctgttatcaaaccagacagtaggggagttcaactcgtgatggaaccacaaaaggtcacacaagccaaccatgtcatgccagagtacaaaacacatagttctttccccgccccgaatgtgacaatggttttcatagtggtttaattttgtagcctgacatttatggataactctgtccttccatttgctcacttctctcttcacccatcttttttaaaaacaaataaatgaataaagctgctgtgacacacacacaaaaggaatttaatagtataatatatatataaataaatatatatacagatatatttatcatggtatgtttgatgggatgactgacacaggaaatctgttaaagtcttaaaatggaatgagaatgttgttttaaaagaaaatagcaaaacaacaaaaaagcaaaccttaaaatgtgaagaaagtgtgaattttagttttgtcacagttaactgtgtcaaagagaattaaaaaaaaaaacttcagattttgtttacatattttactacatttttgctggtataattccttagccacctatgtacatactgctttaagaaatgtttttttcctgtttatttctgtttggtttatattctggttgtctttttctttttgtaaagaggaaacaatgtacagaaaaacaataaactggttgtatggccatagctatccgaaaagcaagagacaaagcaagacaaatattcacacaaaaatgaagtgtgtcctctggagggtcagatatacaatttcttttgtacagatgaaaatcaatcagctgcttagatttagaaatctactcttgctggtctttgtaagttgcatgaatatttgactttgaaaaaatatcttaacgacatggggcaaaaagtgcaatctaaatggtagcctttactaatgtgtgtggaaagaggtgttcctcattatctaatatttcaatgtgttaagagtttaatttttttgttatcattaaaaaagacaggattataaagagatatcaaagcacgattttagataacctaaacggcccagcctatacgaagttgattatatctcgatgtctgtaaaagattgctgttcttggagtcttgaggtcttgtgaattgatttcctgctttctttcatttttttcaatttaagtaataatacatttgttatattcctttcagtgtaagtttctatttggacaattttatgggaacatgtgcattctctatgtgagcttctatcatattcctgttttattagcagaacctaaaggaatttatttaatgatgttgtgacattactgctttttcttttttcttttcttagttcatatttgcattttcgttcaaggatatgcttagcaataaaatgttcttccc

SEQ ID NO: 8525 - protein, 1392 aa, Homo sapiens
MSSTLHSVFFTLKVSILLGSLLGLCLGLEFMGLPNQWARYLRWDASTRSDLSFQFKTNVSTGLLLYLDDGGVCDFLCLSLVDGRVQLRFSMDCAETAVLSNKQVNDSSWHFLMVSRDRLRTVLMLDGEGQSGELQPQRPYMDVVSDLFLGGVPTDIRPSALTLDGVQAMPGFKGLILDLKYGNSEPRLLGSRGVQMDAEGPCGERPCENGGICFLLDGHPTCDCSTTGYGGKLCSEGLSHLMMSEQGRSKAREENVATFRGSEYLCYDLSQNPIQSSSDEITLSFKTWQRNGLILHTGKSADYVNLALKDGAVSLVINLGSGAFEAIVEPVNGKFNDNAWHDVKVTRNLRQVTISVDGILTTTGYTQEDYTMLGSDDFFYVGGSPSTADLPGSPVSNNFMGCLKEVVYKNNDIRLELSRLARIADTKMKIYGEVVFKCENVATLDPINFETPEAYISLPKWNTKRMGSISFDFRTTEPNGLILFTHGKPQERKDARSQKNTKVDFFAVELLDGNLYLLLDMGSGTIKVKATQKKANDGEWYHVDIQRDGRSGTISVNSRRTPFTASGESEILDLEGDMYLGGLPENRAGLILPTELWTAMLNYGYVGCIRDLFIDGRSKNIRQLAEMQNAAGVKSSCSRMSAKQCDSYPCKNNAVCKDGWNRFICDCTGTGYWGRTCEREASILSYDGSMYMKIIMPMVMHTEAEDVSFRFMSQRAYGLLVATTSRDSADTLRLELDGGRVKLMVNLGKGPETLYAGQKLNDNEWHTVRVVRRGKSLKLTVDDDVAEGTMVGDHTRLEFHNIETGIMTEKRYISVVPSSFIGHLQSLMFNGLLYIDLCKNGDIDYCELKARFGLRNIIADPVTFKTKSSYLSLATLQAYTSMHLFFQFKTTSPDGFILFNSGDGNDFIAVELVKGYIHYVFDLGNGPNVIKGNSDRPLNDNQWHNVVITRDNSNTHSLKVDTKVVTQVINGAKNLDLKGDLYMAGLAQGMYSNLPKLVASRDGFQGCLASVDLNGRLPDLINDALHRSGQIERGCEGPSTTCQEDSCANQGVCMQQWEGFTCDCSMTSYSGNQCNDPGATYIFGKSGGLILYTWPANDRPSTRSDRLAVGFSTTVKDGILVRIDSAPGLGDFLQLHIEQGKIGVVFNIGTVDISIKEERTPVNDGKYHVVRFTRNGGNATLQVDNWPVNEHYPTGNTDNERFQMVKQKIPFKYNRPVEEWLQEKGRQLTIFNTQAQIAIGGKDKGRLFQGQLSGLYYDGLKVLNMAAENNPNIKINGSVRLVGEVPSILGTTQTTSMPPEMSTTVMETTTTMATTTTRKNRSTASIQPTSDDLVSSAECSSDDEDFVECEPSTGRSARSSNAARSLRAALTWTWRLTYTFTPIIFISCVVHS

SEQ ID NO: 8526 - DNA, 9609 bp, Homo sapiens
agtctcaggctcagcgctcagccctacacatcgcctcttgcatgcaactcacagagagggagaggcaacctgtcctcccctctctcagcctcggcatctccagccaccaaggacctgcttttcgcacctccaacaacccctcccttctaccctgccactccctcccagagagaaaggaaaaggagagagaaagattctggaatttgaacctacccaaagaggaaacatacccagcaaactcagttgattaaacatcaaacagacatacagacagatcccaaatcttctgttcaactggaaaggtcttttctctggagtcctgggaggcaagttatgggcagcactgcttctggccgcaccatgaagcctgagtctgcttgcgctctgcccagggccctgctctgtctgagcattgggcttctagctgcccccctccccacagcctgccgctgctaggaggtagaactttaggagtggtccttggcctgtttctacctgtcacctggctcacctcaccactcactcctcctccatcacagcaccccggccctccctgtccctggcctccctggctggggcatttgggggtccgctgggaggagtgcatcgctgaaggcttcttcctactctcctgcaccttctcctccttgagtcaaggcctccggatccacatggatagctgagatcttttcttggagaaagacgctttcctctttactccagtccctcacttccccacctgattttcctcctcttctgctggtcctgtctttttctactgcctctttattcaatttcttgcttgtgtgcccctctgggactctcttgtacactttcctccatctccactatctcaggatctgtgtgtgtgctgccttcctcctgtgtgctttctgtccccccatctctgtcttgtctttcccacttctattgccaaagggagagatcctctccgggctgttccctggcctgtctgctcctccgggctctgtcccagcagcgacaatgagctccacactccactcggttttcttcaccctgaaggtcagcatcctgctggggtccctgctggggctctgcctgggccttgagttcatgggcctccccaaccagtgggcccgctacctccgctgggatgccagcacacgcagtgacctgagtttccagttcaagaccaacgtctctacggggctgctcctctacctggatgatggcggcgtctgcgacttcctatgcctctccctggtggatggccgcgttcagctccgcttcagcatggactgtgccgagactgccgtgctgtccaacaagcaggtgaatgacagcagctggcacttcctcatggtgagccgtgaccgcctgcgcacggtgctgatgcttgatggcgagggccagtctggggagctgcagccccagcggccctacatggatgtggtcagtgacttgttccttggtggagtccctactgacatacgaccttctgccctgacccttgatggagttcaggccatgcccggcttcaaggggttaattctggatctcaagtatggaaactcggagcctcggcttctggggagccggggtgtccagatggatgccgagggaccctgtggtgagcgtccctgtgaaaatggtgggatctgctttctcctggacggccaccccacctgtgactgttctaccactggctatggtggcaagctctgctcagaaggcctctcccacctcatgatgagtgaacaaggtagaagtaaagctcgagaggagaatgtggccactttccgaggctcagagtatctgtgctacgacctgtctcagaacccgatccagagcagcagtgatgaaatcaccctctcctttaagacctggcagcgtaacggcctcatcctgcacacgggcaagtcggctgactatgtcaacctggctctgaaggatggtgcggtctccttggtcattaacctggggtccggggcctttgaggccattgtggagccagtgaatggaaaattcaacgacaacgcctggcatgatgtcaaagtgacacgcaacctccggcaggtgacaatctctgtggatggcattcttaccacgacgggctacactcaagaggactataccatgctgggctcggacgacttcttctatgtaggaggaagcccaagtaccgctgacttgcctggctcccctgtcagcaacaacttcatgggctgccttaaagaggttgtttataagaataatgacatccgtctggagctgtctcgcctggcccggattgcggacaccaagatgaaaatctatggcgaagttgtgtttaagtgtgagaatgtggccacactggaccccatcaactttgagaccccagaggcttacatcagcttgcccaagtggaacactaaacgtatgggctccatctcctttgacttccgcaccacagagcccaatggcctgatcctcttcactcatggaaagccccaagagaggaaggatgctcggagccagaagaatacaaaagtagacttctttgccgtggaactcctcgatggcaacctgtacttgctgcttgacatgggctctggcaccatcaaagtgaaagccactcagaagaaagccaatgatggggaatggtaccatgtggacattcagcgagatggcagatcaggtactatatcagtgaacagcaggcgcacgccattcaccgccagtggggagagcgagatcctggacctggaaggagacatgtacctgggagggctgccggagaaccgtgctggccttattctccccaccgagctgtggactgccatgctcaactatggctacgtgggctgcatccgcgacctattcattgatgggcgcagcaagaacattcgacagctggcagagatgcagaatgctgcgggtgtcaagtcctcctgttcacggatgagtgccaagcagtgtgacagctacccctgcaagaataatgctgtgtgcaaggacggctggaaccgcttcatctgcgactgcaccggcaccggatactggggaagaacctgcgaaagggaggcatccatcctgagctatgatggtagcatgtacatgaagatcatcatgcccatggtcatgcatactgaggcagaggatgtgtccttccgcttcatgtcccagcgagcttatgggctgctggtggctacgacctccagggactctgccgacaccctgcgtctggagctggatggggggcgtgtcaagctcatggttaacttaggcaaaggaccagagaccttgtatgcagggcagaagctcaatgacaacgagtggcacaccgttcgggtggtgcggagaggaaaaagccttaagttaaccgtggatgatgatgtggctgagggtacaatggtgggagaccatacccgtttggagttccacaacattgaaacgggaatcatgactgagaaacgctacatctccgttgtcccctccagctttattggccatctgcagagcctcatgtttaatggccttctctacattgacttgtgcaaaaatggtgacattgattattgtgagctgaaggctcgttttggactgaggaacatcatcgctgaccctgtcacctttaagaccaagagcagctacctgagccttgccactcttcaggcttacacctccatgcacctcttcttccagttcaagaccacctcaccagatggcttcattctcttcaatagtggtgatggcaatgacttcattgcagtcgagcttgtcaaggggtatatacactacgtttttgacctcggaaacggtcccaatgtgatcaaaggcaacagtgaccgccccctgaatgacaaccagtggcacaatgtcgtcatcactcgggacaatagtaacactcatagcctgaaagtggacaccaaagtggtcactcaggttatcaatggtgccaaaaatctggatttgaaaggtgatctctatatggctggtctggcccaaggcatgtacagcaacctcccaaagctcgtggcctctcgagatggctttcagggctgtctagcatcagtggacttgaatggacgcctgccagacctcatcaatgatgctcttcatcggagcggacagatcgagcgtggctgtgaaggacccagtaccacctgccaggaagattcatgtgccaaccagggggtctgcatgcaacaatgggagggcttcacctgtgattgttctatgacctcttattctggaaaccagtgcaatgatcctggcgctacgtacatctttgggaaaagtggtgggcttatcctctacacctggccagccaatgacaggcccagcacgcggtctgaccgccttgccgtgggcttcagcaccactgtgaaggatggcatcttggtccgcatcgacagtgctccaggacttggtgacttcctccagcttcacatagaacaggggaaaattggagttgtcttcaacattggcacagttgacatctccatcaaagaggagagaacccctgtaaatgacggcaaataccatgtggtacgcttcaccaggaacggcggcaacgccaccctgcaggtggacaactggccagtgaatgaacattatcctacaggcaacactgataatgaacgcttccaaatggtaaaacagaaaatccccttcaaatataatcggcctgtagaggagtggctgcaggaaaaaggccggcagttaaccatcttcaacactcaggcgcaaatagccattggtggaaaggacaaaggacgcctcttccaaggccaactctctgggctctattatgatggtttgaaagtactgaacatggcggctgagaacaaccccaatattaaaatcaatggaagtgttcggctggttggagaagtcccatcaattttgggaacaacacagacgacctccatgccaccagaaatgtctactactgtcatggaaaccactactacaatggcgactaccacaacccgtaagaatcgctctacagccagcattcagccaacatcagatgatcttgtttcatctgctgaatgttcaagtgatgatgaagactttgttgaatgtgagccgagtacaggtaggtcagccagaagctctaatgcagctagatcactccgtgccgcccttacatggacatggcgactcacttacacatttactcctatcatcttcatctcctgtgtagttcactcatagatatgaccctccccttcctgcatctttccttcccattctccccctttctttagcattgttaaaatttatgtgctgtcatccatctccctaaattaaagaaagcctaaaatttgtcaaaaagacaaaaaaatatatatatctgaaaacttataaatgcagaaattcattcaaaacccgttagagtcatagaattttttgaaaggcaaattataaaagtaaacaggtttttttgtttggtttttcaatcatagcaatcggaattattttaaattcaaaaattgatgccctcccaaaccccccaaagtaaaaatttgttaaagtgcagattttttttttctttttatgttatgtggtgtggatgtatgtgttgttgcctccctgtatcatcctctgttgtaaattattatatttgaaaaattagacattttgctcaaaagtttttaagaaatgacaacaaaaaaagcaagttacaagaatgtggcaattctatttgtccaagagcattcttacacaactttcttttgtaaatttttctttcatgccaaaaaacatgcgggcaatttgttgatgaggtgaattagttatccctcttcttgtagaagaccctttagctacccctcctattgctactcgtgcaccttccattacactcccccctacctttcgccccctcctcaccattattgagaccaccaaagattccctgtccatgacctctgaggcggggttaccttgcttgtcggaccaaggcagcgatggttgtgatgatgatggcttggtgatatctgggtatggctcaggggaaacctttgactctaacctgccccctactgatgatgaagatttttacaccaccttctccttggtaacagataagagtctttccacttcaatcttcgaaggtggctacaaagcacatgcgcccaagtgggaatccaaggactttagacctaacaaagtctccgaaactagtaggactactaccacatctttatcccctgagctgatccgcttcacagcttcctcctcgtctgggatggtgcccaaattgccagctggcaaaatgaataaccgtgatctcaaaccccagcctgatatagtcttgcttccgttgcccactgcctatgagctagacagcaccaaactgaagagcccactaattacttcccccatgttccgtaatgtgcccacagcaaaccccacggagccgggaatcagacgggttccgggggcctcagaggtgatccgggagtcgagcagcacaacagggatggtcgtcggcattgtggctgctgccgccctctgcatcttgatcctcctgtacgccatgtacaagtacaggaacagggacgaggggtcctatcaagtggacgagacgcggaactacatcagcaactccgcccagagcaacggcacgctcatgaaggagaagcagcagagctcgaagagcggccacaagaaacagaaaaacaaggacagggagtattacgtgtaaacatgcgaacactgctcacacgcgagttttcacagttatttctatccacgcctatgaatctttggacggtgagatctcacagatgtcagaactgctggaactatgaaatggggtatataaccacgactctggtggggaaaaccgttttttaaaggacacacacacacacagcgatgcatctctctctaaagctcagccacggctgcggcaaggtcccagcggtcgctgggagacagaaggttttgtgccctgctgtatcataaagcacacacttagcgctctggagccggacggtggctccaccacttccgcaggcctggaaacttccttctccggaggaccttttactaaaaggtagaagacttcatggcttacttgttccataactccaagtgagtctgtaatgtttgtgaagcttgactgtaaccatgttttttctgtttaattatgtaaaaaacaaaactacaacaacaaaaaaagaaaaaagttaaaaaagaaaaaaacaccaaaaaacaaaaacaaacaaaaaaaaaaacccacaacccttatctggttctgaccagtgtgcgtgtaactttatgatctgaggggaaaaatggcttttgggtttttgtttatttttttgataatgactggacatcagaagaggaaaaaaactcaaaacaaaagcgagagagactattgccatatgaactcaaaagctatcatggtgttcactctacatatcaggttatggtgtctctagaatctgttgtttgtttcctataagatgctttgctgaacacatagcaaaattcatgtgacggatgataaattgattcgaaaagctggtcccccaggatctaatttcagaatttaccacccaaacccggaacagatgggtttagggctggtgttatcagagctattggctttacgtaacaatattgttcctgtccattcacccagccaaattgtgttaaagaggaaagccccacaaactaaaacagcctttcctagggaagaggaaggggaggtgggctggatctgtgactgattgaaatgcatgcaaataaaaaagacaatattaaagtctgttatcaaaccagacagtaggggagttcaactcgtgatggaaccacaaaaggtcacacaagccaaccatgtcatgccagagtacaaaacacatagttctttccccgccccgaatgtgacaatggttttcatagtggtttaattttgtagcctgacatttatggataactctgtccttccatttgctcacttctctcttcacccatcttttttaaaaacaaataaatgaataaagctgctgtgacacacacacaaaaggaatttaatagtataatatatatataaataaatatatatacagatatatttatcatggtatgtttgatgggatgactgacacaggaaatctgttaaagtcttaaaatggaatgagaatgttgttttaaaagaaaatagcaaaacaacaaaaaagcaaaccttaaaatgtgaagaaagtgtgaattttagttttgtcacagttaactgtgtcaaagagaattaaaaaaaaaaacttcagattttgtttacatattttactacatttttgctggtataattccttagccacctatgtacatactgctttaagaaatgtttttttcctgtttatttctgtttggtttatattctggttgtctttttctttttgtaaagaggaaacaatgtacagaaaaacaataaactggttgtatggccatagctatccgaaaagcaagagacaaagcaagacaaatattcacacaaaaatgaagtgtgtcctctggagggtcagatatacaatttcttttgtacagatgaaaatcaatcagctgcttagatttagaaatctactcttgctggtctttgtaagttgcatgaatatttgactttgaaaaaatatcttaacgacatggggcaaaaagtgcaatctaaatggtagcctttactaatgtgtgtggaaagaggtgttcctcattatctaatatttcaatgtgttaagagtttaatttttttgttatcattaaaaaagacaggattataaagagatatcaaagcacgattttagataacctaaacggcccagcctatacgaagttgattatatctcgatgtctgtaaaagattgctgttcttggagtcttgaggtcttgtgaattgatttcctgctttctttcatttttttcaatttaagtaataatacatttgttatattcctttcagtgtaagtttctatttggacaattttatgggaacatgtgcattctctatgtgagcttctatcatattcctgttttattagcagaacctaaaggaatttatttaatgatgttgtgacattactgctttttcttttttcttttcttagttcatatttgcattttcgttcaaggatatgcttagcaataaaatgttcttcccaaaaccttgtatgctgatgcacttttattttcttaacatttgagaaaatctcgcactgaagctaattatgtcatatcttattaaaagccgagtaagagctagaccactttcatgtgatagaagatattctaagcagttactaattattacattatcaaaatgccatatttatgagataattatctgttacttgaggcattattttttagattgctatgatagaataaccaggagggagtgcatttttctggaaagatgatagaaacattgtattctagaaaagattattggatactatggttttgtttgtttgtttttgttttttgtttttcgttttttgtttgttttttttttgagacagagtctcgctctgtcgcccgggctggagtgcagtggcacgatctcggctcactgcaagctccgcctcccgggttcacaccattctcctgcctcagccccccgagtaggtgggactacag

SEQ ID NO: 8527 - protein, 1392 aa, Homo sapiens; identical to SEQ ID NO: 8525

SEQ ID NO: 8528 - DNA, 6137 bp, Homo sapiens
caggactggagggcttgaggaatgtggtggtccctctcttcgttgtttctgccccctgaggttgtgctttctcagggatatgcactctgcacttccattcctgcagtgaaattaactcgagcttggcagctcgagaggagaatgtggccactttccgaggctcagagtatctgtgctacgacctgtctcagaacccgatccagagcagcagtgatgaaatcaccctctcctttaagacctggcagcgtaacggcctcatcctgcacacgggcaagtcggctgactatgtcaacctggctctgaaggatggtgcggtctccttggtcattaacctggggtccggggcctttgaggccattgtggagccagtgaatggaaaattcaacgacaacgcctggcatgatgtcaaagtgacacgcaacctccggcaggtgacaatctctgtggatggcattcttaccacgacgggctacactcaagaggactataccatgctgggctcggacgacttcttctatgtaggaggaagcccaagtaccgctgacttgcctggctcccctgtcagcaacaacttcatgggctgccttaaagaggttgtttataagaataatgacatccgtctggagctgtctcgcctggcccggattgcggacaccaagatgaaaatctatggcgaagttgtgtttaagtgtgagaatgtggccacactggaccccatcaactttgagaccccagaggcttacatcagcttgcccaagtggaacactaaacgtatgggctccatctcctttgacttccgcaccacagagcccaatggcctgatcctcttcactcatggaaagccccaagagaggaaggatgctcggagccagaagaatacaaaagtagacttctttgccgtggaactcctcgatggcaacctgtacttgctgcttgacatgggctctggcaccatcaaagtgaaagccactcagaagaaagccaatgatggggaatggtaccatgtggacattcagcgagatggcagatcaggtactatatcagtgaacagcaggcgcacgccattcaccgccagtggggagagcgagatcctggacctggaaggagacatgtacctgggagggctgccggagaaccgtgctggccttattctccccaccgagctgtggactgccatgctcaactatggctacgtgggctgcatccgcgacctattcattgatgggcgcagcaagaacattcgacagctggcagagatgcagaatgctgcgggtgtcaagtcctcctgttcacggatgagtgccaagcagtgtgacagctacccctgcaagaataatgctgtgtgcaaggacggctggaaccgcttcatctgcgactgcaccggcaccggatactggggaagaacctgcgaaagggaggcatccatcctgagctatgatggtagcatgtacatgaagatcatcatgcccatggtcatgcatactgaggcagaggatgtgtccttccgcttcatgtcccagcgagcttatgggctgctggtggctacgacctccagggactctgccgacaccctgcgtctggagctggatggggggcgtgtcaagctcatggttaacttagactgtatcaggataaactgtaactccagcaaaggaccagagaccttgtatgcagggcagaagctcaatgacaacgagtggcacaccgttcgggtggtgcggagaggaaaaagccttaagttaaccgtggatgatgatgtggctgagggtacaatggtgggagaccatacccgtttggagttccacaacattgaaacgggaatcatgactgagaaacgctacatctccgttgtcccctccagctttattggccatctgcagagcctcatgtttaatggccttctctacattgacttgtgcaaaaatggtgacattgattattgtgagctgaaggctcgttttggactgaggaacatcatcgctgaccctgtcacctttaagaccaagagcagctacctgagccttgccactcttcaggcttacacctccatgcacctcttcttccagttcaagaccacctcaccagatggcttcattctcttcaatagtggtgatggcaatgacttcattgcagtcgagcttgtcaaggggtatatacactacgtttttgacctcggaaacggtcccaatgtgatcaaaggcaacagtgaccgccccctgaatgacaaccagtggcacaatgtcgtcatcactcgggacaatagtaacactcatagcctgaaagtggacaccaaagtggtcactcaggttatcaatggtgccaaaaatctggatttgaaaggtgatctctatatggctggtctggcccaaggcatgtacagcaacctcccaaagctcgtggcctctcgagatggctttcagggctgtctagcatcagtggacttgaatggacgcctgccagacctcatcaatgatgctcttcatcggagcggacagatcgagcgtggctgtgaaggacccagtaccacctgccaggaagattcatgtgccaaccagggggtctgcatgcaacaatgggagggcttcacctgtgattgttctatgacctcttattctggaaaccagtgcaatgatcctggcgctacgtacatctttgggaaaagtggtgggcttatcctctacacctggccagccaatgacaggcccagcacgcggtctgaccgccttgccgtgggcttcagcaccactgtgaaggatggcatcttggtccgcatcgacagtgctccaggacttggtgacttcctccagcttcacatagaacaggggaaaattggagttgtcttcaacattggcacagttgacatctccatcaaagaggagagaacccctgtaaatgacggcaaataccatgtggtacgcttcaccaggaacggcggcaacgccaccctgcaggtggacaactggccagtgaatgaacattatcctacaggccggcagttaaccatcttcaacactcaggcgcaaatagccattggtggaaaggacaaaggacgcctcttccaaggccaactctctgggctctattatgatggtttgaaagtactgaacatggcggctgagaacaaccccaatattaaaatcaatggaagtgttcggctggttggagaagtcccatcaattttgggaacaacacagacgacctccatgccaccagaaatgtctactactgtcatggaaaccactactacaatggcgactaccacaacccgtaagaatcgctctacagccagcattcagccaacatcagatgatcttgtttcatctgctgaatgttcaagtgatgatgaagactttgttgaatgtgagccgagtacaggtaggtcagcaaaccccacggagccgggaatcagacgggttccgggggcctcagaggtgatccgggagtcgagcagcacaacagggatggtcgtcggcattgtggctgctgccgccctctgcatcttgatcctcctgtacgccatgtacaagtacaggaacagggacgaggggtcctatcaagtggacgagacgcggaactacatcagcaactccgcccagagcaacggcacgctcatgaaggagaagcagcagagctcgaagagcggccacaagaaacagaaaaacaaggacagggagtattacgtgtaaacatgcgaacactgctcacacgcgagttttcacagttatttctatccacgcctatgaatctttggacggtgagatctcacagatgtcagaactgctggaactatgaaatggggtatataaccacgactctggtggggaaaaccgttttttaaaggacacacacacacacagcgatgcatctctctctaaagctcagccacggctgcggcaaggtcccagcggtcgctgggagacagaaggttttgtgccctgctgtatcataaagcacacacttagcgctctggagccggacggtggctccaccacttccgcaggcctggaaacttccttctccggaggaccttttactaaaaggtagaagacttcatggcttacttgttccataactccaagtgagtctgtaatgtttgtgaagcttgactgtaaccatgttttttctgtttaattatgtaaaaaacaaaactacaacaacaaaaaaagaaaaaagttaaaaaagaaaaaaacaccaaaaaacaaaaacaaacaaaaaaaaaaacccacaacccttatctggttctgaccagtgtgcgtgtaactttatgatctgaggggaaaaatggcttttgggtttttgtttatttttttgataatgactggacatcagaagaggaaaaaaactcaaaacaaaagcgagagagactattgccatatgaactcaaaagctatcatggtgttcactctacatatcaggttatggtgtctctagaatctgttgtttgtttcctataagatgctttgctgaacacatagcaaaattcatgtgacggatgataaattgattcgaaaagctggtcccccaggatctaatttcagaatttaccacccaaacccggaacagatgggtttagggctggtgttatcagagctattggctttacgtaacaatattgttcctgtccattcacccagccaaattgtgttaaagaggaaagccccacaaactaaaacagcctttcctagggaagaggaaggggaggtgggctggatctgtgactgattgaaatgcatgcaaataaaaaagacaatattaaagtctgttatcaaaccagacagtaggggagttcaactcgtgatggaaccacaaaaggtcacacaagccaaccatgtcatgccagagtacaaaacacatagttctttccccgccccgaatgtgacaatggttttcatagtggtttaattttgtagcctgacatttatggataactctgtccttccatttgctcacttctctcttcacccatcttttttaaaaacaaataaatgaataaagctgctgtgacacacacacaaaaggaatttaatagtataatatatatataaataaatatatatacagatatatttatcatggtatgtttgatgggatgactgacacaggaaatctgttaaagtcttaaaatggaatgagaatgttgttttaaaagaaaatagcaaaacaacaaaaaagcaaaccttaaaatgtgaagaaagtgtgaattttagttttgtcacagttaactgtgtcaaagagaattaaaaaaaaaaacttcagattttgtttacatattttactacatttttgctggtataattccttagccacctatgtacatactgctttaagaaatgtttttttcctgtttatttctgtttggtttatattctggttgtctttttctttttgtaaagaggaaacaatgtacagaaaaacaataaactggttgtatggccatagctatccgaaaagcaagagacaaagcaagacaaatattcacacaaaaatgaagtgtgtcctctggagggtcagatatacaatttcttttgtacagatgaaaatcaatcagctgcttagatttagaaatctactcttgctggtctttgtaagttgcatgaatatttgactttgaaaaaatatcttaacgacatggggcaaaaagtgcaatctaaatggtagcctttactaatgtgtgtggaaagaggtgttcctcattatctaatatttcaatgtgttaagagtttaatttttttgttatcattaaaaaagacaggattataaagagatatcaaagcacgattttagataacctaaacggcccagcctatacgaagttgattatatctcgatgtctgtaaaagattgctgttcttggagtcttgaggtcttgtgaattgatttcctgctttctttcatttttttcaatttaagtaataatacatttgttatattcctttcagtgtaagtttctatttggacaattttatgggaacatgtgcattctctatgtgagcttctatcatattcctgttttattagcagaacctaaaggaatttatttaatgatgttgtgacattactgctttttcttttttcttttcttagttcatatttgcattttcgttcaaggatatgcttagcaataaaatgttcttccc

SEQ ID NO: 8529 - protein, 1064 aa, Homo sapiens
MLGSDDFFYVGGSPSTADLPGSPVSNNFMGCLKEVVYKNNDIRLELSRLARIADTKMKIYGEVVFKCENVATLDPINFETPEAYISLPKWNTKRMGSISFDFRTTEPNGLILFTHGKPQERKDARSQKNTKVDFFAVELLDGNLYLLLDMGSGTIKVKATQKKANDGEWYHVDIQRDGRSGTISVNSRRTPFTASGESEILDLEGDMYLGGLPENRAGLILPTELWTAMLNYGYVGCIRDLFIDGRSKNIRQLAEMQNAAGVKSSCSRMSAKQCDSYPCKNNAVCKDGWNRFICDCTGTGYWGRTCEREASILSYDGSMYMKIIMPMVMHTEAEDVSFRFMSQRAYGLLVATTSRDSADTLRLELDGGRVKLMVNLDCIRINCNSSKGPETLYAGQKLNDNEWHTVRVVRRGKSLKLTVDDDVAEGTMVGDHTRLEFHNIETGIMTEKRYISVVPSSFIGHLQSLMFNGLLYIDLCKNGDIDYCELKARFGLRNIIADPVTFKTKSSYLSLATLQAYTSMHLFFQFKTTSPDGFILFNSGDGNDFIAVELVKGYIHYVFDLGNGPNVIKGNSDRPLNDNQWHNVVITRDNSNTHSLKVDTKVVTQVINGAKNLDLKGDLYMAGLAQGMYSNLPKLVASRDGFQGCLASVDLNGRLPDLINDALHRSGQIERGCEGPSTTCQEDSCANQGVCMQQWEGFTCDCSMTSYSGNQCNDPGATYIFGKSGGLILYTWPANDRPSTRSDRLAVGFSTTVKDGILVRIDSAPGLGDFLQLHIEQGKIGVVFNIGTVDISIKEERTPVNDGKYHVVRFTRNGGNATLQVDNWPVNEHYPTGRQLTIFNTQAQIAIGGKDKGRLFQGQLSGLYYDGLKVLNMAAENNPNIKINGSVRLVGEVPSILGTTQTTSMPPEMSTTVMETTTTMATTTTRKNRSTASIQPTSDDLVSSAECSSDDEDFVECEPSTGRSANPTEPGIRRVPGASEVIRESSSTTGMVVGIVAAAALCILILLYAMYKYRNRDEGSYQVDETRNYISNSAQSNGTLMKEKQQSSKSGHKKQKNKDREYYV

SEQ ID NO: 8530 - DNA, 6616 bp, Homo sapiens
caggactggagggcttgaggaatgtggtggtccctctcttcgttgtttctgccccctgaggttgtgctttctcagggatatgcactctgcacttccattcctgcagtgaaattaactcgagcttggcagctcgagaggagaatgtggccactttccgaggctcagagtatctgtgctacgacctgtctcagaacccgatccagagcagcagtgatgaaatcaccctctcctttaagacctggcagcgtaacggcctcatcctgcacacgggcaagtcggctgactatgtcaacctggctctgaaggatggtgcggtctccttggtcattaacctggggtccggggcctttgaggccattgtggagccagtgaatggaaaattcaacgacaacgcctggcatgatgtcaaagtgacacgcaacctccggcaggtgacaatctctgtggatggcattcttaccacgacgggctacactcaagaggactataccatgctgggctcggacgacttcttctatgtaggaggaagcccaagtaccgctgacttgcctggctcccctgtcagcaacaacttcatgggctgccttaaagaggttgtttataagaataatgacatccgtctggagctgtctcgcctggcccggattgcggacaccaagatgaaaatctatggcgaagttgtgtttaagtgtgagaatgtggccacactggaccccatcaactttgagaccccagaggcttacatcagcttgcccaagtggaacactaaacgtatgggctccatctcctttgacttccgcaccacagagcccaatggcctgatcctcttcactcatggaaagccccaagagaggaaggatgctcggagccagaagaatacaaaagtagacttctttgccgtggaactcctcgatggcaacctgtacttgctgcttgacatgggctctggcaccatcaaagtgaaagccactcagaagaaagccaatgatggggaatggtaccatgtggacattcagcgagatggcagatcaggtactatatcagtgaacagcaggcgcacgccattcaccgccagtggggagagcgagatcctggacctggaaggagacatgtacctgggagggctgccggagaaccgtgctggccttattctccccaccgagctgtggactgccatgctcaactatggctacgtgggctgcatccgcgacctattcattgatgggcgcagcaagaacattcgacagctggcagagatgcagaatgctgcgggtgtcaagtcctcctgttcacggatgagtgccaagcagtgtgacagctacccctgcaagaataatgctgtgtgcaaggacggctggaaccgcttcatctgcgactgcaccggcaccggatactggggaagaacctgcgaaagggaggcatccatcctgagctatgatggtagcatgtacatgaagatcatcatgcccatggtcatgcatactgaggcagaggatgtgtccttccgcttcatgtcccagcgagcttatgggctgctggtggctacgacctccagggactctgccgacaccctgcgtctggagctggatggggggcgtgtcaagctcatggttaacttagactgtatcaggataaactgtaactccagcaaaggaccagagaccttgtatgcagggcagaagctcaatgacaacgagtggcacaccgttcgggtggtgcggagaggaaaaagccttaagttaaccgtggatgatgatgtggctgagggtacaatggtgggagaccatacccgtttggagttccacaacattgaaacgggaatcatgactgagaaacgctacatctccgttgtcccctccagctttattggccatctgcagagcctcatgtttaatggccttctctacattgacttgtgcaaaaatggtgacattgattattgtgagctgaaggctcgttttggactgaggaacatcatcgctgaccctgtcacctttaagaccaagagcagctacctgagccttgccactcttcaggcttacacctccatgcacctcttcttccagttcaagaccacctcaccagatggcttcattctcttcaatagtggtgatggcaatgacttcattgcagtcgagcttgtcaaggggtatatacactacgtttttgacctcggaaacggtcccaatgtgatcaaaggcaacagtgaccgccccctgaatgacaaccagtggcacaatgtcgtcatcactcgggacaatagtaacactcatagcctgaaagtggacaccaaagtggtcactcaggttatcaatggtgccaaaaatctggatttgaaaggtgatctctatatggctggtctggcccaaggcatgtacagcaacctcccaaagctcgtggcctctcgagatggctttcagggctgtctagcatcagtggacttgaatggacgcctgccagacctcatcaatgatgctcttcatcggagcggacagatcgagcgtggctgtgaaggacccagtaccacctgccaggaagattcatgtgccaaccagggggtctgcatgcaacaatgggagggcttcacctgtgattgttctatgacctcttattctggaaaccagtgcaatgatcctggcgctacgtacatctttgggaaaagtggtgggcttatcctctacacctggccagccaatgacaggcccagcacgcggtctgaccgccttgccgtgggcttcagcaccactgtgaaggatggcatcttggtccgcatcgacagtgctccaggacttggtgacttcctccagcttcacatagaacaggggaaaattggagttgtcttcaacattggcacagttgacatctccatcaaagaggagagaacccctgtaaatgacggcaaataccatgtggtacgcttcaccaggaacggcggcaacgccaccctgcaggtggacaactggccagtgaatgaacattatcctacaggccggcagttaaccatcttcaacactcaggcgcaaatagccattggtggaaaggacaaaggacgcctcttccaaggccaactctctgggctctattatgatggtttgaaagtactgaacatggcggctgagaacaaccccaatattaaaatcaatggaagtgttcggctggttggagaagtcccatcaattttgggaacaacacagacgacctccatgccaccagaaatgtctactactgtcatggaaaccactactacaatggcgactaccacaacccgtaagaatcgctctacagccagcattcagccaacatcagatgatcttgtttcatctgctgaatgttcaagtgatgatgaagactttgttgaatgtgagccgagtacaggtaggtcagcaaaccccacggagccgggaatcagacgggttccgggggcctcagaggtgatccgggagtcgagcagcacaacagggatggtcgtcggcattgtggctgctgccgccctctgcatcttgatcctcctgtacgccatgtacaagtacaggaacagggacgaggggtcctatcaagtggacgagacgcggaactacatcagcaactccgcccagagcaacggcacgctcatgaaggagaagcagcagagctcgaagagcggccacaagaaacagaaaaacaaggacagggagtattacgtgtaaacatgcgaacactgctcacacgcgagttttcacagttatttctatccacgcctatgaatctttggacggtgagatctcacagatgtcagaactgctggaactatgaaatggggtatataaccacgactctggtggggaaaaccgttttttaaaggacacacacacacacagcgatgcatctctctctaaagctcagccacggctgcggcaaggtcccagcggtcgctgggagacagaaggttttgtgccctgctgtatcataaagcacacacttagcgctctggagccggacggtggctccaccacttccgcaggcctggaaacttccttctccggaggaccttttactaaaaggtagaagacttcatggcttacttgttccataactccaagtgagtctgtaatgtttgtgaagcttgactgtaaccatgttttttctgtttaattatgtaaaaaacaaaactacaacaacaaaaaaagaaaaaagttaaaaaagaaaaaaacaccaaaaaacaaaaacaaacaaaaaaaaaaacccacaacccttatctggttctgaccagtgtgcgtgtaactttatgatctgaggggaaaaatggcttttgggtttttgtttatttttttgataatgactggacatcagaagaggaaaaaaactcaaaacaaaagcgagagagactattgccatatgaactcaaaagctatcatggtgttcactctacatatcaggttatggtgtctctagaatctgttgtttgtttcctataagatgctttgctgaacacatagcaaaattcatgtgacggatgataaattgattcgaaaagctggtcccccaggatctaatttcagaatttaccacccaaacccggaacagatgggtttagggctggtgttatcagagctattggctttacgtaacaatattgttcctgtccattcacccagccaaattgtgttaaagaggaaagccccacaaactaaaacagcctttcctagggaagaggaaggggaggtgggctggatctgtgactgattgaaatgcatgcaaataaaaaagacaatattaaagtctgttatcaaaccagacagtaggggagttcaactcgtgatggaaccacaaaaggtcacacaagccaaccatgtcatgccagagtacaaaacacatagttctttccccgccccgaatgtgacaatggttttcatagtggtttaattttgtagcctgacatttatggataactctgtccttccatttgctcacttctctcttcacccatcttttttaaaaacaaataaatgaataaagctgctgtgacacacacacaaaaggaatttaatagtataatatatatataaataaatatatatacagatatatttatcatggtatgtttgatgggatgactgacacaggaaatctgttaaagtcttaaaatggaatgagaatgttgttttaaaagaaaatagcaaaacaacaaaaaagcaaaccttaaaatgtgaagaaagtgtgaattttagttttgtcacagttaactgtgtcaaagagaattaaaaaaaaaaacttcagattttgtttacatattttactacatttttgctggtataattccttagccacctatgtacatactgctttaagaaatgtttttttcctgtttatttctgtttggtttatattctggttgtctttttctttttgtaaagaggaaacaatgtacagaaaaacaataaactggttgtatggccatagctatccgaaaagcaagagacaaagcaagacaaatattcacacaaaaatgaagtgtgtcctctggagggtcagatatacaatttcttttgtacagatgaaaatcaatcagctgcttagatttagaaatctactcttgctggtctttgtaagttgcatgaatatttgactttgaaaaaatatcttaacgacatggggcaaaaagtgcaatctaaatggtagcctttactaatgtgtgtggaaagaggtgttcctcattatctaatatttcaatgtgttaagagtttaatttttttgttatcattaaaaaagacaggattataaagagatatcaaagcacgattttagataacctaaacggcccagcctatacgaagttgattatatctcgatgtctgtaaaagattgctgttcttggagtcttgaggtcttgtgaattgatttcctgctttctttcatttttttcaatttaagtaataatacatttgttatattcctttcagtgtaagtttctatttggacaattttatgggaacatgtgcattctctatgtgagcttctatcatattcctgttttattagcagaacctaaaggaatttatttaatgatgttgtgacattactgctttttcttttttcttttcttagttcatatttgcattttcgttcaaggatatgcttagcaataaaatgttcttcccaaaaccttgtatgctgatgcacttttattttcttaacatttgagaaaatctcgcactgaagctaattatgtcatatcttattaaaagccgagtaagagctagaccactttcatgtgatagaagatattctaagcagttactaattattacattatcaaaatgccatatttatgagataattatctgttacttgaggcattattttttagattgctatgatagaataaccaggagggagtgcatttttctggaaagatgatagaaacattgtattctagaaaagattattggatactatggttttgtttgtttgtttttgttttttgtttttcgttttttgtttgttttttttttgagacagagtctcgctctgtcgcccgggctggagtgcagtggcacgatctcggctcactgcaagctccgcctcccgggttcacaccattctcctgcctcagccccccgagtaggtgggactacag

SEQ ID NO: 8531 - protein, 1064 aa, Homo sapiens; identical to SEQ ID NO: 8529

SEQ ID NO: 8532 - DNA, 679 bp, Homo sapiens
aagaactggggcgggctagctgccgaggagaccacgctgctgcatgggccacgtgagctcaggctgtgggagcggatggagctgctacagtcagcgcttggggctggcctcagcttgtagacccgagccctgcagaacaaccccccgtggcgcaggagagcagaagaaagggggcctttatgcccttttgagggaagcacacattctgcaaggccgtggaaacaaagggaggaactgtttgtagccctcgtccagacgccccaaacaaacagagccaagttacaccctgtttaaccctgccttcaaagggacgactctgtaagattctctgctacttattcaagttgacacgatgcccttcacactccacctgaggtcccgccttccctctgccataaggagtttgattctacaaaagaaaccaaacatcagaaatacatccagcatggctggagagctccgaccagccagcctggtggtcctgcccaggtcccttgctccagcttttgaaagattctgccaggtcaacactggtcctctacccctgctgggccagagtgagccagaaaagtggatgctgccccctcaaggtgctatctcagagaccagtgagagtctggggccctcccagctttccccttatgtccccaggatgggccatccccagttctggaaatac

SEQ ID NO: 8533 - protein, 108 aa, Homo sapiens
MPFTLHLRSRLPSAIRSLILQKKPNIRNTSSMAGELRPASLVVLPRSLAPAFERFCQVNTGPLPLLGQSEPEKWMLPPQGAISETSESLGPSQLSPYVPRMGHPQFWK

SEQ ID NO: 8534 - DNA, 2634 bp, Homo sapiens
aagaactggggcgggctagctgccgaggagaccacgctgctgcatgggccacgtgagctcaggctgtgggagcggatggagctgctacagtcagcgcttggggctggcctcagcttgtagacccgagccctgcagaacaaccccccgtggcgcaggagagcagaagaaagggggcctttatgcccttttgagggaagcacacattctgcaaggccgtggaaacaaagggaggaactgtttgtagccctcgtccagacgccccaaacaaacagagccaagttacaccctgtttaaccctgccttcaaagggacgactctgtaagattctctgctacttattcaagttgacacgatgcccttcacactccacctgaggtcccgccttccctctgccataaggagtttgattctacaaaagaaaccaaacatcagaaatacatccagcatggctggagagctccgaccagccagcctggtggtcctgcccaggtcccttgctccagcttttgaaagattctgccaggtcaacactggtcctctacccctgctgggccagagtgagccagaaaagtggatgctgccccctcaaggtgctatctcagagaccaggatgggccatccccagttctggaaatacgagttcggtgcctgcaccggcagcctggcttcgctggagcagtactcggagcagctgaaggacatggtggccttcttcctgggctgcagcttctccctggaggaggccttggagaaagcggggctccccagaagagacccagcaggtcacagccaggcgggtgcatacaagacaacagtgccttgtgttacccatgctggcttctgctgccctctggtggtcacgatgaggcccattcccaaggacaagctggaagggctggtgcgggcctgctgctccctcggaggtgagcaggggcaacctgttcacatgggcgacccagaactgttgggaatcaaagagctttccaaacctgcctacggggatgccatggtgtgtcccccaggggaggttccagtgttctggccttctccgctgaccagtctcggagctgtcagcagctgtgagaccccactggcttttgccagcatcccaggctgcacagttatgactgacctgaaggatgcaaaggctccacctggttgtctcaccccagagagaattccagaggtccatcacatttcccaagatcctctgcactacagcatcgcgtcagtctctgcttctcagaagatcagagaactagagtctatgatcggcatagacccagggaaccgggggattgggcacctgctctgtaaagatgagctgctgaaggcctctctctcgctgtcccatgcccgctcagtgctcatcaccactgggttccccacacatttcaatcatgagcctccagaagagacagatggcccaccaggagctgttgctctggttgccttcctgcaggccttggagaaggaggtcgccataatcgttgaccagagagcctggaacttgcaccagaagattgttgaagatgctgttgagcaaggtgttctgaagacgcagatcccgatattaacttaccaaggtggatcagtggaagctgctcaggcattcctgtgcaaaaatggggacccgcagacacctagatttgaccacctggtggccatagagcgtgccggaagagctgctgatggcaattactacaatgcaaggaagatgaacatcaagcacttggttgaccccattgacgatctttttcttgctgcgaagaagattcctggaatctcatcaactggagtcggtgatggaggcaacgagcttgggatgggtaaagtcaaggaggctgtgaggaggcacatacggcacggggatgtcatcgcctgcgacgtggaggctgactttgccgtcattgctggtgtttctaactggggaggctatgccctggcctgcgcactctacatcctgtactcatgtgctgtccacagtcagtacctgaggaaagcagtcggaccctccagggcacctggagatcaggcctggactcaggccctcccgtcggtcattaaggaagaaaaaatgctgggcatcttggtgcagcacaaagtccggagtggcgtctcgggcatcgtgggcatggaggtggatgggctgcccttccacaacacccacgccgagatgatccagaagctggtggacgtcaccacggcacaggtgtaaccgtccatgttccgtgtgagcagagtccctaccaacgggcaggtctgcatccggggagaattgcaggtgctgtggacaaaggacaacatttctctggggctttttaacttttattcctaagactctaaaggcgttgatttcaaccctccttcactctggcttcttcaggcaacccacgtggtctcctgtgagaatcttctcgacagttacttatggggacacttgtgaacaattaactgccaggcagagcatgagaacaaacattcccaggccatgtaggataggatactccagactccagtcatcctcccccatccatggtttctgttactcatggtttcagttactcatagccaactgcagaccgaaaatactaaatgaaaaatttcagaaataaacaactcttaagttttaaa

SEQ ID NO: 8535 - protein, 621 aa, Homo sapiens
MPFTLHLRSRLPSAIRSLILQKKPNIRNTSSMAGELRPASLVVLPRSLAPAFERFCQVNTGPLPLLGQSEPEKWMLPPQGAISETRMGHPQFWKYEFGACTGSLASLEQYSEQLKDMVAFFLGCSFSLEEALEKAGLPRRDPAGHSQAGAYKTTVPCVTHAGFCCPLVVTMRPIPKDKLEGLVRACCSLGGEQGQPVHMGDPELLGIKELSKPAYGDAMVCPPGEVPVFWPSPLTSLGAVSSCETPLAFASIPGCTVMTDLKDAKAPPGCLTPERIPEVHHISQDPLHYSIASVSASQKIRELESMIGIDPGNRGIGHLLCKDELLKASLSLSHARSVLITTGFPTHFNHEPPEETDGPPGAVALVAFLQALEKEVAIIVDQRAWNLHQKIVEDAVEQGVLKTQIPILTYQGGSVEAAQAFLCKNGDPQTPRFDHLVAIERAGRAADGNYYNARKMNIKHLVDPIDDLFLAAKKIPGISSTGVGDGGNELGMGKVKEAVRRHIRHGDVIACDVEADFAVIAGVSNWGGYALACALYILYSCAVHSQYLRKAVGPSRAPGDQAWTQALPSVIKEEKMLGILVQHKVRSGVSGIVGMEVDGLPFHNTHAEMIQKLVDVTTAQV

SEQ ID NO: 8536 - DNA, 2744 bp, Homo sapiens
aagaactggggcgggctagctgccgaggagaccacgctgctgcatgggccacgtgagctcaggctgtgggagcggatggagctgctacagtcagcgcttggggctggcctcagcttgtagacccgagccctgcagaacaaccccccgtggcgcaggagagcagaagaaagggggcctttatgcccttttgagggaagcacacattctgcaaggccgtggaaacaaagggaggaactgtttgtagccctcgtccagacgccccaaacaaacagagccaagttacaccctgtttaaccctgccttcaaagggacgactctgtaagattctctgctacttattcaagttgacacgatgcccttcacactccacctgaggtcccgccttccctctgccataaggagtttgattctacaaaagaaaccaaacatcagaaatacatccagcatggctggagagctccgaccagccagcctggtggtcctgcccaggtcccttgctccagcttttgaaagattctgccaggtcaacactggtcctctacccctgctgggccagagtgagccagaaaagtggatgctgccccctcaaggtgctatctcagagaccaggatgggccatccccagttctggaaatacgagttcggtgcctgcaccggcagcctggcttcgctggagcagtactcggagcagctgaaggacatggtggccttcttcctgggctgcagcttctccctggaggaggccttggagaaagcggggctccccagaagagacccagcaggtcacagccaggcgggtgcatacaagacaacagtgccttgtgttacccatgctggcttctgctgccctctggtggtcacgatgaggcccattcccaaggacaagctggaagggctggtgcgggcctgctgctccctcggaggtgagcaggggcaacctgttcacatgggcgacccagaactgttgggaatcaaagagctttccaaacctgcctacggggatgccatggtgtgtcccccaggggaggttccagtgttctggccttctccgctgaccagtctcggagctgtcagcagctgtgagaccccactggcttttgccagcatcccaggctgcacagttatgactgacctgaaggatgcaaaggctccacctggttgtctcaccccagagagaattccagaggtccatcacatttcccaagatcctctgcactacagcatcgcgtcagtctctgcttctcagaagatcagagaactagagtctatgatcggcatagacccagggaaccgggggattgggcacctgctctgtaaagatgagctgctgaaggcctctctctcgctgtcccatgcccgctcagtgctcatcaccactgggttccccacacatttcaatcatgagcctccagaagagacagatggcccaccaggagctgttgctctggttgccttcctgcaggccttggagaaggaggtcgccataatcgttgaccagagagcctggaacttgcaccagaagattgttgaagatgctgttgagcaaggtgttctgaagacgcagatcccgatattaacttaccaaggtggatcagtggaagctgctcaggcattcctgtgcaaaaatggggacccgcagacacctagatttgaccacctggtggccatagagcgtgccggaagagctgctgatggcaattactacaatgcaaggaagatgaacatcaagcacttggttgaccccattgacgatctttttcttgctgcgaagaagattcctggaatctcatcaactggagtcggtgatggaggcaacgagcttgggatgggtaaagtcaaggaggctgtgaggaggcacatacggcacggggatgtcatcgcctgcgacgtggaggctgactttgccgtcattgctggtgtttctaactggggaggctatgccctggcctgcgcactctacatcctgtactcatgtgctgtccacagtcagtacctgaggaaagcagtcggaccctccagggcacctggagatcaggcctggactcaggccctcccgtcggtcattaaggaagaaaaaatgctgggcatcttggtgcagcacaaagtccggagtggcgtctcgggcatcgtgggcatggaggtggatgggctgcccttccacaacacccacgccgagatgatccagaagctggtggacgtcaccacggcacaggtgtaaccgtccatgttccgtgtgagcagagtccctaccaacgggcaggtctgcatccggggagaatgcagctgcttctggcgacaatcctgctagtaaacactggtcttcggtgagcaacgaacactcgcctggcctgggaaactgcatgcccactttctgggaggggttagtgcaggtgctgtggacaaaggacaacatttctctggggctttttaacttttattcctaagactctaaaggcgttgatttcaaccctccttcactctggcttcttcaggcaacccacgtggtctcctgtgagaatcttctcgacagttacttatggggacacttgtgaacaattaactgccaggcagagcatgagaacaaacattcccaggccatgtaggataggatactccagactccagtcatcctcccccatccatggtttctgttactcatggtttcagttactcatagccaactgcagaccgaaaatactaaatgaaaaatttcagaaataaacaactcttaagttttaaattgt

SEQ ID NO: 8537 - protein, 621 aa, Homo sapiens; identical to SEQ ID NO: 8535

SEQ ID NO: 8538 - DNA, 3013 bp, Homo sapiens
aagaactggggcgggctagctgccgaggagaccacgctgctgcatgggccacgtgagctcaggctgtgggagcggatggagctgctacagtcagcgcttggggctggcctcagcttgtagacccgagccctgcagaacaaccccccgtggcgcaggagagcagaagaaagggggcctttatgcccttttgagggaagcacacattctgcaaggccgtggaaacaaagggaggaactgtttgtagccctcgtccagacgccccaaacaaacagagccaagttacaccctgtttaaccctgccttcaaagggacgactctgtaagattctctgctacttattcaagttgacacgatgcccttcacactccacctgaggtcccgccttccctctgccataaggagtttgattctacaaaagaaaccaaacatcagaaatacatccagcatggctggagagctccgaccagccagcctggtggtcctgcccaggtcccttgctccagcttttgaaagattctgccaggtcaacactggtcctctacccctgctgggccagagtgagccagaaaagtggatgctgccccctcaaggtgctatctcagagaccaggatgggccatccccagttctggaaatacgagttcggtgcctgcaccggcagcctggcttcgctggagcagtactcggagcagctgaaggacatggtggccttcttcctgggctgcagcttctccctggaggaggccttggagaaagcggggctccccagaagagacccagcaggtcacagccaggcgggtgcatacaagacaacagtgccttgtgttacccatgctggcttctgctgccctctggtggtcacgatgaggcccattcccaaggacaagctggaagggctggtgcgggcctgctgctccctcggaggtgagcaggggcaacctgttcacatgggcgacccagaactgttgggaatcaaagagctttccaaacctgcctacggggatgccatggtgtgtcccccaggggaggttccagtgttctggccttctccgctgaccagtctcggagctgtcagcagctgtgagaccccactggcttttgccagcatcccaggctgcacagttatgactgacctgaaggatgcaaaggctccacctggttgtctcaccccagagagaattccagaggtccatcacatttcccaagatcctctgcactacagcatcgcgtcagtctctgcttctcagaagatcagagaactagagtctatgatcggcatagacccagggaaccgggggattgggcacctgctctgtaaagatgagctgctgaaggcctctctctcgctgtcccatgcccgctcagtgctcatcaccactgggttccccacacatttcaatcatgagcctccagaagagacagatggcccaccaggagctgttgctctggttgccttcctgcaggccttggagaaggaggtcgccataatcgttgaccagagagcctggaacttgcaccagaagattgttgaagatgctgttgagcaaggtgttctgaagacgcagatcccgatattaacttaccaaggtggatcagtggaagctgctcaggcattcctgtgcaaaaatggggacccgcagacacctagatttgaccacctggtggccatagagcgtgccggaagagctgctgatggcaattactacaatgcaaggaagatgaacatcaagcacttggttgaccccattgacgatctttttcttgctgcgaagaagattcctggaatctcatcaactggagtcggtgatggaggcaacgagcttgggatgggtaaagtcaaggaggctgtgaggaggcacatacggcacggggatgtcatcgcctgcgacgtggaggctgactttgccgtcattgctggtgtttctaactggggaggctatgccctggcctgcgcactctacatcctgtactcatgtgctgtccacagtcagtacctgaggaaagcagtcggaccctccagggcacctggagatcaggcctggactcaggccctcccgtcggtcattaaggaagaaaaaatgctgggcatcttggtgcagcacaaagtccggagtggcgtctcgggcatcgtgggcatggaggtggatgggctgcccttccacaacacccacgccgagatgatccagaagctggtggacgtcaccacggcacaggtgtaaccgtccatgttccgtgtgagcagagtccctaccaacgggcaggtctgcatccggggagaatgcagctgcttctggcgacaatcctgctagtaaacactggtcttcggtgagcaacgaacactcgcctggcctgggaaactgcatgcccactttctgggaggggttagtgcaggtgctgtggacaaaggacaacatttctctggggctttttaacttttattcctaagactctaaaggcgttgatttcaaccctccttcactctggcttcttcaggcaacccacgtggtctcctgtgagaatcttctcgacagttacttatggggacacttgtgaacaattaactgccaggcagagcatgagaacaaacattcccaggccatgtaggataggatactccagactccagtcatcctcccccatccatggtttctgttactcatggtttcagttactcatagccaactgcagaccgaaaatactaaatgaaaaatttcagaaataaacaactcttaagttttaaattgtgtactcttcggaatatcgtgatgaaatctcacaccatcctgctccatcctacctaggacgtgaatcctccctttgtccagggtacccgtgctgtctacaccacccgcctgccagtcacccagcaggtgatcagatcgactgtcatggtattgcagtgcttatattcaagaacctcttatgtgactcagtaatgtcctcaaagtgcaagagcagagatgctggcaatttggatatgccaaaaagaggccataaagggcttcctttaagtg

SEQ ID NO: 8539 - protein, 621 aa, Homo sapiens; identical to SEQ ID NO: 8535

SEQ ID NO: 8540 - DNA, 2907 bp, Homo sapiens
aagaactggggcgggctagctgccgaggagaccacgctgctgcatgggccacgtgagctcaggctgtgggagcggatggagctgctacagtcagcgcttggggctggcctcagcttgtagacccgagccctgcagaacaaccccccgtggcgcaggagagcagaagaaagggggcctttatgcccttttgagggaagcacacattctgcaaggccgtggaaacaaagggaggaactgtttgtagccctcgtccagacgccccaaacaaacagagccaagttacaccctgtttaaccctgccttcaaagggacgactctgtaagattctctgctacttattcaagttgacacgatgcccttcacactccacctgaggtcccgccttccctctgccataaggagtttgattctacaaaagaaaccaaacatcagaaatacatccagcatggctggagagctccgaccagccagcctggtggtcctgcccaggtcccttgctccagcttttgaaagattctgccaggtcaacactggtcctctacccctgctgggccagagtgagccagaaaagtggatgctgccccctcaaggtgctatctcagagaccaggatgggccatccccagttctggaaatacgagttcggtgcctgcaccggcagcctggcttcgctggagcagtactcggagcagctgaaggacatggtggccttcttcctgggctgcagcttctccctggaggaggccttggagaaagcggggctccccagaagagacccagcaggtcacagccaggcgggtgcatacaagacaacagtgccttgtgttacccatgctggcttctgctgccctctggtggtcacgatgaggcccattcccaaggacaagctggaagggctggtgcgggcctgctgctccctcggaggtgagcaggggcaacctgttcacatgggcgacccagaactgttgggaatcaaagagctttccaaacctgcctacggggatgccatggtgtgtcccccaggggaggttccagtgttctggccttctccgctgaccagtctcggagctgtcagcagctgtgagaccccactggcttttgccagcatcccaggctgcacagttatgactgacctgaaggatgcaaaggctccacctggttgtctcaccccagagagaattccagaggtccatcacatttcccaagatcctctgcactacagcatcgcgtcagtctctgcttctcagaagatcagagaactagagtctatgatcggcatagacccagggaaccgggggattgggcacctgctctgtaaagatgagctgctgaaggcctctctctcgctgtcccatgcccgctcagtgctcatcaccactgggttccccacacatttcaatcatgagcctccagaagagacagatggcccaccaggagctgttgctctggttgccttcctgcaggccttggagaaggaggtcgccataatcgttgaccagagagcctggaacttgcaccagaagattgttgaagatgctgttgagcaaggtgttctgaagacgcagatcccgatattaacttaccaaggtggatcagtggaagctgctcaggcattcctgtgcaaaaatggggacccgcagacacctagatttgaccacctggtggccatagagcgtgccggaagagctgctgatggcaattactacaatgcaaggaagatgaacatcaagcacttggttgaccccattgacgatctttttcttgctgcgaagaagattcctggaatctcatcaactggagtcggtgatggaggcaacgagcttgggatgggtaaagtcaaggaggctgtgaggaggcacatacggcacggggatgtcatcgcctgcgacgtggaggctgactttgccgtcattgctggtgtttctaactggggaggctatgccctggcctgcgcactctacatcctgtactcatgtgctgtccacagtcagtacctgaggaaagcagtcggaccctccagggcacctggagatcaggcctggactcaggccctcccgtcggtcattaaggaagaaaaaatgctgggcatcttggtgcagcacaaagtccggagtggcgtctcgggcatcgtgggcatggaggtggatgggctgcccttccacaacacccacgccgagatgatccagaagctggtggacgtcaccacggcacaggtgtaaccgtccatgttccgtgtgagcagagtccctaccaacgggcaggtctgcatccggggagaattgcaggtgctgtggacaaaggacaacatttctctggggctttttaacttttattcctaagactctaaaggcgttgatttcaaccctccttcactctggcttcttcaggcaacccacgtggtctcctgtgagaatcttctcgacagttacttatggggacacttgtgaacaattaactgccaggcagagcatgagaacaaacattcccaggccatgtaggataggatactccagactccagtcatcctcccccatccatggtttctgttactcatggtttcagttactcatagccaactgcagaccgaaaatactaaatgaaaaatttcagaaataaacaactcttaagttttaaattgtgtactcttcggaatatcgtgatgaaatctcacaccatcctgctccatcctacctaggacgtgaatcctccctttgtccagggtacccgtgctgtctacaccacccgcctgccagtcacccagcaggtgatcagatcgactgtcatggtattgcagtgcttatattcaagaacctcttatgtgactcagtaatgtcctcaaagtgcaagagcagagatgctggcaatttggatatgccaaaaagaggccataaagggcttcctttaagtg

SEQ ID NO: 8541 - protein, 621 aa, Homo sapiens; identical to SEQ ID NO: 8535

SEQ ID NO: 8542 - DNA, 974 bp, Homo sapiens
aggctgtgggagcggatggagctgctacagtcagcgcttggggctggcctcagcttgtagacccgagccctgcagaacaaccccccgtggcgcaggagagcagaagaaagggggcctttatgcccttttgagggaagcacacattctgcaaggccgtggaaacaaagggaggaactgtttgtagccctcgtccagacgccccaaacaaacaatggagaaggaaaggcaagtgacttgtccagagccactctgtcaaaaggggacttgagtcctcagggctgttgactccaaagctgacaagcaggtggcattcttcttcagagcagggcaagtgtaattctggaccaatgtgtgattctgagaccagaccaaccaactgaaggagccaagttacaccctgtttaaccctgccttcaaagggacgactctgtaagattctctgctacttattcaagttgacacgatgcccttcacactccacctgaggtcccgccttccctctgccataaggagtttgattctacaaaagaaaccaaacatcagaaatacatccagcatggctggagagctccgaccagccagcctggtggtcctgcccaggtcccttgctccagcttttgaaagattctgccaggtcaacactggtcctctacccctgctgggccagagtgagccagaaaagtggatgctgccccctcaaggtgctatctcagagaccagcctcagggaccttcacagtgcctggcacagaacctcactcatgactgttgctcaggaacgagctgccctccccactgttctgactccttcccctatcacctggcgcctgtcctggctgagatctttgagatcatggagaaagtccagccctggagaaatcccactggctctgccatctgtccactccatcgcccaagccagaaacccgcctgtacaggattaagaagaaaataaaaaacacttgcattaccaac

SEQ ID NO: 8543 - protein, 159 aa, Homo sapiens
MPFTLHLRSRLPSAIRSLILQKKPNIRNTSSMAGELRPASLVVLPRSLAPAFERFCQVNTGPLPLLGQSEPEKWMLPPQGAISETSLRDLHSAWHRTSLMTVAQERAALPTVLTPSPITWRLSWLRSLRSWRKSSPGEIPLALPSVHSIAQARNPPVQD

SEQ ID NO: 8544 - DNA, 1073 bp, Homo sapiens
aggctgtgggagcggatggagctgctacagtcagcgcttggggctggcctcagcttgtagacccgagccctgcagaacaaccccccgtggcgcaggagagcagaagaaagggggcctttatgcccttttgagggaagcacacattctgcaaggccgtggaaacaaagggaggaactgtttgtagccctcgtccagacgccccaaacaaacaatggagaaggaaaggcaagtgacttgtccagagccactctgtcaaaaggggacttgagtcctcagggctgttgactccaaagctgacaagcaggtggcattcttcttcagagcagggcaagtgtaattctggaccaatgtgtgattctgagaccagaccaaccaactgaaggagccaagttacaccctgtttaaccctgccttcaaagggacgactctgtaagattctctgctacttattcaagttgacacgatgcccttcacactccacctgaggtcccgccttccctctgccataaggagtttgattctacaaaagaaaccaaacatcagaaatacatccagcatggctggagagctccgaccagccagcctggtggtcctgcccaggtcccttgctccagcttttgaaagattctgccaggtcaacactggtcctctacccctgctgggccagagtgagccagaaaagtggatgctgccccctcaaggtgctatctcagagaccaggtaaaaagcttgggttactgtgggttgaagcttgggagtgtccaggtgctgtagccaggtgtctctgtcatccgggacctctctgtccagcctcagggaccttcacagtgcctggcacagaacctcactcatgactgttgctcaggaacgagctgccctccccactgttctgactccttcccctatcacctggcgcctgtcctggctgagatctttgagatcatggagaaagtccagccctggagaaatcccactggctctgccatctgtccactccatcgcccaagccagaaacccgcctgtacaggattaagaagaaaataaaaaacacttgcattaccaacacccagaga

SEQ ID NO: 8545 - protein, 86 aa, Homo sapiens
MPFTLHLRSRLPSAIRSLILQKKPNIRNTSSMAGELRPASLVVLPRSLAPAFERFCQVNTGPLPLLGQSEPEKWMLPPQGAISETR

SEQ ID NO: 8546 - DNA, 2699 bp, Homo sapiens
aggctgtgggagcggatggagctgctacagtcagcgcttggggctggcctcagcttgtagacccgagccctgcagaacaaccccccgtggcgcaggagagcagaagaaagggggcctttatgcccttttgagggaagcacacattctgcaaggccgtggaaacaaagggaggaactgtttgtagccctcgtccagacgccccaaacaaacaatggagaaggaaaggcaagtgacttgtccagagccactctgtcaaaaggggacttgagtcctcagggctgttgactccaaagctgacaagcaggtggcattcttcttcagagcagggcaagtgtaattctggaccaatgtgtgattctgagaccagaccaaccaactgaaggagccaagttacaccctgtttaaccctgccttcaaagggacgactctgtaagattctctgctacttattcaagttgacacgatgcccttcacactccacctgaggtcccgccttccctctgccataaggagtttgattctacaaaagaaaccaaacatcagaaatacatccagcatggctggagagctccgaccagccagcctggtggtcctgcccaggtcccttgctccagcttttgaaagattctgccaggtcaacactggtcctctacccctgctgggccagagtgagccagaaaagtggatgctgccccctcaaggtgctatctcagagaccaggatgggccatccccagttctggaaatacgagttcggtgcctgcaccggcagcctggcttcgctggagcagtactcggagcagctgaaggacatggtggccttcttcctgggctgcagcttctccctggaggaggccttggagaaagcggggctccccagaagagacccagcaggtcacagccaggcgggtgcatacaagacaacagtgccttgtgttacccatgctggcttctgctgccctctggtggtcacgatgaggcccattcccaaggacaagctggaagggctggtgcgggcctgctgctccctcggagaactgttgggaatcaaagagctttccaaacctgcctacggggatgccatggtgtgtcccccaggggaggttccagtgttctggccttctccgctgaccagtctcggagctgtcagcagctgtgagaccccactggcttttgccagcatcccaggctgcacagttatgactgacctgaaggatgcaaaggctccacctggttgtctcaccccagagagaattccagaggtccatcacatttcccaagatcctctgcactacagcatcgcgtcagtctctgcttctcagaagatcagagaactagagtctatgatcggcatagacccagggaaccgggggattgggcacctgctctgtaaagatgagctgctgaaggcctctctctcgctgtcccatgcccgctcagtgctcatcaccactgggttccccacacatttcaatcatgagcctccagaagagacagatggcccaccaggagctgttgctctggttgccttcctgcaggccttggagaaggaggtcgccataatcgttgaccagagagcctggaacttgcaccagaagattgttgaagatgctgttgagcaaggtgttctgaagacgcagatcccgatattaacttaccaaggtggatcagtggaagctgctcaggcattcctgtgcaaaaatggggacccgcagacacctagatttgaccacctggtggccatagagcgtgccggaagagctgctgatggcaattactacaatgcaaggaagatgaacatcaagcacttggttgaccccattgacgatctttttcttgctgcgaagaagattcctggaatctcatcaactggtgtttctaactggggaggctatgccctggcctgcgcactctacatcctgtactcatgtgctgtccacagtcagtacctgaggaaagcagtcggaccctccagggcacctggagatcaggcctggactcaggccctcccgtcggtcattaaggaagaaaaaatgctgggcatcttggtgcagcacaaagtccggagtggcgtctcgggcatcgtgggcatggaggtggatgggctgcccttccacaacacccacgccgagatgatccagaagctggtggacgtcaccacggcacaggtgtaaccgtccatgttccgtgtgagcagagtccctaccaacgggcaggtctgcatccggggagaatgcagctgcttctggcgacaatcctgctagtaaacactggtcttcggtgagcaacgaacactcgcctggcctgggaaactgcatgcccactttctgggaggggttagtgcaggtgctgtggacaaaggacaacatttctctggggctttttaacttttattcctaagactctaaaggcgttgatttcaaccctccttcactctggcttcttcaggcaacccacgtggtctcctgtgagaatcttctcgacagttacttatggggacacttgtgaacaattaactgccaggcagagcatgagaacaaacattcccaggccatgtaggataggatactccagactccagtcatcctcccccatccatggtttctgttactcatggtttcagttactcatagccaactgcagaccgaaaatactaaatgaaaaatttcagaaataaacaactcttaagttttaaattgt

SEQ ID NO: 8547 - protein, 569 aa, Homo sapiens
MPFTLHLRSRLPSAIRSLILQKKPNIRNTSSMAGELRPASLVVLPRSLAPAFERFCQVNTGPLPLLGQSEPEKWMLPPQGAISETRMGHPQFWKYEFGACTGSLASLEQYSEQLKDMVAFFLGCSFSLEEALEKAGLPRRDPAGHSQAGAYKTTVPCVTHAGFCCPLVVTMRPIPKDKLEGLVRACCSLGELLGIKELSKPAYGDAMVCPPGEVPVFWPSPLTSLGAVSSCETPLAFASIPGCTVMTDLKDAKAPPGCLTPERIPEVHHISQDPLHYSIASVSASQKIRELESMIGIDPGNRGIGHLLCKDELLKASLSLSHARSVLITTGFPTHFNHEPPEETDGPPGAVALVAFLQALEKEVAIIVDQRAWNLHQKIVEDAVEQGVLKTQIPILTYQGGSVEAAQAFLCKNGDPQTPRFDHLVAIERAGRAADGNYYNARKMNIKHLVDPIDDLFLAAKKIPGISSTGVSNWGGYALACALYILYSCAVHSQYLRKAVGPSRAPGDQAWTQALPSVIKEEKMLGILVQHKVRSGVSGIVGMEVDGLPFHNTHAEMIQKLVDVTTAQV

SEQ ID NO: 8548 - DNA, 2735 bp, Homo sapiens
aggctgtgggagcggatggagctgctacagtcagcgcttggggctggcctcagcttgtagacccgagccctgcagaacaaccccccgtggcgcaggagagcagaagaaagggggcctttatgcccttttgagggaagcacacattctgcaaggccgtggaaacaaagggaggaactgtttgtagccctcgtccagacgccccaaacaaacaatggagaaggaaaggcaagtgacttgtccagagccactctgtcaaaaggggacttgagtcctcagggctgttgactccaaagctgacaagcaggtggcattcttcttcagagcagggcaagtgtaattctggaccaatgtgtgattctgagaccagaccaaccaactgaaggagccaagttacaccctgtttaaccctgccttcaaagggacgactctgtaagattctctgctacttattcaagttgacacgatgcccttcacactccacctgaggtcccgccttccctctgccataaggagtttgattctacaaaagaaaccaaacatcagaaatacatccagcatggctggagagctccgaccagccagcctggtggtcctgcccaggtcccttgctccagcttttgaaagattctgccaggtcaacactggtcctctacccctgctgggccagagtgagccagaaaagtggatgctgccccctcaaggtgctatctcagagaccaggatgggccatccccagttctggaaatacgagttcggtgcctgcaccggcagcctggcttcgctggagcagtactcggagcagctgaaggacatggtggccttcttcctgggctgcagcttctccctggaggaggccttggagaaagcggggctccccagaagagacccagcaggtcacagccaggcgggtgcatacaagacaacagtgccttgtgttacccatgctggcttctgctgccctctggtggtcacgatgaggcccattcccaaggacaagctggaagggctggtgcgggcctgctgctccctcggaggtgagcaggggcaacctgttcacatgggcgacccagaactgttgggaatcaaagagctttccaaacctgcctacggggatgccatggtgtgtcccccaggggaggttccagtgttctggccttctccgctgaccagtctcggagctgtcagcagctgtgagaccccactggcttttgccagcatcccaggctgcacagttatgactgacctgaaggatgcaaaggctccacctggttgtctcaccccagagagaattccagaggtccatcacatttcccaagatcctctgcactacagcatcgcgtcagtctctgcttctcagaagatcagagaactagagtctatgatcggcatagacccagggaaccgggggattgggcacctgctctgtaaagatgagctgctgaaggcctctctctcgctgtcccatgcccgctcagtgctcatcaccactgggttccccacacatttcaatcatgagcctccagaagagacagatggcccaccaggagctgttgctctggttgccttcctgcaggccttggagaaggaggtcgccataatcgttgaccagagagcctggaacttgcaccagaagattgttgaagatgctgttgagcaaggtgttctgaagacgcagatcccgatattaacttaccaaggtggatcagtggaagctgctcaggcattcctgtgcaaaaatggggacccgcagacacctagatttgaccacctggtggccatagagcgtgccggaagagctgctgatggcaattactacaatgcaaggaagatgaacatcaagcacttggttgaccccattgacgatctttttcttgctgcgaagaagattcctggaatctcatcaactggtgtttctaactggggaggctatgccctggcctgcgcactctacatcctgtactcatgtgctgtccacagtcagtacctgaggaaagcagtcggaccctccagggcacctggagatcaggcctggactcaggccctcccgtcggtcattaaggaagaaaaaatgctgggcatcttggtgcagcacaaagtccggagtggcgtctcgggcatcgtgggcatggaggtggatgggctgcccttccacaacacccacgccgagatgatccagaagctggtggacgtcaccacggcacaggtgtaaccgtccatgttccgtgtgagcagagtccctaccaacgggcaggtctgcatccggggagaatgcagctgcttctggcgacaatcctgctagtaaacactggtcttcggtgagcaacgaacactcgcctggcctgggaaactgcatgcccactttctgggaggggttagtgcaggtgctgtggacaaaggacaacatttctctggggctttttaacttttattcctaagactctaaaggcgttgatttcaaccctccttcactctggcttcttcaggcaacccacgtggtctcctgtgagaatcttctcgacagttacttatggggacacttgtgaacaattaactgccaggcagagcatgagaacaaacattcccaggccatgtaggataggatactccagactccagtcatcctcccccatccatggtttctgttactcatggtttcagttactcatagccaactgcagaccgaaaatactaaatgaaaaatttcagaaataaacaactcttaagttttaaattgt

SEQ ID NO: 8549 - protein, 581 aa, Homo sapiens
MPFTLHLRSRLPSAIRSLILQKKPNIRNTSSMAGELRPASLVVLPRSLAPAFERFCQVNTGPLPLLGQSEPEKWMLPPQGAISETRMGHPQFWKYEFGACTGSLASLEQYSEQLKDMVAFFLGCSFSLEEALEKAGLPRRDPAGHSQAGAYKTTVPCVTHAGFCCPLVVTMRPIPKDKLEGLVRACCSLGGEQGQPVHMGDPELLGIKELSKPAYGDAMVCPPGEVPVFWPSPLTSLGAVSSCETPLAFASIPGCTVMTDLKDAKAPPGCLTPERIPEVHHISQDPLHYSIASVSASQKIRELESMIGIDPGNRGIGHLLCKDELLKASLSLSHARSVLITTGFPTHFNHEPPEETDGPPGAVALVAFLQALEKEVAIIVDQRAWNLHQKIVEDAVEQGVLKTQIPILTYQGGSVEAAQAFLCKNGDPQTPRFDHLVAIERAGRAADGNYYNARKMNIKHLVDPIDDLFLAAKKIPGISSTGVSNWGGYALACALYILYSCAVHSQYLRKAVGPSRAPGDQAWTQALPSVIKEEKMLGILVQHKVRSGVSGIVGMEVDGLPFHNTHAEMIQKLVDVTTAQV

SEQ ID NO: 8550 - DNA, 3004 bp, Homo sapiens
aggctgtgggagcggatggagctgctacagtcagcgcttggggctggcctcagcttgtagacccgagccctgcagaacaaccccccgtggcgcaggagagcagaagaaagggggcctttatgcccttttgagggaagcacacattctgcaaggccgtggaaacaaagggaggaactgtttgtagccctcgtccagacgccccaaacaaacaatggagaaggaaaggcaagtgacttgtccagagccactctgtcaaaaggggacttgagtcctcagggctgttgactccaaagctgacaagcaggtggcattcttcttcagagcagggcaagtgtaattctggaccaatgtgtgattctgagaccagaccaaccaactgaaggagccaagttacaccctgtttaaccctgccttcaaagggacgactctgtaagattctctgctacttattcaagttgacacgatgcccttcacactccacctgaggtcccgccttccctctgccataaggagtttgattctacaaaagaaaccaaacatcagaaatacatccagcatggctggagagctccgaccagccagcctggtggtcctgcccaggtcccttgctccagcttttgaaagattctgccaggtcaacactggtcctctacccctgctgggccagagtgagccagaaaagtggatgctgccccctcaaggtgctatctcagagaccaggatgggccatccccagttctggaaatacgagttcggtgcctgcaccggcagcctggcttcgctggagcagtactcggagcagctgaaggacatggtggccttcttcctgggctgcagcttctccctggaggaggccttggagaaagcggggctccccagaagagacccagcaggtcacagccaggcgggtgcatacaagacaacagtgccttgtgttacccatgctggcttctgctgccctctggtggtcacgatgaggcccattcccaaggacaagctggaagggctggtgcgggcctgctgctccctcggaggtgagcaggggcaacctgttcacatgggcgacccagaactgttgggaatcaaagagctttccaaacctgcctacggggatgccatggtgtgtcccccaggggaggttccagtgttctggccttctccgctgaccagtctcggagctgtcagcagctgtgagaccccactggcttttgccagcatcccaggctgcacagttatgactgacctgaaggatgcaaaggctccacctggttgtctcaccccagagagaattccagaggtccatcacatttcccaagatcctctgcactacagcatcgcgtcagtctctgcttctcagaagatcagagaactagagtctatgatcggcatagacccagggaaccgggggattgggcacctgctctgtaaagatgagctgctgaaggcctctctctcgctgtcccatgcccgctcagtgctcatcaccactgggttccccacacatttcaatcatgagcctccagaagagacagatggcccaccaggagctgttgctctggttgccttcctgcaggccttggagaaggaggtcgccataatcgttgaccagagagcctggaacttgcaccagaagattgttgaagatgctgttgagcaaggtgttctgaagacgcagatcccgatattaacttaccaaggtggatcagtggaagctgctcaggcattcctgtgcaaaaatggggacccgcagacacctagatttgaccacctggtggccatagagcgtgccggaagagctgctgatggcaattactacaatgcaaggaagatgaacatcaagcacttggttgaccccattgacgatctttttcttgctgcgaagaagattcctggaatctcatcaactggtgtttctaactggggaggctatgccctggcctgcgcactctacatcctgtactcatgtgctgtccacagtcagtacctgaggaaagcagtcggaccctccagggcacctggagatcaggcctggactcaggccctcccgtcggtcattaaggaagaaaaaatgctgggcatcttggtgcagcacaaagtccggagtggcgtctcgggcatcgtgggcatggaggtggatgggctgcccttccacaacacccacgccgagatgatccagaagctggtggacgtcaccacggcacaggtgtaaccgtccatgttccgtgtgagcagagtccctaccaacgggcaggtctgcatccggggagaatgcagctgcttctggcgacaatcctgctagtaaacactggtcttcggtgagcaacgaacactcgcctggcctgggaaactgcatgcccactttctgggaggggttagtgcaggtgctgtggacaaaggacaacatttctctggggctttttaacttttattcctaagactctaaaggcgttgatttcaaccctccttcactctggcttcttcaggcaacccacgtggtctcctgtgagaatcttctcgacagttacttatggggacacttgtgaacaattaactgccaggcagagcatgagaacaaacattcccaggccatgtaggataggatactccagactccagtcatcctcccccatccatggtttctgttactcatggtttcagttactcatagccaactgcagaccgaaaatactaaatgaaaaatttcagaaataaacaactcttaagttttaaattgtgtactcttcggaatatcgtgatgaaatctcacaccatcctgctccatcctacctaggacgtgaatcctccctttgtccagggtacccgtgctgtctacaccacccgcctgccagtcacccagcaggtgatcagatcgactgtcatggtattgcagtgcttatattcaagaacctcttatgtgactcagtaatgtcctcaaagtgcaagagcagagatgctggcaatttggatatgccaaaaagaggccataaagggcttcctttaagtg

SEQ ID NO: 8551 - protein, 581 aa, Homo sapiens; identical to SEQ ID NO: 8549

SEQ ID NO: 8552 - DNA, 2968 bp, Homo sapiens
aggctgtgggagcggatggagctgctacagtcagcgcttggggctggcctcagcttgtagacccgagccctgcagaacaaccccccgtggcgcaggagagcagaagaaagggggcctttatgcccttttgagggaagcacacattctgcaaggccgtggaaacaaagggaggaactgtttgtagccctcgtccagacgccccaaacaaacaatggagaaggaaaggcaagtgacttgtccagagccactctgtcaaaaggggacttgagtcctcagggctgttgactccaaagctgacaagcaggtggcattcttcttcagagcagggcaagtgtaattctggaccaatgtgtgattctgagaccagaccaaccaactgaaggagccaagttacaccctgtttaaccctgccttcaaagggacgactctgtaagattctctgctacttattcaagttgacacgatgcccttcacactccacctgaggtcccgccttccctctgccataaggagtttgattctacaaaagaaaccaaacatcagaaatacatccagcatggctggagagctccgaccagccagcctggtggtcctgcccaggtcccttgctccagcttttgaaagattctgccaggtcaacactggtcctctacccctgctgggccagagtgagccagaaaagtggatgctgccccctcaaggtgctatctcagagaccaggatgggccatccccagttctggaaatacgagttcggtgcctgcaccggcagcctggcttcgctggagcagtactcggagcagctgaaggacatggtggccttcttcctgggctgcagcttctccctggaggaggccttggagaaagcggggctccccagaagagacccagcaggtcacagccaggcgggtgcatacaagacaacagtgccttgtgttacccatgctggcttctgctgccctctggtggtcacgatgaggcccattcccaaggacaagctggaagggctggtgcgggcctgctgctccctcggagaactgttgggaatcaaagagctttccaaacctgcctacggggatgccatggtgtgtcccccaggggaggttccagtgttctggccttctccgctgaccagtctcggagctgtcagcagctgtgagaccccactggcttttgccagcatcccaggctgcacagttatgactgacctgaaggatgcaaaggctccacctggttgtctcaccccagagagaattccagaggtccatcacatttcccaagatcctctgcactacagcatcgcgtcagtctctgcttctcagaagatcagagaactagagtctatgatcggcatagacccagggaaccgggggattgggcacctgctctgtaaagatgagctgctgaaggcctctctctcgctgtcccatgcccgctcagtgctcatcaccactgggttccccacacatttcaatcatgagcctccagaagagacagatggcccaccaggagctgttgctctggttgccttcctgcaggccttggagaaggaggtcgccataatcgttgaccagagagcctggaacttgcaccagaagattgttgaagatgctgttgagcaaggtgttctgaagacgcagatcccgatattaacttaccaaggtggatcagtggaagctgctcaggcattcctgtgcaaaaatggggacccgcagacacctagatttgaccacctggtggccatagagcgtgccggaagagctgctgatggcaattactacaatgcaaggaagatgaacatcaagcacttggttgaccccattgacgatctttttcttgctgcgaagaagattcctggaatctcatcaactggtgtttctaactggggaggctatgccctggcctgcgcactctacatcctgtactcatgtgctgtccacagtcagtacctgaggaaagcagtcggaccctccagggcacctggagatcaggcctggactcaggccctcccgtcggtcattaaggaagaaaaaatgctgggcatcttggtgcagcacaaagtccggagtggcgtctcgggcatcgtgggcatggaggtggatgggctgcccttccacaacacccacgccgagatgatccagaagctggtggacgtcaccacggcacaggtgtaaccgtccatgttccgtgtgagcagagtccctaccaacgggcaggtctgcatccggggagaatgcagctgcttctggcgacaatcctgctagtaaacactggtcttcggtgagcaacgaacactcgcctggcctgggaaactgcatgcccactttctgggaggggttagtgcaggtgctgtggacaaaggacaacatttctctggggctttttaacttttattcctaagactctaaaggcgttgatttcaaccctccttcactctggcttcttcaggcaacccacgtggtctcctgtgagaatcttctcgacagttacttatggggacacttgtgaacaattaactgccaggcagagcatgagaacaaacattcccaggccatgtaggataggatactccagactccagtcatcctcccccatccatggtttctgttactcatggtttcagttactcatagccaactgcagaccgaaaatactaaatgaaaaatttcagaaataaacaactcttaagttttaaattgtgtactcttcggaatatcgtgatgaaatctcacaccatcctgctccatcctacctaggacgtgaatcctccctttgtccagggtacccgtgctgtctacaccacccgcctgccagtcacccagcaggtgatcagatcgactgtcatggtattgcagtgcttatattcaagaacctcttatgtgactcagtaatgtcctcaaagtgcaagagcagagatgctggcaatttggatatgccaaaaagaggccataaagggcttcctttaagtg

SEQ ID NO: 8553 - protein, 569 aa, Homo sapiens; identical to SEQ ID NO: 8547

SEQ ID NO: 8554 - DNA, 3250 bp, Homo sapiens
gctacagtcagcgcttggggctggcctcagcttgtagacccgagccctgcagaacaaccccccgtggcgcaggagagcagaagaaagggggcctttatgcccttttgagggaagcacacattctgcaaggccgtggaaacaaagggaggaactgtttgtagccctcgtccagacgccccaaacaaacagtaagtcagaagggaacagagcacagcacagtccctccctccgccccaggcagtatccaccttgccccgccccacctaaggagcccaagggtattctgggagcccaccccaggacaatggcagggcaaaaccagtgagcaaggcagaaaattcctgaaattctccactgaggcccagctgttcctctccttgaaaagtcaaggcttggttcaagccagatagcacctgaggacagaacatatcaggtattggtagtgtttctcctctgttctctctcctgcaaggccctttcagtccttgtcactgcccttgagaactcccaggtcacatgaaggcaaagaaagtaaaactgaaactgcctttgagccacaggcttgctggggatgaggtgacaaagctaatcgaggtggcaattggggaaggggttctgggctgccgcaggcacacaggccagagcttcgtggatacctgcagggcccaaaggtccctccctgttttgaagagtgagtgatggctatgaggtagcggccaggctgatcacccctgcgttggctggaggcagaattctgtaaatcctcgccaagtctttctccaggccactggttagctcatctcagcctcctctgggagcatcaacaccaacatggcacaggggactgcagtggtgtgctttggacctgtgtacccacccaaggctaaaggcagagccaggagccaagttacaccctgtttaaccctgccttcaaagggacgactctgtaagattctctgctacttattcaagttgacacgatgcccttcacactccacctgaggtcccgccttccctctgccataaggagtttgattctacaaaagaaaccaaacatcagaaatacatccagcatggctggagagctccgaccagccagcctggtggtcctgcccaggtcccttgctccagcttttgaaagattctgccaggtcaacactggtcctctacccctgctgggccagagtgagccagaaaagtggatgctgccccctcaaggtgctatctcagagaccaggatgggccatccccagttctggaaatacgagttcggtgcctgcaccggcagcctggcttcgctggagcagtactcggagcagctgaaggacatggtggccttcttcctgggctgcagcttctccctggaggaggccttggagaaagcggggctccccagaagagacccagcaggtcacagccaggcgggtgcatacaagacaacagtgccttgtgttacccatgctggcttctgctgccctctggtggtcacgatgaggcccattcccaaggacaagctggaagggctggtgcgggcctgctgctccctcggaggtgagcaggggcaacctgttcacatgggcgacccagaactgttgggaatcaaagagctttccaaacctgcctacggggatgccatggtgtgtcccccaggggaggttccagtgttctggccttctccgctgaccagtctcggagctgtcagcagctgtgagaccccactggcttttgccagcatcccaggctgcacagttatgactgacctgaaggatgcaaaggctccacctggttgtctcaccccagagagaattccagaggtccatcacatttcccaagatcctctgcactacagcatcgcgtcagtctctgcttctcagaagatcagagaactagagtctatgatcggcatagacccagggaaccgggggattgggcacctgctctgtaaagatgagctgctgaaggcctctctctcgctgtcccatgcccgctcagtgctcatcaccactgggttccccacacatttcaatcatgagcctccagaagagacagatggcccaccaggagctgttgctctggttgccttcctgcaggccttggagaaggaggtcgccataatcgttgaccagagagcctggaacttgcaccagaagattgttgaagatgctgttgagcaaggtgttctgaagacgcagatcccgatattaacttaccaaggtggatcagtggaagctgctcaggcattcctgtgcaaaaatggggacccgcagacacctagatttgaccacctggtggccatagagcgtgccggaagagctgctgatggcaattactacaatgcaaggaagatgaacatcaagcacttggttgaccccattgacgatctttttcttgctgcgaagaagattcctggaatctcatcaactggagtcggtgatggaggcaacgagcttgggatgggtaaagtcaaggaggctgtgaggaggcacatacggcacggggatgtcatcgcctgcgacgtggaggctgactttgccgtcattgctggtgtttctaactggggaggctatgccctggcctgcgcactctacatcctgtactcatgtgctgtccacagtcagtacctgaggaaagcagtcggaccctccagggcacctggagatcaggcctggactcaggccctcccgtcggtcattaaggaagaaaaaatgctgggcatcttggtgcagcacaaagtccggagtggcgtctcgggcatcgtgggcatggaggtggatgggctgcccttccacaacacccacgccgagatgatccagaagctggtggacgtcaccacggcacaggtgtaaccgtccatgttccgtgtgagcagagtccctaccaacgggcaggtctgcatccggggagaatgcagctgcttctggcgacaatcctgctagtaaacactggtcttcggtgagcaacgaacactcgcctggcctgggaaactgcatgcccactttctgggaggggttagtgcaggtgctgtggacaaaggacaacatttctctggggctttttaacttttattcctaagactctaaaggcgttgatttcaaccctccttcactctggcttcttcaggcaacccacgtggtctcctgtgagaatcttctcgacagttacttatggggacacttgtgaacaattaactgccaggcagagcatgagaacaaacattcccaggccatgtaggataggatactccagactc

SEQ ID NO: 8555 - protein, 621 aa, Homo sapiens; identical to SEQ ID NO: 8535

SEQ ID NO: 8556 - DNA, 3480 bp, Homo sapiens
attctgcaaggccgtggaaacaaagggaggaactgtttgtagccctcgtccagacgccccaaacaaacagtaagtcagaagggaacagagcacagcacagtccctccctccgccccaggcagtatccaccttgccccgccccacctaaggagcccaagggtattctgggagcccaccccaggacaatggcagggcaaaaccagtgagcaaggcagaaaattcctgaaattctccactgaggcccagctgttcctctccttgaaaagtcaaggcttggttcaagccagatagcacctgaggacagaacatatcaggtattggtagtgtttctcctctgttctctctcctgcaaggccctttcagtccttgtcactgcccttgagaactcccaggtcacatgaaggcaaagaaagtaaaactgaaactgcctttgagccacaggcttgctggggatgaggtgacaaagctaatcgaggtggcaattggggaaggggttctgggctgccgcaggcacacaggccagagcttcgtggatacctgcagggcccaaaggtccctccctgttttgaagagtgagtgatggctatgaggtagcggccaggctgatcacccctgcgttggctggaggcagaattctgtaaatcctcgccaagtctttctccaggccactggttagctcatctcagcctcctctgggagcatcaacaccaacatggcacaggggactgcagtggtgtgctttggacctgtgtacccacccaaggctaaaggcagagccaggtgactttgcgggggtctcttctctaggattatctgtacttcccctctgtcctcttttactacgggagatcgagctagctataacccaccttctttcatgagaaccacactaaattgcaaaaattatcccagtgctggaggagggcagcaggttgagattatgttggcaggaagaatgttggcattgattggcacgcaggggacgagagctgctttgtgctttaaaggagccaagttacaccctgtttaaccctgccttcaaagggacgactctgtaagattctctgctacttattcaagttgacacgatgcccttcacactccacctgaggtcccgccttccctctgccataaggagtttgattctacaaaagaaaccaaacatcagaaatacatccagcatggctggagagctccgaccagccagcctggtggtcctgcccaggtcccttgctccagcttttgaaagattctgccaggtcaacactggtcctctacccctgctgggccagagtgagccagaaaagtggatgctgccccctcaaggtgctatctcagagaccaggatgggccatccccagttctggaaatacgagttcggtgcctgcaccggcagcctggcttcgctggagcagtactcggagcagctgaaggacatggtggccttcttcctgggctgcagcttctccctggaggaggccttggagaaagcggggctccccagaagagacccagcaggtcacagccaggcgggtgcatacaagacaacagtgccttgtgttacccatgctggcttctgctgccctctggtggtcacgatgaggcccattcccaaggacaagctggaagggctggtgcgggcctgctgctccctcggaggtgagcaggggcaacctgttcacatgggcgacccagaactgttgggaatcaaagagctttccaaacctgcctacggggatgccatggtgtgtcccccaggggaggttccagtgttctggccttctccgctgaccagtctcggagctgtcagcagctgtgagaccccactggcttttgccagcatcccaggctgcacagttatgactgacctgaaggatgcaaaggctccacctggttgtctcaccccagagagaattccagaggtccatcacatttcccaagatcctctgcactacagcatcgcgtcagtctctgcttctcagaagatcagagaactagagtctatgatcggcatagacccagggaaccgggggattgggcacctgctctgtaaagatgagctgctgaaggcctctctctcgctgtcccatgcccgctcagtgctcatcaccactgggttccccacacatttcaatcatgagcctccagaagagacagatggcccaccaggagctgttgctctggttgccttcctgcaggccttggagaaggaggtcgccataatcgttgaccagagagcctggaacttgcaccagaagattgttgaagatgctgttgagcaaggtgttctgaagacgcagatcccgatattaacttaccaaggtggatcagtggaagctgctcaggcattcctgtgcaaaaatggggacccgcagacacctagatttgaccacctggtggccatagagcgtgccggaagagctgctgatggcaattactacaatgcaaggaagatgaacatcaagcacttggttgaccccattgacgatctttttcttgctgcgaagaagattcctggaatctcatcaactggagtcggtgatggaggcaacgagcttgggatgggtaaagtcaaggaggctgtgaggaggcacatacggcacggggatgtcatcgcctgcgacgtggaggctgactttgccgtcattgctggtgtttctaactggggaggctatgccctggcctgcgcactctacatcctgtactcatgtgctgtccacagtcagtacctgaggaaagcagtcggaccctccagggcacctggagatcaggcctggactcaggccctcccgtcggtcattaaggaagaaaaaatgctgggcatcttggtgcagcacaaagtccggagtggcgtctcgggcatcgtgggcatggaggtggatgggctgcccttccacaacacccacgccgagatgatccagaagctggtggacgtcaccacggcacaggtgtaaccgtccatgttccgtgtgagcagagtccctaccaacgggcaggtctgcatccggggagaatgcagctgcttctggcgacaatcctgctagtaaacactggtcttcggtgagcaacgaacactcgcctggcctgggaaactgcatgcccactttctgggaggggttagtgcaggtgctgtggacaaaggacaacatttctctggggctttttaacttttattcctaagactctaaaggcgttgatttcaaccctccttcactctggcttcttcaggcaacccacgtggtctcctgtgagaatcttctcgacagttacttatggggacacttgtgaacaattaactgccaggcagagcatgagaacaaacattcccaggccatgtaggataggatactccagactccagtcatcctcccccatccatggtttctgttactcatggtttcagttactcatagccaactgcagaccgaaaatactaaatgaaaaatttcagaaataaacaactcttaagttttaaattgt

SEQ ID NO: 8557 - protein, 621 aa, Homo sapiens; identical to SEQ ID NO: 8535

SEQ ID NO: 8558 - DNA, 3749 bp, Homo sapiens
attctgcaaggccgtggaaacaaagggaggaactgtttgtagccctcgtccagacgccccaaacaaacagtaagtcagaagggaacagagcacagcacagtccctccctccgccccaggcagtatccaccttgccccgccccacctaaggagcccaagggtattctgggagcccaccccaggacaatggcagggcaaaaccagtgagcaaggcagaaaattcctgaaattctccactgaggcccagctgttcctctccttgaaaagtcaaggcttggttcaagccagatagcacctgaggacagaacatatcaggtattggtagtgtttctcctctgttctctctcctgcaaggccctttcagtccttgtcactgcccttgagaactcccaggtcacatgaaggcaaagaaagtaaaactgaaactgcctttgagccacaggcttgctggggatgaggtgacaaagctaatcgaggtggcaattggggaaggggttctgggctgccgcaggcacacaggccagagcttcgtggatacctgcagggcccaaaggtccctccctgttttgaagagtgagtgatggctatgaggtagcggccaggctgatcacccctgcgttggctggaggcagaattctgtaaatcctcgccaagtctttctccaggccactggttagctcatctcagcctcctctgggagcatcaacaccaacatggcacaggggactgcagtggtgtgctttggacctgtgtacccacccaaggctaaaggcagagccaggtgactttgcgggggtctcttctctaggattatctgtacttcccctctgtcctcttttactacgggagatcgagctagctataacccaccttctttcatgagaaccacactaaattgcaaaaattatcccagtgctggaggagggcagcaggttgagattatgttggcaggaagaatgttggcattgattggcacgcaggggacgagagctgctttgtgctttaaaggagccaagttacaccctgtttaaccctgccttcaaagggacgactctgtaagattctctgctacttattcaagttgacacgatgcccttcacactccacctgaggtcccgccttccctctgccataaggagtttgattctacaaaagaaaccaaacatcagaaatacatccagcatggctggagagctccgaccagccagcctggtggtcctgcccaggtcccttgctccagcttttgaaagattctgccaggtcaacactggtcctctacccctgctgggccagagtgagccagaaaagtggatgctgccccctcaaggtgctatctcagagaccaggatgggccatccccagttctggaaatacgagttcggtgcctgcaccggcagcctggcttcgctggagcagtactcggagcagctgaaggacatggtggccttcttcctgggctgcagcttctccctggaggaggccttggagaaagcggggctccccagaagagacccagcaggtcacagccaggcgggtgcatacaagacaacagtgccttgtgttacccatgctggcttctgctgccctctggtggtcacgatgaggcccattcccaaggacaagctggaagggctggtgcgggcctgctgctccctcggaggtgagcaggggcaacctgttcacatgggcgacccagaactgttgggaatcaaagagctttccaaacctgcctacggggatgccatggtgtgtcccccaggggaggttccagtgttctggccttctccgctgaccagtctcggagctgtcagcagctgtgagaccccactggcttttgccagcatcccaggctgcacagttatgactgacctgaaggatgcaaaggctccacctggttgtctcaccccagagagaattccagaggtccatcacatttcccaagatcctctgcactacagcatcgcgtcagtctctgcttctcagaagatcagagaactagagtctatgatcggcatagacccagggaaccgggggattgggcacctgctctgtaaagatgagctgctgaaggcctctctctcgctgtcccatgcccgctcagtgctcatcaccactgggttccccacacatttcaatcatgagcctccagaagagacagatggcccaccaggagctgttgctctggttgccttcctgcaggccttggagaaggaggtcgccataatcgttgaccagagagcctggaacttgcaccagaagattgttgaagatgctgttgagcaaggtgttctgaagacgcagatcccgatattaacttaccaaggtggatcagtggaagctgctcaggcattcctgtgcaaaaatggggacccgcagacacctagatttgaccacctggtggccatagagcgtgccggaagagctgctgatggcaattactacaatgcaaggaagatgaacatcaagcacttggttgaccccattgacgatctttttcttgctgcgaagaagattcctggaatctcatcaactggagtcggtgatggaggcaacgagcttgggatgggtaaagtcaaggaggctgtgaggaggcacatacggcacggggatgtcatcgcctgcgacgtggaggctgactttgccgtcattgctggtgtttctaactggggaggctatgccctggcctgcgcactctacatcctgtactcatgtgctgtccacagtcagtacctgaggaaagcagtcggaccctccagggcacctggagatcaggcctggactcaggccctcccgtcggtcattaaggaagaaaaaatgctgggcatcttggtgcagcacaaagtccggagtggcgtctcgggcatcgtgggcatggaggtggatgggctgcccttccacaacacccacgccgagatgatccagaagctggtggacgtcaccacggcacaggtgtaaccgtccatgttccgtgtgagcagagtccctaccaacgggcaggtctgcatccggggagaatgcagctgcttctggcgacaatcctgctagtaaacactggtcttcggtgagcaacgaacactcgcctggcctgggaaactgcatgcccactttctgggaggggttagtgcaggtgctgtggacaaaggacaacatttctctggggctttttaacttttattcctaagactctaaaggcgttgatttcaaccctccttcactctggcttcttcaggcaacccacgtggtctcctgtgagaatcttctcgacagttacttatggggacacttgtgaacaattaactgccaggcagagcatgagaacaaacattcccaggccatgtaggataggatactccagactccagtcatcctcccccatccatggtttctgttactcatggtttcagttactcatagccaactgcagaccgaaaatactaaatgaaaaatttcagaaataaacaactcttaagttttaaattgtgtactcttcggaatatcgtgatgaaatctcacaccatcctgctccatcctacctaggacgtgaatcctccctttgtccagggtacccgtgctgtctacaccacccgcctgccagtcacccagcaggtgatcagatcgactgtcatggtattgcagtgcttatattcaagaacctcttatgtgactcagtaatgtcctcaaagtgcaagagcagagatgctggcaatttggatatgccaaaaagaggccataaagggcttcctttaagtg

SEQ ID NO: 8559 - protein, 621 aa, Homo sapiens; identical to SEQ ID NO: 8535

SEQ ID NO: 8560 - DNA, 849 bp, Homo sapiens
cccaaacaaacagtaagtcagaagggaacagagcacagcacagtccctccctccgccccaggcagtatccaccttgccccgccccacctaaggagcccaagggtattctgggagcccaccccaggacaatggcagggcaaaaccagtgagcaaggcagaaaattcctgaaattctccactgaggcccagctgttcctctccttgaaaagtcaaggcttggttcaagccagatagcacctgaggacagaacatatcaggagccaagttacaccctgtttaaccctgccttcaaagggacgactctgtaagattctctgctacttattcaagttgacacgatgcccttcacactccacctgaggtcccgccttccctctgccataaggagtttgattctacaaaagaaaccaaacatcagaaatacatccagcatggctggagagctccgaccagccagcctggtggtcctgcccaggtcccttgctccagcttttgaaagattctgccaggtcaacactggtcctctacccctgctgggccagagtgagccagaaaagtggatgctgccccctcaaggtgctatctcagagaccagcctcagggaccttcacagtgcctggcacagaacctcactcatgactgttgctcaggaacgagctgccctccccactgttctgactccttcccctatcacctggcgcctgtcctggctgagatctttgagatcatggagaaagtccagccctggagaaatcccactggctctgccatctgtccactccatcgcccaagccagaaacccgcctgtacaggattaagaagaaaataaaaaacacttgcattaccaac

SEQ ID NO: 8561 - protein, 159 aa, Homo sapiens; identical to SEQ ID NO: 8543

SEQ ID NO: 8562 - DNA, 2730 bp, Homo sapiens
cccaaacaaacagtaagtcagaagggaacagagcacagcacagtccctccctccgccccaggcagtatccaccttgccccgccccacctaaggagcccaagggtattctgggagcccaccccaggacaatggcagggcaaaaccagtgagcaaggcagaaaattcctgaaattctccactgaggcccagctgttcctctccttgaaaagtcaaggcttggttcaagccagatagcacctgaggacagaacatatcaggagccaagttacaccctgtttaaccctgccttcaaagggacgactctgtaagattctctgctacttattcaagttgacacgatgcccttcacactccacctgaggtcccgccttccctctgccataaggagtttgattctacaaaagaaaccaaacatcagaaatacatccagcatggctggagagctccgaccagccagcctggtggtcctgcccaggtcccttgctccagcttttgaaagattctgccaggtcaacactggtcctctacccctgctgggccagagtgagccagaaaagtggatgctgccccctcaaggtgctatctcagagaccaggatgggccatccccagttctggaaatacgagttcggtgcctgcaccggcagcctggcttcgctggagcagtactcggagcagctgaaggacatggtggccttcttcctgggctgcagcttctccctggaggaggccttggagaaagcggggctccccagaagagacccagcaggtcacagccaggcgggtgcatacaagacaacagtgccttgtgttacccatgctggcttctgctgccctctggtggtcacgatgaggcccattcccaaggacaagctggaagggctggtgcgggcctgctgctccctcggaggtgagcaggggcaacctgttcacatgggcgacccagaactgttgggaatcaaagagctttccaaacctgcctacggggatgccatggtgtgtcccccaggggaggttccagtgttctggccttctccgctgaccagtctcggagctgtcagcagctgtgagaccccactggcttttgccagcatcccaggctgcacagttatgactgacctgaaggatgcaaaggctccacctggttgtctcaccccagagagaattccagaggtccatcacatttcccaagatcctctgcactacagcatcgcgtcagtctctgcttctcagaagatcagagaactagagtctatgatcggcatagacccagggaaccgggggattgggcacctgctctgtaaagatgagctgctgaaggcctctctctcgctgtcccatgcccgctcagtgctcatcaccactgggttccccacacatttcaatcatgagcctccagaagagacagatggcccaccaggagctgttgctctggttgccttcctgcaggccttggagaaggaggtcgccataatcgttgaccagagagcctggaacttgcaccagaagattgttgaagatgctgttgagcaaggtgttctgaagacgcagatcccgatattaacttaccaaggtggatcagtggaagctgctcaggcattcctgtgcaaaaatggggacccgcagacacctagatttgaccacctggtggccatagagcgtgccggaagagctgctgatggcaattactacaatgcaaggaagatgaacatcaagcacttggttgaccccattgacgatctttttcttgctgcgaagaagattcctggaatctcatcaactggagtcggtgatggaggcaacgagcttgggatgggtaaagtcaaggaggctgtgaggaggcacatacggcacggggatgtcatcgcctgcgacgtggaggctgactttgccgtcattgctggtgtttctaactggggaggctatgccctggcctgcgcactctacatcctgtactcatgtgctgtccacagtcagtacctgaggaaagcagtcggaccctccagggcacctggagatcaggcctggactcaggccctcccgtcggtcattaaggaagaaaaaatgctgggcatcttggtgcagcacaaagtccggagtggcgtctcgggcatcgtgggcatggaggtggatgggctgcccttccacaacacccacgccgagatgatccagaagctggtggacgtcaccacggcacaggtgtaaccgtccatgttccgtgtgagcagagtccctaccaacgggcaggtctgcatccggggagaatgcagctgcttctggcgacaatcctgctagtaaacactggtcttcggtgagcaacgaacactcgcctggcctgggaaactgcatgcccactttctgggaggggttagtgcaggtgctgtggacaaaggacaacatttctctggggctttttaacttttattcctaagactctaaaggcgttgatttcaaccctccttcactctggcttcttcaggcaacccacgtggtctcctgtgagaatcttctcgacagttacttatggggacacttgtgaacaattaactgccaggcagagcatgagaacaaacattcccaggccatgtaggataggatactccagactccagtcatcctcccccatccatggtttctgttactcatggtttcagttactcatagccaactgcagaccgaaaatactaaatgaaaaatttcagaaataaacaactcttaagttttaaattgt

SEQ ID NO: 8563 - protein, 621 aa, Homo sapiens; identical to SEQ ID NO: 8535

SEQ ID NO: 8564 - DNA, 2999 bp, Homo sapiens
cccaaacaaacagtaagtcagaagggaacagagcacagcacagtccctccctccgccccaggcagtatccaccttgccccgccccacctaaggagcccaagggtattctgggagcccaccccaggacaatggcagggcaaaaccagtgagcaaggcagaaaattcctgaaattctccactgaggcccagctgttcctctccttgaaaagtcaaggcttggttcaagccagatagcacctgaggacagaacatatcaggagccaagttacaccctgtttaaccctgccttcaaagggacgactctgtaagattctctgctacttattcaagttgacacgatgcccttcacactccacctgaggtcccgccttccctctgccataaggagtttgattctacaaaagaaaccaaacatcagaaatacatccagcatggctggagagctccgaccagccagcctggtggtcctgcccaggtcccttgctccagcttttgaaagattctgccaggtcaacactggtcctctacccctgctgggccagagtgagccagaaaagtggatgctgccccctcaaggtgctatctcagagaccaggatgggccatccccagttctggaaatacgagttcggtgcctgcaccggcagcctggcttcgctggagcagtactcggagcagctgaaggacatggtggccttcttcctgggctgcagcttctccctggaggaggccttggagaaagcggggctccccagaagagacccagcaggtcacagccaggcgggtgcatacaagacaacagtgccttgtgttacccatgctggcttctgctgccctctggtggtcacgatgaggcccattcccaaggacaagctggaagggctggtgcgggcctgctgctccctcggaggtgagcaggggcaacctgttcacatgggcgacccagaactgttgggaatcaaagagctttccaaacctgcctacggggatgccatggtgtgtcccccaggggaggttccagtgttctggccttctccgctgaccagtctcggagctgtcagcagctgtgagaccccactggcttttgccagcatcccaggctgcacagttatgactgacctgaaggatgcaaaggctccacctggttgtctcaccccagagagaattccagaggtccatcacatttcccaagatcctctgcactacagcatcgcgtcagtctctgcttctcagaagatcagagaactagagtctatgatcggcatagacccagggaaccgggggattgggcacctgctctgtaaagatgagctgctgaaggcctctctctcgctgtcccatgcccgctcagtgctcatcaccactgggttccccacacatttcaatcatgagcctccagaagagacagatggcccaccaggagctgttgctctggttgccttcctgcaggccttggagaaggaggtcgccataatcgttgaccagagagcctggaacttgcaccagaagattgttgaagatgctgttgagcaaggtgttctgaagacgcagatcccgatattaacttaccaaggtggatcagtggaagctgctcaggcattcctgtgcaaaaatggggacccgcagacacctagatttgaccacctggtggccatagagcgtgccggaagagctgctgatggcaattactacaatgcaaggaagatgaacatcaagcacttggttgaccccattgacgatctttttcttgctgcgaagaagattcctggaatctcatcaactggagtcggtgatggaggcaacgagcttgggatgggtaaagtcaaggaggctgtgaggaggcacatacggcacggggatgtcatcgcctgcgacgtggaggctgactttgccgtcattgctggtgtttctaactggggaggctatgccctggcctgcgcactctacatcctgtactcatgtgctgtccacagtcagtacctgaggaaagcagtcggaccctccagggcacctggagatcaggcctggactcaggccctcccgtcggtcattaaggaagaaaaaatgctgggcatcttggtgcagcacaaagtccggagtggcgtctcgggcatcgtgggcatggaggtggatgggctgcccttccacaacacccacgccgagatgatccagaagctggtggacgtcaccacggcacaggtgtaaccgtccatgttccgtgtgagcagagtccctaccaacgggcaggtctgcatccggggagaatgcagctgcttctggcgacaatcctgctagtaaacactggtcttcggtgagcaacgaacactcgcctggcctgggaaactgcatgcccactttctgggaggggttagtgcaggtgctgtggacaaaggacaacatttctctggggctttttaacttttattcctaagactctaaaggcgttgatttcaaccctccttcactctggcttcttcaggcaacccacgtggtctcctgtgagaatcttctcgacagttacttatggggacacttgtgaacaattaactgccaggcagagcatgagaacaaacattcccaggccatgtaggataggatactccagactccagtcatcctcccccatccatggtttctgttactcatggtttcagttactcatagccaactgcagaccgaaaatactaaatgaaaaatttcagaaataaacaactcttaagttttaaattgtgtactcttcggaatatcgtgatgaaatctcacaccatcctgctccatcctacctaggacgtgaatcctccctttgtccagggtacccgtgctgtctacaccacccgcctgccagtcacccagcaggtgatcagatcgactgtcatggtattgcagtgcttatattcaagaacctcttatgtgactcagtaatgtcctcaaagtgcaagagcagagatgctggcaatttggatatgccaaaaagaggccataaagggcttcctttaagtg

SEQ ID NO: 8565 - protein, 621 aa, Homo sapiens; identical to SEQ ID NO: 8535

SEQ ID NO: 8566 - DNA, 3082 bp, Homo sapiens
aagggtattctgggagcccaccccaggacaatggcagggcaaaaccagtgagcaaggcagaaaattcctgaaattctccactgaggcccagctgttcctctccttgaaaagtcaaggcttggttcaagccagatagcacctgaggacagaacatatcagatggagaaggaaaggcaagtgacttgtccagagccactctgtcaaaaggggacttgagtcctcagggctgttgactccaaagctgacaagcaggtggcattcttcttcagagcagggcaagtgtaattctggaccaatgtgtgattctgagaccagaccaaccaactgaagttacagattacgaaaatgatagaaccagaaggtgctaacaaaatgtctgtcctgcatgtgtggcatttgacatgaagaaactgaggcccttgctgggcgcagtggctcatgcctgtaaccccagcactttgggaggccaaggcaggaggatcacttgagctcaagagttcaagaccagccttggacaagatagtgaaaccttgtctctaccaaaaaaatacagaagttagccaggcatggtgcagtgtacctgtagtagcagctactgaggaagctgaggagccaagttacaccctgtttaaccctgccttcaaagggacgactctgtaagattctctgctacttattcaagttgacacgatgcccttcacactccacctgaggtcccgccttccctctgccataaggagtttgattctacaaaagaaaccaaacatcagaaatacatccagcatggctggagagctccgaccagccagcctggtggtcctgcccaggtcccttgctccagcttttgaaagattctgccaggtcaacactggtcctctacccctgctgggccagagtgagccagaaaagtggatgctgccccctcaaggtgctatctcagagaccaggatgggccatccccagttctggaaatacgagttcggtgcctgcaccggcagcctggcttcgctggagcagtactcggagcagctgaaggacatggtggccttcttcctgggctgcagcttctccctggaggaggccttggagaaagcggggctccccagaagagacccagcaggtcacagccaggcgggtgcatacaagacaacagtgccttgtgttacccatgctggcttctgctgccctctggtggtcacgatgaggcccattcccaaggacaagctggaagggctggtgcgggcctgctgctccctcggaggtgagcaggggcaacctgttcacatgggcgacccagaactgttgggaatcaaagagctttccaaacctgcctacggggatgccatggtgtgtcccccaggggaggttccagtgttctggccttctccgctgaccagtctcggagctgtcagcagctgtgagaccccactggcttttgccagcatcccaggctgcacagttatgactgacctgaaggatgcaaaggctccacctggttgtctcaccccagagagaattccagaggtccatcacatttcccaagatcctctgcactacagcatcgcgtcagtctctgcttctcagaagatcagagaactagagtctatgatcggcatagacccagggaaccgggggattgggcacctgctctgtaaagatgagctgctgaaggcctctctctcgctgtcccatgcccgctcagtgctcatcaccactgggttccccacacatttcaatcatgagcctccagaagagacagatggcccaccaggagctgttgctctggttgccttcctgcaggccttggagaaggaggtcgccataatcgttgaccagagagcctggaacttgcaccagaagattgttgaagatgctgttgagcaaggtgttctgaagacgcagatcccgatattaacttaccaaggtggatcagtggaagctgctcaggcattcctgtgcaaaaatggggacccgcagacacctagatttgaccacctggtggccatagagcgtgccggaagagctgctgatggcaattactacaatgcaaggaagatgaacatcaagcacttggttgaccccattgacgatctttttcttgctgcgaagaagattcctggaatctcatcaactggagtcggtgatggaggcaacgagcttgggatgggtaaagtcaaggaggctgtgaggaggcacatacggcacggggatgtcatcgcctgcgacgtggaggctgactttgccgtcattgctggtgtttctaactggggaggctatgccctggcctgcgcactctacatcctgtactcatgtgctgtccacagtcagtacctgaggaaagcagtcggaccctccagggcacctggagatcaggcctggactcaggccctcccgtcggtcattaaggaagaaaaaatgctgggcatcttggtgcagcacaaagtccggagtggcgtctcgggcatcgtgggcatggaggtggatgggctgcccttccacaacacccacgccgagatgatccagaagctggtggacgtcaccacggcacaggtgtaaccgtccatgttccgtgtgagcagagtccctaccaacgggcaggtctgcatccggggagaatgcagctgcttctggcgacaatcctgctagtaaacactggtcttcggtgagcaacgaacactcgcctggcctgggaaactgcatgcccactttctgggaggggttagtgcaggtgctgtggacaaaggacaacatttctctggggctttttaacttttattcctaagactctaaaggcgttgatttcaaccctccttcactctggcttcttcaggcaacccacgtggtctcctgtgagaatcttctcgacagttacttatggggacacttgtgaacaattaactgccaggcagagcatgagaacaaacattcccaggccatgtaggataggatactccagactccagtcatcctcccccatccatggtttctgttactcatggtttcagttactcatagccaactgcagaccgaaaatactaaatgaaaaatttcagaaataaacaactcttaagttttaaattgt

SEQ ID NO: 8567 - protein, 621 aa, Homo sapiens; identical to SEQ ID NO: 8535

SEQ ID NO: 8568 - DNA, 3351 bp, Homo sapiens
aagggtattctgggagcccaccccaggacaatggcagggcaaaaccagtgagcaaggcagaaaattcctgaaattctccactgaggcccagctgttcctctccttgaaaagtcaaggcttggttcaagccagatagcacctgaggacagaacatatcagatggagaaggaaaggcaagtgacttgtccagagccactctgtcaaaaggggacttgagtcctcagggctgttgactccaaagctgacaagcaggtggcattcttcttcagagcagggcaagtgtaattctggaccaatgtgtgattctgagaccagaccaaccaactgaagttacagattacgaaaatgatagaaccagaaggtgctaacaaaatgtctgtcctgcatgtgtggcatttgacatgaagaaactgaggcccttgctgggcgcagtggctcatgcctgtaaccccagcactttgggaggccaaggcaggaggatcacttgagctcaagagttcaagaccagccttggacaagatagtgaaaccttgtctctaccaaaaaaatacagaagttagccaggcatggtgcagtgtacctgtagtagcagctactgaggaagctgaggagccaagttacaccctgtttaaccctgccttcaaagggacgactctgtaagattctctgctacttattcaagttgacacgatgcccttcacactccacctgaggtcccgccttccctctgccataaggagtttgattctacaaaagaaaccaaacatcagaaatacatccagcatggctggagagctccgaccagccagcctggtggtcctgcccaggtcccttgctccagcttttgaaagattctgccaggtcaacactggtcctctacccctgctgggccagagtgagccagaaaagtggatgctgccccctcaaggtgctatctcagagaccaggatgggccatccccagttctggaaatacgagttcggtgcctgcaccggcagcctggcttcgctggagcagtactcggagcagctgaaggacatggtggccttcttcctgggctgcagcttctccctggaggaggccttggagaaagcggggctccccagaagagacccagcaggtcacagccaggcgggtgcatacaagacaacagtgccttgtgttacccatgctggcttctgctgccctctggtggtcacgatgaggcccattcccaaggacaagctggaagggctggtgcgggcctgctgctccctcggaggtgagcaggggcaacctgttcacatgggcgacccagaactgttgggaatcaaagagctttccaaacctgcctacggggatgccatggtgtgtcccccaggggaggttccagtgttctggccttctccgctgaccagtctcggagctgtcagcagctgtgagaccccactggcttttgccagcatcccaggctgcacagttatgactgacctgaaggatgcaaaggctccacctggttgtctcaccccagagagaattccagaggtccatcacatttcccaagatcctctgcactacagcatcgcgtcagtctctgcttctcagaagatcagagaactagagtctatgatcggcatagacccagggaaccgggggattgggcacctgctctgtaaagatgagctgctgaaggcctctctctcgctgtcccatgcccgctcagtgctcatcaccactgggttccccacacatttcaatcatgagcctccagaagagacagatggcccaccaggagctgttgctctggttgccttcctgcaggccttggagaaggaggtcgccataatcgttgaccagagagcctggaacttgcaccagaagattgttgaagatgctgttgagcaaggtgttctgaagacgcagatcccgatattaacttaccaaggtggatcagtggaagctgctcaggcattcctgtgcaaaaatggggacccgcagacacctagatttgaccacctggtggccatagagcgtgccggaagagctgctgatggcaattactacaatgcaaggaagatgaacatcaagcacttggttgaccccattgacgatctttttcttgctgcgaagaagattcctggaatctcatcaactggagtcggtgatggaggcaacgagcttgggatgggtaaagtcaaggaggctgtgaggaggcacatacggcacggggatgtcatcgcctgcgacgtggaggctgactttgccgtcattgctggtgtttctaactggggaggctatgccctggcctgcgcactctacatcctgtactcatgtgctgtccacagtcagtacctgaggaaagcagtcggaccctccagggcacctggagatcaggcctggactcaggccctcccgtcggtcattaaggaagaaaaaatgctgggcatcttggtgcagcacaaagtccggagtggcgtctcgggcatcgtgggcatggaggtggatgggctgcccttccacaacacccacgccgagatgatccagaagctggtggacgtcaccacggcacaggtgtaaccgtccatgttccgtgtgagcagagtccctaccaacgggcaggtctgcatccggggagaatgcagctgcttctggcgacaatcctgctagtaaacactggtcttcggtgagcaacgaacactcgcctggcctgggaaactgcatgcccactttctgggaggggttagtgcaggtgctgtggacaaaggacaacatttctctggggctttttaacttttattcctaagactctaaaggcgttgatttcaaccctccttcactctggcttcttcaggcaacccacgtggtctcctgtgagaatcttctcgacagttacttatggggacacttgtgaacaattaactgccaggcagagcatgagaacaaacattcccaggccatgtaggataggatactccagactccagtcatcctcccccatccatggtttctgttactcatggtttcagttactcatagccaactgcagaccgaaaatactaaatgaaaaatttcagaaataaacaactcttaagttttaaattgtgtactcttcggaatatcgtgatgaaatctcacaccatcctgctccatcctacctaggacgtgaatcctccctttgtccagggtacccgtgctgtctacaccacccgcctgccagtcacccagcaggtgatcagatcgactgtcatggtattgcagtgcttatattcaagaacctcttatgtgactcagtaatgtcctcaaagtgcaagagcagagatgctggcaatttggatatgccaaaaagaggccataaagggcttcctttaagtg

SEQ ID NO: 8569 - protein, 621 aa, Homo sapiens; identical to SEQ ID NO: 8535

SEQ ID NO: 8570 - DNA, 812 bp, Homo sapiens
attctgggagcccaccccaggacaatggcagggcaaaaccagtgagcaaggcagaaaattcctgaaattctccactgaggcccagctgttcctctccttgaaaagtcaaggcttggttcaagccagatagcacctgaggacagaacatatcagatggagaaggaaaggcaagtgacttgtccagagccactctgtcaaaaggggacttgagtcctcagggctgttgactccaaagctgacaagcaggtggcattcttcttcagagcagggcaagtgtaattctggaccaatgtgtgattctgagaccagaccaaccaactgaaggagccaagttacaccctgtttaaccctgccttcaaagggacgactctgtaagattctctgctacttattcaagttgacacgatgcccttcacactccacctgaggtcccgccttccctctgccataaggagtttgattctacaaaagaaaccaaacatcagaaatacatccagcatggctggagagctccgaccagccagcctggtggtcctgcccaggtcccttgctccagcttttgaaagattctgccaggtcaacactggtcctctacccctgctgggccagagtgagccagaaaagtggatgctgccccctcaaggtgctatctcagagaccaggaacgagctgccctccccactgttctgactccttcccctatcacctggcgcctgtcctggctgagatctttgagatcatggagaaagtccagccctggagaaatcccactggctctgccatctgtccactccatcgcccaagccagaaac

SEQ ID NO: 8571 - protein, 94 aa, Homo sapiens
MPFTLHLRSRLPSAIRSLILQKKPNIRNTSSMAGELRPASLVVLPRSLAPAFERFCQVNTGPLPLLGQSEPEKWMLPPQGAISETRNELPSPLF

SEQ ID NO: 8572 - DNA, 2797 bp, Homo sapiens
attctgggagcccaccccaggacaatggcagggcaaaaccagtgagcaaggcagaaaattcctgaaattctccactgaggcccagctgttcctctccttgaaaagtcaaggcttggttcaagccagatagcacctgaggacagaacatatcagatggagaaggaaaggcaagtgacttgtccagagccactctgtcaaaaggggacttgagtcctcagggctgttgactccaaagctgacaagcaggtggcattcttcttcagagcagggcaagtgtaattctggaccaatgtgtgattctgagaccagaccaaccaactgaaggagccaagttacaccctgtttaaccctgccttcaaagggacgactctgtaagattctctgctacttattcaagttgacacgatgcccttcacactccacctgaggtcccgccttccctctgccataaggagtttgattctacaaaagaaaccaaacatcagaaatacatccagcatggctggagagctccgaccagccagcctggtggtcctgcccaggtcccttgctccagcttttgaaagattctgccaggtcaacactggtcctctacccctgctgggccagagtgagccagaaaagtggatgctgccccctcaaggtgctatctcagagaccaggatgggccatccccagttctggaaatacgagttcggtgcctgcaccggcagcctggcttcgctggagcagtactcggagcagctgaaggacatggtggccttcttcctgggctgcagcttctccctggaggaggccttggagaaagcggggctccccagaagagacccagcaggtcacagccaggcgggtgcatacaagacaacagtgccttgtgttacccatgctggcttctgctgccctctggtggtcacgatgaggcccattcccaaggacaagctggaagggctggtgcgggcctgctgctccctcggaggtgagcaggggcaacctgttcacatgggcgacccagaactgttgggaatcaaagagctttccaaacctgcctacggggatgccatggtgtgtcccccaggggaggttccagtgttctggccttctccgctgaccagtctcggagctgtcagcagctgtgagaccccactggcttttgccagcatcccaggctgcacagttatgactgacctgaaggatgcaaaggctccacctggttgtctcaccccagagagaattccagaggtccatcacatttcccaagatcctctgcactacagcatcgcgtcagtctctgcttctcagaagatcagagaactagagtctatgatcggcatagacccagggaaccgggggattgggcacctgctctgtaaagatgagctgctgaaggcctctctctcgctgtcccatgcccgctcagtgctcatcaccactgggttccccacacatttcaatcatgagcctccagaagagacagatggcccaccaggagctgttgctctggttgccttcctgcaggccttggagaaggaggtcgccataatcgttgaccagagagcctggaacttgcaccagaagattgttgaagatgctgttgagcaaggtgttctgaagacgcagatcccgatattaacttaccaaggtggatcagtggaagctgctcaggcattcctgtgcaaaaatggggacccgcagacacctagatttgaccacctggtggccatagagcgtgccggaagagctgctgatggcaattactacaatgcaaggaagatgaacatcaagcacttggttgaccccattgacgatctttttcttgctgcgaagaagattcctggaatctcatcaactggagtcggtgatggaggcaacgagcttgggatgggtaaagtcaaggaggctgtgaggaggcacatacggcacggggatgtcatcgcctgcgacgtggaggctgactttgccgtcattgctggtgtttctaactggggaggctatgccctggcctgcgcactctacatcctgtactcatgtgctgtccacagtcagtacctgaggaaagcagtcggaccctccagggcacctggagatcaggcctggactcaggccctcccgtcggtcattaaggaagaaaaaatgctgggcatcttggtgcagcacaaagtccggagtggcgtctcgggcatcgtgggcatggaggtggatgggctgcccttccacaacacccacgccgagatgatccagaagctggtggacgtcaccacggcacaggtgtaaccgtccatgttccgtgtgagcagagtccctaccaacgggcaggtctgcatccggggagaatgcagctgcttctggcgacaatcctgctagtaaacactggtcttcggtgagcaacgaacactcgcctggcctgggaaactgcatgcccactttctgggaggggttagtgcaggtgctgtggacaaaggacaacatttctctggggctttttaacttttattcctaagactctaaaggcgttgatttcaaccctccttcactctggcttcttcaggcaacccacgtggtctcctgtgagaatcttctcgacagttacttatggggacacttgtgaacaattaactgccaggcagagcatgagaacaaacattcccaggccatgtaggataggatactccagactccagtcatcctcccccatccatggtttctgttactcatggtttcagttactcatagccaactgcagaccgaaaatactaaatgaaaaatttcagaaataaacaactcttaagttttaaattgt

SEQ ID NO: 8573 - protein, 621 aa, Homo sapiens; identical to SEQ ID NO: 8535

SEQ ID NO: 8574 - DNA, 2332 bp, Homo sapiens
gaaattctccactgaggcccagctgttcctctccttgaaaagtcaaggcttggttcaagccagatagcacctgaggacagaacatatcaggagccaagttacaccctgtttaaccctgccttcaaagggacgactctgtaagattctctgctacttattcaagttgacacgatgcccttcacactccacctgaggtcccgccttccctctgccataaggagtttgattctacaaaagaaaccaaacatcagaaatacatccagcatggctggagagctccgaccagccagcctggtggtcctgcccagtactcggagcagctgaaggacatggtggccttcttcctgggctgcagcttctccctggaggaggccttggagaaagcggggctccccaacaacagtgccttgtgttacccatgctggcttctgctgccctctggtggtcacgatgaggcccattcccaaggacaagctggaagggctggtgcgggcctgctgctccctcggaggtgagcaggggcaacctgttcacatgggcgacccagaactgttgggaatcaaagagctttccaaacctgcctacggggatgccatggtgtgtcccccaggggaggttccagtgttctggccttctccgctgaccagtctcggagctgtcagcagctgtgagaccccactggcttttgccagcatcccaggctgcacagttatgactgacctgaaggatgcaaaggctccacctggttgtctcaccccagagagaattccagaggtccatcacatttcccaagatcctctgcactacagcatcgcgtcagtctctgcttctcagaagatcagagaactagagtctatgatcggcatagacccagggaaccgggggattgggcacctgctctgtaaagatgagctgctgaaggcctctctctcgctgtcccatgcccgctcagtgctcatcaccactgggttccccacacatttcaatcatgagcctccagaagagacagatggcccaccaggagctgttgctctggttgccttcctgcaggccttggagaaggaggtcgccataatcgttgaccagagagcctggaacttgcaccagaagattgttgaagatgctgttgagcaaggtgttctgaagacgcagatcccgatattaacttaccaaggtggatcagtggaagctgctcaggcattcctgtgcaaaaatggggacccgcagacacctagatttgaccacctggtggccatagagcgtgccggaagagctgctgatggcaattactacaatgcaaggaagatgaacatcaagcacttggttgaccccattgacgatctttttcttgctgcgaagaagattcctggaatctcatcaactggagtcggtgatggaggcaacgagcttgggatgggtaaagtcaaggaggctgtgaggaggcacatacggcacggggatgtcatcgcctgcgacgtggaggctgactttgccgtcattgctggtgtttctaactggggaggctatgccctggcctgcgcactctacatcctgtactcatgtgctgtccacagtcagtacctgaggaaagcagtcggaccctccagggcacctggagatcaggcctggactcaggccctcccgtcggtcattaaggaagaaaaaatgctgggcatcttggtgcagcacaaagtccggagtggcgtctcgggcatcgtgggcatggaggtggatgggctgcccttccacaacacccacgccgagatgatccagaagctggtggacgtcaccacggcacaggtgtaaccgtccatgttccgtgtgagcagagtccctaccaacgggcaggtctgcatccggggagaatgcagctgcttctggcgacaatcctgctagtaaacactggtcttcggtgagcaacgaacactcgcctggcctgggaaactgcatgcccactttctgggaggggttagtgcaggtgctgtggacaaaggacaacatttctctggggctttttaacttttattcctaagactctaaaggcgttgatttcaaccctccttcactctggcttcttcaggcaacccacgtggtctcctgtgagaatcttctcgacagttacttatggggacacttgtgaacaattaactgccaggcagagcatgagaacaaacattcccaggccatgtaggataggatactccagactccagtcatcctcccccatccatggtttctgttactcatggtttcagttactcatagccaactgcagaccgaaaatactaaatgaaaaatttcagaaataaacaactcttaagttttaaattgt

SEQ ID NO: 8575 - protein, 451 aa, Homo sapiens
MRPIPKDKLEGLVRACCSLGGEQGQPVHMGDPELLGIKELSKPAYGDAMVCPPGEVPVFWPSPLTSLGAVSSCETPLAFASIPGCTVMTDLKDAKAPPGCLTPERIPEVHHISQDPLHYSIASVSASQKIRELESMIGIDPGNRGIGHLLCKDELLKASLSLSHARSVLITTGFPTHFNHEPPEETDGPPGAVALVAFLQALEKEVAIIVDQRAWNLHQKIVEDAVEQGVLKTQIPILTYQGGSVEAAQAFLCKNGDPQTPRFDHLVAIERAGRAADGNYYNARKMNIKHLVDPIDDLFLAAKKIPGISSTGVGDGGNELGMGKVKEAVRRHIRHGDVIACDVEADFAVIAGVSNWGGYALACALYILYSCAVHSQYLRKAVGPSRAPGDQAWTQALPSVIKEEKMLGILVQHKVRSGVSGIVGMEVDGLPFHNTHAEMIQKLVDVTTAQV

SEQ ID NO: 8576 - DNA, 2601 bp, Homo sapiens
gaaattctccactgaggcccagctgttcctctccttgaaaagtcaaggcttggttcaagccagatagcacctgaggacagaacatatcaggagccaagttacaccctgtttaaccctgccttcaaagggacgactctgtaagattctctgctacttattcaagttgacacgatgcccttcacactccacctgaggtcccgccttccctctgccataaggagtttgattctacaaaagaaaccaaacatcagaaatacatccagcatggctggagagctccgaccagccagcctggtggtcctgcccagtactcggagcagctgaaggacatggtggccttcttcctgggctgcagcttctccctggaggaggccttggagaaagcggggctccccaacaacagtgccttgtgttacccatgctggcttctgctgccctctggtggtcacgatgaggcccattcccaaggacaagctggaagggctggtgcgggcctgctgctccctcggaggtgagcaggggcaacctgttcacatgggcgacccagaactgttgggaatcaaagagctttccaaacctgcctacggggatgccatggtgtgtcccccaggggaggttccagtgttctggccttctccgctgaccagtctcggagctgtcagcagctgtgagaccccactggcttttgccagcatcccaggctgcacagttatgactgacctgaaggatgcaaaggctccacctggttgtctcaccccagagagaattccagaggtccatcacatttcccaagatcctctgcactacagcatcgcgtcagtctctgcttctcagaagatcagagaactagagtctatgatcggcatagacccagggaaccgggggattgggcacctgctctgtaaagatgagctgctgaaggcctctctctcgctgtcccatgcccgctcagtgctcatcaccactgggttccccacacatttcaatcatgagcctccagaagagacagatggcccaccaggagctgttgctctggttgccttcctgcaggccttggagaaggaggtcgccataatcgttgaccagagagcctggaacttgcaccagaagattgttgaagatgctgttgagcaaggtgttctgaagacgcagatcccgatattaacttaccaaggtggatcagtggaagctgctcaggcattcctgtgcaaaaatggggacccgcagacacctagatttgaccacctggtggccatagagcgtgccggaagagctgctgatggcaattactacaatgcaaggaagatgaacatcaagcacttggttgaccccattgacgatctttttcttgctgcgaagaagattcctggaatctcatcaactggagtcggtgatggaggcaacgagcttgggatgggtaaagtcaaggaggctgtgaggaggcacatacggcacggggatgtcatcgcctgcgacgtggaggctgactttgccgtcattgctggtgtttctaactggggaggctatgccctggcctgcgcactctacatcctgtactcatgtgctgtccacagtcagtacctgaggaaagcagtcggaccctccagggcacctggagatcaggcctggactcaggccctcccgtcggtcattaaggaagaaaaaatgctgggcatcttggtgcagcacaaagtccggagtggcgtctcgggcatcgtgggcatggaggtggatgggctgcccttccacaacacccacgccgagatgatccagaagctggtggacgtcaccacggcacaggtgtaaccgtccatgttccgtgtgagcagagtccctaccaacgggcaggtctgcatccggggagaatgcagctgcttctggcgacaatcctgctagtaaacactggtcttcggtgagcaacgaacactcgcctggcctgggaaactgcatgcccactttctgggaggggttagtgcaggtgctgtggacaaaggacaacatttctctggggctttttaacttttattcctaagactctaaaggcgttgatttcaaccctccttcactctggcttcttcaggcaacccacgtggtctcctgtgagaatcttctcgacagttacttatggggacacttgtgaacaattaactgccaggcagagcatgagaacaaacattcccaggccatgtaggataggatactccagactccagtcatcctcccccatccatggtttctgttactcatggtttcagttactcatagccaactgcagaccgaaaatactaaatgaaaaatttcagaaataaacaactcttaagttttaaattgtgtactcttcggaatatcgtgatgaaatctcacaccatcctgctccatcctacctaggacgtgaatcctccctttgtccagggtacccgtgctgtctacaccacccgcctgccagtcacccagcaggtgatcagatcgactgtcatggtattgcagtgcttatattcaagaacctcttatgtgactcagtaatgtcctcaaagtgcaagagcagagatgctggcaatttggatatgccaaaaagaggccataaagggcttcctttaagtg

SEQ ID NO: 8577 - protein, 451 aa, Homo sapiens; identical to SEQ ID NO: 8575

SEQ ID NO: 8578 - DNA, 2401 bp, Homo sapiens
cggctagtaagcctcttgtttttgaaggtcacaaacaacaaaaacatggaaactcagaatggaagggggcccatgagagcaatcttgaggcataacaacagctgcagaaggtgactgcagggaagcggactgtgctcctattctttatgttctgtttttagctgtgtttttcagagcaagtaggtaccatggtgataggtaccatagaaatagatggagcgcaccacccagcacggggctgccaagctgttcccctggaaatgcaccgagagctgccagggagagcccagggactctgcttcctggggcctgtcagctgcacggccagggaagaagtcccctgtagaatggtccccagaggcttctcactgtcttgctgtcattgtccaaggtccctgatggtgcatcctcctcctggagcacctgtggccttcctctctgagtcctcaggaaactcacttaagggggtttgcctttgcctagtgaagcaattatcttggccaacagtgacctcaaaagtagcactgccagcattcctgtctccatagttaggagtgcgtggtcctcatcctgcctggatgtggcactgtcactggttttatgcaatgtcataaagaatttgtggggcaggagctgagttctgaacatttggtaatcaggaatactcataaaatgaaatttcagaggatctaacccagaaagccgagcaaggtagggcataaccacgtctgatatggtggttttcagtttgtgaagccacaggcagtacagaatagggcccagcctcaactatttttggatgcagcttgaatggactgaaagaccctttgaaacaagtgctggaaccatcccgtagcacttacataaccatctctgcaaggctgttgatagatgaatgtaaatgaacctaggcagagcttagctcatttttatttagatttagaccaatttcatgtcttctgaaacgtaacccatatatacacacactaaatctaactcttttattttaggcctagcatgagaggatcaagttgaaagggcatctgttattatatctgtcccatcatatctgcttctgtgatggctttattatgtacatttctttctatacatttgtgctctcaggtggcattcttcttcagagcagggcaagtgtaattctggaccaatgtgtgattctgagaccagaccaaccaactgaaggtaattttattctcaattaaagaaacacagacggggcgcagtggcgcacgtgagcctgtagtcccagcactttgggaggctgaggcaggtggatcacttaaggtcaggagttcaagaccagcctggccaacatagtgaaaccccatttctactaaaaatacaaaaattagccaggtgcagtggcacgcacctgtaatcccagctacttgggagggtgaggcaggagaatcgtgcaacctccacccccaaggctcaagcgatattcctacctcagcctcccaagtagctgggaccacaggtgtgtaccaccatgcctggctatttttttgtatttttagtaaagacagggtctcaccattttgctcaggctggtctcgaactcctgagctcaagcgatccacccaccttggcctctcaaagtgctgggattataggcatgagccactgtgcctggctaggaatttattttaacaaccaaaaacttaaaactcaataacatcattaactcataaattattgtttagttacagattacgaaaatgatagaaccagaaggtgctaacaaaatgtctgtcctgcatgtgtggcatttgacatgaagaaactgaggcccttgctgggcgcagtggctcatgcctgtaaccccagcactttgggaggccaaggcaggaggatcacttgagctcaagagttcaagaccagccttggacaagatagtgaaaccttgtctctaccaaaaaaatacagaagttagccaggcatggtgcagtgtacctgtagtagcagctactgaggaagctgaggtaggaggatcgcttgatcccaggaggtcaaggctgcagtaagccgtgattgtgccactgcaccccagcctgggcgacagagtgagaccctgtctcaaaaaaagaaaagtaaaggctacgcgcggtggctcatacctgtaatttcagcactttgggaggccgaggcgggtggatcacctgaggtggggagtttgagatcagcctgaccaacatggagaaaccccgtctctactaaaaatacaaaattagccaggcgtggtggcgcatgcctgtaatcccagctactcgggaggctgaggcaggagaatcacttgaacccgtgcggcggaggttgctgtgagccgagatggtgccattgcaccccagcctgggcaacaagagcgaaactctatctc

SEQ ID NO: 8579 - protein, 119 aa, Homo sapiens [sequence omitted]

SEQ ID NO: 8580 - DNA, 760 bp, Homo sapiens
gcctgcaccggcagcctggcttcgctggagcagtactcggagcagctgaaggacatggtggccttcttcctgggctgcagcttctccctggaggaggccttggagaaagcggggctccccagaagagacccagcaggtcacagccaggcgggtgcatacaagacaacagtgccttgtgttacccatgctggcttctgctgccctctggtggtcacgatgaggcccattcccaaggacaagctggaagggctggtgcgggcctgctgctccctcggaggtgagcaggggcaacctgttcacatgggcgacccagaactgttgggaatcaaagagctttccaaacctgcctacggggatgccatggtgtgtcccccaggggaggttccagtgttctggccttctccgctgaccagtctcggagctgtcagcagctgtgagaccccactggcttttgccagcatcccaggctgcacagttatgactgacctgaaggatgcaaaggctccacctggttgtctcaccccagagagaattccagaggtccatcacatttcccaagatcctctgcactacagcatcgcgtcagtctctgcttctcagaagatcagagaactagagtctatgatcggcatagacccagtgctcatcaccactgggttccccacacatttcaatcatgagcctccagaagagacagatggcccaccaggagctgttgctctggttgccttcctgcaggccttggagaaggaggtcgcca

SEQ ID NO: 8581 - protein, 234 aa, Homo sapiens
MVAFFLGCSFSLEEALEKAGLPRRDPAGHSQAGAYKTTVPCVTHAGFCCPLVVTMRPIPKDKLEGLVRACCSLGGEQGQPVHMGDPELLGIKELSKPAYGDAMVCPPGEVPVFWPSPLTSLGAVSSCETPLAFASIPGCTVMTDLKDAKAPPGCLTPERIPEVHHISQDPLHYSIASVSASQKIRELESMIGIDPVLITTGFPTHFNHEPPEETDGPPGAVALVAFLQALEKEV

SEQ ID NO: 8582 - DNA, 568 bp, Homo sapiens
agttcttggattgagggtcagtttcctgaggaaggaactcaaagcaatgcaagaatggactaatacgtctactgaaggacatcttggttggtcccagattttggcaattatgaaaaatctgctatagatgtatgcaggttttctgtggacgtacgttttccactcctgctggccagacaacacatctacagggtgcagatgacctatgggcagccacactgtgatgcctgtgtgagggcctaaacttcagggaggaagaaagtgaggtcagatcctgagggagcacttgctctcctgcagcaggcatgggggagcacctgactgctgaggatggcttcggaacatttgtgtgaagagggataacagatgctgcatgccagagggatggtggccataggccgcaagattcggttcttctggccgcagaagaccctgacttcacctttcaggcctctgtttccttatcaacgaaataagagcatgtgattaattctgcaggtgcttccagcttggacttttttgcaaatattttcattcaactcactttagaaacctgcagggagtctct

SEQ ID NO: 8583 - protein, 30 aa, Homo sapiens
MQVFCGRTFSTPAGQTTHLQGADDLWAATL

SEQ ID NO: 8584 - DNA, 1718 bp, Homo sapiens
gtccgctgccactcctggggctctctgtgccaggtcctgggctgagtgtgctccgtgcatgattgctttgaatttctgtaaccttgtgatgtggggattcttagcagcatgccacagagtggaagccaaggtcctgagaggcaaggccacctgcctaaggtgctgggcttatatgagcccagccctggactcctccctgtaccatgagtcacctcctggccctcccctcctcacagcttcctaccaaggaccccagaggatggaggcctctcggtggtggctgctggtcactgtgctcatggctggggctcattgtgtggccctggttgaccaagaagcttctgatctcatccattctggcccccaggacagcagccctgggcctgccctgccctgccacaaaatctctgtgagcaacatagactttgccttcaagctctacagacagttggctttgaacgcccccggggagaacattctcttctccccagtgagcatctccctggccttggccatgctttcttggggggccccagtggccagcaggacccaactcctggagggcctggggttcaccctcaccgtggtgcctgaggaggagatccaggaaggcttctgggatctgctgatcaggctccgtgggcagggtccccggctcctcctgaccatggaccagcgcaggttcagcggcctgggcgcgagggccaaccagagcctagaggaggcccaaaaacacattgacgaatatacagagcagcagacccaggggaagctcggggcctgggagaaggacctcggcagtgaaaccacagcggttctggtgaatcacatgctcctcagagctgagtggatgaagccctttgactcacgtgccaccagcccaaaggagttctttgtagatgagcacagcgctgtgtgggtgcccatgatgaaggagaaggccagccaccgcttcctgcacgaccgtgagctgcaatgctctgtgctgcggatggaccacgctgggaacaccaccaccttcttcatcttccccaacaggggcaagatgaggcagctggaagatgccctgctgcctgaaacactgattaagtgggacagtctgctcaggaccagagaactcgatttccacttccccaaattttccatttctagaacctgcagactggagatgctcctcccatgagtgactgtgggtggaggcttccctgggcagcctggactgaacatttctaaagtcactcataaggccatgatgacgctggatgagaggggctctgaagctgctgcagccaccagcattcagctcacccctgggcctcgcccagaccttgacttcccacccactctgggcactgagttcagtcggcccttcctggtgatgactttccacacggaaacaggaagcatgctttttctggagaagattgtaaacccactgggataacgccccctcagacatgctgggtgactcagagagaacagaatggcctacacagcagggagcttctattacagcctcaagtttaaggaaaagttgcatatacctgagttcttttgcttggtttccacaggaaccaagtgggtaaggatagtaatggtgatcaaggctgttctccctgcacacaggcagtaattaccattgagcaaacacctactatgtaccaaatgctttctatctcttatctcattttaaaatgaattacaacaacaatccaaca

SEQ ID NO: 8585 - protein, 374 aa, Homo sapiens
MIALNFCNLVMWGFLAACHRVEAKVLRGKATCLRCWAYMSPALDSSLYHESPPGPPLLTASYQGPQRMEASRWWLLVTVLMAGAHCVALVDQEASDLIHSGPQDSSPGPALPCHKISVSNIDFAFKLYRQLALNAPGENILFSPVSISLALAMLSWGAPVASRTQLLEGLGFTLTVVPEEEIQEGFWDLLIRLRGQGPRLLLTMDQRRFSGLGARANQSLEEAQKHIDEYTEQQTQGKLGAWEKDLGSETTAVLVNHMLLRAEWMKPFDSRATSPKEFFVDEHSAVWVPMMKEKASHRFLHDRELQCSVLRMDHAGNTTTFFIFPNRGKMRQLEDALLPETLIKWDSLLRTRELDFHFPKFSISRTCRLEMLLP

SEQ ID NO: 8586 - DNA, 6838 bp, Homo sapiens
gcgactccagctccgcggcgccctcgccgggtgcgtgccgctcgcgcgcccgccagccaggctctccgcgcccgccgcccgcgccgcgctggcccgggctctcccgcccgcgcttcatggctgcacacgagtgggactggttccaacgcgaggagctcatcgggcagattagcgacatccgagtgcagaacctgcaagttgagagggaaaatgtgcagaagaggacctttacacgatggataaatctacatctagaaaagtgcaacccacctctagaagttaaagatttattcgtcgatatacaagatggcaaaatcctaatggctttgttagaagtcctgtctgggcggaatctgctgcacgaatacaaatcctcgtcgcatcgtatttttcggttgaacaacatagcgaaagcacttaagtttttggaagatagcaatgtaaaactggttagcattgatgcagcagaaatagcagatggcaacccttctttggttcttgggctgatatggaacataatcctcttcttccagattaaggagctcacaggcaacctcagcagaaactctccatcttccagcttgtcccctggctcagggggcacagactcagactcatccttcccacccacacccactgcagagaggagcgtggcaatatcggtgaaagaccagaggaaggctatcaaggccctgttggcgtgggtgcagaggaaaacgagaaagtatggcgtggcggtgcaggactttgcgggcagttggaggagtgggctggctttcctggcggtgatcaaggccattgaccccagcctggtggacatgaaacaggccctggaaaattccacacgagaaaatctagagaaggctttcagcatcgcacaggatgccctgcacatccccaggctcctggagccagaagacatcatggttgacacaccagacgagcagtctatcatgacttacgtggcacagtttctagaacgttttccggagttggaagccgaagatattttcgattcagataaagaagttcctatcgaatccacttttgttcgcatcaaagaaactccttctgaacaggagagcaaagtcttcgttctgactgaaaatggggagcgtacctacactgttaaccatgaaaccagccacccaccaccctccaaagtctttgtctgtgacaagcccgagagcatgaaggaattccgcctggatggtgtttccagccatgcgctgtcagacagctccaccgagttcatgcaccagattattgaccaggtcctgcaagggggcccaggtaagaccagcgacatcagtgagccatctccagaatcctccattttatcatccagaaaggagaacgggaggtccaactctttgccgatcaagaaaacagttcactttgaggctgacacctacaaggatcctttctgcagtaagaacctgtccctttgctttgaagggagcccaagagtggcaaaggaatcattgaggcaggatggacatgtcttggcagttgaggttgctgaggaaaaggaacagaaacaggaatcctcgaagattccagaatcctcctctgacaaggtcgctggtgacatttttttggtggagggcacaaacaataattctcagtcttcttcctgtaatggtgctttagagagtacagcccgccacgatgaagaaagtcactctctttcacccccaggagaaaatactgtgatggccgattccttccagatcaaggttaacctgatgactgtagaagctttagaggagggagactattttgaagccatcccattaaaagcctcaaaatttaacagcgacctaatagattttgcttctaccagccaggctttcaacaaagttccttcacctcatgagacaaaacctgacgaggatgctgaggcttttgagaatcatgctgaaaaactaggtaaaaggagtattaaatctgctcacaaaaagaaggattcgccagagcctcaagttaagatggacaaacatgaacctcatcaggactccggagaagaagctgaaggctgtccttcagccccagaagagacaccagtggataaaaagccagaggtgcatgaaaaggccaagagaaagtccacccgtcctcattatgaggaagagggagaagacgatgacctccagggtgtgggcgaggaattatcttccagccccccaagcagctgtgtcagcttggagacccttgggagtcacagcgaagaaggcctggatttcaagccctccccacccctctcaaaggtttccgtcattccccacgacctcttctatttcccacactatgaggttcccctggctgcagttttggaggcttatgtagaagacccggaggatctaaaaaatgaagaaatggatctcgaagagccagagggctatatgccagacctggactccagggaggaggaggccgatggctctcagagcagctccagttcctcggtgccaggagagagcctccccagtgccagcgaccaggtgctgtatctcagcaggggtggtgtgggtaccacaccagcctcagaacccgctccactggccccccatgaggaccaccagcaaagggagaccaaagagaatgaccccatggacagccatcagtcccaggaatccccaaacctggaaaacatagcaaaccccctagaagaaaatgtaacgaaagaatcaatcagtagtaaaaaaaaggaaaaaaggaaacatgtggaccacgtagaaagttcactatttgtagcaccaggaagtgttcaatcctcagatgacctagaagaagacagtagcgactacagcattccttccaggactagtcacagtgactccagcatttaccttcgacgacatactcataggtcttcggaatcggatcattttagctatgttcagttgaggaacgcagcagatctggatgacagaagaaaccgaatattaaccaggaaggccaacagctcaggagaagccatgtcactggggagccacagcccgcagagtgactccctgacacagcttgtccagcagccggatatgatgtattttattctcttcctgtggctcctggtgtactgcttgctgctcttcccacaactggatgttagcaggctctgatacgtgtgtctggataataaaaaagacaggaccctgaccaggggcggggttacttcattttattttgggttctgggtggggcacttctacagacagttgaggacctccgaggaaacttagaccccctttctcgctattgtggtttttttttttttttcaggtttccttttttttctggacaacctgagcatgcttttttctttggctgtgtactcaaaactcaggcatgcagctggatccgtaggtggggttttgtccttgtgtgccttgctgggttggatagggagcattgttagtgatcattagcccgcctggatcttagcacaccccacattgcaggttcacacgctggatgaacttgagtttcttacctctcagatgaagggctgcttaatgagaaagagggtgggcaccccaggccaagccccagctggggagagagctgccacgttttcctccaagcgtgggtgtttgagagaaggtgctggggtccatgcacctgtcgcagtccggtaactggttgcattcactaggggaaatccgagcagccagctctgtgtaagcacatccaggaatggcagaatccagggaggaaggtgaaagctgtgttgagagccactgtgtgctctttttcaccctgttttttttgttgtttttttgttttgttttttgtttgaggggagataacacttgaaattcagttttccattgattggattgagatagaaccatgattttcaaaccagatcgccagggcccagcagggccatataaaagccatgaggagtggctgggctggaatcagctcccagcagtgctggagctgggtggtggggtagcttcctgcccactaaagctttggtgcacacctccctcagaatgcatgtcttggaacgggcattctttgtggtcacttgtaatgggtttcttgaagaggctttctggacagcactccgggagcaggccagcacaggaggtttgtgaaagaagagaggcatctctagcacccctgcccccagtcttcctcagccccaggctccctctgctctctcctccctgccaagactcaggtccgtggtgagtctctgcattggttcctcctccccttgctctccccttcagaaagcatgtaccaggcaacccttataaaatcacaaatgagtcaggaggggactcagtgagcatcttgtctagctggacccagagagacagagcagcttgaccaagatcatatagccgaccaggggcagacttgcagtgagcacacaggcacctgatgccctgtccagagctgtcaccccttgtaggaaacttccactgggcacaccaatgtcctgagaaaaagataaaatgactagattaaaatgtccacattcaagcaaaaccaaaaagtttagaccaactatcgacatttgttttgttcttgtatttttcccatgaggaattcttactcaccttcaagctcatccccaattccttctgaaatacccttgacagctgcaacagcttgtcatttgacataccagcgtcgctcttactccaggaatcacgtttctttctttgctagccaaggacttgctcatttcaagcagtgggtttcaagtttacagaattccagcatggccagaagaatttacatagcacatctgagtcgatgacagccaaaatctggcctctaaaccagtctgattatagtctgtctcccctcctgaaagaatttcagccttccaaccagaaagctgctgggagcttggagtgattccatctggaaggccaagagccccatggaaaatgagctaattaatgagctccctggcatcaatgaaagctcaaaggtacagataataaagattatgtgatagtttataactctgggcaccatgcagtccttgcctaaattagatgctcgaagagcctgggaagagccaacccaaatgtgaatcatttcattttatgggtctagaccttgttcagaaaaacctctgcaagatacttctctcacctattacaacttgtaatattgtttaaaacatctactggcaagatgcctgaaagtcatttggttcaggttggcagtcaactgatattttgcaaaggaaaaaaaaatctcatttgagtataggcttctatggaagaagctggatatagaaaatggatgtggaagtctgcaggacaaaccaccccattgcttgtaaattttttttaaattaaaagaaatacaataaggcttttaacaagaactagcagtcccctaagtctcgctgcttagaagtaaccactttcaactctcttatgtttgcatttctacataacgtgcttacactttattttttaatttagaaacatctactggcttgctgtcacagtagaggaggatttcactcttaccataccgtgctttggttttccagtatagctagatcacatcatttagtacatttctattaggtgttgacattacctggagcacttaaggattgttgactcccaagcccagcagtgtgttatggttacatgtcctttctcctccaaatgtccccattaatttgctattctctctctttactttttttttttttttggtgtggcacattctttaataacttcctgaggaagagaacatgggaagtaaatatggttgtaaatattttgagatttttgcatgacttaagatgtctgtattctgcccttaacagaaatgtggctgagcatagaatgacaggtggaaaataataccctcccctagcccctcccaagcgtgctggttgagatttctgatgccattctgattcccgtacctttatatgtgacttaggtttttttatccacccttcctggaaacatttaagatctctttattcttggtgttctgaactgtcatgatggtgttgtatcccgggtgttaaaccttgtgctgggccttcatgggaaatttcttaaattttcttgtgattatttacattctttctttctggaccacctattatttcaatgttggaccctcccctacacccaggctgatgctctaatattttttatcttttctatttttcgtctatgtttctgatctgctttcaggaagaattattcatttttatcttcccaatctgaatgttttattgaatttttattttccaagttaataaaacctttggttattatcctgtctttgttttacagtgtcctgctcttgatgcgtggatgcagattttgtctctctgtggacgttaatgattgtggtctgaggggaagtcttttctgctccctgtgttgccctcattttctctgagttctctttattttggtggtctcagtctctatctttcacgttgtgaatttttctcaaatatatggtgatcctatggatctgttcatgttttaagagtgaggcatccaaaagctgattggaagttgtgtgtgccaactggtgagcttttccactagggtcaccaggtgggcacctggactcatcattggagaacactgcctgtcagtatttgcacgtgttttctctggggctcattctgtttcttgagagatattcccactactctccttcctgggaaacgggcatacacagggcttttagcctatgctgagtactcatgtggtttcaaaaatggtgtcccatctgggcagaagtccccatgagcacttggcttgactggcaaaggacaccttttgccccttcctccagacatacccagctctga

SEQ ID NO: 8587 - protein, 1002 aa, Homo sapiens; identical to SEQ ID NO: 1249

SEQ ID NO: 8588 - DNA, 3161 bp, Homo sapiens
gcgactccagctccgcggcgccctcgccgggtgcgtgccgctcgcgcgcccgccagccaggctctccgcgcccgccgcccgcgccgcgctggcccgggctctcccgcccgcgcttcatggctgcacacgagtgggactggttccaacgcgaggagctcatcgggcagattagcgacatccgagtgcagaacctgcaagttgagagggaaaatgtgcagaagaggacctttacacgatggataaatctacatctagaaaagtgcaacccacctctagaagttaaagatttattcgtcgatatacaagatggcaaaatcctaatggctttgttagaagtcctgtctgggcggaatctgctgcacgaatacaaatcctcgtcgcatcgtatttttcggttgaacaacatagcgaaagcacttaagtttttggaagatagcaatgtaaaactggttagcattgatgcagcagaaatagcagatggcaacccttctttggttcttgggctgatatggaacataatcctcttcttccagattaaggagctcacaggcaacctcagcagaaactctccatcttccagcttgtcccctggctcagggggcacagactcagactcatccttcccacccacacccactgcagagaggagcgtggcaatatcggtgaaagaccagaggaaggctatcaaggccctgttggcgtgggtgcagaggaaaacgagaaagtatggcgtggcggtgcaggactttgcgggcagttggaggagtgggctggctttcctggcggtgatcaaggccattgaccccagcctggtggacatgaaacaggccctggaaaattccacacgagaaaatctagagaaggctttcagcatcgcacaggatgccctgcacatccccaggctcctggagccagaagacatcatggttgacacaccagacgagcagtctatcatgacttacgtggcacagtttctagaacgttttccggagttggaagccgaagatattttcgattcagataaagaagttcctatcgaatccacttttgttcgcatcaaagaaactccttctgaacaggagagcaaagtcttcgttctgactgaaaatggggagcgtacctacactgttaaccatgaaaccagccacccaccaccctccaaagtctttgtctgtgacaagcccgagagcatgaaggaattccgcctggatggtgtttccagccatgcgctgtcagacagctccaccgagttcatgcaccagattattgaccaggtcctgcaagggggcccaggtaagaccagcgacatcagtgagccatctccagaatcctccattttatcatccagaaaggagaacgggaggtccaactctttgccgatcaagaaaacagttcactttgaggctgacacctacaaggatcctttctgcagtaagaacctgtccctttgctttgaagggagcccaagagtggcaaaggaatcattgaggcaggatggacatgtcttggcagttgaggttgctgaggaaaaggaacagaaacaggaatcctcgaagattccagaatcctcctctgacaaggtcgctggtgacatttttttggtggagggcacaaacaataattctcagtcttcttcctgtaatggtgctttagagagtacagcccgccacgatgaagaaagtcactctctttcacccccaggagaaaatactgtgatggccgattccttccagatcaaggttaacctgatgactgtagaagctttagaggagggagactattttgaagccatcccattaaaagcctcaaaatttaacagcgacctaatagattttgcttctaccagccaggctttcaacaaagttccttcacctcatgagacaaaacctgacgaggatgctgaggcttttgagaatcatgctgaaaaactaggtaaaaggagtattaaatctgctcacaaaaagaaggattcgccagagcctcaagttaagatggacaaacatgaacctcatcaggactccggagaagaagctgaaggctgtccttcagccccagaagagacaccagtggataaaaagccagaggtgcatgaaaaggccaagagaaagtccacccgtcctcattatgaggaagagggagaagacgatgacctccagggtgtgggcgaggaattatcttccagccccccaagcagctgtgtcagcttggagacccttgggagtcacagcgaagaaggcctggatttcaagccctccccacccctctcaaaggtttccgtcattccccacgacctcttctatttcccacactatgaggttcccctggctgcagttttggaggcttatgtagaagacccggaggatctaaaaaatgaagaaatggatctcgaagagccagagggctatatgccagacctggactccagggaggaggaggccgatggctctcagagcagctccagttcctcggtgccaggagagagcctccccagtgccagcgaccaggtgctgtatctcagcaggggtggtgtgggtaccacaccagcctcagaacccgctccactggccccccatgaggaccaccagcaaagggagaccaaagagaatgaccccatggacagccatcagtcccaggaatccccaaacctggaaaacatagcaaaccccctagaagaaaatgtaacgaaagaatcaatcagtagtaaaaaaaaggaaaaaaggaaacatgtggaccacgtagaaagttcactatttgtagcaccaggaagtgttcaatcctcagatgacctagaagaagacagtagcgactacagcattccttccaggactagtcacagtgactccagcatttaccttcgacgacatactcataggtcttcggaatcggatcattttagctatgttcagttgaggaacgcagcagatctggatgacagaagaaaccgaatattaaccaggaaggccaacagctcaggagaagccatgtcactggggagccacagcccgcagagtgactccctgacacagcttgtccagcagccggatatgatgtattttattctcttcctgtggctcctggtgtactgcttgctgctcttcccacaactggatgttagcaggctctgatacgtgtgtctggataataaaaaagacaggaccctg

SEQ ID NO: 8589 - protein, 1002 aa, Homo sapiens; identical to SEQ ID NO: 1249

SEQ ID NO: 8590 - DNA, 2702 bp, Homo sapiens
gcgactccagctccgcggcgccctcgccgggtgcgtgccgctcgcgcgcccgccagccaggctctccgcgcccgccgcccgcgccgcgctggcccgggctctcccgcccgcgcttcatggctgcacacgagtgggactggttccaacgcgaggagctcatcgggcagattagcgacatccgagtgcagaacctgcaagttgagagggaaaatgtgcagaagaggacctttacacgatggataaatctacatctagaaaagtgcaacccacctctagaagttaaagatttattcgtcgatatacaagatggcaaaatcctaatggctttgttagaagtcctgtctgggcggaatctgctgcacgaatacaaatcctcgtcgcatcgtatttttcggttgaacaacatagcgaaagcacttaagtttttggaagatagcaatgtaaaactggttagcattgatgcagcagaaatagcagatggcaacccttctttggttcttgggctgatatggaacataatcctcttcttccagattaaggagctcacaggcaacctcagcagaaactctccatcttccagcttgtcccctggctcagggggcacagactcagactcatccttcccacccacacccactgcagagaggagcgtggcaatatcggtgaaagaccagaggaaggctatcaaggccctgttggcgtgggtgcagaggaaaacgagaaagtatggcgtggcggtgcaggactttgcgggcagttggaggagtgggctggctttcctggcggtgatcaaggccattgaccccagcctggtggacatgaaacaggccctggaaaattccacacgagaaaatctagagaaggctttcagcatcgcacaggatgccctgcacatccccaggctcctggagccagaagacatcatggttgacacaccagacgagcagtctatcatgacttacgtggcacagtttctagaacgttttccggagttggaagccgaagatattttcgattcagataaagaagttcctatcgaatccacttttgttcgcatcaaagaaactccttctgaacaggagagcaaagtcttcgttctgactgaaaatggggagcgtacctacactgttaaccatgaaaccagccacccaccaccctccaaagtctttgtctgtgacaagcccgagagcatgaaggaattccgcctggatggtgtttccagccatgcgctgtcagacagctccaccgagttcatgcaccagattattgaccaggtcctgcaagggggcccaggtaagaccagcgacatcagtgagccatctccagaatcctccattttatcatccagaaaggagaacgggaggtccaactctttgccgatcaagaaaacagttcactttgaggctgacacctacaaggatcctttctgcagtaagaacctgtccctttgctttgaagggagcccaagagtggcaaaggaatcattgaggcaggatggacatgtcttggcagttgaggttgctgaggaaaaggaacagaaacaggaatcctcgaagattccagaatcctcctctgacaaggtcgctggtgacatttttttggtggagggcacaaacaataattctcagtcttcttcctgtaatggtgctttagagagtacagcccgccacgatgaagaaagtcactctctttcacccccaggagaaaatactgtgatggccgattccttccagatcaaggttaacctgatgactgtagaagctttagaggagggagactattttgaagccatcccattaaaagcctcaaaatttaacagcgacctaatagattttgcttctaccagccaggctttcaacaaagttccttcacctcatgagacaaaacctgacgaggatgctgaggcttttgagaatcatgctgaaaaactaggtaaaaggagtattaaatctgctcacaaaaagaaggattcgccagagcctcaagttaagatggacaaacatgaacctcatcaggactccggagaagaagctgaaggctgtccttcagccccagaagagacaccagtggataaaaagccagaggtgcatgaaaaggccaagagaaagtccacccgtcctcattatgaggaagagggagaagacgatgacctccagggtgtgggcgaggaattatcttccagccccccaagcagctgtgtcagcttggagacccttgggagtcacagcgaagaaggcctggatttcaagccctccccacccctctcaaaggtttccgtcattccccacgacctcttctatttcccacactatgaggttcccctggctgcagttttggaggcttatgtagaagacccggaggatctaaaaaatgaagaaatggatctcgaagagccagagggctatatgccagacctggactccagggaggaggaggccgatggctctcagagcagctccagttcctcggtgccaggagagagcctccccagtgccagcgaccaggtgctgtatctcagcaggggtggtgtgggtaccacaccagcctcagaacccgctccactggccccccatgaggaccaccagcaaagggagaccaaagagaatgaccccatggacagccatcagtcccaggaatccccaaacctggaaaacatagcaaaccccctagaagaaaatgtaacgaaagaatcaatcagtagt

SEQ ID NO: 8591 - protein, 861 aa, Homo sapiens
MAAHEWDWFQREELIGQISDIRVQNLQVERENVQKRTFTRWINLHLEKCNPPLEVKDLFVDIQDGKILMALLEVLSGRNLLHEYKSSSHRIFRLNNIAKALKFLEDSNVKLVSIDAAEIADGNPSLVLGLIWNIILFFQIKELTGNLSRNSPSSSLSPGSGGTDSDSSFPPTPTAERSVAISVKDQRKAIKALLAWVQRKTRKYGVAVQDFAGSWRSGLAFLAVIKAIDPSLVDMKQALENSTRENLEKAFSIAQDALHIPRLLEPEDIMVDTPDEQSIMTYVAQFLERFPELEAEDIFDSDKEVPIESTFVRIKETPSEQESKVFVLTENGERTYTVNHETSHPPPSKVFVCDKPESMKEFRLDGVSSHALSDSSTEFMHQIIDQVLQGGPGKTSDISEPSPESSILSSRKENGRSNSLPIKKTVHFEADTYKDPFCSKNLSLCFEGSPRVAKESLRQDGHVLAVEVAEEKEQKQESSKIPESSSDKVAGDIFLVEGTNNNSQSSSCNGALESTARHDEESHSLSPPGENTVMADSFQIKVNLMTVEALEEGDYFEAIPLKASKFNSDLIDFASTSQAFNKVPSPHETKPDEDAEAFENHAEKLGKRSIKSAHKKKDSPEPQVKMDKHEPHQDSGEEAEGCPSAPEETPVDKKPEVHEKAKRKSTRPHYEEEGEDDDLQGVGEELSSSPPSSCVSLETLGSHSEEGLDFKPSPPLSKVSVIPHDLFYFPHYEVPLAAVLEAYVEDPEDLKNEEMDLEEPEGYMPDLDSREEEADGSQSSSSSSVPGESLPSASDQVLYLSRGGVGTTPASEPAPLAPHEDHQQRETKENDPMDSHQSQESPNLENIANPLEENVTKESIS

SEQ ID NO: 8592 - DNA, 1347 bp, Homo sapiens
ggcgccctcgccgggtgcgtgccgctcgcgcgcccgccagccaggctctccgcgcccgccgcccgcgccgcgctggcccgggctctcccgcccgcgcttcatggctgcacacgagtgggactggttccaacgcgaggagctcatcgggcagattagcgacatccgagtgcagaacctgcaagttgagagggaaaatgtgcagaagaggacctttacacgatggataaatctacatctagaaaagtgcaacccacctctagaagttaaagatttattcgtcgatatacaagatggcaaaatcctaatggctttgttagaagtcctgtctgggcggaatctgagccctggtcaccagctgctgtgtccttggtgggcctccacggggagtctttgattctggagcccagccaagaacaggcctccacttccccatgagcgtggcctggcacttcacacctggtggagctgacccactggtttgccttgtaatgccatcttcccccaacctggaggagcgtcagtgtgcttcagttcaggctgcacgaatacaaatcctcgtcgcatcgtatttttcggttgaacaacatagcgaaagcacttaagtttttggaagatagcaatgtaagtgtttgaagctcatcctgctaacacaagcttgtcctgttaggaaaaggacgtcatttgaagttcagtgctggtcgcaagagaagcgtgagacggggactgagctaaaatggtcaaattaaactaagcttaaatttcacagaaatcactcagatgacccctccgttgggaacatagtccctgactccgtgcccacccactttgcagccatcaggattaaaactctgatgtacgttcagtcgtagaaaggcagagcagctaactggctctcagatatttagaattcagttcacgttttctccttcattcccttgaataagagtatggcgagcatgtccgagtgtagaactttctcttggaacttagaatatgggagaagaaggggaagaggggggccaaatgagccaggggaaaaaagttacaaaattctcccattcttgatgtaactttctagactccgatgatctttttctgtgcctggaaccctgctccacattcttcacagaggggagggggtggctcagcagggaggacgtttcatcacgcctctcattaggtttcaccaatcaatccgggttaaaacaaaacccagcttgcctgacacattggcacatacagtgagattttatcataaagtaggattcatctggggttcttcatagtaacagaagctgaactcagctgatttaagcagtaaaggaatttgttgaaatatgccgagta

SEQ ID NO: 8593 - protein, 97 aa, Homo sapiens
MAAHEWDWFQREELIGQISDIRVQNLQVERENVQKRTFTRWINLHLEKCNPPLEVKDLFVDIQDGKILMALLEVLSGRNLSPGHQLLCPWWASTGSL

SEQ ID NO: 8594 - DNA, 6030 bp, Homo sapiens
cgttttcttgcttggggcgaaagggggcagcggagcggagcgcccgaaacccagcccctgcggaccgcaatctttgggaaaaaggcgcaaggtgggaacgcagggccgcacgtgggaaccgttcgcggctgccgggtttgcagcccctgcccgcgcagctgggagccgcaggaggcggcccgggactccagcctgcagcccctatcccgcctcctcccacgctccagccacggcgcggcgctacctgctgcagcctctcttctccggagaggcccgggctcctccctacacccccgcggcccagccccgggtcccaggctccggctccgggtcagcatcctcgcgctcaaggcggtcatgccggactcctgcggactacacatcccggcggcccatgcggccccgtcacgtgatgcaaggatcgccggcctttccgccagagggcggcacagaactacaactcccagcaagctcccaaggcggccctccgcgcaatgccgctaccggaagtgcgggtcgcgcttccggcggcgtcccggggccaggggggtgcgcctttctccgcgtcggggcggcccggagcgcggtggcgcggcgcgggaggggttttctggtgcgtcctggtccaccatggccaaaccaacaagcaaagattcaggcttgaaggagaagtttaagattctgttgggactgggaacaccgaggccaaatcccaggtctgcagagggtaaacagacggagtttatcatcaccgcggaaatactgagagaactgagcatggaatgtggcctcaacaatcgcatccggatgatagggcagatttgtgaagtcgcaaaaaccaagaaatttgaagagcacgcagtggaagcactctggaaggcggtcgcggatctgttgcagccggagcggccgctggaggcccggcacgcggtgctggctctgctgaaggccatcgtgcaggggcagggcgagcgtttgggggtcctcagagccctcttctttaaggtcatcaaggattacccttccaacgaagaccttcacgaaaggctggaggttttcaaggccctcacagacaatgggagacacatcacctacttggaggaagagctggctgactttgtcctgcagtggatggatgttggcttgtcctcggaattccttctggtgctggtgaacttggtcaaattcaatagctgttacctcgacgagtacatcgcaaggatggttcagatgatctgtctgctgtgcgtccggaccgcgtcctctgtggacatagaggtctccctgcaggtgctggacgccgtggtctgctacaactgcctgccggctgagagcctcccgctgttcatcgttaccctctgtcgcaccatcaacgtcaaggagctctgcgagccttgctggaagctgatgcggaacctccttggcacccacctgggccacagcgccatctacaacatgtgccacctcatggaggacagagcctacatggaggacgcgcccctgctgagaggagccgtgttttttgtgggcatggctctctggggagcccaccggctctattctctcaggaactcgccgacatctgtgttgccatcattttaccaggccatggcatgtccgaacgaggtggtgtcctatgagatcgtcctgtccatcaccaggctcatcaagaagtataggaaggagctccaggtggtggcgtgggacattctgctgaacatcatcgaacggctccttcagcagctccagaccttggacagcccggagctcaggaccatcgtccatgacctgttgaccacggtggaggagctgtgtgaccagaacgagttccacgggtctcaggagagatactttgaactggtggagagatgtgcggaccagaggcctgagtcctccctcctgaacctgatctcctatagagcgcagtccatccacccggccaaggacggctggattcagaacctgcaggcgctgatggagagattcttcaggagcgagtcccgaggcgccgtgcgcatcaaggtgctggacgtgctgtcctttgtgctgctcatcaacaggcagttctatgaggaggagctgattaactcagtggtcatctcgcagctctcccacatccccgaggataaagaccaccaggtccgaaagctggccacccagttgctggtggacctggcagagggctgccacacacaccacttcaacagcctgctggacatcatcgagaaggtgatggcccgctccctctccccacccccggagctggaagaaagggatgtggccgcatactcggcctccttggaggatgtgaagacagccgtcctggggcttctggtcatccttcagaccaagctgtacaccctgcctgcaagccacgccacgcgtgtgtatgagatgctggtcagccacattcagctccactacaagcacagctacaccctgccaatcgcgagcagcatccggctgcaggcctttgacttcctgttgctgctgcgggccgactcactgcaccgcctgggcctgcccaacaaggatggagtcgtgcggttcagcccctactgcgtctgcgactacatggagccagagagaggctctgagaagaagaccagcggccccctttctcctcccacagggcctcctggcccggcgcctgcaggccccgccgtgcggctggggtccgtgccctactccctgctcttccgcgtcctgctgcagtgcttgaagcaggagtctgactggaaggtgctgaagctggttctgggcaggctgcctgagtccctgcgctataaagtgctcatctttacttccccttgcagtgtggaccagctgtgctctgctctctgctccatgctttcaggcccaaagacactggagcggctccgaggcgccccagaaggcttctccagaactgacttgcacctggccgtggttccagtgctgacagcattaatctcttaccataactacctggacaaaaccaaacagcgcgagatggtctactgcctggagcagggcctcatccaccgctgtgccagccagtgcgtcgtggccttgtccatctgcagcgtggagatgcctgacatcatcatcaaggcgctgcctgttctggtggtgaagctcacgcacatctcagccacagccagcatggccgtcccactgctggagttcctgtccactctggccaggctgccgcacctctacaggaactttgccgcggagcagtatgccagtgtgttcgccatctccctgccgtacaccaacccctccaagtttaatcagtacatcgtgtgtctggcccatcacgtcatagccatgtggttcatcaggtgccgcctgcccttccggaaggattttgtccctttcatcactaagggcctgcggtccaatgtcctcttgtcttttgatgacacccccgagaaggacagcttcagggcccggagtactagtctcaacgagagacccaagagcaggatacagacgtccctcaccagtgccagcttggggtctgcagatgagaactccgtggcccaggctgacgatagcctgaaaaacctccacctggagctcacggaaacctgtctggacatgatggctcgatacgtcttctccaacttcacggctgtcccgaagaggtctcctgtgggcgagttcctcctagcgggtggcaggaccaaaacctggctggttgggaacaagcttgtcactgtgacgacaagcgtgggaaccgggacccggtcgttactaggcctggactcgggggagctgcagtccggcccggagtcgagctccagccccggggtgcatgtgagacagaccaaggaggcgccggccaagctggagtcccaggctgggcagcaggtgtcccgtggggcccgggatcgggtccgttccatgtcggggggccatggtcttcgagttggcgccctggacgtgccggcctcccagttcctgggcagtgccacttctccaggaccacggactgcaccagccgcgaaacctgagaaggcctcagctggcacccgggttcctgtgcaggagaagacgaacctggcggcctatgtgcccctgctgacccagggctgggcggagatcctggtccggaggcccacagggaacaccagctggctgatgagcctggagaacccgctcagccctttctcctcggacatcaacaacatgcccctgcaggagctgtctaacgccctcatggcggctgagcgcttcaaggagcaccgggacacagccctgtacaagtcactgtcggtgccggcagccagcacggccaaaccccctcctctgcctcgctccaacacagtggcctctttctcctccctgtaccagtccagctgccaaggacagctgcacaggagcgtttcctgggcagactccgccgtggtcatggaggagggaagtccgggcgaggttcctgtgctggtggagcccccagggttggaggacgttgaggcagcgctaggcatggacaggcgcacggatgcctacagcaggtcgtcctcagtctccagccaggaggagaagtcgctccacgcggaggagctggttggcaggggcatccccatcgagcgagtcgtctcctcggagggtggccggccctctgtggacctctccttccagccctcgcagcccctgagcaagtccagctcctctcccgagctgcagactctgcaggacatcctcggggaccctggggacaaggccgacgtgggccggctgagccctgaggttaaggcccggtcacagtcagggaccctggacggggaaagtgctgcctggtcggcctcgggcgaagacagtcggggccagcccgagggtcccttgccttccagctccccccgctcgcccagtggcctccggccccgaggttacaccatctccgactcggccccatcacgcaggggcaagagagtagagagggacgccttaaagagcagagccacagcctccaatgcagagaaagtgccaggcatcaaccccagtttcgtgttcctgcagctctaccattcccccttctttggcgacgagtcaaacaagccaatcctgctgcccaatgagtcacagtcctttgagcggtcggtgcagctcctcgaccagatcccatcatacgacacccacaagatcgccgtcctgtatgttggagaaggccagagcaacagcgagctcgccatcctgtccaatgagcatggctcctacaggtacacggagttcctgacgggcctgggccggctcatcgagctgaaggactgccagccggacaaggtgtacctgggaggcctggacgtgtgtggtgaggacggccagttcacctactgctggcacgatgacatcatgcaagccgtcttccacatcgccaccctgatgcccaccaaggacgtggacaagcaccgctgcgacaagaagcgccacctgggcaacgactttgtgtccattgtctacaatgactccggtgaggacttcaagcttggcaccatcaagggccagttcaactttgtccacgtgatcgtcaccccgctggactacgagtgcaacctggtgtccctgcagtgcaggaaagacatggagggccttgtggacaccagcgtggccaagatcgtgtctgaccgcaacctgcccttcgtggcccgccagatggccctgcacgcaaatatggcctcacaggtgcatcatagccgctccaaccccaccgatatctacccctccaagtggattgcccggctccgccacatcaagcggctccgccagcggatctgcgaggaagccgcctactccaaccccagcctacctctggtgcaccctccgtcccatagcaaagcccctgcacagactccagccgagcccacacctggctatgaggtgggccagcggaagcgcctcatctcctcggtggaggacttcaccgagtttgtgtgaggccggggccctccctcctgcactggccttggacggtattgcctgtcagtgaaataaataaagtcctgaccccagtgcacagacatagaggcacagattgcagtc

SEQ ID NO: 8595 - protein, 1855 aa, Homo sapiens
MPDSCGLHIPAAHAAPSRDARIAGLSARGRHRTTTPSKLPRRPSAQCRYRKCGSRFRRRPGARGVRLSPRRGGPERGGAAREGFSGASWSTMAKPTSKDSGLKEKFKILLGLGTPRPNPRSAEGKQTEFIITAEILRELSMECGLNNRIRMIGQICEVAKTKKFEEHAVEALWKAVADLLQPERPLEARHAVLALLKAIVQGQGERLGVLRALFFKVIKDYPSNEDLHERLEVFKALTDNGRHITYLEEELADFVLQWMDVGLSSEFLLVLVNLVKFNSCYLDEYIARMVQMICLLCVRTASSVDIEVSLQVLDAVVCYNCLPAESLPLFIVTLCRTINVKELCEPCWKLMRNLLGTHLGHSAIYNMCHLMEDRAYMEDAPLLRGAVFFVGMALWGAHRLYSLRNSPTSVLPSFYQAMACPNEVVSYEIVLSITRLIKKYRKELQVVAWDILLNIIERLLQQLQTLDSPELRTIVHDLLTTVEELCDQNEFHGSQERYFELVERCADQRPESSLLNLISYRAQSIHPAKDGWIQNLQALMERFFRSESRGAVRIKVLDVLSFVLLINRQFYEEELINSVVISQLSHIPEDKDHQVRKLATQLLVDLAEGCHTHHFNSLLDIIEKVMARSLSPPPELEERDVAAYSASLEDVKTAVLGLLVILQTKLYTLPASHATRVYEMLVSHIQLHYKHSYTLPIASSIRLQAFDFLLLLRADSLHRLGLPNKDGVVRFSPYCVCDYMEPERGSEKKTSGPLSPPTGPPGPAPAGPAVRLGSVPYSLLFRVLLQCLKQESDWKVLKLVLGRLPESLRYKVLIFTSPCSVDQLCSALCSMLSGPKTLERLRGAPEGFSRTDLHLAVVPVLTALISYHNYLDKTKQREMVYCLEQGLIHRCASQCVVALSICSVEMPDIIIKALPVLVVKLTHISATASMAVPLLEFLSTLARLPHLYRNFAAEQYASVFAISLPYTNPSKFNQYIVCLAHHVIAMWFIRCRLPFRKDFVPFITKGLRSNVLLSFDDTPEKDSFRARSTSLNERPKSRIQTSLTSASLGSADENSVAQADDSLKNLHLELTETCLDMMARYVFSNFTAVPKRSPVGEFLLAGGRTKTWLVGNKLVTVTTSVGTGTRSLLGLDSGELQSGPESSSSPGVHVRQTKEAPAKLESQAGQQVSRGARDRVRSMSGGHGLRVGALDVPASQFLGSATSPGPRTAPAAKPEKASAGTRVPVQEKTNLAAYVPLLTQGWAEILVRRPTGNTSWLMSLENPLSPFSSDINNMPLQELSNALMAAERFKEHRDTALYKSLSVPAASTAKPPPLPRSNTVASFSSLYQSSCQGQLHRSVSWADSAVVMEEGSPGEVPVLVEPPGLEDVEAALGMDRRTDAYSRSSSVSSQEEKSLHAEELVGRGIPIERVVSSEGGRPSVDLSFQPSQPLSKSSSSPELQTLQDILGDPGDKADVGRLSPEVKARSQSGTLDGESAAWSASGEDSRGQPEGPLPSSSPRSPSGLRPRGYTISDSAPSRRGKRVERDALKSRATASNAEKVPGINPSFVFLQLYHSPFFGDESNKPILLPNESQSFERSVQLLDQIPSYDTHKIAVLYVGEGQSNSELAILSNEHGSYRYTEFLTGLGRLIELKDCQPDKVYLGGLDVCGEDGQFTYCWHDDIMQAVFHIATLMPTKDVDKHRCDKKRHLGNDFVSIVYNDSGEDFKLGTIKGQFNFVHVIVTPLDYECNLVSLQCRKDMEGLVDTSVAKIVSDRNLPFVARQMALHANMASQVHHSRSNPTDIYPSKWIARLRHIKRLRQRICEEAAYSNPSLPLVHPPSHSKAPAQTPAEPTPGYEVGQRKRLISSVEDFTEFV

SEQ ID NO: 8596 - DNA, 5656 bp, Homo sapiens
cgttttcttgcttggggcgaaagggggcagcggagcggagcgcccgaaacccagcccctgcggaccgcaatctttgggaaaaaggcgcaaggtgggaacgcagggccgcacgtgggaaccgttcgcggctgccgggtttgcagcccctgcccgcgcagctgggagccgcaggaggcggcccgggactccagcctgcagcccctatcccgcctcctcccacgctccagccacggcgcggcgctacctgctgcagcctctcttctccggagaggcccgggctcctccctacacccccgcggcccagccccgggtcccaggctccggctccgggtcagcatcctcgcgctcaaggcggtcatgccggactcctgcggactacacatcccggcggcccatgcggccccgtcacgtgatgcaaggatcgccggcctttccgccagagggcggcacagaactacaactcccagcaagctcccaaggcggccctccgcgcaatgccgctaccggaagtgcgggtcgcgcttccggcggcgtcccggggccaggggggtgcgcctttctccgcgtcggggcggcccggagcgcggtggcgcggcgcgggaggggttttctggtgcgtcctggtccaccatggccaaaccaacaagcaaagattcaggcttgaaggagaagtttaagattctgttgggactgggaacaccgaggccaaatcccaggtctgcagagggtaaacagacggagtttatcatcaccgcggaaatactgagagaactgagcatggaatgtggcctcaacaatcgcatccggatgatagggcagatttgtgaagtcgcaaaaaccaagaaatttgaagaggatgatctgtctgctgtgcgtccggaccgcgtcctctgtggacatagaggtctccctgcaggtgctggacgccgtggtctgctacaactgcctgccggctgagagcctcccgctgttcatcgttaccctctgtcgcaccatcaacgtcaaggagctctgcgagccttgctggaagctgatgcggaacctccttggcacccacctgggccacagcgccatctacaacatgtgccacctcatggaggacagagcctacatggaggacgcgcccctgctgagaggagccgtgttttttgtgggcatggctctctggggagcccaccggctctattctctcaggaactcgccgacatctgtgttgccatcattttaccaggccatggcatgtccgaacgaggtggtgtcctatgagatcgtcctgtccatcaccaggctcatcaagaagtataggaaggagctccaggtggtggcgtgggacattctgctgaacatcatcgaacggctccttcagcagctccagaccttggacagcccggagctcaggaccatcgtccatgacctgttgaccacggtggaggagctgtgtgaccagaacgagttccacgggtctcaggagagatactttgaactggtggagagatgtgcggaccagaggcctgagtcctccctcctgaacctgatctcctatagagcgcagtccatccacccggccaaggacggctggattcagaacctgcaggcgctgatggagagattcttcaggagcgagtcccgaggcgccgtgcgcatcaaggtgctggacgtgctgtcctttgtgctgctcatcaacaggcagttctatgaggaggagctgattaactcagtggtcatctcgcagctctcccacatccccgaggataaagaccaccaggtccgaaagctggccacccagttgctggtggacctggcagagggctgccacacacaccacttcaacagcctgctggacatcatcgagaaggtgatggcccgctccctctccccacccccggagctggaagaaagggatgtggccgcatactcggcctccttggaggatgtgaagacagccgtcctggggcttctggtcatccttcagaccaagctgtacaccctgcctgcaagccacgccacgcgtgtgtatgagatgctggtcagccacattcagctccactacaagcacagctacaccctgccaatcgcgagcagcatccggctgcaggcctttgacttcctgttgctgctgcgggccgactcactgcaccgcctgggcctgcccaacaaggatggagtcgtgcggttcagcccctactgcgtctgcgactacatggagccagagagaggctctgagaagaagaccagcggccccctttctcctcccacagggcctcctggcccggcgcctgcaggccccgccgtgcggctggggtccgtgccctactccctgctcttccgcgtcctgctgcagtgcttgaagcaggagtctgactggaaggtgctgaagctggttctgggcaggctgcctgagtccctgcgctataaagtgctcatctttacttccccttgcagtgtggaccagctgtgctctgctctctgctccatgctttcaggcccaaagacactggagcggctccgaggcgccccagaaggcttctccagaactgacttgcacctggccgtggttccagtgctgacagcattaatctcttaccataactacctggacaaaaccaaacagcgcgagatggtctactgcctggagcagggcctcatccaccgctgtgccagccagtgcgtcgtggccttgtccatctgcagcgtggagatgcctgacatcatcatcaaggcgctgcctgttctggtggtgaagctcacgcacatctcagccacagccagcatggccgtcccactgctggagttcctgtccactctggccaggctgccgcacctctacaggaactttgccgcggagcagtatgccagtgtgttcgccatctccctgccgtacaccaacccctccaagtttaatcagtacatcgtgtgtctggcccatcacgtcatagccatgtggttcatcaggtgccgcctgcccttccggaaggattttgtccctttcatcactaagggcctgcggtccaatgtcctcttgtcttttgatgacacccccgagaaggacagcttcagggcccggagtactagtctcaacgagagacccaagagcaggatacagacgtccctcaccagtgccagcttggggtctgcagatgagaactccgtggcccaggctgacgatagcctgaaaaacctccacctggagctcacggaaacctgtctggacatgatggctcgatacgtcttctccaacttcacggctgtcccgaagaggtctcctgtgggcgagttcctcctagcgggtggcaggaccaaaacctggctggttgggaacaagcttgtcactgtgacgacaagcgtgggaaccgggacccggtcgttactaggcctggactcgggggagctgcagtccggcccggagtcgagctccagccccggggtgcatgtgagacagaccaaggaggcgccggccaagctggagtcccaggctgggcagcaggtgtcccgtggggcccgggatcgggtccgttccatgtcggggggccatggtcttcgagttggcgccctggacgtgccggcctcccagttcctgggcagtgccacttctccaggaccacggactgcaccagccgcgaaacctgagaaggcctcagctggcacccgggttcctgtgcaggagaagacgaacctggcggcctatgtgcccctgctgacccagggctgggcggagatcctggtccggaggcccacagggaacaccagctggctgatgagcctggagaacccgctcagccctttctcctcggacatcaacaacatgcccctgcaggagctgtctaacgccctcatggcggctgagcgcttcaaggagcaccgggacacagccctgtacaagtcactgtcggtgccggcagccagcacggccaaaccccctcctctgcctcgctccaacacagtggcctctttctcctccctgtaccagtccagctgccaaggacagctgcacaggagcgtttcctgggcagactccgccgtggtcatggaggagggaagtccgggcgaggttcctgtgctggtggagcccccagggttggaggacgttgaggcagcgctaggcatggacaggcgcacggatgcctacagcaggtcgtcctcagtctccagccaggaggagaagtcgctccacgcggaggagctggttggcaggggcatccccatcgagcgagtcgtctcctcggagggtggccggccctctgtggacctctccttccagccctcgcagcccctgagcaagtccagctcctctcccgagctgcagactctgcaggacatcctcggggaccctggggacaaggccgacgtgggccggctgagccctgaggttaaggcccggtcacagtcagggaccctggacggggaaagtgctgcctggtcggcctcgggcgaagacagtcggggccagcccgagggtcccttgccttccagctccccccgctcgcccagtggcctccggccccgaggttacaccatctccgactcggccccatcacgcaggggcaagagagtagagagggacgccttaaagagcagagccacagcctccaatgcagagaaagtgccaggcatcaaccccagtttcgtgttcctgcagctctaccattcccccttctttggcgacgagtcaaacaagccaatcctgctgcccaatgagtcacagtcctttgagcggtcggtgcagctcctcgaccagatcccatcatacgacacccacaagatcgccgtcctgtatgttggagaaggccagagcaacagcgagctcgccatcctgtccaatgagcatggctcctacaggtacacggagttcctgacgggcctgggccggctcatcgagctgaaggactgccagccggacaaggtgtacctgggaggcctggacgtgtgtggtgaggacggccagttcacctactgctggcacgatgacatcatgcaagccgtcttccacatcgccaccctgatgcccaccaaggacgtggacaagcaccgctgcgacaagaagcgccacctgggcaacgactttgtgtccattgtctacaatgactccggtgaggacttcaagcttggcaccatcaagggccagttcaactttgtccacgtgatcgtcaccccgctggactacgagtgcaacctggtgtccctgcagtgcaggaaagacatggagggccttgtggacaccagcgtggccaagatcgtgtctgaccgcaacctgcccttcgtggcccgccagatggccctgcacgcaaatatggcctcacaggtgcatcatagccgctccaaccccaccgatatctacccctccaagtggattgcccggctccgccacatcaagcggctccgccagcggatctgcgaggaagccgcctactccaaccccagcctacctctggtgcaccctccgtcccatagcaaagcccctgcacagactccagccgagcccacacctggctatgaggtgggccagcggaagcgcctcatctcctcggtggaggacttcaccgagtttgtgtgaggccggggccctccctcctgcactggccttggacggtattgcctgtcagtgaaataaataaagtcctgaccccagtgcacagacatagaggcacagattgcagtc

SEQ ID NO: 8597 - protein, 1564 aa, Homo sapiens
MICLLCVRTASSVDIEVSLQVLDAVVCYNCLPAESLPLFIVTLCRTINVKELCEPCWKLMRNLLGTHLGHSAIYNMCHLMEDRAYMEDAPLLRGAVFFVGMALWGAHRLYSLRNSPTSVLPSFYQAMACPNEVVSYEIVLSITRLIKKYRKELQVVAWDILLNIIERLLQQLQTLDSPELRTIVHDLLTTVEELCDQNEFHGSQERYFELVERCADQRPESSLLNLISYRAQSIHPAKDGWIQNLQALMERFFRSESRGAVRIKVLDVLSFVLLINRQFYEEELINSVVISQLSHIPEDKDHQVRKLATQLLVDLAEGCHTHHFNSLLDIIEKVMARSLSPPPELEERDVAAYSASLEDVKTAVLGLLVILQTKLYTLPASHATRVYEMLVSHIQLHYKHSYTLPIASSIRLQAFDFLLLLRADSLHRLGLPNKDGVVRFSPYCVCDYMEPERGSEKKTSGPLSPPTGPPGPAPAGPAVRLGSVPYSLLFRVLLQCLKQESDWKVLKLVLGRLPESLRYKVLIFTSPCSVDQLCSALCSMLSGPKTLERLRGAPEGFSRTDLHLAVVPVLTALISYHNYLDKTKQREMVYCLEQGLIHRCASQCVVALSICSVEMPDIIIKALPVLVVKLTHISATASMAVPLLEFLSTLARLPHLYRNFAAEQYASVFAISLPYTNPSKFNQYIVCLAHHVIAMWFIRCRLPFRKDFVPFITKGLRSNVLLSFDDTPEKDSFRARSTSLNERPKSRIQTSLTSASLGSADENSVAQADDSLKNLHLELTETCLDMMARYVFSNFTAVPKRSPVGEFLLAGGRTKTWLVGNKLVTVTTSVGTGTRSLLGLDSGELQSGPESSSSPGVHVRQTKEAPAKLESQAGQQVSRGARDRVRSMSGGHGLRVGALDVPASQFLGSATSPGPRTAPAAKPEKASAGTRVPVQEKTNLAAYVPLLTQGWAEILVRRPTGNTSWLMSLENPLSPFSSDINNMPLQELSNALMAAERFKEHRDTALYKSLSVPAASTAKPPPLPRSNTVASFSSLYQSSCQGQLHRSVSWADSAVVMEEGSPGEVPVLVEPPGLEDVEAALGMDRRTDAYSRSSSVSSQEEKSLHAEELVGRGIPIERVVSSEGGRPSVDLSFQPSQPLSKSSSSPELQTLQDILGDPGDKADVGRLSPEVKARSQSGTLDGESAAWSASGEDSRGQPEGPLPSSSPRSPSGLRPRGYTISDSAPSRRGKRVERDALKSRATASNAEKVPGINPSFVFLQLYHSPFFGDESNKPILLPNESQSFERSVQLLDQIPSYDTHKIAVLYVGEGQSNSELAILSNEHGSYRYTEFLTGLGRLIELKDCQPDKVYLGGLDVCGEDGQFTYCWHDDIMQAVFHIATLMPTKDVDKHRCDKKRHLGNDFVSIVYNDSGEDFKLGTIKGQFNFVHVIVTPLDYECNLVSLQCRKDMEGLVDTSVAKIVSDRNLPFVARQMALHANMASQVHHSRSNPTDIYPSKWIARLRHIKRLRQRICEEAAYSNPSLPLVHPPSHSKAPAQTPAEPTPGYEVGQRKRLISSVEDFTEFV

SEQ ID NO: 8598 - DNA, 5961 bp, Homo sapiens
cgttttcttgcttggggcgaaagggggcagcggagcggagcgcccgaaacccagcccctgcggaccgcaatctttgggaaaaaggcgcaaggtgggaacgcagggccgcacgtgggaaccgttcgcggctgccgggtttgcagcccctgcccgcgcagctgggagccgcaggaggcggcccgggactccagcctgcagcccctatcccgcctcctcccacgctccagccacggcgcggcgctacctgctgcagcctctcttctccggagaggcccgggctcctccctacacccccgcggcccagccccgggtcccaggctccggctccgggtcagcatcctcgcgctcaaggcggtcatgccggactcctgcggactacacatcccggcggcccatgcggccccgtcacgtgatgcaaggatcgccggcctttccgccagagggcggcacagaactacaactcccagcaagctcccaaggcggccctccgcgcaatgccgctaccggaagtgcgggtcgcgcttccggcggcgtcccggggccaggggggtgcgcctttctccgcgtcggggcggcccggagcgcggtggcgcggcgcgggaggggttttctggtgcgtcctggtccaccatggccaaaccaacaagcaaagattcaggcttgaaggagaagtttaagattctgttgggactgggaacaccgaggccaaatcccaggtctgcagagggtaaacagacggagtttatcatcaccgcggaaatactgagagaactgagcatggaatgtggcctcaacaatcgcatccggatgatagggcagatttgtgaagtcgcaaaaaccaagaaatttgaagagcacgcagtggaagcactctggaaggcggtcgcggatctgttgcagccggagcggccgctggaggcccggcacgcggtgctggctctgctgaaggccatcgtgcaggggcagggcgagcgtttgggggtcctcagagccctcttctttaaggtcatcaaggattacccttccaacgaagaccttcacgaaaggctggaggttttcaaggccctcacagacaatgggagacacatcacctacttggaggaagagctggctgactttgtcctgcagtggatggatgttggcttgtcctcggaattccttctggtgctggtgaacttggtcaaattcaatagctgttacctcgacgagtacatcgcaaggatggttcagatgatctgtctgctgtgcgtccggaccgcgtcctctgtggacatagaggtctccctgcaggtgctggacgccgtggtctgctacaactgcctgccggctgagagcctcccgctgttcatcgttaccctctgtcgcaccatcaacgtcaaggagctctgcgagccttgctggaagctgatgcggaacctccttggcacccacctgggccacagcgccatctacaacatgtgccacctcatggaggacagagcctacatggaggacgcgcccctgctgagaggagccgtgttttttgtgggcatggctctctggggagcccaccggctctattctctcaggaactcgccgacatctgtgttgccatcattttaccaggccatggcatgtccgaacgaggtggtgtcctatgagatcgtcctgtccatcaccaggctcatcaagaagtataggaaggagctccaggtggtggcgtgggacattctgctgaacatcatcgaacggctccttcagcagctccagaccttggacagcccggagctcaggaccatcgtccatgacctgttgaccacggtggaggagctgtgtgaccagaacgagttccacgggtctcaggagagatactttgaactggtggagagatgtgcggaccagaggcctgagtcctccctcctgaacctgatctcctatagagcgcagtccatccacccggccaaggacggctggattcagaacctgcaggcgctgatggagagattcttcaggagcgagtcccgaggcgccgtgcgcatcaaggtgctggacgtgctgtcctttgtgctgctcatcaacaggcagttctatgaggaggagctgattaactcagtggtcatctcgcagctctcccacatccccgaggataaagaccaccaggtccgaaagctggccacccagttgctggtggacctggcagagggctgccacacacaccacttcaacagcctgctggacatcatcgagaaggtgatggcccgctccctctccccacccccggagctggaagaaagggatgtggccgcatactcggcctccttggaggatgtgaagacagccgtcctggggcttctggtcatccttcagaccaagctgtacaccctgcctgcaagccacgccacgcgtgtgtatgagatgctggtcagccacattcagctccactacaagcacagctacaccctgccaatcgcgagcagcatccggctgcaggcctttgacttcctgttgctgctgcgggccgactcactgcaccgcctgggcctgcccaacaaggatggagtcgtgcggttcagcccctactgcgtctgcgactacatggagccagagagaggctctgagaagaagaccagcggccccctttctcctcccacagggcctcctggcccggcgcctgcaggccccgccgtgcggctggggtccgtgccctactccctgctcttccgcgtcctgctgcagtgcttgaagcaggagtctgactggaaggtgctgaagctggttctgggcaggctgcctgagtccctgcgctataaagtgctcatctttacttccccttgcagtgtggaccagctgtgctctgctctctgctccatgctttcaggcccaaagacactggagcggctccgaggcgccccagaaggcttctccagaactgacttgcacctggccgtggttccagtgctgacagcattaatctcttaccataactacctggacaaaaccaaacagcgcgagatggtctactgcctggagcagggcctcatccaccgctgtgccagccagtgcgtcgtggccttgtccatctgcagcgtggagatgcctgacatcatcatcaaggcgctgcctgttctggtggtgaagctcacgcacatctcagccacagccagcatggccgtcccactgctggagttcctgtccactctggccaggctgccgcacctctacaggaactttgccgcggagcagtatgccagtgtgttcgccatctccctgccgtacaccaacccctccaagtttaatcagtacatcgtgtgtctggcccatcacgtcatagccatgtggttcatcaggtgccgcctgcccttccggaaggattttgtccctttcatcactaagggcctgcggtccaatgtcctcttgtcttttgatgacacccccgagaaggacagcttcagggcccggagtactagtctcaacgagagacccaagagcaggatacagacgtccctcaccagtgccagcttggggtctgcagatgagaactccgtggcccaggctgacgatagcctgaaaaacctccacctggagctcacggaaacctgtctggacatgatggctcgatacgtcttctccaacttcacggctgtcccgaagaggtctcctgtgggcgagttcctcctagcgggtggcaggaccaaaacctggctggttgggaacaagcttgtcactgtgacgacaagcgtgggaaccgggacccggtcgttactaggcctggactcgggggagctgcagtccggcccggagtcgagctccagccccggggtgcatgtgagacagaccaaggaggcgccggccaagctggagtcccaggctgggcagcaggtgtcccgtggggcccgggatcgggtccgttccatgtcggggggccatggtcttcgagttggcgccctggacgtgccggcctcccagttcctgggcagtgccacttctccaggaccacggactgcaccagccgcgaaacctgagaaggcctcagctggcacccgggttcctgtgcaggagaagacgaacctggcggcctatgtgcccctgctgacccagggctgggcggagatcctggtccggaggcccacagggaacaccagctggctgatgagcctggagaacccgctcagccctttctcctcggacatcaacaacatgcccctgcaggagctgtctaacgccctcatggcggctgagcgcttcaaggagcaccgggacacagccctgtacaagtcactgtcggtgccggcagccagcacggccaaaccccctcctctgcctcgctccaacacagactccgccgtggtcatggaggagggaagtccgggcgaggttcctgtgctggtggagcccccagggttggaggacgttgaggcagcgctaggcatggacaggcgcacggatgcctacagcaggtcgtcctcagtctccagccaggaggagaagtcgctccacgcggaggagctggttggcaggggcatccccatcgagcgagtcgtctcctcggagggtggccggccctctgtggacctctccttccagccctcgcagcccctgagcaagtccagctcctctcccgagctgcagactctgcaggacatcctcggggaccctggggacaaggccgacgtgggccggctgagccctgaggttaaggcccggtcacagtcagggaccctggacggggaaagtgctgcctggtcggcctcgggcgaagacagtcggggccagcccgagggtcccttgccttccagctccccccgctcgcccagtggcctccggccccgaggttacaccatctccgactcggccccatcacgcaggggcaagagagtagagagggacgccttaaagagcagagccacagcctccaatgcagagaaagtgccaggcatcaaccccagtttcgtgttcctgcagctctaccattcccccttctttggcgacgagtcaaacaagccaatcctgctgcccaatgagtcacagtcctttgagcggtcggtgcagctcctcgaccagatcccatcatacgacacccacaagatcgccgtcctgtatgttggagaaggccagagcaacagcgagctcgccatcctgtccaatgagcatggctcctacaggtacacggagttcctgacgggcctgggccggctcatcgagctgaaggactgccagccggacaaggtgtacctgggaggcctggacgtgtgtggtgaggacggccagttcacctactgctggcacgatgacatcatgcaagccgtcttccacatcgccaccctgatgcccaccaaggacgtggacaagcaccgctgcgacaagaagcgccacctgggcaacgactttgtgtccattgtctacaatgactccggtgaggacttcaagcttggcaccatcaagggccagttcaactttgtccacgtgatcgtcaccccgctggactacgagtgcaacctggtgtccctgcagtgcaggaaagacatggagggccttgtggacaccagcgtggccaagatcgtgtctgaccgcaacctgcccttcgtggcccgccagatggccctgcacgcaaatatggcctcacaggtgcatcatagccgctccaaccccaccgatatctacccctccaagtggattgcccggctccgccacatcaagcggctccgccagcggatctgcgaggaagccgcctactccaaccccagcctacctctggtgcaccctccgtcccatagcaaagcccctgcacagactccagccgagcccacacctggctatgaggtgggccagcggaagcgcctcatctcctcggtggaggacttcaccgagtttgtgtgaggccggggccctccctcctgcactggccttggacggtattgcctgtcagtgaaataaataaagtcctgaccccagtgcacagacatagaggcacagattgcagtc

SEQ ID NO: 8599 - protein, 1832 aa, Homo sapiens
MPDSCGLHIPAAHAAPSRDARIAGLSARGRHRTTTPSKLPRRPSAQCRYRKCGSRFRRRPGARGVRLSPRRGGPERGGAAREGFSGASWSTMAKPTSKDSGLKEKFKILLGLGTPRPNPRSAEGKQTEFIITAEILRELSMECGLNNRIRMIGQICEVAKTKKFEEHAVEALWKAVADLLQPERPLEARHAVLALLKAIVQGQGERLGVLRALFFKVIKDYPSNEDLHERLEVFKALTDNGRHITYLEEELADFVLQWMDVGLSSEFLLVLVNLVKFNSCYLDEYIARMVQMICLLCVRTASSVDIEVSLQVLDAVVCYNCLPAESLPLFIVTLCRTINVKELCEPCWKLMRNLLGTHLGHSAIYNMCHLMEDRAYMEDAPLLRGAVFFVGMALWGAHRLYSLRNSPTSVLPSFYQAMACPNEVVSYEIVLSITRLIKKYRKELQVVAWDILLNIIERLLQQLQTLDSPELRTIVHDLLTTVEELCDQNEFHGSQERYFELVERCADQRPESSLLNLISYRAQSIHPAKDGWIQNLQALMERFFRSESRGAVRIKVLDVLSFVLLINRQFYEEELINSVVISQLSHIPEDKDHQVRKLATQLLVDLAEGCHTHHFNSLLDIIEKVMARSLSPPPELEERDVAAYSASLEDVKTAVLGLLVILQTKLYTLPASHATRVYEMLVSHIQLHYKHSYTLPIASSIRLQAFDFLLLLRADSLHRLGLPNKDGVVRFSPYCVCDYMEPERGSEKKTSGPLSPPTGPPGPAPAGPAVRLGSVPYSLLFRVLLQCLKQESDWKVLKLVLGRLPESLRYKVLIFTSPCSVDQLCSALCSMLSGPKTLERLRGAPEGFSRTDLHLAVVPVLTALISYHNYLDKTKQREMVYCLEQGLIHRCASQCVVALSICSVEMPDIIIKALPVLVVKLTHISATASMAVPLLEFLSTLARLPHLYRNFAAEQYASVFAISLPYTNPSKFNQYIVCLAHHVIAMWFIRCRLPFRKDFVPFITKGLRSNVLLSFDDTPEKDSFRARSTSLNERPKSRIQTSLTSASLGSADENSVAQADDSLKNLHLELTETCLDMMARYVFSNFTAVPKRSPVGEFLLAGGRTKTWLVGNKLVTVTTSVGTGTRSLLGLDSGELQSGPESSSSPGVHVRQTKEAPAKLESQAGQQVSRGARDRVRSMSGGHGLRVGALDVPASQFLGSATSPGPRTAPAAKPEKASAGTRVPVQEKTNLAAYVPLLTQGWAEILVRRPTGNTSWLMSLENPLSPFSSDINNMPLQELSNALMAAERFKEHRDTALYKSLSVPAASTAKPPPLPRSNTDSAVVMEEGSPGEVPVLVEPPGLEDVEAALGMDRRTDAYSRSSSVSSQEEKSLHAEELVGRGIPIERVVSSEGGRPSVDLSFQPSQPLSKSSSSPELQTLQDILGDPGDKADVGRLSPEVKARSQSGTLDGESAAWSASGEDSRGQPEGPLPSSSPRSPSGLRPRGYTISDSAPSRRGKRVERDALKSRATASNAEKVPGINPSFVFLQLYHSPFFGDESNKPILLPNESQSFERSVQLLDQIPSYDTHKIAVLYVGEGQSNSELAILSNEHGSYRYTEFLTGLGRLIELKDCQPDKVYLGGLDVCGEDGQFTYCWHDDIMQAVFHIATLMPTKDVDKHRCDKKRHLGNDFVSIVYNDSGEDFKLGTIKGQFNFVHVIVTPLDYECNLVSLQCRKDMEGLVDTSVAKIVSDRNLPFVARQMALHANMASQVHHSRSNPTDIYPSKWIARLRHIKRLRQRICEEAAYSNPSLPLVHPPSHSKAPAQTPAEPTPGYEVGQRKRLISSVEDFTEFV

SEQ ID NO: 8600 - DNA, 6159 bp, Homo sapiens
cgttttcttgcttggggcgaaagggggcagcggagcggagcgcccgaaacccagcccctgcggaccgcaatctttgggaaaaaggcgcaaggtgggaacgcagggccgcacgtgggaaccgttcgcggctgccgggtttgcagcccctgcccgcgcagctgggagccgcaggaggcggcccgggactccagcctgcagcccctatcccgcctcctcccacgctccagccacggcgcggcgctacctgctgcagcctctcttctccggagaggcccgggctcctccctacacccccgcggcccagccccgggtcccaggctccggctccgggtcagcatcctcgcgctcaaggcggtcatgccggactcctgcggactacacatcccggcggcccatgcggccccgtcacgtgatgcaaggatcgccggcctttccgccagagggcggcacagaactacaactcccagcaagctcccaaggcggccctccgcgcaatgccgctaccggaagtgcgggtcgcgcttccggcggcgtcccggggccaggggggtgcgcctttctccgcgtcggggcggcccggagcgcggtggcgcggcgcgggaggggttttctggtgcgtcctggtccaccatggccaaaccaacaagcaaagattcaggcttgaaggagaagtttaagattctgttgggactgggaacaccgaggccaaatcccaggtctgcagagggtaaacagacggagtttatcatcaccgcggaaatactgagagaactgagcatggaatgtggcctcaacaatcgcatccggatgatagggcagatttgtgaagtcgcaaaaaccaagaaatttgaagagcacgcagtggaagcactctggaaggcggtcgcggatctgttgcagccggagcggccgctggaggcccggcacgcggtgctggctctgctgaaggccatcgtgcaggggcagggcgagcgtttgggggtcctcagagccctcttctttaaggtcatcaaggattacccttccaacgaagaccttcacgaaaggctggaggttttcaaggccctcacagacaatgggagacacatcacctacttggaggaagagctggctgactttgtcctgcagtggatggatgttggcttgtcctcggaattccttctggtgctggtgaacttggtcaaattcaatagctgttacctcgacgagtacatcgcaaggatggttcagatgatctgtctgctgtgcgtccggaccgcgtcctctgtggacatagaggtctccctgcaggtgctggacgccgtggtctgctacaactgcctgccggctgagagcctcccgctgttcatcgttaccctctgtcgcaccatcaacgtcaaggagctctgcgagccttgctggaagctgatgcggaacctccttggcacccacctgggccacagcgccatctacaacatgtgccacctcatggaggacagagcctacatggaggacgcgcccctgctgagaggagccgtgttttttgtgggcatggctctctggggagcccaccggctctattctctcaggaactcgccgacatctgtgttgccatcattttaccaggccatggcatgtccgaacgaggtggtgtcctatgagatcgtcctgtccatcaccaggctcatcaagaagtataggaaggagctccaggtggtggcgtgggacattctgctgaacatcatcgaacggctccttcagcagctccagaccttggacagcccggagctcaggaccatcgtccatgacctgttgaccacggtggaggagctgtgtgaccagaacgagttccacgggtctcaggagagatactttgaactggtggagagatgtgcggaccagaggcctgagtcctccctcctgaacctgatctcctatagagcgcagtccatccacccggccaaggacggctggattcagaacctgcaggcgctgatggagagattcttcaggagcgagtcccgaggcgccgtgcgcatcaaggtgctggacgtgctgtcctttgtgctgctcatcaacaggcagttctatgaggaggagctgattaactcagtggtcatctcgcagctctcccacatccccgaggataaagaccaccaggtccgaaagctggccacccagttgctggtggacctggcagagggctgccacacacaccacttcaacagcctgctggacatcatcgagaaggtgatggcccgctccctctccccacccccggagctggaagaaagggatgtggccgcatactcggcctccttggaggatgtgaagacagccgtcctggggcttctggtcatccttcagaccaagctgtacaccctgcctgcaagccacgccacgcgtgtgtatgagatgctggtcagccacattcagctccactacaagcacagctacaccctgccaatcgcgagcagcatccggctgcaggcctttgacttcctgttgctgctgcgggccgactcactgcaccgcctgggcctgcccaacaaggatggagtcgtgcggttcagcccctactgcgtctgcgactacatggagccagagagaggctctgagaagaagaccagcggccccctttctcctcccacagggcctcctggcccggcgcctgcaggccccgccgtgcggctggggtccgtgccctactccctgctcttccgcgtcctgctgcagtgcttgaagcaggagtctgactggaaggtgctgaagctggttctgggcaggctgcctgagtccctgcgctataaagtgctcatctttacttccccttgcagtgtggaccagctgtgctctgctctctgctccatgctttcaggcccaaagacactggagcggctccgaggcgccccagaaggcttctccagaactgacttgcacctggccgtggttccagtgctgacagcattaatctcttaccataactacctggacaaaaccaaacagcgcgagatggtctactgcctggagcagggcctcatccaccgctgtgccagccagtgcgtcgtggccttgtccatctgcagcgtggagatgcctgacatcatcatcaaggcgctgcctgttctggtggtgaagctcacgcacatctcagccacagccagcatggccgtcccactgctggagttcctgtccactctggccaggctgccgcacctctacaggaactttgccgcggagcagtatgccagtgtgttcgccatctccctgccgtacaccaacccctccaagtttaatcagtacatcgtgtgtctggcccatcacgtcatagccatgtggttcatcaggtgccgcctgcccttccggaaggattttgtccctttcatcactaagggcctgcggtccaatgtcctcttgtcttttgatgacacccccgagaaggacagcttcagggcccggagtactagtctcaacgagagacccaagagtctgaggatagccagaccccccaaacaaggcttgaataactctccacccgtgaaagaattcaaggagagctctgcagccgaggccttccggtgccgcagcatcagtgtgtctgaacatgtggtccgcagcaggatacagacgtccctcaccagtgccagcttggggtctgcagatgagaactccgtggcccaggctgacgatagcctgaaaaacctccacctggagctcacggaaacctgtctggacatgatggctcgatacgtcttctccaacttcacggctgtcccgaagaggtctcctgtgggcgagttcctcctagcgggtggcaggaccaaaacctggctggttgggaacaagcttgtcactgtgacgacaagcgtgggaaccgggacccggtcgttactaggcctggactcgggggagctgcagtccggcccggagtcgagctccagccccggggtgcatgtgagacagaccaaggaggcgccggccaagctggagtcccaggctgggcagcaggtgtcccgtggggcccgggatcgggtccgttccatgtcggggggccatggtcttcgagttggcgccctggacgtgccggcctcccagttcctgggcagtgccacttctccaggaccacggactgcaccagccgcgaaacctgagaaggcctcagctggcacccgggttcctgtgcaggagaagacgaacctggcggcctatgtgcccctgctgacccagggctgggcggagatcctggtccggaggcccacagggaacaccagctggctgatgagcctggagaacccgctcagccctttctcctcggacatcaacaacatgcccctgcaggagctgtctaacgccctcatggcggctgagcgcttcaaggagcaccgggacacagccctgtacaagtcactgtcggtgccggcagccagcacggccaaaccccctcctctgcctcgctccaacacagtggcctctttctcctccctgtaccagtccagctgccaaggacagctgcacaggagcgtttcctgggcagactccgccgtggtcatggaggagggaagtccgggcgaggttcctgtgctggtggagcccccagggttggaggacgttgaggcagcgctaggcatggacaggcgcacggatgcctacagcaggtcgtcctcagtctccagccaggaggagaagtcgctccacgcggaggagctggttggcaggggcatccccatcgagcgagtcgtctcctcggagggtggccggccctctgtggacctctccttccagccctcgcagcccctgagcaagtccagctcctctcccgagctgcagactctgcaggacatcctcggggaccctggggacaaggccgacgtgggccggctgagccctgaggttaaggcccggtcacagtcagggaccctggacggggaaagtgctgcctggtcggcctcgggcgaagacagtcggggccagcccgagggtcccttgccttccagctccccccgctcgcccagtggcctccggccccgaggttacaccatctccgactcggccccatcacgcaggggcaagagagtagagagggacgccttaaagagcagagccacagcctccaatgcagagaaagtgccaggcatcaaccccagtttcgtgttcctgcagctctaccattcccccttctttggcgacgagtcaaacaagccaatcctgctgcccaatgagtcacagtcctttgagcggtcggtgcagctcctcgaccagatcccatcatacgacacccacaagatcgccgtcctgtatgttggagaaggccagagcaacagcgagctcgccatcctgtccaatgagcatggctcctacaggtacacggagttcctgacgggcctgggccggctcatcgagctgaaggactgccagccggacaaggtgtacctgggaggcctggacgtgtgtggtgaggacggccagttcacctactgctggcacgatgacatcatgcaagccgtcttccacatcgccaccctgatgcccaccaaggacgtggacaagcaccgctgcgacaagaagcgccacctgggcaacgactttgtgtccattgtctacaatgactccggtgaggacttcaagcttggcaccatcaagggccagttcaactttgtccacgtgatcgtcaccccgctggactacgagtgcaacctggtgtccctgcagtgcaggaaagacatggagggccttgtggacaccagcgtggccaagatcgtgtctgaccgcaacctgcccttcgtggcccgccagatggccctgcacgcaaatatggcctcacaggtgcatcatagccgctccaaccccaccgatatctacccctccaagtggattgcccggctccgccacatcaagcggctccgccagcggatctgcgaggaagccgcctactccaaccccagcctacctctggtgcaccctccgtcccatagcaaagcccctgcacagactccagccgagcccacacctggctatgaggtgggccagcggaagcgcctcatctcctcggtggaggacttcaccgagtttgtgtgaggccggggccctccctcctgcactggccttggacggtattgcctgtcagtgaaataaataaagtcctgaccccagtgcacagacatagaggcacagattgcagtc

SEQ ID NO: 8601 - protein, 1898 aa, Homo sapiens
MPDSCGLHIPAAHAAPSRDARIAGLSARGRHRTTTPSKLPRRPSAQCRYRKCGSRFRRRPGARGVRLSPRRGGPERGGAAREGFSGASWSTMAKPTSKDSGLKEKFKILLGLGTPRPNPRSAEGKQTEFIITAEILRELSMECGLNNRIRMIGQICEVAKTKKFEEHAVEALWKAVADLLQPERPLEARHAVLALLKAIVQGQGERLGVLRALFFKVIKDYPSNEDLHERLEVFKALTDNGRHITYLEEELADFVLQWMDVGLSSEFLLVLVNLVKFNSCYLDEYIARMVQMICLLCVRTASSVDIEVSLQVLDAVVCYNCLPAESLPLFIVTLCRTINVKELCEPCWKLMRNLLGTHLGHSAIYNMCHLMEDRAYMEDAPLLRGAVFFVGMALWGAHRLYSLRNSPTSVLPSFYQAMACPNEVVSYEIVLSITRLIKKYRKELQVVAWDILLNIIERLLQQLQTLDSPELRTIVHDLLTTVEELCDQNEFHGSQERYFELVERCADQRPESSLLNLISYRAQSIHPAKDGWIQNLQALMERFFRSESRGAVRIKVLDVLSFVLLINRQFYEEELINSVVISQLSHIPEDKDHQVRKLATQLLVDLAEGCHTHHFNSLLDIIEKVMARSLSPPPELEERDVAAYSASLEDVKTAVLGLLVILQTKLYTLPASHATRVYEMLVSHIQLHYKHSYTLPIASSIRLQAFDFLLLLRADSLHRLGLPNKDGVVRFSPYCVCDYMEPERGSEKKTSGPLSPPTGPPGPAPAGPAVRLGSVPYSLLFRVLLQCLKQESDWKVLKLVLGRLPESLRYKVLIFTSPCSVDQLCSALCSMLSGPKTLERLRGAPEGFSRTDLHLAVVPVLTALISYHNYLDKTKQREMVYCLEQGLIHRCASQCVVALSICSVEMPDIIIKALPVLVVKLTHISATASMAVPLLEFLSTLARLPHLYRNFAAEQYASVFAISLPYTNPSKFNQYIVCLAHHVIAMWFIRCRLPFRKDFVPFITKGLRSNVLLSFDDTPEKDSFRARSTSLNERPKSLRIARPPKQGLNNSPPVKEFKESSAAEAFRCRSISVSEHVVRSRIQTSLTSASLGSADENSVAQADDSLKNLHLELTETCLDMMARYVFSNFTAVPKRSPVGEFLLAGGRTKTWLVGNKLVTVTTSVGTGTRSLLGLDSGELQSGPESSSSPGVHVRQTKEAPAKLESQAGQQVSRGARDRVRSMSGGHGLRVGALDVPASQFLGSATSPGPRTAPAAKPEKASAGTRVPVQEKTNLAAYVPLLTQGWAEILVRRPTGNTSWLMSLENPLSPFSSDINNMPLQELSNALMAAERFKEHRDTALYKSLSVPAASTAKPPPLPRSNTVASFSSLYQSSCQGQLHRSVSWADSAVVMEEGSPGEVPVLVEPPGLEDVEAALGMDRRTDAYSRSSSVSSQEEKSLHAEELVGRGIPIERVVSSEGGRPSVDLSFQPSQPLSKSSSSPELQTLQDILGDPGDKADVGRLSPEVKARSQSGTLDGESAAWSASGEDSRGQPEGPLPSSSPRSPSGLRPRGYTISDSAPSRRGKRVERDALKSRATASNAEKVPGINPSFVFLQLYHSPFFGDESNKPILLPNESQSFERSVQLLDQIPSYDTHKIAVLYVGEGQSNSELAILSNEHGSYRYTEFLTGLGRLIELKDCQPDKVYLGGLDVCGEDGQFTYCWHDDIMQAVFHIATLMPTKDVDKHRCDKKRHLGNDFVSIVYNDSGEDFKLGTIKGQFNFVHVIVTPLDYECNLVSLQCRKDMEGLVDTSVAKIVSDRNLPFVARQMALHANMASQVHHSRSNPTDIYPSKWIARLRHIKRLRQRICEEAAYSNPSLPLVHPPSHSKAPAQTPAEPTPGYEVGQRKRLISSVEDFTEFV

SEQ ID NO: 8602 - DNA, 6951 bp, Homo sapiens
cgttttcttgcttggggcgaaagggggcagcggagcggagcgcccgaaacccagcccctgcggaccgcaatctttgggaaaaaggcgcaaggtgggaacgcagggccgcacgtgggaaccgttcgcggctgccgggtttgcagcccctgcccgcgcagctgggagccgcaggaggcggcccgggactccagcctgcagcccctatcccgcctcctcccacgctccagccacggcgcggcgctacctgctgcagcctctcttctccggagaggcccgggctcctccctacacccccgcggcccagccccgggtcccaggctccggctccgggtcagcatcctcgcgctcaaggcggtcatgccggactcctgcggactacacatcccggcggcccatgcggccccgtcacgtgatgcaaggatcgccggcctttccgccagagggcggcacagaactacaactcccagcaagctcccaaggcggccctccgcgcaatgccgctaccggaagtgcgggtcgcgcttccggcggcgtcccggggccaggggggtgcgcctttctccgcgtcggggcggcccggagcgcggtggcgcggcgcgggaggggttttctggtgcgtcctggtccaccatggccaaaccaacaagcaaagattcaggcttgaaggagaagtttaagattctgttgggactgggaacaccgaggccaaatcccaggtctgcagagggtaaacagacggagtttatcatcaccgcggaaatactgagagaactgagcatggaatgtggcctcaacaatcgcatccggatgatagggcagatttgtgaagtcgcaaaaaccaagaaatttgaagagcacgcagtggaagcactctggaaggcggtcgcggatctgttgcagccggagcggccgctggaggcccggcacgcggtgctggctctgctgaaggccatcgtgcaggggcagggcgagcgtttgggggtcctcagagccctcttctttaaggtcatcaaggattacccttccaacgaagaccttcacgaaaggctggaggttttcaaggccctcacagacaatgggagacacatcacctacttggaggaagagctggctgactttgtcctgcagtggatggatgttggcttgtcctcggaattccttctggtgctggtgaacttggtcaaattcaatagctgttacctcgacgagtacatcgcaaggatggttcagatgatctgtctgctgtgcgtccggaccgcgtcctctgtggacatagaggtctccctgcaggtgctggacgccgtggtctgctacaactgcctgccggctgagagcctcccgctgttcatcgttaccctctgtcgcaccatcaacgtcaaggagctctgcgagccttgctggaagctgatgcggaacctccttggcacccacctgggccacagcgccatctacaacatgtgccacctcatggaggacagagcctacatggaggacgcgcccctgctgagaggagccgtgttttttgtgggcatggctctctggggagcccaccggctctattctctcaggaactcgccgacatctgtgttgccatcattttaccaggccatggcatgtccgaacgaggtggtgtcctatgagatcgtcctgtccatcaccaggctcatcaagaagtataggaaggagctccaggtggtggcgtgggacattctgctgaacatcatcgaacggctccttcagcagctccagaccttggacagcccggagctcaggaccatcgtccatgacctgttgaccacggtggaggagctgtgtgaccagaacgagttccacgggtctcaggagagatactttgaactggtggagagatgtgcggaccagaggcctgagtcctccctcctgaacctgatctcctatagagcgcagtccatccacccggccaaggacggctggattcagaacctgcaggcgctgatggagagattcttcaggagcgagtcccgaggcgccgtgcgcatcaaggtgctggacgtgctgtcctttgtgctgctcatcaacaggcagttctatgaggaggagctgattaactcagtggtcatctcgcagctctcccacatccccgaggataaagaccaccaggtccgaaagctggccacccagttgctggtggacctggcagagggctgccacacacaccacttcaacagcctgctggacatcatcgagaaggtgatggcccgctccctctccccacccccggagctggaagaaagggatgtggccgcatactcggcctccttggaggatgtgaagacagccgtcctggggcttctggtcatccttcagaccaagctgtacaccctgcctgcaagccacgccacgcgtgtgtatgagatgctggtcagccacattcagctccactacaagcacagctacaccctgccaatcgcgagcagcatccggctgcaggcctttgacttcctgttgctgctgcgggccgactcactgcaccgcctgggcctgcccaacaaggatggagtcgtgcggttcagcccctactgcgtctgcgactacatggagccagagagaggctctgagaagaagaccagcggccccctttctcctcccacagggcctcctggcccggcgcctgcaggccccgccgtgcggctggggtccgtgccctactccctgctcttccgcgtcctgctgcagtgcttgaagcaggagtctgactggaaggtgctgaagctggttctgggcaggctgcctgagtccctgcgctataaagtgctcatctttacttccccttgcagtgtggaccagctgtgctctgctctctgctccatgctttcaggcccaaagacactggagcggctccgaggcgccccagaaggcttctccagaactgacttgcacctggccgtggttccagtgctgacagcattaatctcttaccataactacctggacaaaaccaaacagcgcgagatggtctactgcctggagcagggcctcatccaccgctgtgccagccagtgcgtcgtggccttgtccatctgcagcgtggagatgcctgacatcatcatcaaggcgctgcctgttctggtggtgaagctcacgcacatctcagccacagccagcatggccgtcccactgctggagttcctgtccactctggccaggctgccgcacctctacaggaactttgccgcggagcagtatgccagtgtgttcgccatctccctgccgtacaccaacccctccaagtttaatcagtacatcgtgtgtctggcccatcacgtcatagccatgtggttcatcaggtgccgcctgcccttccggaaggattttgtccctttcatcactaagggcctgcggtccaatgtcctcttgtcttttgatgacacccccgagaaggacagcttcagggcccggagtactagtctcaacgagagacccaagagcaggatacagacgtccctcaccagtgccagcttggggtctgcagatgagaactccgtggcccaggctgacgatagcctgaaaaacctccacctggagctcacggaaacctgtctggacatgatggctcgatacgtcttctccaacttcacggctgtcccgaagaggtctcctgtgggcgagttcctcctagcgggtggcaggaccaaaacctggctggttgggaacaagcttgtcactgtgacgacaagcgtgggaaccgggacccggtcgttactaggcctggactcgggggagctgcagtccggcccggagtcgagctccagccccggggtgcatgtgagacagaccaaggaggcgccggccaagctggagtcccaggctgggcagcaggtgtcccgtggggcccgggatcgggtccgttccatgtcggggggccatggtcttcgagttggcgccctggacgtgccggcctcccagttcctgggcagtgccacttctccaggaccacggactgcaccagccgcgaaacctgagaaggcctcagctggcacccgggttcctgtgcaggagaagacgaacctggcggcctatgtgcccctgctgacccagggctgggcggagatcctggtccggaggcccacagggaacaccagctggctgatgagcctggagaacccgctcagccctttctcctcggacatcaacaacatgcccctgcaggagctgtctaacgccctcatggcggctgagcgcttcaaggagcaccgggacacagccctgtacaagtcactgtcggtgccggcagccagcacggccaaaccccctcctctgcctcgctccaacacagactccgccgtggtcatggaggagggaagtccgggcgaggttcctgtgctggtggagcccccagggttggaggacgttgaggcagcgctaggcatggacaggcgcacggatgcctacagcaggtcgtcctcagtctccagccaggaggagaagtcgctccacgcggaggagctggttggcaggggcatccccatcgagcgagtcgtctcctcggagggtggccggccctctgtggacctctccttccagccctcgcagcccctgagcaagtccagctcctctcccgagctgcagactctgcaggacatcctcggggaccctggggacaaggccgacgtgggccggctgagccctgaggttaaggcccggtcacagtcagggaccctggacggggaaagtgctgcctggtcggcctcgggcgaagacagtcggggccagcccgagggtcccttgccttccagctccccccgctcgcccagtggcctccggccccgaggttacaccatctccgactcggccccatcacgcaggggcaagagagtagagagggacgccttaaagagcagagccacagcctccaatgcagagaaagtgccaggcatcaaccccagtttcgtgttcctgcagctctaccattcccccttctttggcgacgagtcaaacaagccaatcctgctgcccaatgagtcacagtcctttgagcggtcggtgcagctcctcgaccagatcccatcatacgacacccacaagatcgccgtcctgtatgttggagaaggccagagcaacagcgagctcgccatcctgtccaatgagcatggctcctacaggtacacggagttcctgacgggcctgggccggctcatcgagctgaaggactgccagccggacaaggtgtacctgggaggcctggacgtgtgtggtgaggacggccagttcacctactgctggcacgatgacatcatgcaagccgtcttccacatcgccaccctgatgcccaccaaggacgtggacaagcaccgctgcgacaagaagcgccacctgggcaacgactttgtgtccattgtctacaatgactccggtgaggacttcaagcttggcaccatcaagggccagttcaactttgtccacgtgatcgtcaccccgctggactacgagtgcaacctggtgtccctgcagtgcaggaaagacatggagggccttgtggacaccagcgtggccaagatcgtgtctgaccgcaacctgcccttcgtggcccgccagatggccctgcacgcaaatatggcctcacaggtgcatcatagccgctccaaccccaccgatatctacccctccaagtggattgcccggctccgccacatcaagcggctccgccagcggatctgcgaggaagccgcctactccaaccccagcctacctctggtgcaccctccgtcccatagcaaagcccctgcacagactccagccgagcccacacctggctatgaggtgggccagcggaagcgcctcatctcctcggtggaggacttcaccgagtttgtgtgaggccggggccctccctcctgcactggccttggacggtattgcctgtcagtgaaataaataaagtcctgaccccagtgcacagacatagaggcacagattgcagtcagacagctcttttattgactttgtctgcttggtgcgggggttgggggggtgtcgaggctctagaagcggccatgcccacagaagtggtacacagaagcaggcacagccagctccgagggccttgaggctgcctgggccatacagcacactcgcgcgtgcgcgcgcgcacacacacacacacacagtcaccttcctccaccctgggagccagcccccaggaggagtcttttcctctaaccaccctggggtcctctgacatgcctagtcctgctacttgcccagacctgatgccagcaggcctgggcgctgctctcttgctacctggcctggggcaagggaggatgacaaggcctctggggtgatgagagtgcctggcagacagctgtgcccccagcaccggcccaaggccaagctcgcatccaagcagcagccgggctgccataacgccaccacacctaccaagcgcagcaggtgttgggggaggccagctctgggcgcaggcccctcagccctagtgaaaatagtgacatacaaaaatatacacattttaacaccatataaattactgacacgagacacacagtgagacggtgcagggagtacggtaggaactggagaggtaataacttaggggcagggtggcggcggtgcaggctaaccctccctgaagccagcagccttagcagtgggggacatctgcccagggggtggggccgggcacagcccgctgtacctgaggactcggggaaataaattagcatctcagaggctagaaaccgtccaatactgctgtgtccttcccaagggagctggggaggggaccctgggtcctggttggccacacagcctctttaaagtgctgaagcccacagacagacagatgcccctgcctgctctctggggaacctacgtgcagccattctgcctggccctcggccttgacagcggcagaaagtaatactgagcggtgtccactccgactccacggcc

SEQ ID NO: 8603 - protein, 1832 aa, Homo sapiens; identical to SEQ ID NO: 8599

SEQ ID NO: 8604 - DNA, 7020 bp, Homo sapiens
cgttttcttgcttggggcgaaagggggcagcggagcggagcgcccgaaacccagcccctgcggaccgcaatctttgggaaaaaggcgcaaggtgggaacgcagggccgcacgtgggaaccgttcgcggctgccgggtttgcagcccctgcccgcgcagctgggagccgcaggaggcggcccgggactccagcctgcagcccctatcccgcctcctcccacgctccagccacggcgcggcgctacctgctgcagcctctcttctccggagaggcccgggctcctccctacacccccgcggcccagccccgggtcccaggctccggctccgggtcagcatcctcgcgctcaaggcggtcatgccggactcctgcggactacacatcccggcggcccatgcggccccgtcacgtgatgcaaggatcgccggcctttccgccagagggcggcacagaactacaactcccagcaagctcccaaggcggccctccgcgcaatgccgctaccggaagtgcgggtcgcgcttccggcggcgtcccggggccaggggggtgcgcctttctccgcgtcggggcggcccggagcgcggtggcgcggcgcgggaggggttttctggtgcgtcctggtccaccatggccaaaccaacaagcaaagattcaggcttgaaggagaagtttaagattctgttgggactgggaacaccgaggccaaatcccaggtctgcagagggtaaacagacggagtttatcatcaccgcggaaatactgagagaactgagcatggaatgtggcctcaacaatcgcatccggatgatagggcagatttgtgaagtcgcaaaaaccaagaaatttgaagagcacgcagtggaagcactctggaaggcggtcgcggatctgttgcagccggagcggccgctggaggcccggcacgcggtgctggctctgctgaaggccatcgtgcaggggcagggcgagcgtttgggggtcctcagagccctcttctttaaggtcatcaaggattacccttccaacgaagaccttcacgaaaggctggaggttttcaaggccctcacagacaatgggagacacatcacctacttggaggaagagctggctgactttgtcctgcagtggatggatgttggcttgtcctcggaattccttctggtgctggtgaacttggtcaaattcaatagctgttacctcgacgagtacatcgcaaggatggttcagatgatctgtctgctgtgcgtccggaccgcgtcctctgtggacatagaggtctccctgcaggtgctggacgccgtggtctgctacaactgcctgccggctgagagcctcccgctgttcatcgttaccctctgtcgcaccatcaacgtcaaggagctctgcgagccttgctggaagctgatgcggaacctccttggcacccacctgggccacagcgccatctacaacatgtgccacctcatggaggacagagcctacatggaggacgcgcccctgctgagaggagccgtgttttttgtgggcatggctctctggggagcccaccggctctattctctcaggaactcgccgacatctgtgttgccatcattttaccaggccatggcatgtccgaacgaggtggtgtcctatgagatcgtcctgtccatcaccaggctcatcaagaagtataggaaggagctccaggtggtggcgtgggacattctgctgaacatcatcgaacggctccttcagcagctccagaccttggacagcccggagctcaggaccatcgtccatgacctgttgaccacggtggaggagctgtgtgaccagaacgagttccacgggtctcaggagagatactttgaactggtggagagatgtgcggaccagaggcctgagtcctccctcctgaacctgatctcctatagagcgcagtccatccacccggccaaggacggctggattcagaacctgcaggcgctgatggagagattcttcaggagcgagtcccgaggcgccgtgcgcatcaaggtgctggacgtgctgtcctttgtgctgctcatcaacaggcagttctatgaggaggagctgattaactcagtggtcatctcgcagctctcccacatccccgaggataaagaccaccaggtccgaaagctggccacccagttgctggtggacctggcagagggctgccacacacaccacttcaacagcctgctggacatcatcgagaaggtgatggcccgctccctctccccacccccggagctggaagaaagggatgtggccgcatactcggcctccttggaggatgtgaagacagccgtcctggggcttctggtcatccttcagaccaagctgtacaccctgcctgcaagccacgccacgcgtgtgtatgagatgctggtcagccacattcagctccactacaagcacagctacaccctgccaatcgcgagcagcatccggctgcaggcctttgacttcctgttgctgctgcgggccgactcactgcaccgcctgggcctgcccaacaaggatggagtcgtgcggttcagcccctactgcgtctgcgactacatggagccagagagaggctctgagaagaagaccagcggccccctttctcctcccacagggcctcctggcccggcgcctgcaggccccgccgtgcggctggggtccgtgccctactccctgctcttccgcgtcctgctgcagtgcttgaagcaggagtctgactggaaggtgctgaagctggttctgggcaggctgcctgagtccctgcgctataaagtgctcatctttacttccccttgcagtgtggaccagctgtgctctgctctctgctccatgctttcaggcccaaagacactggagcggctccgaggcgccccagaaggcttctccagaactgacttgcacctggccgtggttccagtgctgacagcattaatctcttaccataactacctggacaaaaccaaacagcgcgagatggtctactgcctggagcagggcctcatccaccgctgtgccagccagtgcgtcgtggccttgtccatctgcagcgtggagatgcctgacatcatcatcaaggcgctgcctgttctggtggtgaagctcacgcacatctcagccacagccagcatggccgtcccactgctggagttcctgtccactctggccaggctgccgcacctctacaggaactttgccgcggagcagtatgccagtgtgttcgccatctccctgccgtacaccaacccctccaagtttaatcagtacatcgtgtgtctggcccatcacgtcatagccatgtggttcatcaggtgccgcctgcccttccggaaggattttgtccctttcatcactaagggcctgcggtccaatgtcctcttgtcttttgatgacacccccgagaaggacagcttcagggcccggagtactagtctcaacgagagacccaagagcaggatacagacgtccctcaccagtgccagcttggggtctgcagatgagaactccgtggcccaggctgacgatagcctgaaaaacctccacctggagctcacggaaacctgtctggacatgatggctcgatacgtcttctccaacttcacggctgtcccgaagaggtctcctgtgggcgagttcctcctagcgggtggcaggaccaaaacctggctggttgggaacaagcttgtcactgtgacgacaagcgtgggaaccgggacccggtcgttactaggcctggactcgggggagctgcagtccggcccggagtcgagctccagccccggggtgcatgtgagacagaccaaggaggcgccggccaagctggagtcccaggctgggcagcaggtgtcccgtggggcccgggatcgggtccgttccatgtcggggggccatggtcttcgagttggcgccctggacgtgccggcctcccagttcctgggcagtgccacttctccaggaccacggactgcaccagccgcgaaacctgagaaggcctcagctggcacccgggttcctgtgcaggagaagacgaacctggcggcctatgtgcccctgctgacccagggctgggcggagatcctggtccggaggcccacagggaacaccagctggctgatgagcctggagaacccgctcagccctttctcctcggacatcaacaacatgcccctgcaggagctgtctaacgccctcatggcggctgagcgcttcaaggagcaccgggacacagccctgtacaagtcactgtcggtgccggcagccagcacggccaaaccccctcctctgcctcgctccaacacagtggcctctttctcctccctgtaccagtccagctgccaaggacagctgcacaggagcgtttcctgggcagactccgccgtggtcatggaggagggaagtccgggcgaggttcctgtgctggtggagcccccagggttggaggacgttgaggcagcgctaggcatggacaggcgcacggatgcctacagcaggtcgtcctcagtctccagccaggaggagaagtcgctccacgcggaggagctggttggcaggggcatccccatcgagcgagtcgtctcctcggagggtggccggccctctgtggacctctccttccagccctcgcagcccctgagcaagtccagctcctctcccgagctgcagactctgcaggacatcctcggggaccctggggacaaggccgacgtgggccggctgagccctgaggttaaggcccggtcacagtcagggaccctggacggggaaagtgctgcctggtcggcctcgggcgaagacagtcggggccagcccgagggtcccttgccttccagctccccccgctcgcccagtggcctccggccccgaggttacaccatctccgactcggccccatcacgcaggggcaagagagtagagagggacgccttaaagagcagagccacagcctccaatgcagagaaagtgccaggcatcaaccccagtttcgtgttcctgcagctctaccattcccccttctttggcgacgagtcaaacaagccaatcctgctgcccaatgagtcacagtcctttgagcggtcggtgcagctcctcgaccagatcccatcatacgacacccacaagatcgccgtcctgtatgttggagaaggccagagcaacagcgagctcgccatcctgtccaatgagcatggctcctacaggtacacggagttcctgacgggcctgggccggctcatcgagctgaaggactgccagccggacaaggtgtacctgggaggcctggacgtgtgtggtgaggacggccagttcacctactgctggcacgatgacatcatgcaagccgtcttccacatcgccaccctgatgcccaccaaggacgtggacaagcaccgctgcgacaagaagcgccacctgggcaacgactttgtgtccattgtctacaatgactccggtgaggacttcaagcttggcaccatcaagggccagttcaactttgtccacgtgatcgtcaccccgctggactacgagtgcaacctggtgtccctgcagtgcaggaaagacatggagggccttgtggacaccagcgtggccaagatcgtgtctgaccgcaacctgcccttcgtggcccgccagatggccctgcacgcaaatatggcctcacaggtgcatcatagccgctccaaccccaccgatatctacccctccaagtggattgcccggctccgccacatcaagcggctccgccagcggatctgcgaggaagccgcctactccaaccccagcctacctctggtgcaccctccgtcccatagcaaagcccctgcacagactccagccgagcccacacctggctatgaggtgggccagcggaagcgcctcatctcctcggtggaggacttcaccgagtttgtgtgaggccggggccctccctcctgcactggccttggacggtattgcctgtcagtgaaataaataaagtcctgaccccagtgcacagacatagaggcacagattgcagtcagacagctcttttattgactttgtctgcttggtgcgggggttgggggggtgtcgaggctctagaagcggccatgcccacagaagtggtacacagaagcaggcacagccagctccgagggccttgaggctgcctgggccatacagcacactcgcgcgtgcgcgcgcgcacacacacacacacacagtcaccttcctccaccctgggagccagcccccaggaggagtcttttcctctaaccaccctggggtcctctgacatgcctagtcctgctacttgcccagacctgatgccagcaggcctgggcgctgctctcttgctacctggcctggggcaagggaggatgacaaggcctctggggtgatgagagtgcctggcagacagctgtgcccccagcaccggcccaaggccaagctcgcatccaagcagcagccgggctgccataacgccaccacacctaccaagcgcagcaggtgttgggggaggccagctctgggcgcaggcccctcagccctagtgaaaatagtgacatacaaaaatatacacattttaacaccatataaattactgacacgagacacacagtgagacggtgcagggagtacggtaggaactggagaggtaataacttaggggcagggtggcggcggtgcaggctaaccctccctgaagccagcagccttagcagtgggggacatctgcccagggggtggggccgggcacagcccgctgtacctgaggactcggggaaataaattagcatctcagaggctagaaaccgtccaatactgctgtgtccttcccaagggagctggggaggggaccctgggtcctggttggccacacagcctctttaaagtgctgaagcccacagacagacagatgcccctgcctgctctctggggaacctacgtgcagccattctgcctggccctcggccttgacagcggcagaaagtaatactgagcggtgtccactccgactccacggcc

SEQ ID NO: 8605 - protein, 1855 aa, Homo sapiens; identical to SEQ ID NO: 8595

SEQ ID NO: 8606 - DNA, 7149 bp, Homo sapiens
cgttttcttgcttggggcgaaagggggcagcggagcggagcgcccgaaacccagcccctgcggaccgcaatctttgggaaaaaggcgcaaggtgggaacgcagggccgcacgtgggaaccgttcgcggctgccgggtttgcagcccctgcccgcgcagctgggagccgcaggaggcggcccgggactccagcctgcagcccctatcccgcctcctcccacgctccagccacggcgcggcgctacctgctgcagcctctcttctccggagaggcccgggctcctccctacacccccgcggcccagccccgggtcccaggctccggctccgggtcagcatcctcgcgctcaaggcggtcatgccggactcctgcggactacacatcccggcggcccatgcggccccgtcacgtgatgcaaggatcgccggcctttccgccagagggcggcacagaactacaactcccagcaagctcccaaggcggccctccgcgcaatgccgctaccggaagtgcgggtcgcgcttccggcggcgtcccggggccaggggggtgcgcctttctccgcgtcggggcggcccggagcgcggtggcgcggcgcgggaggggttttctggtgcgtcctggtccaccatggccaaaccaacaagcaaagattcaggcttgaaggagaagtttaagattctgttgggactgggaacaccgaggccaaatcccaggtctgcagagggtaaacagacggagtttatcatcaccgcggaaatactgagagaactgagcatggaatgtggcctcaacaatcgcatccggatgatagggcagatttgtgaagtcgcaaaaaccaagaaatttgaagagcacgcagtggaagcactctggaaggcggtcgcggatctgttgcagccggagcggccgctggaggcccggcacgcggtgctggctctgctgaaggccatcgtgcaggggcagggcgagcgtttgggggtcctcagagccctcttctttaaggtcatcaaggattacccttccaacgaagaccttcacgaaaggctggaggttttcaaggccctcacagacaatgggagacacatcacctacttggaggaagagctggctgactttgtcctgcagtggatggatgttggcttgtcctcggaattccttctggtgctggtgaacttggtcaaattcaatagctgttacctcgacgagtacatcgcaaggatggttcagatgatctgtctgctgtgcgtccggaccgcgtcctctgtggacatagaggtctccctgcaggtgctggacgccgtggtctgctacaactgcctgccggctgagagcctcccgctgttcatcgttaccctctgtcgcaccatcaacgtcaaggagctctgcgagccttgctggaagctgatgcggaacctccttggcacccacctgggccacagcgccatctacaacatgtgccacctcatggaggacagagcctacatggaggacgcgcccctgctgagaggagccgtgttttttgtgggcatggctctctggggagcccaccggctctattctctcaggaactcgccgacatctgtgttgccatcattttaccaggccatggcatgtccgaacgaggtggtgtcctatgagatcgtcctgtccatcaccaggctcatcaagaagtataggaaggagctccaggtggtggcgtgggacattctgctgaacatcatcgaacggctccttcagcagctccagaccttggacagcccggagctcaggaccatcgtccatgacctgttgaccacggtggaggagctgtgtgaccagaacgagttccacgggtctcaggagagatactttgaactggtggagagatgtgcggaccagaggcctgagtcctccctcctgaacctgatctcctatagagcgcagtccatccacccggccaaggacggctggattcagaacctgcaggcgctgatggagagattcttcaggagcgagtcccgaggcgccgtgcgcatcaaggtgctggacgtgctgtcctttgtgctgctcatcaacaggcagttctatgaggaggagctgattaactcagtggtcatctcgcagctctcccacatccccgaggataaagaccaccaggtccgaaagctggccacccagttgctggtggacctggcagagggctgccacacacaccacttcaacagcctgctggacatcatcgagaaggtgatggcccgctccctctccccacccccggagctggaagaaagggatgtggccgcatactcggcctccttggaggatgtgaagacagccgtcctggggcttctggtcatccttcagaccaagctgtacaccctgcctgcaagccacgccacgcgtgtgtatgagatgctggtcagccacattcagctccactacaagcacagctacaccctgccaatcgcgagcagcatccggctgcaggcctttgacttcctgttgctgctgcgggccgactcactgcaccgcctgggcctgcccaacaaggatggagtcgtgcggttcagcccctactgcgtctgcgactacatggagccagagagaggctctgagaagaagaccagcggccccctttctcctcccacagggcctcctggcccggcgcctgcaggccccgccgtgcggctggggtccgtgccctactccctgctcttccgcgtcctgctgcagtgcttgaagcaggagtctgactggaaggtgctgaagctggttctgggcaggctgcctgagtccctgcgctataaagtgctcatctttacttccccttgcagtgtggaccagctgtgctctgctctctgctccatgctttcaggcccaaagacactggagcggctccgaggcgccccagaaggcttctccagaactgacttgcacctggccgtggttccagtgctgacagcattaatctcttaccataactacctggacaaaaccaaacagcgcgagatggtctactgcctggagcagggcctcatccaccgctgtgccagccagtgcgtcgtggccttgtccatctgcagcgtggagatgcctgacatcatcatcaaggcgctgcctgttctggtggtgaagctcacgcacatctcagccacagccagcatggccgtcccactgctggagttcctgtccactctggccaggctgccgcacctctacaggaactttgccgcggagcagtatgccagtgtgttcgccatctccctgccgtacaccaacccctccaagtttaatcagtacatcgtgtgtctggcccatcacgtcatagccatgtggttcatcaggtgccgcctgcccttccggaaggattttgtccctttcatcactaagggcctgcggtccaatgtcctcttgtcttttgatgacacccccgagaaggacagcttcagggcccggagtactagtctcaacgagagacccaagagtctgaggatagccagaccccccaaacaaggcttgaataactctccacccgtgaaagaattcaaggagagctctgcagccgaggccttccggtgccgcagcatcagtgtgtctgaacatgtggtccgcagcaggatacagacgtccctcaccagtgccagcttggggtctgcagatgagaactccgtggcccaggctgacgatagcctgaaaaacctccacctggagctcacggaaacctgtctggacatgatggctcgatacgtcttctccaacttcacggctgtcccgaagaggtctcctgtgggcgagttcctcctagcgggtggcaggaccaaaacctggctggttgggaacaagcttgtcactgtgacgacaagcgtgggaaccgggacccggtcgttactaggcctggactcgggggagctgcagtccggcccggagtcgagctccagccccggggtgcatgtgagacagaccaaggaggcgccggccaagctggagtcccaggctgggcagcaggtgtcccgtggggcccgggatcgggtccgttccatgtcggggggccatggtcttcgagttggcgccctggacgtgccggcctcccagttcctgggcagtgccacttctccaggaccacggactgcaccagccgcgaaacctgagaaggcctcagctggcacccgggttcctgtgcaggagaagacgaacctggcggcctatgtgcccctgctgacccagggctgggcggagatcctggtccggaggcccacagggaacaccagctggctgatgagcctggagaacccgctcagccctttctcctcggacatcaacaacatgcccctgcaggagctgtctaacgccctcatggcggctgagcgcttcaaggagcaccgggacacagccctgtacaagtcactgtcggtgccggcagccagcacggccaaaccccctcctctgcctcgctccaacacagtggcctctttctcctccctgtaccagtccagctgccaaggacagctgcacaggagcgtttcctgggcagactccgccgtggtcatggaggagggaagtccgggcgaggttcctgtgctggtggagcccccagggttggaggacgttgaggcagcgctaggcatggacaggcgcacggatgcctacagcaggtcgtcctcagtctccagccaggaggagaagtcgctccacgcggaggagctggttggcaggggcatccccatcgagcgagtcgtctcctcggagggtggccggccctctgtggacctctccttccagccctcgcagcccctgagcaagtccagctcctctcccgagctgcagactctgcaggacatcctcggggaccctggggacaaggccgacgtgggccggctgagccctgaggttaaggcccggtcacagtcagggaccctggacggggaaagtgctgcctggtcggcctcgggcgaagacagtcggggccagcccgagggtcccttgccttccagctccccccgctcgcccagtggcctccggccccgaggttacaccatctccgactcggccccatcacgcaggggcaagagagtagagagggacgccttaaagagcagagccacagcctccaatgcagagaaagtgccaggcatcaaccccagtttcgtgttcctgcagctctaccattcccccttctttggcgacgagtcaaacaagccaatcctgctgcccaatgagtcacagtcctttgagcggtcggtgcagctcctcgaccagatcccatcatacgacacccacaagatcgccgtcctgtatgttggagaaggccagagcaacagcgagctcgccatcctgtccaatgagcatggctcctacaggtacacggagttcctgacgggcctgggccggctcatcgagctgaaggactgccagccggacaaggtgtacctgggaggcctggacgtgtgtggtgaggacggccagttcacctactgctggcacgatgacatcatgcaagccgtcttccacatcgccaccctgatgcccaccaaggacgtggacaagcaccgctgcgacaagaagcgccacctgggcaacgactttgtgtccattgtctacaatgactccggtgaggacttcaagcttggcaccatcaagggccagttcaactttgtccacgtgatcgtcaccccgctggactacgagtgcaacctggtgtccctgcagtgcaggaaagacatggagggccttgtggacaccagcgtggccaagatcgtgtctgaccgcaacctgcccttcgtggcccgccagatggccctgcacgcaaatatggcctcacaggtgcatcatagccgctccaaccccaccgatatctacccctccaagtggattgcccggctccgccacatcaagcggctccgccagcggatctgcgaggaagccgcctactccaaccccagcctacctctggtgcaccctccgtcccatagcaaagcccctgcacagactccagccgagcccacacctggctatgaggtgggccagcggaagcgcctcatctcctcggtggaggacttcaccgagtttgtgtgaggccggggccctccctcctgcactggccttggacggtattgcctgtcagtgaaataaataaagtcctgaccccagtgcacagacatagaggcacagattgcagtcagacagctcttttattgactttgtctgcttggtgcgggggttgggggggtgtcgaggctctagaagcggccatgcccacagaagtggtacacagaagcaggcacagccagctccgagggccttgaggctgcctgggccatacagcacactcgcgcgtgcgcgcgcgcacacacacacacacacagtcaccttcctccaccctgggagccagcccccaggaggagtcttttcctctaaccaccctggggtcctctgacatgcctagtcctgctacttgcccagacctgatgccagcaggcctgggcgctgctctcttgctacctggcctggggcaagggaggatgacaaggcctctggggtgatgagagtgcctggcagacagctgtgcccccagcaccggcccaaggccaagctcgcatccaagcagcagccgggctgccataacgccaccacacctaccaagcgcagcaggtgttgggggaggccagctctgggcgcaggcccctcagccctagtgaaaatagtgacatacaaaaatatacacattttaacaccatataaattactgacacgagacacacagtgagacggtgcagggagtacggtaggaactggagaggtaataacttaggggcagggtggcggcggtgcaggctaaccctccctgaagccagcagccttagcagtgggggacatctgcccagggggtggggccgggcacagcccgctgtacctgaggactcggggaaataaattagcatctcagaggctagaaaccgtccaatactgctgtgtccttcccaagggagctggggaggggaccctgggtcctggttggccacacagcctctttaaagtgctgaagcccacagacagacagatgcccctgcctgctctctggggaacctacgtgcagccattctgcctggccctcggccttgacagcggcagaaagtaatactgagcggtgtccactccgactccacggcc

SEQ ID NO: 8607 - protein, 1898 aa, Homo sapiens; identical to SEQ ID NO: 8601

SEQ ID NO: 8608 - DNA, 5573 bp, Homo sapiens
ggcgcggcgctacctaggggttttctggtgcgtcctggtccaccatggccaaaccaacaagcaaagattcaggcttgaaggagaagtttaagattctgttgggactgggaacaccgaggccaaatcccaggtctgcagagggtaaacagacggagtttatcatcaccgcggaaatactgagagaactgagcatggaatgtggcctcaacaatcgcatccggatgatagggcagatttgtgaagtcgcaaaaaccaagaaatttgaagagcacgcagtggaagcactctggaaggcggtcgcggatctgttgcagccggagcggccgctggaggcccggcacgcggtgctggctctgctgaaggccatcgtgcaggggcagggcgagcgtttgggggtcctcagagccctcttctttaaggtcatcaaggattacccttccaacgaagaccttcacgaaaggctggaggttttcaaggccctcacagacaatgggagacacatcacctacttggaggaagagctggctgactttgtcctgcagtggatggatgttggcttgtcctcggaattccttctggtgctggtgaacttggtcaaattcaatagctgttacctcgacgagtacatcgcaaggatggttcagatgatctgtctgctgtgcgtccggaccgcgtcctctgtggacatagaggtctccctgcaggtgctggacgccgtggtctgctacaactgcctgccggctgagagcctcccgctgttcatcgttaccctctgtcgcaccatcaacgtcaaggagctctgcgagccttgctggaagctgatgcggaacctccttggcacccacctgggccacagcgccatctacaacatgtgccacctcatggaggacagagcctacatggaggacgcgcccctgctgagaggagccgtgttttttgtgggcatggctctctggggagcccaccggctctattctctcaggaactcgccgacatctgtgttgccatcattttaccaggccatggcatgtccgaacgaggtggtgtcctatgagatcgtcctgtccatcaccaggctcatcaagaagtataggaaggagctccaggtggtggcgtgggacattctgctgaacatcatcgaacggctccttcagcagctccagaccttggacagcccggagctcaggaccatcgtccatgacctgttgaccacggtggaggagctgtgtgaccagaacgagttccacgggtctcaggagagatactttgaactggtggagagatgtgcggaccagaggcctgagtcctccctcctgaacctgatctcctatagagcgcagtccatccacccggccaaggacggctggattcagaacctgcaggcgctgatggagagattcttcaggagcgagtcccgaggcgccgtgcgcatcaaggtgctggacgtgctgtcctttgtgctgctcatcaacaggcagttctatgaggaggagctgattaactcagtggtcatctcgcagctctcccacatccccgaggataaagaccaccaggtccgaaagctggccacccagttgctggtggacctggcagagggctgccacacacaccacttcaacagcctgctggacatcatcgagaaggtgatggcccgctccctctccccacccccggagctggaagaaagggatgtggccgcatactcggcctccttggaggatgtgaagacagccgtcctggggcttctggtcatccttcagaccaagctgtacaccctgcctgcaagccacgccacgcgtgtgtatgagatgctggtcagccacattcagctccactacaagcacagctacaccctgccaatcgcgagcagcatccggctgcaggcctttgacttcctgttgctgctgcgggccgactcactgcaccgcctgggcctgcccaacaaggatggagtcgtgcggttcagcccctactgcgtctgcgactacatggagccagagagaggctctgagaagaagaccagcggccccctttctcctcccacagggcctcctggcccggcgcctgcaggccccgccgtgcggctggggtccgtgccctactccctgctcttccgcgtcctgctgcagtgcttgaagcaggagtctgactggaaggtgctgaagctggttctgggcaggctgcctgagtccctgcgctataaagtgctcatctttacttccccttgcagtgtggaccagctgtgctctgctctctgctccatgctttcaggcccaaagacactggagcggctccgaggcgccccagaaggcttctccagaactgacttgcacctggccgtggttccagtgctgacagcattaatctcttaccataactacctggacaaaaccaaacagcgcgagatggtctactgcctggagcagggcctcatccaccgctgtgccagccagtgcgtcgtggccttgtccatctgcagcgtggagatgcctgacatcatcatcaaggcgctgcctgttctggtggtgaagctcacgcacatctcagccacagccagcatggccgtcccactgctggagttcctgtccactctggccaggctgccgcacctctacaggaactttgccgcggagcagtatgccagtgtgttcgccatctccctgccgtacaccaacccctccaagtttaatcagtacatcgtgtgtctggcccatcacgtcatagccatgtggttcatcaggtgccgcctgcccttccggaaggattttgtccctttcatcactaagggcctgcggtccaatgtcctcttgtcttttgatgacacccccgagaaggacagcttcagggcccggagtactagtctcaacgagagacccaagagtctgaggatagccagaccccccaaacaaggcttgaataactctccacccgtgaaagaattcaaggagagctctgcagccgaggccttccggtgccgcagcatcagtgtgtctgaacatgtggtccgcagcaggatacagacgtccctcaccagtgccagcttggggtctgcagatgagaactccgtggcccaggctgacgatagcctgaaaaacctccacctggagctcacggaaacctgtctggacatgatggctcgatacgtcttctccaacttcacggctgtcccgaagaggtctcctgtgggcgagttcctcctagcgggtggcaggaccaaaacctggctggttgggaacaagcttgtcactgtgacgacaagcgtgggaaccgggacccggtcgttactaggcctggactcgggggagctgcagtccggcccggagtcgagctccagccccggggtgcatgtgagacagaccaaggaggcgccggccaagctggagtcccaggctgggcagcaggtgtcccgtggggcccgggatcgggtccgttccatgtcggggggccatggtcttcgagttggcgccctggacgtgccggcctcccagttcctgggcagtgccacttctccaggaccacggactgcaccagccgcgaaacctgagaaggcctcagctggcacccgggttcctgtgcaggagaagacgaacctggcggcctatgtgcccctgctgacccagggctgggcggagatcctggtccggaggcccacagggaacaccagctggctgatgagcctggagaacccgctcagccctttctcctcggacatcaacaacatgcccctgcaggagctgtctaacgccctcatggcggctgagcgcttcaaggagcaccgggacacagccctgtacaagtcactgtcggtgccggcagccagcacggccaaaccccctcctctgcctcgctccaacacagtggcctctttctcctccctgtaccagtccagctgccaaggacagctgcacaggagcgtttcctgggcagactccgccgtggtcatggaggagggaagtccgggcgaggttcctgtgctggtggagcccccagggttggaggacgttgaggcagcgctaggcatggacaggcgcacggatgcctacagcaggtcgtcctcagtctccagccaggaggagaagtcgctccacgcggaggagctggttggcaggggcatccccatcgagcgagtcgtctcctcggagggtggccggccctctgtggacctctccttccagccctcgcagcccctgagcaagtccagctcctctcccgagctgcagactctgcaggacatcctcggggaccctggggacaaggccgacgtgggccggctgagccctgaggttaaggcccggtcacagtcagggaccctggacggggaaagtgctgcctggtcggcctcgggcgaagacagtcggggccagcccgagggtcccttgccttccagctccccccgctcgcccagtggcctccggccccgaggttacaccatctccgactcggccccatcacgcaggggcaagagagtagagagggacgccttaaagagcagagccacagcctccaatgcagagaaagtgccaggcatcaaccccagtttcgtgttcctgcagctctaccattcccccttctttggcgacgagtcaaacaagccaatcctgctgcccaatgagtcacagtcctttgagcggtcggtgcagctcctcgaccagatcccatcatacgacacccacaagatcgccgtcctgtatgttggagaaggccagagcaacagcgagctcgccatcctgtccaatgagcatggctcctacaggtacacggagttcctgacgggcctgggccggctcatcgagctgaaggactgccagccggacaaggtgtacctgggaggcctggacgtgtgtggtgaggacggccagttcacctactgctggcacgatgacatcatgcaagccgtcttccacatcgccaccctgatgcccaccaaggacgtggacaagcaccgctgcgacaagaagcgccacctgggcaacgactttgtgtccattgtctacaatgactccggtgaggacttcaagcttggcaccatcaagggccagttcaactttgtccacgtgatcgtcaccccgctggactacgagtgcaacctggtgtccctgcagtgcaggaaagacatggagggccttgtggacaccagcgtggccaagatcgtgtctgaccgcaacctgcccttcgtggcccgccagatggccctgcacgcaaatatggcctcacaggtgcatcatagccgctccaaccccaccgatatctacccctccaagtggattgcccggctccgccacatcaagcggctccgccagcggatctgcgaggaagccgcctactccaaccccagcctacctctggtgcaccctccgtcccatagcaaagcccctgcacagactccagccgagcccacacctggctatgaggtgggccagcggaagcgcctcatctcctcggtggaggacttcaccgagtttgtgtgaggccggggccctccctcctgcactggccttggacggtattgcctgtcagtgaaataaataaagtcctgaccccagtgcacagacatagaggcacagattgcagtc

SEQ ID NO: 8609 - protein, 1807 aa, Homo sapiens; identical to SEQ ID NO: 1303

SEQ ID NO: 8610 - DNA, 5444 bp, Homo sapiens
ggcgcggcgctacctaggggttttctggtgcgtcctggtccaccatggccaaaccaacaagcaaagattcaggcttgaaggagaagtttaagattctgttgggactgggaacaccgaggccaaatcccaggtctgcagagggtaaacagacggagtttatcatcaccgcggaaatactgagagaactgagcatggaatgtggcctcaacaatcgcatccggatgatagggcagatttgtgaagtcgcaaaaaccaagaaatttgaagagcacgcagtggaagcactctggaaggcggtcgcggatctgttgcagccggagcggccgctggaggcccggcacgcggtgctggctctgctgaaggccatcgtgcaggggcagggcgagcgtttgggggtcctcagagccctcttctttaaggtcatcaaggattacccttccaacgaagaccttcacgaaaggctggaggttttcaaggccctcacagacaatgggagacacatcacctacttggaggaagagctggctgactttgtcctgcagtggatggatgttggcttgtcctcggaattccttctggtgctggtgaacttggtcaaattcaatagctgttacctcgacgagtacatcgcaaggatggttcagatgatctgtctgctgtgcgtccggaccgcgtcctctgtggacatagaggtctccctgcaggtgctggacgccgtggtctgctacaactgcctgccggctgagagcctcccgctgttcatcgttaccctctgtcgcaccatcaacgtcaaggagctctgcgagccttgctggaagctgatgcggaacctccttggcacccacctgggccacagcgccatctacaacatgtgccacctcatggaggacagagcctacatggaggacgcgcccctgctgagaggagccgtgttttttgtgggcatggctctctggggagcccaccggctctattctctcaggaactcgccgacatctgtgttgccatcattttaccaggccatggcatgtccgaacgaggtggtgtcctatgagatcgtcctgtccatcaccaggctcatcaagaagtataggaaggagctccaggtggtggcgtgggacattctgctgaacatcatcgaacggctccttcagcagctccagaccttggacagcccggagctcaggaccatcgtccatgacctgttgaccacggtggaggagctgtgtgaccagaacgagttccacgggtctcaggagagatactttgaactggtggagagatgtgcggaccagaggcctgagtcctccctcctgaacctgatctcctatagagcgcagtccatccacccggccaaggacggctggattcagaacctgcaggcgctgatggagagattcttcaggagcgagtcccgaggcgccgtgcgcatcaaggtgctggacgtgctgtcctttgtgctgctcatcaacaggcagttctatgaggaggagctgattaactcagtggtcatctcgcagctctcccacatccccgaggataaagaccaccaggtccgaaagctggccacccagttgctggtggacctggcagagggctgccacacacaccacttcaacagcctgctggacatcatcgagaaggtgatggcccgctccctctccccacccccggagctggaagaaagggatgtggccgcatactcggcctccttggaggatgtgaagacagccgtcctggggcttctggtcatccttcagaccaagctgtacaccctgcctgcaagccacgccacgcgtgtgtatgagatgctggtcagccacattcagctccactacaagcacagctacaccctgccaatcgcgagcagcatccggctgcaggcctttgacttcctgttgctgctgcgggccgactcactgcaccgcctgggcctgcccaacaaggatggagtcgtgcggttcagcccctactgcgtctgcgactacatggagccagagagaggctctgagaagaagaccagcggccccctttctcctcccacagggcctcctggcccggcgcctgcaggccccgccgtgcggctggggtccgtgccctactccctgctcttccgcgtcctgctgcagtgcttgaagcaggagtctgactggaaggtgctgaagctggttctgggcaggctgcctgagtccctgcgctataaagtgctcatctttacttccccttgcagtgtggaccagctgtgctctgctctctgctccatgctttcaggcccaaagacactggagcggctccgaggcgccccagaaggcttctccagaactgacttgcacctggccgtggttccagtgctgacagcattaatctcttaccataactacctggacaaaaccaaacagcgcgagatggtctactgcctggagcagggcctcatccaccgctgtgccagccagtgcgtcgtggccttgtccatctgcagcgtggagatgcctgacatcatcatcaaggcgctgcctgttctggtggtgaagctcacgcacatctcagccacagccagcatggccgtcccactgctggagttcctgtccactctggccaggctgccgcacctctacaggaactttgccgcggagcagtatgccagtgtgttcgccatctccctgccgtacaccaacccctccaagtttaatcagtacatcgtgtgtctggcccatcacgtcatagccatgtggttcatcaggtgccgcctgcccttccggaaggattttgtccctttcatcactaagggcctgcggtccaatgtcctcttgtcttttgatgacacccccgagaaggacagcttcagggcccggagtactagtctcaacgagagacccaagagcaggatacagacgtccctcaccagtgccagcttggggtctgcagatgagaactccgtggcccaggctgacgatagcctgaaaaacctccacctggagctcacggaaacctgtctggacatgatggctcgatacgtcttctccaacttcacggctgtcccgaagaggtctcctgtgggcgagttcctcctagcgggtggcaggaccaaaacctggctggttgggaacaagcttgtcactgtgacgacaagcgtgggaaccgggacccggtcgttactaggcctggactcgggggagctgcagtccggcccggagtcgagctccagccccggggtgcatgtgagacagaccaaggaggcgccggccaagctggagtcccaggctgggcagcaggtgtcccgtggggcccgggatcgggtccgttccatgtcggggggccatggtcttcgagttggcgccctggacgtgccggcctcccagttcctgggcagtgccacttctccaggaccacggactgcaccagccgcgaaacctgagaaggcctcagctggcacccgggttcctgtgcaggagaagacgaacctggcggcctatgtgcccctgctgacccagggctgggcggagatcctggtccggaggcccacagggaacaccagctggctgatgagcctggagaacccgctcagccctttctcctcggacatcaacaacatgcccctgcaggagctgtctaacgccctcatggcggctgagcgcttcaaggagcaccgggacacagccctgtacaagtcactgtcggtgccggcagccagcacggccaaaccccctcctctgcctcgctccaacacagtggcctctttctcctccctgtaccagtccagctgccaaggacagctgcacaggagcgtttcctgggcagactccgccgtggtcatggaggagggaagtccgggcgaggttcctgtgctggtggagcccccagggttggaggacgttgaggcagcgctaggcatggacaggcgcacggatgcctacagcaggtcgtcctcagtctccagccaggaggagaagtcgctccacgcggaggagctggttggcaggggcatccccatcgagcgagtcgtctcctcggagggtggccggccctctgtggacctctccttccagccctcgcagcccctgagcaagtccagctcctctcccgagctgcagactctgcaggacatcctcggggaccctggggacaaggccgacgtgggccggctgagccctgaggttaaggcccggtcacagtcagggaccctggacggggaaagtgctgcctggtcggcctcgggcgaagacagtcggggccagcccgagggtcccttgccttccagctccccccgctcgcccagtggcctccggccccgaggttacaccatctccgactcggccccatcacgcaggggcaagagagtagagagggacgccttaaagagcagagccacagcctccaatgcagagaaagtgccaggcatcaaccccagtttcgtgttcctgcagctctaccattcccccttctttggcgacgagtcaaacaagccaatcctgctgcccaatgagtcacagtcctttgagcggtcggtgcagctcctcgaccagatcccatcatacgacacccacaagatcgccgtcctgtatgttggagaaggccagagcaacagcgagctcgccatcctgtccaatgagcatggctcctacaggtacacggagttcctgacgggcctgggccggctcatcgagctgaaggactgccagccggacaaggtgtacctgggaggcctggacgtgtgtggtgaggacggccagttcacctactgctggcacgatgacatcatgcaagccgtcttccacatcgccaccctgatgcccaccaaggacgtggacaagcaccgctgcgacaagaagcgccacctgggcaacgactttgtgtccattgtctacaatgactccggtgaggacttcaagcttggcaccatcaagggccagttcaactttgtccacgtgatcgtcaccccgctggactacgagtgcaacctggtgtccctgcagtgcaggaaagacatggagggccttgtggacaccagcgtggccaagatcgtgtctgaccgcaacctgcccttcgtggcccgccagatggccctgcacgcaaatatggcctcacaggtgcatcatagccgctccaaccccaccgatatctacccctccaagtggattgcccggctccgccacatcaagcggctccgccagcggatctgcgaggaagccgcctactccaaccccagcctacctctggtgcaccctccgtcccatagcaaagcccctgcacagactccagccgagcccacacctggctatgaggtgggccagcggaagcgcctcatctcctcggtggaggacttcaccgagtttgtgtgaggccggggccctccctcctgcactggccttggacggtattgcctgtcagtgaaataaataaagtcctgaccccagtgcacagacatagaggcacagattgcagtc

SEQ ID NO: 8611 - protein, 1764 aa, Homo sapiens
MAKPTSKDSGLKEKFKILLGLGTPRPNPRSAEGKQTEFIITAEILRELSMECGLNNRIRMIGQICEVAKTKKFEEHAVEALWKAVADLLQPERPLEARHAVLALLKAIVQGQGERLGVLRALFFKVIKDYPSNEDLHERLEVFKALTDNGRHITYLEEELADFVLQWMDVGLSSEFLLVLVNLVKFNSCYLDEYIARMVQMICLLCVRTASSVDIEVSLQVLDAVVCYNCLPAESLPLFIVTLCRTINVKELCEPCWKLMRNLLGTHLGHSAIYNMCHLMEDRAYMEDAPLLRGAVFFVGMALWGAHRLYSLRNSPTSVLPSFYQAMACPNEVVSYEIVLSITRLIKKYRKELQVVAWDILLNIIERLLQQLQTLDSPELRTIVHDLLTTVEELCDQNEFHGSQERYFELVERCADQRPESSLLNLISYRAQSIHPAKDGWIQNLQALMERFFRSESRGAVRIKVLDVLSFVLLINRQFYEEELINSVVISQLSHIPEDKDHQVRKLATQLLVDLAEGCHTHHFNSLLDIIEKVMARSLSPPPELEERDVAAYSASLEDVKTAVLGLLVILQTKLYTLPASHATRVYEMLVSHIQLHYKHSYTLPIASSIRLQAFDFLLLLRADSLHRLGLPNKDGVVRFSPYCVCDYMEPERGSEKKTSGPLSPPTGPPGPAPAGPAVRLGSVPYSLLFRVLLQCLKQESDWKVLKLVLGRLPESLRYKVLIFTSPCSVDQLCSALCSMLSGPKTLERLRGAPEGFSRTDLHLAVVPVLTALISYHNYLDKTKQREMVYCLEQGLIHRCASQCVVALSICSVEMPDIIIKALPVLVVKLTHISATASMAVPLLEFLSTLARLPHLYRNFAAEQYASVFAISLPYTNPSKFNQYIVCLAHHVIAMWFIRCRLPFRKDFVPFITKGLRSNVLLSFDDTPEKDSFRARSTSLNERPKSRIQTSLTSASLGSADENSVAQADDSLKNLHLELTETCLDMMARYVFSNFTAVPKRSPVGEFLLAGGRTKTWLVGNKLVTVTTSVGTGTRSLLGLDSGELQSGPESSSSPGVHVRQTKEAPAKLESQAGQQVSRGARDRVRSMSGGHGLRVGALDVPASQFLGSATSPGPRTAPAAKPEKASAGTRVPVQEKTNLAAYVPLLTQGWAEILVRRPTGNTSWLMSLENPLSPFSSDINNMPLQELSNALMAAERFKEHRDTALYKSLSVPAASTAKPPPLPRSNTVASFSSLYQSSCQGQLHRSVSWADSAVVMEEGSPGEVPVLVEPPGLEDVEAALGMDRRTDAYSRSSSVSSQEEKSLHAEELVGRGIPIERVVSSEGGRPSVDLSFQPSQPLSKSSSSPELQTLQDILGDPGDKADVGRLSPEVKARSQSGTLDGESAAWSASGEDSRGQPEGPLPSSSPRSPSGLRPRGYTISDSAPSRRGKRVERDALKSRATASNAEKVPGINPSFVFLQLYHSPFFGDESNKPILLPNESQSFERSVQLLDQIPSYDTHKIAVLYVGEGQSNSELAILSNEHGSYRYTEFLTGLGRLIELKDCQPDKVYLGGLDVCGEDGQFTYCWHDDIMQAVFHIATLMPTKDVDKHRCDKKRHLGNDFVSIVYNDSGEDFKLGTIKGQFNFVHVIVTPLDYECNLVSLQCRKDMEGLVDTSVAKIVSDRNLPFVARQMALHANMASQVHHSRSNPTDIYPSKWIARLRHIKRLRQRICEEAAYSNPSLPLVHPPSHSKAPAQTPAEPTPGYEVGQRKRLISSVEDFTEFV

SEQ ID NO: 8612 - DNA, 6434 bp, Homo sapiens
ggcgcggcgctacctaggggttttctggtgcgtcctggtccaccatggccaaaccaacaagcaaagattcaggcttgaaggagaagtttaagattctgttgggactgggaacaccgaggccaaatcccaggtctgcagagggtaaacagacggagtttatcatcaccgcggaaatactgagagaactgagcatggaatgtggcctcaacaatcgcatccggatgatagggcagatttgtgaagtcgcaaaaaccaagaaatttgaagagcacgcagtggaagcactctggaaggcggtcgcggatctgttgcagccggagcggccgctggaggcccggcacgcggtgctggctctgctgaaggccatcgtgcaggggcagggcgagcgtttgggggtcctcagagccctcttctttaaggtcatcaaggattacccttccaacgaagaccttcacgaaaggctggaggttttcaaggccctcacagacaatgggagacacatcacctacttggaggaagagctggctgactttgtcctgcagtggatggatgttggcttgtcctcggaattccttctggtgctggtgaacttggtcaaattcaatagctgttacctcgacgagtacatcgcaaggatggttcagatgatctgtctgctgtgcgtccggaccgcgtcctctgtggacatagaggtctccctgcaggtgctggacgccgtggtctgctacaactgcctgccggctgagagcctcccgctgttcatcgttaccctctgtcgcaccatcaacgtcaaggagctctgcgagccttgctggaagctgatgcggaacctccttggcacccacctgggccacagcgccatctacaacatgtgccacctcatggaggacagagcctacatggaggacgcgcccctgctgagaggagccgtgttttttgtgggcatggctctctggggagcccaccggctctattctctcaggaactcgccgacatctgtgttgccatcattttaccaggccatggcatgtccgaacgaggtggtgtcctatgagatcgtcctgtccatcaccaggctcatcaagaagtataggaaggagctccaggtggtggcgtgggacattctgctgaacatcatcgaacggctccttcagcagctccagaccttggacagcccggagctcaggaccatcgtccatgacctgttgaccacggtggaggagctgtgtgaccagaacgagttccacgggtctcaggagagatactttgaactggtggagagatgtgcggaccagaggcctgagtcctccctcctgaacctgatctcctatagagcgcagtccatccacccggccaaggacggctggattcagaacctgcaggcgctgatggagagattcttcaggagcgagtcccgaggcgccgtgcgcatcaaggtgctggacgtgctgtcctttgtgctgctcatcaacaggcagttctatgaggaggagctgattaactcagtggtcatctcgcagctctcccacatccccgaggataaagaccaccaggtccgaaagctggccacccagttgctggtggacctggcagagggctgccacacacaccacttcaacagcctgctggacatcatcgagaaggtgatggcccgctccctctccccacccccggagctggaagaaagggatgtggccgcatactcggcctccttggaggatgtgaagacagccgtcctggggcttctggtcatccttcagaccaagctgtacaccctgcctgcaagccacgccacgcgtgtgtatgagatgctggtcagccacattcagctccactacaagcacagctacaccctgccaatcgcgagcagcatccggctgcaggcctttgacttcctgttgctgctgcgggccgactcactgcaccgcctgggcctgcccaacaaggatggagtcgtgcggttcagcccctactgcgtctgcgactacatggagccagagagaggctctgagaagaagaccagcggccccctttctcctcccacagggcctcctggcccggcgcctgcaggccccgccgtgcggctggggtccgtgccctactccctgctcttccgcgtcctgctgcagtgcttgaagcaggagtctgactggaaggtgctgaagctggttctgggcaggctgcctgagtccctgcgctataaagtgctcatctttacttccccttgcagtgtggaccagctgtgctctgctctctgctccatgctttcaggcccaaagacactggagcggctccgaggcgccccagaaggcttctccagaactgacttgcacctggccgtggttccagtgctgacagcattaatctcttaccataactacctggacaaaaccaaacagcgcgagatggtctactgcctggagcagggcctcatccaccgctgtgccagccagtgcgtcgtggccttgtccatctgcagcgtggagatgcctgacatcatcatcaaggcgctgcctgttctggtggtgaagctcacgcacatctcagccacagccagcatggccgtcccactgctggagttcctgtccactctggccaggctgccgcacctctacaggaactttgccgcggagcagtatgccagtgtgttcgccatctccctgccgtacaccaacccctccaagtttaatcagtacatcgtgtgtctggcccatcacgtcatagccatgtggttcatcaggtgccgcctgcccttccggaaggattttgtccctttcatcactaagggcctgcggtccaatgtcctcttgtcttttgatgacacccccgagaaggacagcttcagggcccggagtactagtctcaacgagagacccaagagcaggatacagacgtccctcaccagtgccagcttggggtctgcagatgagaactccgtggcccaggctgacgatagcctgaaaaacctccacctggagctcacggaaacctgtctggacatgatggctcgatacgtcttctccaacttcacggctgtcccgaagaggtctcctgtgggcgagttcctcctagcgggtggcaggaccaaaacctggctggttgggaacaagcttgtcactgtgacgacaagcgtgggaaccgggacccggtcgttactaggcctggactcgggggagctgcagtccggcccggagtcgagctccagccccggggtgcatgtgagacagaccaaggaggcgccggccaagctggagtcccaggctgggcagcaggtgtcccgtggggcccgggatcgggtccgttccatgtcggggggccatggtcttcgagttggcgccctggacgtgccggcctcccagttcctgggcagtgccacttctccaggaccacggactgcaccagccgcgaaacctgagaaggcctcagctggcacccgggttcctgtgcaggagaagacgaacctggcggcctatgtgcccctgctgacccagggctgggcggagatcctggtccggaggcccacagggaacaccagctggctgatgagcctggagaacccgctcagccctttctcctcggacatcaacaacatgcccctgcaggagctgtctaacgccctcatggcggctgagcgcttcaaggagcaccgggacacagccctgtacaagtcactgtcggtgccggcagccagcacggccaaaccccctcctctgcctcgctccaacacagtggcctctttctcctccctgtaccagtccagctgccaaggacagctgcacaggagcgtttcctgggcagactccgccgtggtcatggaggagggaagtccgggcgaggttcctgtgctggtggagcccccagggttggaggacgttgaggcagcgctaggcatggacaggcgcacggatgcctacagcaggtcgtcctcagtctccagccaggaggagaagtcgctccacgcggaggagctggttggcaggggcatccccatcgagcgagtcgtctcctcggagggtggccggccctctgtggacctctccttccagccctcgcagcccctgagcaagtccagctcctctcccgagctgcagactctgcaggacatcctcggggaccctggggacaaggccgacgtgggccggctgagccctgaggttaaggcccggtcacagtcagggaccctggacggggaaagtgctgcctggtcggcctcgggcgaagacagtcggggccagcccgagggtcccttgccttccagctccccccgctcgcccagtggcctccggccccgaggttacaccatctccgactcggccccatcacgcaggggcaagagagtagagagggacgccttaaagagcagagccacagcctccaatgcagagaaagtgccaggcatcaaccccagtttcgtgttcctgcagctctaccattcccccttctttggcgacgagtcaaacaagccaatcctgctgcccaatgagtcacagtcctttgagcggtcggtgcagctcctcgaccagatcccatcatacgacacccacaagatcgccgtcctgtatgttggagaaggccagagcaacagcgagctcgccatcctgtccaatgagcatggctcctacaggtacacggagttcctgacgggcctgggccggctcatcgagctgaaggactgccagccggacaaggtgtacctgggaggcctggacgtgtgtggtgaggacggccagttcacctactgctggcacgatgacatcatgcaagccgtcttccacatcgccaccctgatgcccaccaaggacgtggacaagcaccgctgcgacaagaagcgccacctgggcaacgactttgtgtccattgtctacaatgactccggtgaggacttcaagcttggcaccatcaagggccagttcaactttgtccacgtgatcgtcaccccgctggactacgagtgcaacctggtgtccctgcagtgcaggaaagacatggagggccttgtggacaccagcgtggccaagatcgtgtctgaccgcaacctgcccttcgtggcccgccagatggccctgcacgcaaatatggcctcacaggtgcatcatagccgctccaaccccaccgatatctacccctccaagtggattgcccggctccgccacatcaagcggctccgccagcggatctgcgaggaagccgcctactccaaccccagcctacctctggtgcaccctccgtcccatagcaaagcccctgcacagactccagccgagcccacacctggctatgaggtgggccagcggaagcgcctcatctcctcggtggaggacttcaccgagtttgtgtgaggccggggccctccctcctgcactggccttggacggtattgcctgtcagtgaaataaataaagtcctgaccccagtgcacagacatagaggcacagattgcagtcagacagctcttttattgactttgtctgcttggtgcgggggttgggggggtgtcgaggctctagaagcggccatgcccacagaagtggtacacagaagcaggcacagccagctccgagggccttgaggctgcctgggccatacagcacactcgcgcgtgcgcgcgcgcacacacacacacacacagtcaccttcctccaccctgggagccagcccccaggaggagtcttttcctctaaccaccctggggtcctctgacatgcctagtcctgctacttgcccagacctgatgccagcaggcctgggcgctgctctcttgctacctggcctggggcaagggaggatgacaaggcctctggggtgatgagagtgcctggcagacagctgtgcccccagcaccggcccaaggccaagctcgcatccaagcagcagccgggctgccataacgccaccacacctaccaagcgcagcaggtgttgggggaggccagctctgggcgcaggcccctcagccctagtgaaaatagtgacatacaaaaatatacacattttaacaccatataaattactgacacgagacacacagtgagacggtgcagggagtacggtaggaactggagaggtaataacttaggggcagggtggcggcggtgcaggctaaccctccctgaagccagcagccttagcagtgggggacatctgcccagggggtggggccgggcacagcccgctgtacctgaggactcggggaaataaattagcatctcagaggctagaaaccgtccaatactgctgtgtccttcccaagggagctggggaggggaccctgggtcctggttggccacacagcctctttaaagtgctgaagcccacagacagacagatgcccctgcctgctctctggggaacctacgtgcagccattctgcctggccctcggccttgacagcggcagaaagtaatactgagcggtgtccactccgactccacggcc

SEQ ID NO: 8613 - protein, 1764 aa, Homo sapiens; identical to SEQ ID NO: 8611

SEQ ID NO: 8614 - DNA, 6563 bp, Homo sapiens
ggcgcggcgctacctaggggttttctggtgcgtcctggtccaccatggccaaaccaacaagcaaagattcaggcttgaaggagaagtttaagattctgttgggactgggaacaccgaggccaaatcccaggtctgcagagggtaaacagacggagtttatcatcaccgcggaaatactgagagaactgagcatggaatgtggcctcaacaatcgcatccggatgatagggcagatttgtgaagtcgcaaaaaccaagaaatttgaagagcacgcagtggaagcactctggaaggcggtcgcggatctgttgcagccggagcggccgctggaggcccggcacgcggtgctggctctgctgaaggccatcgtgcaggggcagggcgagcgtttgggggtcctcagagccctcttctttaaggtcatcaaggattacccttccaacgaagaccttcacgaaaggctggaggttttcaaggccctcacagacaatgggagacacatcacctacttggaggaagagctggctgactttgtcctgcagtggatggatgttggcttgtcctcggaattccttctggtgctggtgaacttggtcaaattcaatagctgttacctcgacgagtacatcgcaaggatggttcagatgatctgtctgctgtgcgtccggaccgcgtcctctgtggacatagaggtctccctgcaggtgctggacgccgtggtctgctacaactgcctgccggctgagagcctcccgctgttcatcgttaccctctgtcgcaccatcaacgtcaaggagctctgcgagccttgctggaagctgatgcggaacctccttggcacccacctgggccacagcgccatctacaacatgtgccacctcatggaggacagagcctacatggaggacgcgcccctgctgagaggagccgtgttttttgtgggcatggctctctggggagcccaccggctctattctctcaggaactcgccgacatctgtgttgccatcattttaccaggccatggcatgtccgaacgaggtggtgtcctatgagatcgtcctgtccatcaccaggctcatcaagaagtataggaaggagctccaggtggtggcgtgggacattctgctgaacatcatcgaacggctccttcagcagctccagaccttggacagcccggagctcaggaccatcgtccatgacctgttgaccacggtggaggagctgtgtgaccagaacgagttccacgggtctcaggagagatactttgaactggtggagagatgtgcggaccagaggcctgagtcctccctcctgaacctgatctcctatagagcgcagtccatccacccggccaaggacggctggattcagaacctgcaggcgctgatggagagattcttcaggagcgagtcccgaggcgccgtgcgcatcaaggtgctggacgtgctgtcctttgtgctgctcatcaacaggcagttctatgaggaggagctgattaactcagtggtcatctcgcagctctcccacatccccgaggataaagaccaccaggtccgaaagctggccacccagttgctggtggacctggcagagggctgccacacacaccacttcaacagcctgctggacatcatcgagaaggtgatggcccgctccctctccccacccccggagctggaagaaagggatgtggccgcatactcggcctccttggaggatgtgaagacagccgtcctggggcttctggtcatccttcagaccaagctgtacaccctgcctgcaagccacgccacgcgtgtgtatgagatgctggtcagccacattcagctccactacaagcacagctacaccctgccaatcgcgagcagcatccggctgcaggcctttgacttcctgttgctgctgcgggccgactcactgcaccgcctgggcctgcccaacaaggatggagtcgtgcggttcagcccctactgcgtctgcgactacatggagccagagagaggctctgagaagaagaccagcggccccctttctcctcccacagggcctcctggcccggcgcctgcaggccccgccgtgcggctggggtccgtgccctactccctgctcttccgcgtcctgctgcagtgcttgaagcaggagtctgactggaaggtgctgaagctggttctgggcaggctgcctgagtccctgcgctataaagtgctcatctttacttccccttgcagtgtggaccagctgtgctctgctctctgctccatgctttcaggcccaaagacactggagcggctccgaggcgccccagaaggcttctccagaactgacttgcacctggccgtggttccagtgctgacagcattaatctcttaccataactacctggacaaaaccaaacagcgcgagatggtctactgcctggagcagggcctcatccaccgctgtgccagccagtgcgtcgtggccttgtccatctgcagcgtggagatgcctgacatcatcatcaaggcgctgcctgttctggtggtgaagctcacgcacatctcagccacagccagcatggccgtcccactgctggagttcctgtccactctggccaggctgccgcacctctacaggaactttgccgcggagcagtatgccagtgtgttcgccatctccctgccgtacaccaacccctccaagtttaatcagtacatcgtgtgtctggcccatcacgtcatagccatgtggttcatcaggtgccgcctgcccttccggaaggattttgtccctttcatcactaagggcctgcggtccaatgtcctcttgtcttttgatgacacccccgagaaggacagcttcagggcccggagtactagtctcaacgagagacccaagagtctgaggatagccagaccccccaaacaaggcttgaataactctccacccgtgaaagaattcaaggagagctctgcagccgaggccttccggtgccgcagcatcagtgtgtctgaacatgtggtccgcagcaggatacagacgtccctcaccagtgccagcttggggtctgcagatgagaactccgtggcccaggctgacgatagcctgaaaaacctccacctggagctcacggaaacctgtctggacatgatggctcgatacgtcttctccaacttcacggctgtcccgaagaggtctcctgtgggcgagttcctcctagcgggtggcaggaccaaaacctggctggttgggaacaagcttgtcactgtgacgacaagcgtgggaaccgggacccggtcgttactaggcctggactcgggggagctgcagtccggcccggagtcgagctccagccccggggtgcatgtgagacagaccaaggaggcgccggccaagctggagtcccaggctgggcagcaggtgtcccgtggggcccgggatcgggtccgttccatgtcggggggccatggtcttcgagttggcgccctggacgtgccggcctcccagttcctgggcagtgccacttctccaggaccacggactgcaccagccgcgaaacctgagaaggcctcagctggcacccgggttcctgtgcaggagaagacgaacctggcggcctatgtgcccctgctgacccagggctgggcggagatcctggtccggaggcccacagggaacaccagctggctgatgagcctggagaacccgctcagccctttctcctcggacatcaacaacatgcccctgcaggagctgtctaacgccctcatggcggctgagcgcttcaaggagcaccgggacacagccctgtacaagtcactgtcggtgccggcagccagcacggccaaaccccctcctctgcctcgctccaacacagtggcctctttctcctccctgtaccagtccagctgccaaggacagctgcacaggagcgtttcctgggcagactccgccgtggtcatggaggagggaagtccgggcgaggttcctgtgctggtggagcccccagggttggaggacgttgaggcagcgctaggcatggacaggcgcacggatgcctacagcaggtcgtcctcagtctccagccaggaggagaagtcgctccacgcggaggagctggttggcaggggcatccccatcgagcgagtcgtctcctcggagggtggccggccctctgtggacctctccttccagccctcgcagcccctgagcaagtccagctcctctcccgagctgcagactctgcaggacatcctcggggaccctggggacaaggccgacgtgggccggctgagccctgaggttaaggcccggtcacagtcagggaccctggacggggaaagtgctgcctggtcggcctcgggcgaagacagtcggggccagcccgagggtcccttgccttccagctccccccgctcgcccagtggcctccggccccgaggttacaccatctccgactcggccccatcacgcaggggcaagagagtagagagggacgccttaaagagcagagccacagcctccaatgcagagaaagtgccaggcatcaaccccagtttcgtgttcctgcagctctaccattcccccttctttggcgacgagtcaaacaagccaatcctgctgcccaatgagtcacagtcctttgagcggtcggtgcagctcctcgaccagatcccatcatacgacacccacaagatcgccgtcctgtatgttggagaaggccagagcaacagcgagctcgccatcctgtccaatgagcatggctcctacaggtacacggagttcctgacgggcctgggccggctcatcgagctgaaggactgccagccggacaaggtgtacctgggaggcctggacgtgtgtggtgaggacggccagttcacctactgctggcacgatgacatcatgcaagccgtcttccacatcgccaccctgatgcccaccaaggacgtggacaagcaccgctgcgacaagaagcgccacctgggcaacgactttgtgtccattgtctacaatgactccggtgaggacttcaagcttggcaccatcaagggccagttcaactttgtccacgtgatcgtcaccccgctggactacgagtgcaacctggtgtccctgcagtgcaggaaagacatggagggccttgtggacaccagcgtggccaagatcgtgtctgaccgcaacctgcccttcgtggcccgccagatggccctgcacgcaaatatggcctcacaggtgcatcatagccgctccaaccccaccgatatctacccctccaagtggattgcccggctccgccacatcaagcggctccgccagcggatctgcgaggaagccgcctactccaaccccagcctacctctggtgcaccctccgtcccatagcaaagcccctgcacagactccagccgagcccacacctggctatgaggtgggccagcggaagcgcctcatctcctcggtggaggacttcaccgagtttgtgtgaggccggggccctccctcctgcactggccttggacggtattgcctgtcagtgaaataaataaagtcctgaccccagtgcacagacatagaggcacagattgcagtcagacagctcttttattgactttgtctgcttggtgcgggggttgggggggtgtcgaggctctagaagcggccatgcccacagaagtggtacacagaagcaggcacagccagctccgagggccttgaggctgcctgggccatacagcacactcgcgcgtgcgcgcgcgcacacacacacacacacagtcaccttcctccaccctgggagccagcccccaggaggagtcttttcctctaaccaccctggggtcctctgacatgcctagtcctgctacttgcccagacctgatgccagcaggcctgggcgctgctctcttgctacctggcctggggcaagggaggatgacaaggcctctggggtgatgagagtgcctggcagacagctgtgcccccagcaccggcccaaggccaagctcgcatccaagcagcagccgggctgccataacgccaccacacctaccaagcgcagcaggtgttgggggaggccagctctgggcgcaggcccctcagccctagtgaaaatagtgacatacaaaaatatacacattttaacaccatataaattactgacacgagacacacagtgagacggtgcagggagtacggtaggaactggagaggtaataacttaggggcagggtggcggcggtgcaggctaaccctccctgaagccagcagccttagcagtgggggacatctgcccagggggtggggccgggcacagcccgctgtacctgaggactcggggaaataaattagcatctcagaggctagaaaccgtccaatactgctgtgtccttcccaagggagctggggaggggaccctgggtcctggttggccacacagcctctttaaagtgctgaagcccacagacagacagatgcccctgcctgctctctggggaacctacgtgcagccattctgcctggccctcggccttgacagcggcagaaagtaatactgagcggtgtccactccgactccacggcc

SEQ ID NO: 8615 - protein, 1807 aa, Homo sapiens; identical to SEQ ID NO: 1303

SEQ ID NO: 8616 - DNA, 5630 bp, Homo sapiens
agttttaagtcatggcgggtgcgaacgggtctctgctgcaggcggctccgtgacagctcctgcttcacatggaggggttttctggtgcgtcctggtccaccatggccaaaccaacaagcaaagattcaggcttgaaggagaagtttaagattctgttgggactgggaacaccgaggccaaatcccaggtctgcagagggtaaacagacggagtttatcatcaccgcggaaatactgagagaactgagcatggaatgtggcctcaacaatcgcatccggatgatagggcagatttgtgaagtcgcaaaaaccaagaaatttgaagagcacgcagtggaagcactctggaaggcggtcgcggatctgttgcagccggagcggccgctggaggcccggcacgcggtgctggctctgctgaaggccatcgtgcaggggcagggcgagcgtttgggggtcctcagagccctcttctttaaggtcatcaaggattacccttccaacgaagaccttcacgaaaggctggaggttttcaaggccctcacagacaatgggagacacatcacctacttggaggaagagctggctgactttgtcctgcagtggatggatgttggcttgtcctcggaattccttctggtgctggtgaacttggtcaaattcaatagctgttacctcgacgagtacatcgcaaggatggttcagatgatctgtctgctgtgcgtccggaccgcgtcctctgtggacatagaggtctccctgcaggtgctggacgccgtggtctgctacaactgcctgccggctgagagcctcccgctgttcatcgttaccctctgtcgcaccatcaacgtcaaggagctctgcgagccttgctggaagctgatgcggaacctccttggcacccacctgggccacagcgccatctacaacatgtgccacctcatggaggacagagcctacatggaggacgcgcccctgctgagaggagccgtgttttttgtgggcatggctctctggggagcccaccggctctattctctcaggaactcgccgacatctgtgttgccatcattttaccaggccatggcatgtccgaacgaggtggtgtcctatgagatcgtcctgtccatcaccaggctcatcaagaagtataggaaggagctccaggtggtggcgtgggacattctgctgaacatcatcgaacggctccttcagcagctccagaccttggacagcccggagctcaggaccatcgtccatgacctgttgaccacggtggaggagctgtgtgaccagaacgagttccacgggtctcaggagagatactttgaactggtggagagatgtgcggaccagaggcctgagtcctccctcctgaacctgatctcctatagagcgcagtccatccacccggccaaggacggctggattcagaacctgcaggcgctgatggagagattcttcaggagcgagtcccgaggcgccgtgcgcatcaaggtgctggacgtgctgtcctttgtgctgctcatcaacaggcagttctatgaggaggagctgattaactcagtggtcatctcgcagctctcccacatccccgaggataaagaccaccaggtccgaaagctggccacccagttgctggtggacctggcagagggctgccacacacaccacttcaacagcctgctggacatcatcgagaaggtgatggcccgctccctctccccacccccggagctggaagaaagggatgtggccgcatactcggcctccttggaggatgtgaagacagccgtcctggggcttctggtcatccttcagaccaagctgtacaccctgcctgcaagccacgccacgcgtgtgtatgagatgctggtcagccacattcagctccactacaagcacagctacaccctgccaatcgcgagcagcatccggctgcaggcctttgacttcctgttgctgctgcgggccgactcactgcaccgcctgggcctgcccaacaaggatggagtcgtgcggttcagcccctactgcgtctgcgactacatggagccagagagaggctctgagaagaagaccagcggccccctttctcctcccacagggcctcctggcccggcgcctgcaggccccgccgtgcggctggggtccgtgccctactccctgctcttccgcgtcctgctgcagtgcttgaagcaggagtctgactggaaggtgctgaagctggttctgggcaggctgcctgagtccctgcgctataaagtgctcatctttacttccccttgcagtgtggaccagctgtgctctgctctctgctccatgctttcaggcccaaagacactggagcggctccgaggcgccccagaaggcttctccagaactgacttgcacctggccgtggttccagtgctgacagcattaatctcttaccataactacctggacaaaaccaaacagcgcgagatggtctactgcctggagcagggcctcatccaccgctgtgccagccagtgcgtcgtggccttgtccatctgcagcgtggagatgcctgacatcatcatcaaggcgctgcctgttctggtggtgaagctcacgcacatctcagccacagccagcatggccgtcccactgctggagttcctgtccactctggccaggctgccgcacctctacaggaactttgccgcggagcagtatgccagtgtgttcgccatctccctgccgtacaccaacccctccaagtttaatcagtacatcgtgtgtctggcccatcacgtcatagccatgtggttcatcaggtgccgcctgcccttccggaaggattttgtccctttcatcactaagggcctgcggtccaatgtcctcttgtcttttgatgacacccccgagaaggacagcttcagggcccggagtactagtctcaacgagagacccaagagtctgaggatagccagaccccccaaacaaggcttgaataactctccacccgtgaaagaattcaaggagagctctgcagccgaggccttccggtgccgcagcatcagtgtgtctgaacatgtggtccgcagcaggatacagacgtccctcaccagtgccagcttggggtctgcagatgagaactccgtggcccaggctgacgatagcctgaaaaacctccacctggagctcacggaaacctgtctggacatgatggctcgatacgtcttctccaacttcacggctgtcccgaagaggtctcctgtgggcgagttcctcctagcgggtggcaggaccaaaacctggctggttgggaacaagcttgtcactgtgacgacaagcgtgggaaccgggacccggtcgttactaggcctggactcgggggagctgcagtccggcccggagtcgagctccagccccggggtgcatgtgagacagaccaaggaggcgccggccaagctggagtcccaggctgggcagcaggtgtcccgtggggcccgggatcgggtccgttccatgtcggggggccatggtcttcgagttggcgccctggacgtgccggcctcccagttcctgggcagtgccacttctccaggaccacggactgcaccagccgcgaaacctgagaaggcctcagctggcacccgggttcctgtgcaggagaagacgaacctggcggcctatgtgcccctgctgacccagggctgggcggagatcctggtccggaggcccacagggaacaccagctggctgatgagcctggagaacccgctcagccctttctcctcggacatcaacaacatgcccctgcaggagctgtctaacgccctcatggcggctgagcgcttcaaggagcaccgggacacagccctgtacaagtcactgtcggtgccggcagccagcacggccaaaccccctcctctgcctcgctccaacacagtggcctctttctcctccctgtaccagtccagctgccaaggacagctgcacaggagcgtttcctgggcagactccgccgtggtcatggaggagggaagtccgggcgaggttcctgtgctggtggagcccccagggttggaggacgttgaggcagcgctaggcatggacaggcgcacggatgcctacagcaggtcgtcctcagtctccagccaggaggagaagtcgctccacgcggaggagctggttggcaggggcatccccatcgagcgagtcgtctcctcggagggtggccggccctctgtggacctctccttccagccctcgcagcccctgagcaagtccagctcctctcccgagctgcagactctgcaggacatcctcggggaccctggggacaaggccgacgtgggccggctgagccctgaggttaaggcccggtcacagtcagggaccctggacggggaaagtgctgcctggtcggcctcgggcgaagacagtcggggccagcccgagggtcccttgccttccagctccccccgctcgcccagtggcctccggccccgaggttacaccatctccgactcggccccatcacgcaggggcaagagagtagagagggacgccttaaagagcagagccacagcctccaatgcagagaaagtgccaggcatcaaccccagtttcgtgttcctgcagctctaccattcccccttctttggcgacgagtcaaacaagccaatcctgctgcccaatgagtcacagtcctttgagcggtcggtgcagctcctcgaccagatcccatcatacgacacccacaagatcgccgtcctgtatgttggagaaggccagagcaacagcgagctcgccatcctgtccaatgagcatggctcctacaggtacacggagttcctgacgggcctgggccggctcatcgagctgaaggactgccagccggacaaggtgtacctgggaggcctggacgtgtgtggtgaggacggccagttcacctactgctggcacgatgacatcatgcaagccgtcttccacatcgccaccctgatgcccaccaaggacgtggacaagcaccgctgcgacaagaagcgccacctgggcaacgactttgtgtccattgtctacaatgactccggtgaggacttcaagcttggcaccatcaagggccagttcaactttgtccacgtgatcgtcaccccgctggactacgagtgcaacctggtgtccctgcagtgcaggaaagacatggagggccttgtggacaccagcgtggccaagatcgtgtctgaccgcaacctgcccttcgtggcccgccagatggccctgcacgcaaatatggcctcacaggtgcatcatagccgctccaaccccaccgatatctacccctccaagtggattgcccggctccgccacatcaagcggctccgccagcggatctgcgaggaagccgcctactccaaccccagcctacctctggtgcaccctccgtcccatagcaaagcccctgcacagactccagccgagcccacacctggctatgaggtgggccagcggaagcgcctcatctcctcggtggaggacttcaccgagtttgtgtgaggccggggccctccctcctgcactggccttggacggtattgcctgtcagtgaaataaataaagtcctgaccccagtgcacagacatagaggcacagattgcagtc

SEQ ID NO: 8617 - protein, 1818 aa, Homo sapiens
MEGFSGASWSTMAKPTSKDSGLKEKFKILLGLGTPRPNPRSAEGKQTEFIITAEILRELSMECGLNNRIRMIGQICEVAKTKKFEEHAVEALWKAVADLLQPERPLEARHAVLALLKAIVQGQGERLGVLRALFFKVIKDYPSNEDLHERLEVFKALTDNGRHITYLEEELADFVLQWMDVGLSSEFLLVLVNLVKFNSCYLDEYIARMVQMICLLCVRTASSVDIEVSLQVLDAVVCYNCLPAESLPLFIVTLCRTINVKELCEPCWKLMRNLLGTHLGHSAIYNMCHLMEDRAYMEDAPLLRGAVFFVGMALWGAHRLYSLRNSPTSVLPSFYQAMACPNEVVSYEIVLSITRLIKKYRKELQVVAWDILLNIIERLLQQLQTLDSPELRTIVHDLLTTVEELCDQNEFHGSQERYFELVERCADQRPESSLLNLISYRAQSIHPAKDGWIQNLQALMERFFRSESRGAVRIKVLDVLSFVLLINRQFYEEELINSVVISQLSHIPEDKDHQVRKLATQLLVDLAEGCHTHHFNSLLDIIEKVMARSLSPPPELEERDVAAYSASLEDVKTAVLGLLVILQTKLYTLPASHATRVYEMLVSHIQLHYKHSYTLPIASSIRLQAFDFLLLLRADSLHRLGLPNKDGVVRFSPYCVCDYMEPERGSEKKTSGPLSPPTGPPGPAPAGPAVRLGSVPYSLLFRVLLQCLKQESDWKVLKLVLGRLPESLRYKVLIFTSPCSVDQLCSALCSMLSGPKTLERLRGAPEGFSRTDLHLAVVPVLTALISYHNYLDKTKQREMVYCLEQGLIHRCASQCVVALSICSVEMPDIIIKALPVLVVKLTHISATASMAVPLLEFLSTLARLPHLYRNFAAEQYASVFAISLPYTNPSKFNQYIVCLAHHVIAMWFIRCRLPFRKDFVPFITKGLRSNVLLSFDDTPEKDSFRARSTSLNERPKSLRIARPPKQGLNNSPPVKEFKESSAAEAFRCRSISVSEHVVRSRIQTSLTSASLGSADENSVAQADDSLKNLHLELTETCLDMMARYVFSNFTAVPKRSPVGEFLLAGGRTKTWLVGNKLVTVTTSVGTGTRSLLGLDSGELQSGPESSSSPGVHVRQTKEAPAKLESQAGQQVSRGARDRVRSMSGGHGLRVGALDVPASQFLGSATSPGPRTAPAAKPEKASAGTRVPVQEKTNLAAYVPLLTQGWAEILVRRPTGNTSWLMSLENPLSPFSSDINNMPLQELSNALMAAERFKEHRDTALYKSLSVPAASTAKPPPLPRSNTVASFSSLYQSSCQGQLHRSVSWADSAVVMEEGSPGEVPVLVEPPGLEDVEAALGMDRRTDAYSRSSSVSSQEEKSLHAEELVGRGIPIERVVSSEGGRPSVDLSFQPSQPLSKSSSSPELQTLQDILGDPGDKADVGRLSPEVKARSQSGTLDGESAAWSASGEDSRGQPEGPLPSSSPRSPSGLRPRGYTISDSAPSRRGKRVERDALKSRATASNAEKVPGINPSFVFLQLYHSPFFGDESNKPILLPNESQSFERSVQLLDQIPSYDTHKIAVLYVGEGQSNSELAILSNEHGSYRYTEFLTGLGRLIELKDCQPDKVYLGGLDVCGEDGQFTYCWHDDIMQAVFHIATLMPTKDVDKHRCDKKRHLGNDFVSIVYNDSGEDFKLGTIKGQFNFVHVIVTPLDYECNLVSLQCRKDMEGLVDTSVAKIVSDRNLPFVARQMALHANMASQVHHSRSNPTDIYPSKWIARLRHIKRLRQRICEEAAYSNPSLPLVHPPSHSKAPAQTPAEPTPGYEVGQRKRLISSVEDFTEFV

SEQ ID NO: 8618 - DNA, 5501 bp, Homo sapiens
agttttaagtcatggcgggtgcgaacgggtctctgctgcaggcggctccgtgacagctcctgcttcacatggaggggttttctggtgcgtcctggtccaccatggccaaaccaacaagcaaagattcaggcttgaaggagaagtttaagattctgttgggactgggaacaccgaggccaaatcccaggtctgcagagggtaaacagacggagtttatcatcaccgcggaaatactgagagaactgagcatggaatgtggcctcaacaatcgcatccggatgatagggcagatttgtgaagtcgcaaaaaccaagaaatttgaagagcacgcagtggaagcactctggaaggcggtcgcggatctgttgcagccggagcggccgctggaggcccggcacgcggtgctggctctgctgaaggccatcgtgcaggggcagggcgagcgtttgggggtcctcagagccctcttctttaaggtcatcaaggattacccttccaacgaagaccttcacgaaaggctggaggttttcaaggccctcacagacaatgggagacacatcacctacttggaggaagagctggctgactttgtcctgcagtggatggatgttggcttgtcctcggaattccttctggtgctggtgaacttggtcaaattcaatagctgttacctcgacgagtacatcgcaaggatggttcagatgatctgtctgctgtgcgtccggaccgcgtcctctgtggacatagaggtctccctgcaggtgctggacgccgtggtctgctacaactgcctgccggctgagagcctcccgctgttcatcgttaccctctgtcgcaccatcaacgtcaaggagctctgcgagccttgctggaagctgatgcggaacctccttggcacccacctgggccacagcgccatctacaacatgtgccacctcatggaggacagagcctacatggaggacgcgcccctgctgagaggagccgtgttttttgtgggcatggctctctggggagcccaccggctctattctctcaggaactcgccgacatctgtgttgccatcattttaccaggccatggcatgtccgaacgaggtggtgtcctatgagatcgtcctgtccatcaccaggctcatcaagaagtataggaaggagctccaggtggtggcgtgggacattctgctgaacatcatcgaacggctccttcagcagctccagaccttggacagcccggagctcaggaccatcgtccatgacctgttgaccacggtggaggagctgtgtgaccagaacgagttccacgggtctcaggagagatactttgaactggtggagagatgtgcggaccagaggcctgagtcctccctcctgaacctgatctcctatagagcgcagtccatccacccggccaaggacggctggattcagaacctgcaggcgctgatggagagattcttcaggagcgagtcccgaggcgccgtgcgcatcaaggtgctggacgtgctgtcctttgtgctgctcatcaacaggcagttctatgaggaggagctgattaactcagtggtcatctcgcagctctcccacatccccgaggataaagaccaccaggtccgaaagctggccacccagttgctggtggacctggcagagggctgccacacacaccacttcaacagcctgctggacatcatcgagaaggtgatggcccgctccctctccccacccccggagctggaagaaagggatgtggccgcatactcggcctccttggaggatgtgaagacagccgtcctggggcttctggtcatccttcagaccaagctgtacaccctgcctgcaagccacgccacgcgtgtgtatgagatgctggtcagccacattcagctccactacaagcacagctacaccctgccaatcgcgagcagcatccggctgcaggcctttgacttcctgttgctgctgcgggccgactcactgcaccgcctgggcctgcccaacaaggatggagtcgtgcggttcagcccctactgcgtctgcgactacatggagccagagagaggctctgagaagaagaccagcggccccctttctcctcccacagggcctcctggcccggcgcctgcaggccccgccgtgcggctggggtccgtgccctactccctgctcttccgcgtcctgctgcagtgcttgaagcaggagtctgactggaaggtgctgaagctggttctgggcaggctgcctgagtccctgcgctataaagtgctcatctttacttccccttgcagtgtggaccagctgtgctctgctctctgctccatgctttcaggcccaaagacactggagcggctccgaggcgccccagaaggcttctccagaactgacttgcacctggccgtggttccagtgctgacagcattaatctcttaccataactacctggacaaaaccaaacagcgcgagatggtctactgcctggagcagggcctcatccaccgctgtgccagccagtgcgtcgtggccttgtccatctgcagcgtggagatgcctgacatcatcatcaaggcgctgcctgttctggtggtgaagctcacgcacatctcagccacagccagcatggccgtcccactgctggagttcctgtccactctggccaggctgccgcacctctacaggaactttgccgcggagcagtatgccagtgtgttcgccatctccctgccgtacaccaacccctccaagtttaatcagtacatcgtgtgtctggcccatcacgtcatagccatgtggttcatcaggtgccgcctgcccttccggaaggattttgtccctttcatcactaagggcctgcggtccaatgtcctcttgtcttttgatgacacccccgagaaggacagcttcagggcccggagtactagtctcaacgagagacccaagagcaggatacagacgtccctcaccagtgccagcttggggtctgcagatgagaactccgtggcccaggctgacgatagcctgaaaaacctccacctggagctcacggaaacctgtctggacatgatggctcgatacgtcttctccaacttcacggctgtcccgaagaggtctcctgtgggcgagttcctcctagcgggtggcaggaccaaaacctggctggttgggaacaagcttgtcactgtgacgacaagcgtgggaaccgggacccggtcgttactaggcctggactcgggggagctgcagtccggcccggagtcgagctccagccccggggtgcatgtgagacagaccaaggaggcgccggccaagctggagtcccaggctgggcagcaggtgtcccgtggggcccgggatcgggtccgttccatgtcggggggccatggtcttcgagttggcgccctggacgtgccggcctcccagttcctgggcagtgccacttctccaggaccacggactgcaccagccgcgaaacctgagaaggcctcagctggcacccgggttcctgtgcaggagaagacgaacctggcggcctatgtgcccctgctgacccagggctgggcggagatcctggtccggaggcccacagggaacaccagctggctgatgagcctggagaacccgctcagccctttctcctcggacatcaacaacatgcccctgcaggagctgtctaacgccctcatggcggctgagcgcttcaaggagcaccgggacacagccctgtacaagtcactgtcggtgccggcagccagcacggccaaaccccctcctctgcctcgctccaacacagtggcctctttctcctccctgtaccagtccagctgccaaggacagctgcacaggagcgtttcctgggcagactccgccgtggtcatggaggagggaagtccgggcgaggttcctgtgctggtggagcccccagggttggaggacgttgaggcagcgctaggcatggacaggcgcacggatgcctacagcaggtcgtcctcagtctccagccaggaggagaagtcgctccacgcggaggagctggttggcaggggcatccccatcgagcgagtcgtctcctcggagggtggccggccctctgtggacctctccttccagccctcgcagcccctgagcaagtccagctcctctcccgagctgcagactctgcaggacatcctcggggaccctggggacaaggccgacgtgggccggctgagccctgaggttaaggcccggtcacagtcagggaccctggacggggaaagtgctgcctggtcggcctcgggcgaagacagtcggggccagcccgagggtcccttgccttccagctccccccgctcgcccagtggcctccggccccgaggttacaccatctccgactcggccccatcacgcaggggcaagagagtagagagggacgccttaaagagcagagccacagcctccaatgcagagaaagtgccaggcatcaaccccagtttcgtgttcctgcagctctaccattcccccttctttggcgacgagtcaaacaagccaatcctgctgcccaatgagtcacagtcctttgagcggtcggtgcagctcctcgaccagatcccatcatacgacacccacaagatcgccgtcctgtatgttggagaaggccagagcaacagcgagctcgccatcctgtccaatgagcatggctcctacaggtacacggagttcctgacgggcctgggccggctcatcgagctgaaggactgccagccggacaaggtgtacctgggaggcctggacgtgtgtggtgaggacggccagttcacctactgctggcacgatgacatcatgcaagccgtcttccacatcgccaccctgatgcccaccaaggacgtggacaagcaccgctgcgacaagaagcgccacctgggcaacgactttgtgtccattgtctacaatgactccggtgaggacttcaagcttggcaccatcaagggccagttcaactttgtccacgtgatcgtcaccccgctggactacgagtgcaacctggtgtccctgcagtgcaggaaagacatggagggccttgtggacaccagcgtggccaagatcgtgtctgaccgcaacctgcccttcgtggcccgccagatggccctgcacgcaaatatggcctcacaggtgcatcatagccgctccaaccccaccgatatctacccctccaagtggattgcccggctccgccacatcaagcggctccgccagcggatctgcgaggaagccgcctactccaaccccagcctacctctggtgcaccctccgtcccatagcaaagcccctgcacagactccagccgagcccacacctggctatgaggtgggccagcggaagcgcctcatctcctcggtggaggacttcaccgagtttgtgtgaggccggggccctccctcctgcactggccttggacggtattgcctgtcagtgaaataaataaagtcctgaccccagtgcacagacatagaggcacagattgcagtc

SEQ ID NO: 8619 - protein, 1775 aa, Homo sapiens
MEGFSGASWSTMAKPTSKDSGLKEKFKILLGLGTPRPNPRSAEGKQTEFIITAEILRELSMECGLNNRIRMIGQICEVAKTKKFEEHAVEALWKAVADLLQPERPLEARHAVLALLKAIVQGQGERLGVLRALFFKVIKDYPSNEDLHERLEVFKALTDNGRHITYLEEELADFVLQWMDVGLSSEFLLVLVNLVKFNSCYLDEYIARMVQMICLLCVRTASSVDIEVSLQVLDAVVCYNCLPAESLPLFIVTLCRTINVKELCEPCWKLMRNLLGTHLGHSAIYNMCHLMEDRAYMEDAPLLRGAVFFVGMALWGAHRLYSLRNSPTSVLPSFYQAMACPNEVVSYEIVLSITRLIKKYRKELQVVAWDILLNIIERLLQQLQTLDSPELRTIVHDLLTTVEELCDQNEFHGSQERYFELVERCADQRPESSLLNLISYRAQSIHPAKDGWIQNLQALMERFFRSESRGAVRIKVLDVLSFVLLINRQFYEEELINSVVISQLSHIPEDKDHQVRKLATQLLVDLAEGCHTHHFNSLLDIIEKVMARSLSPPPELEERDVAAYSASLEDVKTAVLGLLVILQTKLYTLPASHATRVYEMLVSHIQLHYKHSYTLPIASSIRLQAFDFLLLLRADSLHRLGLPNKDGVVRFSPYCVCDYMEPERGSEKKTSGPLSPPTGPPGPAPAGPAVRLGSVPYSLLFRVLLQCLKQESDWKVLKLVLGRLPESLRYKVLIFTSPCSVDQLCSALCSMLSGPKTLERLRGAPEGFSRTDLHLAVVPVLTALISYHNYLDKTKQREMVYCLEQGLIHRCASQCVVALSICSVEMPDIIIKALPVLVVKLTHISATASMAVPLLEFLSTLARLPHLYRNFAAEQYASVFAISLPYTNPSKFNQYIVCLAHHVIAMWFIRCRLPFRKDFVPFITKGLRSNVLLSFDDTPEKDSFRARSTSLNERPKSRIQTSLTSASLGSADENSVAQADDSLKNLHLELTETCLDMMARYVFSNFTAVPKRSPVGEFLLAGGRTKTWLVGNKLVTVTTSVGTGTRSLLGLDSGELQSGPESSSSPGVHVRQTKEAPAKLESQAGQQVSRGARDRVRSMSGGHGLRVGALDVPASQFLGSATSPGPRTAPAAKPEKASAGTRVPVQEKTNLAAYVPLLTQGWAEILVRRPTGNTSWLMSLENPLSPFSSDINNMPLQELSNALMAAERFKEHRDTALYKSLSVPAASTAKPPPLPRSNTVASFSSLYQSSCQGQLHRSVSWADSAVVMEEGSPGEVPVLVEPPGLEDVEAALGMDRRTDAYSRSSSVSSQEEKSLHAEELVGRGIPIERVVSSEGGRPSVDLSFQPSQPLSKSSSSPELQTLQDILGDPGDKADVGRLSPEVKARSQSGTLDGESAAWSASGEDSRGQPEGPLPSSSPRSPSGLRPRGYTISDSAPSRRGKRVERDALKSRATASNAEKVPGINPSFVFLQLYHSPFFGDESNKPILLPNESQSFERSVQLLDQIPSYDTHKIAVLYVGEGQSNSELAILSNEHGSYRYTEFLTGLGRLIELKDCQPDKVYLGGLDVCGEDGQFTYCWHDDIMQAVFHIATLMPTKDVDKHRCDKKRHLGNDFVSIVYNDSGEDFKLGTIKGQFNFVHVIVTPLDYECNLVSLQCRKDMEGLVDTSVAKIVSDRNLPFVARQMALHANMASQVHHSRSNPTDIYPSKWIARLRHIKRLRQRICEEAAYSNPSLPLVHPPSHSKAPAQTPAEPTPGYEVGQRKRLISSVEDFTEFV

SEQ ID NO: 8620 - DNA, 6620 bp, Homo sapiens
agttttaagtcatggcgggtgcgaacgggtctctgctgcaggcggctccgtgacagctcctgcttcacatggaggggttttctggtgcgtcctggtccaccatggccaaaccaacaagcaaagattcaggcttgaaggagaagtttaagattctgttgggactgggaacaccgaggccaaatcccaggtctgcagagggtaaacagacggagtttatcatcaccgcggaaatactgagagaactgagcatggaatgtggcctcaacaatcgcatccggatgatagggcagatttgtgaagtcgcaaaaaccaagaaatttgaagagcacgcagtggaagcactctggaaggcggtcgcggatctgttgcagccggagcggccgctggaggcccggcacgcggtgctggctctgctgaaggccatcgtgcaggggcagggcgagcgtttgggggtcctcagagccctcttctttaaggtcatcaaggattacccttccaacgaagaccttcacgaaaggctggaggttttcaaggccctcacagacaatgggagacacatcacctacttggaggaagagctggctgactttgtcctgcagtggatggatgttggcttgtcctcggaattccttctggtgctggtgaacttggtcaaattcaatagctgttacctcgacgagtacatcgcaaggatggttcagatgatctgtctgctgtgcgtccggaccgcgtcctctgtggacatagaggtctccctgcaggtgctggacgccgtggtctgctacaactgcctgccggctgagagcctcccgctgttcatcgttaccctctgtcgcaccatcaacgtcaaggagctctgcgagccttgctggaagctgatgcggaacctccttggcacccacctgggccacagcgccatctacaacatgtgccacctcatggaggacagagcctacatggaggacgcgcccctgctgagaggagccgtgttttttgtgggcatggctctctggggagcccaccggctctattctctcaggaactcgccgacatctgtgttgccatcattttaccaggccatggcatgtccgaacgaggtggtgtcctatgagatcgtcctgtccatcaccaggctcatcaagaagtataggaaggagctccaggtggtggcgtgggacattctgctgaacatcatcgaacggctccttcagcagctccagaccttggacagcccggagctcaggaccatcgtccatgacctgttgaccacggtggaggagctgtgtgaccagaacgagttccacgggtctcaggagagatactttgaactggtggagagatgtgcggaccagaggcctgagtcctccctcctgaacctgatctcctatagagcgcagtccatccacccggccaaggacggctggattcagaacctgcaggcgctgatggagagattcttcaggagcgagtcccgaggcgccgtgcgcatcaaggtgctggacgtgctgtcctttgtgctgctcatcaacaggcagttctatgaggaggagctgattaactcagtggtcatctcgcagctctcccacatccccgaggataaagaccaccaggtccgaaagctggccacccagttgctggtggacctggcagagggctgccacacacaccacttcaacagcctgctggacatcatcgagaaggtgatggcccgctccctctccccacccccggagctggaagaaagggatgtggccgcatactcggcctccttggaggatgtgaagacagccgtcctggggcttctggtcatccttcagaccaagctgtacaccctgcctgcaagccacgccacgcgtgtgtatgagatgctggtcagccacattcagctccactacaagcacagctacaccctgccaatcgcgagcagcatccggctgcaggcctttgacttcctgttgctgctgcgggccgactcactgcaccgcctgggcctgcccaacaaggatggagtcgtgcggttcagcccctactgcgtctgcgactacatggagccagagagaggctctgagaagaagaccagcggccccctttctcctcccacagggcctcctggcccggcgcctgcaggccccgccgtgcggctggggtccgtgccctactccctgctcttccgcgtcctgctgcagtgcttgaagcaggagtctgactggaaggtgctgaagctggttctgggcaggctgcctgagtccctgcgctataaagtgctcatctttacttccccttgcagtgtggaccagctgtgctctgctctctgctccatgctttcaggcccaaagacactggagcggctccgaggcgccccagaaggcttctccagaactgacttgcacctggccgtggttccagtgctgacagcattaatctcttaccataactacctggacaaaaccaaacagcgcgagatggtctactgcctggagcagggcctcatccaccgctgtgccagccagtgcgtcgtggccttgtccatctgcagcgtggagatgcctgacatcatcatcaaggcgctgcctgttctggtggtgaagctcacgcacatctcagccacagccagcatggccgtcccactgctggagttcctgtccactctggccaggctgccgcacctctacaggaactttgccgcggagcagtatgccagtgtgttcgccatctccctgccgtacaccaacccctccaagtttaatcagtacatcgtgtgtctggcccatcacgtcatagccatgtggttcatcaggtgccgcctgcccttccggaaggattttgtccctttcatcactaagggcctgcggtccaatgtcctcttgtcttttgatgacacccccgagaaggacagcttcagggcccggagtactagtctcaacgagagacccaagagtctgaggatagccagaccccccaaacaaggcttgaataactctccacccgtgaaagaattcaaggagagctctgcagccgaggccttccggtgccgcagcatcagtgtgtctgaacatgtggtccgcagcaggatacagacgtccctcaccagtgccagcttggggtctgcagatgagaactccgtggcccaggctgacgatagcctgaaaaacctccacctggagctcacggaaacctgtctggacatgatggctcgatacgtcttctccaacttcacggctgtcccgaagaggtctcctgtgggcgagttcctcctagcgggtggcaggaccaaaacctggctggttgggaacaagcttgtcactgtgacgacaagcgtgggaaccgggacccggtcgttactaggcctggactcgggggagctgcagtccggcccggagtcgagctccagccccggggtgcatgtgagacagaccaaggaggcgccggccaagctggagtcccaggctgggcagcaggtgtcccgtggggcccgggatcgggtccgttccatgtcggggggccatggtcttcgagttggcgccctggacgtgccggcctcccagttcctgggcagtgccacttctccaggaccacggactgcaccagccgcgaaacctgagaaggcctcagctggcacccgggttcctgtgcaggagaagacgaacctggcggcctatgtgcccctgctgacccagggctgggcggagatcctggtccggaggcccacagggaacaccagctggctgatgagcctggagaacccgctcagccctttctcctcggacatcaacaacatgcccctgcaggagctgtctaacgccctcatggcggctgagcgcttcaaggagcaccgggacacagccctgtacaagtcactgtcggtgccggcagccagcacggccaaaccccctcctctgcctcgctccaacacagtggcctctttctcctccctgtaccagtccagctgccaaggacagctgcacaggagcgtttcctgggcagactccgccgtggtcatggaggagggaagtccgggcgaggttcctgtgctggtggagcccccagggttggaggacgttgaggcagcgctaggcatggacaggcgcacggatgcctacagcaggtcgtcctcagtctccagccaggaggagaagtcgctccacgcggaggagctggttggcaggggcatccccatcgagcgagtcgtctcctcggagggtggccggccctctgtggacctctccttccagccctcgcagcccctgagcaagtccagctcctctcccgagctgcagactctgcaggacatcctcggggaccctggggacaaggccgacgtgggccggctgagccctgaggttaaggcccggtcacagtcagggaccctggacggggaaagtgctgcctggtcggcctcgggcgaagacagtcggggccagcccgagggtcccttgccttccagctccccccgctcgcccagtggcctccggccccgaggttacaccatctccgactcggccccatcacgcaggggcaagagagtagagagggacgccttaaagagcagagccacagcctccaatgcagagaaagtgccaggcatcaaccccagtttcgtgttcctgcagctctaccattcccccttctttggcgacgagtcaaacaagccaatcctgctgcccaatgagtcacagtcctttgagcggtcggtgcagctcctcgaccagatcccatcatacgacacccacaagatcgccgtcctgtatgttggagaaggccagagcaacagcgagctcgccatcctgtccaatgagcatggctcctacaggtacacggagttcctgacgggcctgggccggctcatcgagctgaaggactgccagccggacaaggtgtacctgggaggcctggacgtgtgtggtgaggacggccagttcacctactgctggcacgatgacatcatgcaagccgtcttccacatcgccaccctgatgcccaccaaggacgtggacaagcaccgctgcgacaagaagcgccacctgggcaacgactttgtgtccattgtctacaatgactccggtgaggacttcaagcttggcaccatcaagggccagttcaactttgtccacgtgatcgtcaccccgctggactacgagtgcaacctggtgtccctgcagtgcaggaaagacatggagggccttgtggacaccagcgtggccaagatcgtgtctgaccgcaacctgcccttcgtggcccgccagatggccctgcacgcaaatatggcctcacaggtgcatcatagccgctccaaccccaccgatatctacccctccaagtggattgcccggctccgccacatcaagcggctccgccagcggatctgcgaggaagccgcctactccaaccccagcctacctctggtgcaccctccgtcccatagcaaagcccctgcacagactccagccgagcccacacctggctatgaggtgggccagcggaagcgcctcatctcctcggtggaggacttcaccgagtttgtgtgaggccggggccctccctcctgcactggccttggacggtattgcctgtcagtgaaataaataaagtcctgaccccagtgcacagacatagaggcacagattgcagtcagacagctcttttattgactttgtctgcttggtgcgggggttgggggggtgtcgaggctctagaagcggccatgcccacagaagtggtacacagaagcaggcacagccagctccgagggccttgaggctgcctgggccatacagcacactcgcgcgtgcgcgcgcgcacacacacacacacacagtcaccttcctccaccctgggagccagcccccaggaggagtcttttcctctaaccaccctggggtcctctgacatgcctagtcctgctacttgcccagacctgatgccagcaggcctgggcgctgctctcttgctacctggcctggggcaagggaggatgacaaggcctctggggtgatgagagtgcctggcagacagctgtgcccccagcaccggcccaaggccaagctcgcatccaagcagcagccgggctgccataacgccaccacacctaccaagcgcagcaggtgttgggggaggccagctctgggcgcaggcccctcagccctagtgaaaatagtgacatacaaaaatatacacattttaacaccatataaattactgacacgagacacacagtgagacggtgcagggagtacggtaggaactggagaggtaataacttaggggcagggtggcggcggtgcaggctaaccctccctgaagccagcagccttagcagtgggggacatctgcccagggggtggggccgggcacagcccgctgtacctgaggactcggggaaataaattagcatctcagaggctagaaaccgtccaatactgctgtgtccttcccaagggagctggggaggggaccctgggtcctggttggccacacagcctctttaaagtgctgaagcccacagacagacagatgcccctgcctgctctctggggaacctacgtgcagccattctgcctggccctcggccttgacagcggcagaaagtaatactgagcggtgtccactccgactccacggcc

SEQ ID NO: 8621 - protein, 1818 aa, Homo sapiens; identical to SEQ ID NO: 8617

SEQ ID NO: 8622 - DNA, 6491 bp, Homo sapiens
agttttaagtcatggcgggtgcgaacgggtctctgctgcaggcggctccgtgacagctcctgcttcacatggaggggttttctggtgcgtcctggtccaccatggccaaaccaacaagcaaagattcaggcttgaaggagaagtttaagattctgttgggactgggaacaccgaggccaaatcccaggtctgcagagggtaaacagacggagtttatcatcaccgcggaaatactgagagaactgagcatggaatgtggcctcaacaatcgcatccggatgatagggcagatttgtgaagtcgcaaaaaccaagaaatttgaagagcacgcagtggaagcactctggaaggcggtcgcggatctgttgcagccggagcggccgctggaggcccggcacgcggtgctggctctgctgaaggccatcgtgcaggggcagggcgagcgtttgggggtcctcagagccctcttctttaaggtcatcaaggattacccttccaacgaagaccttcacgaaaggctggaggttttcaaggccctcacagacaatgggagacacatcacctacttggaggaagagctggctgactttgtcctgcagtggatggatgttggcttgtcctcggaattccttctggtgctggtgaacttggtcaaattcaatagctgttacctcgacgagtacatcgcaaggatggttcagatgatctgtctgctgtgcgtccggaccgcgtcctctgtggacatagaggtctccctgcaggtgctggacgccgtggtctgctacaactgcctgccggctgagagcctcccgctgttcatcgttaccctctgtcgcaccatcaacgtcaaggagctctgcgagccttgctggaagctgatgcggaacctccttggcacccacctgggccacagcgccatctacaacatgtgccacctcatggaggacagagcctacatggaggacgcgcccctgctgagaggagccgtgttttttgtgggcatggctctctggggagcccaccggctctattctctcaggaactcgccgacatctgtgttgccatcattttaccaggccatggcatgtccgaacgaggtggtgtcctatgagatcgtcctgtccatcaccaggctcatcaagaagtataggaaggagctccaggtggtggcgtgggacattctgctgaacatcatcgaacggctccttcagcagctccagaccttggacagcccggagctcaggaccatcgtccatgacctgttgaccacggtggaggagctgtgtgaccagaacgagttccacgggtctcaggagagatactttgaactggtggagagatgtgcggaccagaggcctgagtcctccctcctgaacctgatctcctatagagcgcagtccatccacccggccaaggacggctggattcagaacctgcaggcgctgatggagagattcttcaggagcgagtcccgaggcgccgtgcgcatcaaggtgctggacgtgctgtcctttgtgctgctcatcaacaggcagttctatgaggaggagctgattaactcagtggtcatctcgcagctctcccacatccccgaggataaagaccaccaggtccgaaagctggccacccagttgctggtggacctggcagagggctgccacacacaccacttcaacagcctgctggacatcatcgagaaggtgatggcccgctccctctccccacccccggagctggaagaaagggatgtggccgcatactcggcctccttggaggatgtgaagacagccgtcctggggcttctggtcatccttcagaccaagctgtacaccctgcctgcaagccacgccacgcgtgtgtatgagatgctggtcagccacattcagctccactacaagcacagctacaccctgccaatcgcgagcagcatccggctgcaggcctttgacttcctgttgctgctgcgggccgactcactgcaccgcctgggcctgcccaacaaggatggagtcgtgcggttcagcccctactgcgtctgcgactacatggagccagagagaggctctgagaagaagaccagcggccccctttctcctcccacagggcctcctggcccggcgcctgcaggccccgccgtgcggctggggtccgtgccctactccctgctcttccgcgtcctgctgcagtgcttgaagcaggagtctgactggaaggtgctgaagctggttctgggcaggctgcctgagtccctgcgctataaagtgctcatctttacttccccttgcagtgtggaccagctgtgctctgctctctgctccatgctttcaggcccaaagacactggagcggctccgaggcgccccagaaggcttctccagaactgacttgcacctggccgtggttccagtgctgacagcattaatctcttaccataactacctggacaaaaccaaacagcgcgagatggtctactgcctggagcagggcctcatccaccgctgtgccagccagtgcgtcgtggccttgtccatctgcagcgtggagatgcctgacatcatcatcaaggcgctgcctgttctggtggtgaagctcacgcacatctcagccacagccagcatggccgtcccactgctggagttcctgtccactctggccaggctgccgcacctctacaggaactttgccgcggagcagtatgccagtgtgttcgccatctccctgccgtacaccaacccctccaagtttaatcagtacatcgtgtgtctggcccatcacgtcatagccatgtggttcatcaggtgccgcctgcccttccggaaggattttgtccctttcatcactaagggcctgcggtccaatgtcctcttgtcttttgatgacacccccgagaaggacagcttcagggcccggagtactagtctcaacgagagacccaagagcaggatacagacgtccctcaccagtgccagcttggggtctgcagatgagaactccgtggcccaggctgacgatagcctgaaaaacctccacctggagctcacggaaacctgtctggacatgatggctcgatacgtcttctccaacttcacggctgtcccgaagaggtctcctgtgggcgagttcctcctagcgggtggcaggaccaaaacctggctggttgggaacaagcttgtcactgtgacgacaagcgtgggaaccgggacccggtcgttactaggcctggactcgggggagctgcagtccggcccggagtcgagctccagccccggggtgcatgtgagacagaccaaggaggcgccggccaagctggagtcccaggctgggcagcaggtgtcccgtggggcccgggatcgggtccgttccatgtcggggggccatggtcttcgagttggcgccctggacgtgccggcctcccagttcctgggcagtgccacttctccaggaccacggactgcaccagccgcgaaacctgagaaggcctcagctggcacccgggttcctgtgcaggagaagacgaacctggcggcctatgtgcccctgctgacccagggctgggcggagatcctggtccggaggcccacagggaacaccagctggctgatgagcctggagaacccgctcagccctttctcctcggacatcaacaacatgcccctgcaggagctgtctaacgccctcatggcggctgagcgcttcaaggagcaccgggacacagccctgtacaagtcactgtcggtgccggcagccagcacggccaaaccccctcctctgcctcgctccaacacagtggcctctttctcctccctgtaccagtccagctgccaaggacagctgcacaggagcgtttcctgggcagactccgccgtggtcatggaggagggaagtccgggcgaggttcctgtgctggtggagcccccagggttggaggacgttgaggcagcgctaggcatggacaggcgcacggatgcctacagcaggtcgtcctcagtctccagccaggaggagaagtcgctccacgcggaggagctggttggcaggggcatccccatcgagcgagtcgtctcctcggagggtggccggccctctgtggacctctccttccagccctcgcagcccctgagcaagtccagctcctctcccgagctgcagactctgcaggacatcctcggggaccctggggacaaggccgacgtgggccggctgagccctgaggttaaggcccggtcacagtcagggaccctggacggggaaagtgctgcctggtcggcctcgggcgaagacagtcggggccagcccgagggtcccttgccttccagctccccccgctcgcccagtggcctccggccccgaggttacaccatctccgactcggccccatcacgcaggggcaagagagtagagagggacgccttaaagagcagagccacagcctccaatgcagagaaagtgccaggcatcaaccccagtttcgtgttcctgcagctctaccattcccccttctttggcgacgagtcaaacaagccaatcctgctgcccaatgagtcacagtcctttgagcggtcggtgcagctcctcgaccagatcccatcatacgacacccacaagatcgccgtcctgtatgttggagaaggccagagcaacagcgagctcgccatcctgtccaatgagcatggctcctacaggtacacggagttcctgacgggcctgggccggctcatcgagctgaaggactgccagccggacaaggtgtacctgggaggcctggacgtgtgtggtgaggacggccagttcacctactgctggcacgatgacatcatgcaagccgtcttccacatcgccaccctgatgcccaccaaggacgtggacaagcaccgctgcgacaagaagcgccacctgggcaacgactttgtgtccattgtctacaatgactccggtgaggacttcaagcttggcaccatcaagggccagttcaactttgtccacgtgatcgtcaccccgctggactacgagtgcaacctggtgtccctgcagtgcaggaaagacatggagggccttgtggacaccagcgtggccaagatcgtgtctgaccgcaacctgcccttcgtggcccgccagatggccctgcacgcaaatatggcctcacaggtgcatcatagccgctccaaccccaccgatatctacccctccaagtggattgcccggctccgccacatcaagcggctccgccagcggatctgcgaggaagccgcctactccaaccccagcctacctctggtgcaccctccgtcccatagcaaagcccctgcacagactccagccgagcccacacctggctatgaggtgggccagcggaagcgcctcatctcctcggtggaggacttcaccgagtttgtgtgaggccggggccctccctcctgcactggccttggacggtattgcctgtcagtgaaataaataaagtcctgaccccagtgcacagacatagaggcacagattgcagtcagacagctcttttattgactttgtctgcttggtgcgggggttgggggggtgtcgaggctctagaagcggccatgcccacagaagtggtacacagaagcaggcacagccagctccgagggccttgaggctgcctgggccatacagcacactcgcgcgtgcgcgcgcgcacacacacacacacacagtcaccttcctccaccctgggagccagcccccaggaggagtcttttcctctaaccaccctggggtcctctgacatgcctagtcctgctacttgcccagacctgatgccagcaggcctgggcgctgctctcttgctacctggcctggggcaagggaggatgacaaggcctctggggtgatgagagtgcctggcagacagctgtgcccccagcaccggcccaaggccaagctcgcatccaagcagcagccgggctgccataacgccaccacacctaccaagcgcagcaggtgttgggggaggccagctctgggcgcaggcccctcagccctagtgaaaatagtgacatacaaaaatatacacattttaacaccatataaattactgacacgagacacacagtgagacggtgcagggagtacggtaggaactggagaggtaataacttaggggcagggtggcggcggtgcaggctaaccctccctgaagccagcagccttagcagtgggggacatctgcccagggggtggggccgggcacagcccgctgtacctgaggactcggggaaataaattagcatctcagaggctagaaaccgtccaatactgctgtgtccttcccaagggagctggggaggggaccctgggtcctggttggccacacagcctctttaaagtgctgaagcccacagacagacagatgcccctgcctgctctctggggaacctacgtgcagccattctgcctggccctcggccttgacagcggcagaaagtaatactgagcggtgtccactccgactccacggcc

SEQ ID NO: 8623 - protein, 1775 aa, Homo sapiens; identical to SEQ ID NO: 8619

SEQ ID NO: 8624 - DNA, 3689 bp, Homo sapiens
ttgcatgacctcatcgtctgcccgtgtcctccctggccagcccagggggagccggtgacgaggggtggaaaggttgcattctgtccccaggccccgtatgagcacgggctggttgcacgcatccccaggccccctcggggtgccgctccgagagagccaggcgtgccgggcagcagcctccccaggctgtccccaagggccgcagtgtgggttgggggagacaccactcctggttttggccttttcgtattctctagaatggacgtttttcttcgggctttcttctcaacaaggtttattttttgttgtagctgaaagggaacaaggggcatttgtggagggtgctggggtggggcagcctgggagggcctgggtgggggctaggatcctgcagggcatgggcatgggcctgggccccaggccatggtcttagttctccccgcagtgtctgggtgcaggtgtgggctctcgggctctcggctgtcacctgcctgtgggtcatcgctgctggcactggcagaggggatacctgtctcctcctggaagcccgttgcaggccaaggggtcccatggccctcagtccatccacctcctcacctcaggccggcctctgctgggtgggacttggccaggggttggggtggtagaggtgctcggtgaggcttaaagccattttctagcacattctgtatcatgagcaaaatattgcctaggggctatgaaatttgtatcagaatgaactcccataagcctcttccctgtcactgggtgtggagctcaggcagccgctcgcctgcctgagggtgacggtggaaggccacatggggatcccagacctctgtgtgcttgccggaggcagcctgcgggcagaatgcaatctgggcctgtctgtgtggcctccgcctctctgcatgactacaccgtttcgccaggaggccgtaacctagtgctcccgtgggcttcggtgagggggatgtcggtctctagcctcctgagtctgctccgaccagtaggcctggtcttccccacccagcgtctccccgttctctgggacaatgtggtccacgtgattctcaagctgaggctcgctgggccgcccacgccctgttggggtctttccgagcgaggtcctcagccgtgcatgcgttgagctttggcccttggtgataggtggctcggcccgccctacctggcaccctgaccctggtcacggcctctccctccagcaggatacagacgtccctcaccagtgccagcttggggtctgcagatgagaactccgtggcccaggctgacgatagcctgaaaaacctccacctggagctcacggaaacctgtctggacatgatggctcgatacgtcttctccaacttcacggctgtcccgaagaggtctcctgtgggcgagttcctcctagcgggtggcaggaccaaaacctggctggttgggaacaagcttgtcactgtgacgacaagcgtgggaaccgggacccggtcgttactaggcctggactcgggggagctgcagtccggcccggagtcgagctccagccccggggtgcatgtgagacagaccaaggaggcgccggccaagctggagtcccaggctgggcagcaggtgtcccgtggggcccgggatcgggtccgttccatgtcggggggccatggtcttcgagttggcgccctggacgtgccggcctcccagttcctgggcagtgccacttctccaggaccacggactgcaccagccgcgaaacctgagaaggcctcagctggcacccgggttcctgtgcaggagaagacgaacctggcggcctatgtgcccctgctgacccagggctgggcggagatcctggtccggaggcccacagggaacaccagctggctgatgagcctggagaacccgctcagccctttctcctcggacatcaacaacatgcccctgcaggagctgtctaacgccctcatggcggctgagcgcttcaaggagcaccgggacacagccctgtacaagtcactgtcggtgccggcagccagcacggccaaaccccctcctctgcctcgctccaacacagactccgccgtggtcatggaggagggaagtccgggcgaggttcctgtgctggtggagcccccagggttggaggacgttgaggcagcgctaggcatggacaggcgcacggatgcctacagcaggtcgtcctcagtctccagccaggaggagaagtcgctccacgcggaggagctggttggcaggggcatccccatcgagcgagtcgtctcctcggagggtggccggccctctgtggacctctccttccagccctcgcagcccctgagcaagtccagctcctctcccgagctgcagactctgcaggacatcctcggggaccctggggacaaggccgacgtgggccggctgagccctgaggttaaggcccggtcacagtcagggaccctggacggggaaagtgctgcctggtcggcctcgggcgaagacagtcggggccagcccgagggtcccttgccttccagctccccccgctcgcccagtggcctccggccccgaggttacaccatctccgactcggccccatcacgcaggggcaagagagtagagagggacgccttaaagagcagagccacagcctccaatgcagagaaagtgccaggcatcaaccccagtttcgtgttcctgcagctctaccattcccccttctttggcgacgagtcaaacaagccaatcctgctgcccaatgagtcacagtcctttgagcggtcggtgcagctcctcgaccagatcccatcatacgacacccacaagatcgccgtcctgtatgttggagaaggccagagcaacagcgagctcgccatcctgtccaatgagcatggctcctacaggtacacggagttcctgacgggcctgggccggctcatcgagctgaaggactgccagccggacaaggtgtacctgggaggcctggacgtgtgtggtgaggacggccagttcacctactgctggcacgatgacatcatgcaaggacgtggacaagcaccgctgcgacaagaagcgccacctgggcaacgactttgtgtccattgtctacaatgactccggtgaggacttcaagcttggcaccatcaagggccagttcaactttgtccacgtgatcgtcaccccgctggactacgagtgcaacctggtgtccctgcagtgcaggaaagacatggagggccttgtggacaccagcgtggccaagatcgtgtctgaccgcaacctgcccttcgtggcccgccagatggccctgcacgcaaatatggcctcacaggtgcatcatagccgctccaaccccaccgatatctacccctccaagtggattgcccggctccgccacatcaagcggctccgccagcggatctgcgaggaagccgcctactccaaccccagcctacctctggtgcaccctccgtcccatagcaaagcccctgcacagactccagccgagcccacacctggctatgaggtgggccagcggaagcgcctcatctcctcggtggaggacttcaccgagtttgtgtgaggccggggccctccctcctgcactggccttggacggtattgcctgtcagtgaaataaataaagtcctgaccccagtgcacagacatagaggcacagattgcagtcagac

SEQ ID NO: 8625 - protein, 588 aa, Homo sapiens
MMARYVFSNFTAVPKRSPVGEFLLAGGRTKTWLVGNKLVTVTTSVGTGTRSLLGLDSGELQSGPESSSSPGVHVRQTKEAPAKLESQAGQQVSRGARDRVRSMSGGHGLRVGALDVPASQFLGSATSPGPRTAPAAKPEKASAGTRVPVQEKTNLAAYVPLLTQGWAEILVRRPTGNTSWLMSLENPLSPFSSDINNMPLQELSNALMAAERFKEHRDTALYKSLSVPAASTAKPPPLPRSNTDSAVVMEEGSPGEVPVLVEPPGLEDVEAALGMDRRTDAYSRSSSVSSQEEKSLHAEELVGRGIPIERVVSSEGGRPSVDLSFQPSQPLSKSSSSPELQTLQDILGDPGDKADVGRLSPEVKARSQSGTLDGESAAWSASGEDSRGQPEGPLPSSSPRSPSGLRPRGYTISDSAPSRRGKRVERDALKSRATASNAEKVPGINPSFVFLQLYHSPFFGDESNKPILLPNESQSFERSVQLLDQIPSYDTHKIAVLYVGEGQSNSELAILSNEHGSYRYTEFLTGLGRLIELKDCQPDKVYLGGLDVCGEDGQFTYCWHDDIMQGRGQAPLRQEAPPGQRLCVHCLQ

SEQ ID NO: 8626 - DNA, 4675 bp, Homo sapiens
ttgcatgacctcatcgtctgcccgtgtcctccctggccagcccagggggagccggtgacgaggggtggaaaggttgcattctgtccccaggccccgtatgagcacgggctggttgcacgcatccccaggccccctcggggtgccgctccgagagagccaggcgtgccgggcagcagcctccccaggctgtccccaagggccgcagtgtgggttgggggagacaccactcctggttttggccttttcgtattctctagaatggacgtttttcttcgggctttcttctcaacaaggtttattttttgttgtagctgaaagggaacaaggggcatttgtggagggtgctggggtggggcagcctgggagggcctgggtgggggctaggatcctgcagggcatgggcatgggcctgggccccaggccatggtcttagttctccccgcagtgtctgggtgcaggtgtgggctctcgggctctcggctgtcacctgcctgtgggtcatcgctgctggcactggcagaggggatacctgtctcctcctggaagcccgttgcaggccaaggggtcccatggccctcagtccatccacctcctcacctcaggccggcctctgctgggtgggacttggccaggggttggggtggtagaggtgctcggtgaggcttaaagccattttctagcacattctgtatcatgagcaaaatattgcctaggggctatgaaatttgtatcagaatgaactcccataagcctcttccctgtcactgggtgtggagctcaggcagccgctcgcctgcctgagggtgacggtggaaggccacatggggatcccagacctctgtgtgcttgccggaggcagcctgcgggcagaatgcaatctgggcctgtctgtgtggcctccgcctctctgcatgactacaccgtttcgccaggaggccgtaacctagtgctcccgtgggcttcggtgagggggatgtcggtctctagcctcctgagtctgctccgaccagtaggcctggtcttccccacccagcgtctccccgttctctgggacaatgtggtccacgtgattctcaagctgaggctcgctgggccgcccacgccctgttggggtctttccgagcgaggtcctcagccgtgcatgcgttgagctttggcccttggtgataggtggctcggcccgccctacctggcaccctgaccctggtcacggcctctccctccagcaggatacagacgtccctcaccagtgccagcttggggtctgcagatgagaactccgtggcccaggctgacgatagcctgaaaaacctccacctggagctcacggaaacctgtctggacatgatggctcgatacgtcttctccaacttcacggctgtcccgaagaggtctcctgtgggcgagttcctcctagcgggtggcaggaccaaaacctggctggttgggaacaagcttgtcactgtgacgacaagcgtgggaaccgggacccggtcgttactaggcctggactcgggggagctgcagtccggcccggagtcgagctccagccccggggtgcatgtgagacagaccaaggaggcgccggccaagctggagtcccaggctgggcagcaggtgtcccgtggggcccgggatcgggtccgttccatgtcggggggccatggtcttcgagttggcgccctggacgtgccggcctcccagttcctgggcagtgccacttctccaggaccacggactgcaccagccgcgaaacctgagaaggcctcagctggcacccgggttcctgtgcaggagaagacgaacctggcggcctatgtgcccctgctgacccagggctgggcggagatcctggtccggaggcccacagggaacaccagctggctgatgagcctggagaacccgctcagccctttctcctcggacatcaacaacatgcccctgcaggagctgtctaacgccctcatggcggctgagcgcttcaaggagcaccgggacacagccctgtacaagtcactgtcggtgccggcagccagcacggccaaaccccctcctctgcctcgctccaacacagactccgccgtggtcatggaggagggaagtccgggcgaggttcctgtgctggtggagcccccagggttggaggacgttgaggcagcgctaggcatggacaggcgcacggatgcctacagcaggtcgtcctcagtctccagccaggaggagaagtcgctccacgcggaggagctggttggcaggggcatccccatcgagcgagtcgtctcctcggagggtggccggccctctgtggacctctccttccagccctcgcagcccctgagcaagtccagctcctctcccgagctgcagactctgcaggacatcctcggggaccctggggacaaggccgacgtgggccggctgagccctgaggttaaggcccggtcacagtcagggaccctggacggggaaagtgctgcctggtcggcctcgggcgaagacagtcggggccagcccgagggtcccttgccttccagctccccccgctcgcccagtggcctccggccccgaggttacaccatctccgactcggccccatcacgcaggggcaagagagtagagagggacgccttaaagagcagagccacagcctccaatgcagagaaagtgccaggcatcaaccccagtttcgtgttcctgcagctctaccattcccccttctttggcgacgagtcaaacaagccaatcctgctgcccaatgagtcacagtcctttgagcggtcggtgcagctcctcgaccagatcccatcatacgacacccacaagatcgccgtcctgtatgttggagaaggccagagcaacagcgagctcgccatcctgtccaatgagcatggctcctacaggtacacggagttcctgacgggcctgggccggctcatcgagctgaaggactgccagccggacaaggtgtacctgggaggcctggacgtgtgtggtgaggacggccagttcacctactgctggcacgatgacatcatgcaaggacgtggacaagcaccgctgcgacaagaagcgccacctgggcaacgactttgtgtccattgtctacaatgactccggtgaggacttcaagcttggcaccatcaagggccagttcaactttgtccacgtgatcgtcaccccgctggactacgagtgcaacctggtgtccctgcagtgcaggaaagacatggagggccttgtggacaccagcgtggccaagatcgtgtctgaccgcaacctgcccttcgtggcccgccagatggccctgcacgcaaatatggcctcacaggtgcatcatagccgctccaaccccaccgatatctacccctccaagtggattgcccggctccgccacatcaagcggctccgccagcggatctgcgaggaagccgcctactccaaccccagcctacctctggtgcaccctccgtcccatagcaaagcccctgcacagactccagccgagcccacacctggctatgaggtgggccagcggaagcgcctcatctcctcggtggaggacttcaccgagtttgtgtgaggccggggccctccctcctgcactggccttggacggtattgcctgtcagtgaaataaataaagtcctgaccccagtgcacagacatagaggcacagattgcagtcagacagctcttttattgactttgtctgcttggtgcgggggttgggggggtgtcgaggctctagaagcggccatgcccacagaagtggtacacagaagcaggcacagccagctccgagggccttgaggctgcctgggccatacagcacactcgcgcgtgcgcgcgcgcacacacacacacacacagtcaccttcctccaccctgggagccagcccccaggaggagtcttttcctctaaccaccctggggtcctctgacatgcctagtcctgctacttgcccagacctgatgccagcaggcctgggcgctgctctcttgctacctggcctggggcaagggaggatgacaaggcctctggggtgatgagagtgcctggcagacagctgtgcccccagcaccggcccaaggccaagctcgcatccaagcagcagccgggctgccataacgccaccacacctaccaagcgcagcaggtgttgggggaggccagctctgggcgcaggcccctcagccctagtgaaaatagtgacatacaaaaatatacacattttaacaccatataaattactgacacgagacacacagtgagacggtgcagggagtacggtaggaactggagaggtaataacttaggggcagggtggcggcggtgcaggctaaccctccctgaagccagcagccttagcagtgggggacatctgcccagggggtggggccgggcacagcccgctgtacctgaggactcggggaaataaattagcatctcagaggctagaaaccgtccaatactgctgtgtccttcccaagggagctggggaggggaccctgggtcctggttggccacacagcctctttaaagtgctgaagcccacagacagacagatgcccctgcctgctctctggggaacctacgtgcagccattctgcctggccctcggccttgacagcggcagaaagtaatactgagcggtgtccactccgactccacggcc

SEQ ID NO: 8627 - protein, 588 aa, Homo sapiens; identical to SEQ ID NO: 8625

SEQ ID NO: 8628 - DNA, 3169 bp, Homo sapiens
tgcttctcgccaggccctctggctcttccctgtggctgcagatggcacttagcggcctaggacgtctattcacgggaggagggaggcactgccctcctcaggtctgcccaagcagcttgtagctagcactgggccccgtgcgcgcccctgccggccgctggccctgccctctctcctctgcaggcacggggcctgtgctctctgctcgacctgtgtgtagcccctcctcctgctgacgtggccgcacacggccttcccttgcagtggcctctttctcctccctgtaccagtccagctgccaaggacagctgcacaggagcgtttcctgggcaggtatcgcctctcagagggaagcggttggctgcagagcgccactctgcctcataggtgctgtgctcgtcgcctcatccgcccacccccatggtccgtctgcctccattgccctggggagcaggtcccgactcgcatgaggacgtctgtgcagaatgtctttggcttggccagcgggatccccttgacttggtccctttgtggctgagccctgttcccacgctgtgcgagcactcccggcccagcttcaggcctgaggggtgggggtggcctgagtctccatggtgacatcagctgagctgcagactctgatgggtggcagctgtttagggggaagcccacccctgggcctgcaccgagcgggccttgccctggcctttggtggctcccctggcctctggaacccacagatggggctgcctcaagtcccaggttgaccaggggccctgcagaccgacctctgcctgttgcccccaagccctggtggggagtgctgtgacctgcatggtgctcccctgccaggtctccacgtgcagacgagctggtttggaagggctgcgtgggacgggccctggggtggctgactgcgcgtgtgcagggctgtggggcgcccgggggctgtgatggtcccctctgttgctgcttctacttcctctccccctgtcctgacgctggcacaggaaatgctgctttgggacctcccaccctctctccttagcgtccccagctgtgggtctggcttggagttggagggtgagcctctgctcttgggagcagtctgtttgcaaacagggacttcccccacgtcacggagtctccgcagctctcctcggttacgagggctggtttcaggctcccgctcttttagagctgaggcccgtcgggcggagagcgtcttgcccctgcctacctggaggcacaggggtggctgctggtggacactagggtgggcagagccgattgcctgcccaacccccgggcactcatgcaggagaggcctgtgtcggggtcacgtgcaggccttcccagcgtcctccctgcccgctcggtggatggcagcagtaagcagagccctggggaggctcgcagggctgctgtccctctggtcaggagaaggctggttctcggaggccacgtcagggccagggcctggcccagccccacatccagcagccccgtctgtgtcctcccagactccgccgtggtcatggaggagggaagtccgggcgaggttcctgtgctggtggagcccccagggttggaggacgttgaggcagcgctaggcatggacaggcgcacggatgcctacagcaggtcgtcctcagtctccagccaggaggagaagtcgctccacgcggaggagctggttggcaggggcatccccatcgagcgagtcgtctcctcggagggtggccggccctctgtggacctctccttccagccctcgcagcccctgagcaagtccagctcctctcccgagctgcagactctgcaggacatcctcggggaccctggggacaaggccgacgtgggccggctgagccctgaggttaaggcccggtcacagtcagggaccctggacggggaaagtgctgcctggtcggcctcgggcgaagacagtcggggccagcccgagggtcccttgccttccagctccccccgctcgcccagtggcctccggccccgaggttacaccatctccgactcggccccatcacgcaggggcaagagagtagagagggacgccttaaagagcagagccacagcctccaatgcagagaaagtgccaggcatcaaccccagtttcgtgttcctgcagctctaccattcccccttctttggcgacgagtcaaacaagccaatcctgctgcccaatgagtcacagtcctttgagcggtcggtgcagctcctcgaccagatcccatcatacgacacccacaagatcgccgtcctgtatgttggagaaggccagagcaacagcgagctcgccatcctgtccaatgagcatggctcctacaggtacacggagttcctgacgggcctgggccggctcatcgagctgaaggactgccagccggacaaggtgtacctgggaggcctggacgtgtgtggtgaggacggccagttcacctactgctggcacgatgacatcatgcaagccgtcttccacatcgccaccctgatgcccaccaaggacgtggacaagcaccgctgcgacaagaagcgccacctgggcaacgactttgtgtccattgtctacaatgactccggtgaggacttcaagcttggcaccatcaagggccagttcaactttgtccacgtgatcgtcaccccgctggactacgagtgcaacctggtgtccctgcagtgcaggaaagacatggagggccttgtggacaccagcgtggccaagatcgtgtctgaccgcaacctgcccttcgtggcccgccagatggccctgcacgcaaatatggcctcacaggtgcatcatagccgctccaaccccaccgatatctacccctccaagtggattgcccggctccgccacatcaagcggctccgccagcggatctgcgaggaagccgcctactccaaccccagcctacctctggtgcaccctccgtcccatagcaaagcccctgcacagactccagccgagcccacacctggctatgaggtgggccagcggaagcgcctcatctcctcggtggaggacttcaccgagtttgtgtgaggccggggccctccctcctgcactggccttggacggtattgcctgtcagtgaaataaataaagtcctgaccccagtgcacagacatagaggcacagattgcagtc

SEQ ID NO: 8629 - protein, 582 aa, Homo sapiens
MQERPVSGSRAGLPSVLPARSVDGSSKQSPGEARRAAVPLVRRRLVLGGHVRARAWPSPTSSSPVCVLPDSAVVMEEGSPGEVPVLVEPPGLEDVEAALGMDRRTDAYSRSSSVSSQEEKSLHAEELVGRGIPIERVVSSEGGRPSVDLSFQPSQPLSKSSSSPELQTLQDILGDPGDKADVGRLSPEVKARSQSGTLDGESAAWSASGEDSRGQPEGPLPSSSPRSPSGLRPRGYTISDSAPSRRGKRVERDALKSRATASNAEKVPGINPSFVFLQLYHSPFFGDESNKPILLPNESQSFERSVQLLDQIPSYDTHKIAVLYVGEGQSNSELAILSNEHGSYRYTEFLTGLGRLIELKDCQPDKVYLGGLDVCGEDGQFTYCWHDDIMQAVFHIATLMPTKDVDKHRCDKKRHLGNDFVSIVYNDSGEDFKLGTIKGQFNFVHVIVTPLDYECNLVSLQCRKDMEGLVDTSVAKIVSDRNLPFVARQMALHANMASQVHHSRSNPTDIYPSKWIARLRHIKRLRQRICEEAAYSNPSLPLVHPPSHSKAPAQTPAEPTPGYEVGQRKRLISSVEDFTEFV

SEQ ID NO: 8630 - DNA, 4159 bp, Homo sapiens
tgcttctcgccaggccctctggctcttccctgtggctgcagatggcacttagcggcctaggacgtctattcacgggaggagggaggcactgccctcctcaggtctgcccaagcagcttgtagctagcactgggccccgtgcgcgcccctgccggccgctggccctgccctctctcctctgcaggcacggggcctgtgctctctgctcgacctgtgtgtagcccctcctcctgctgacgtggccgcacacggccttcccttgcagtggcctctttctcctccctgtaccagtccagctgccaaggacagctgcacaggagcgtttcctgggcaggtatcgcctctcagagggaagcggttggctgcagagcgccactctgcctcataggtgctgtgctcgtcgcctcatccgcccacccccatggtccgtctgcctccattgccctggggagcaggtcccgactcgcatgaggacgtctgtgcagaatgtctttggcttggccagcgggatccccttgacttggtccctttgtggctgagccctgttcccacgctgtgcgagcactcccggcccagcttcaggcctgaggggtgggggtggcctgagtctccatggtgacatcagctgagctgcagactctgatgggtggcagctgtttagggggaagcccacccctgggcctgcaccgagcgggccttgccctggcctttggtggctcccctggcctctggaacccacagatggggctgcctcaagtcccaggttgaccaggggccctgcagaccgacctctgcctgttgcccccaagccctggtggggagtgctgtgacctgcatggtgctcccctgccaggtctccacgtgcagacgagctggtttggaagggctgcgtgggacgggccctggggtggctgactgcgcgtgtgcagggctgtggggcgcccgggggctgtgatggtcccctctgttgctgcttctacttcctctccccctgtcctgacgctggcacaggaaatgctgctttgggacctcccaccctctctccttagcgtccccagctgtgggtctggcttggagttggagggtgagcctctgctcttgggagcagtctgtttgcaaacagggacttcccccacgtcacggagtctccgcagctctcctcggttacgagggctggtttcaggctcccgctcttttagagctgaggcccgtcgggcggagagcgtcttgcccctgcctacctggaggcacaggggtggctgctggtggacactagggtgggcagagccgattgcctgcccaacccccgggcactcatgcaggagaggcctgtgtcggggtcacgtgcaggccttcccagcgtcctccctgcccgctcggtggatggcagcagtaagcagagccctggggaggctcgcagggctgctgtccctctggtcaggagaaggctggttctcggaggccacgtcagggccagggcctggcccagccccacatccagcagccccgtctgtgtcctcccagactccgccgtggtcatggaggagggaagtccgggcgaggttcctgtgctggtggagcccccagggttggaggacgttgaggcagcgctaggcatggacaggcgcacggatgcctacagcaggtcgtcctcagtctccagccaggaggagaagtcgctccacgcggaggagctggttggcaggggcatccccatcgagcgagtcgtctcctcggagggtggccggccctctgtggacctctccttccagccctcgcagcccctgagcaagtccagctcctctcccgagctgcagactctgcaggacatcctcggggaccctggggacaaggccgacgtgggccggctgagccctgaggttaaggcccggtcacagtcagggaccctggacggggaaagtgctgcctggtcggcctcgggcgaagacagtcggggccagcccgagggtcccttgccttccagctccccccgctcgcccagtggcctccggccccgaggttacaccatctccgactcggccccatcacgcaggggcaagagagtagagagggacgccttaaagagcagagccacagcctccaatgcagagaaagtgccaggcatcaaccccagtttcgtgttcctgcagctctaccattcccccttctttggcgacgagtcaaacaagccaatcctgctgcccaatgagtcacagtcctttgagcggtcggtgcagctcctcgaccagatcccatcatacgacacccacaagatcgccgtcctgtatgttggagaaggccagagcaacagcgagctcgccatcctgtccaatgagcatggctcctacaggtacacggagttcctgacgggcctgggccggctcatcgagctgaaggactgccagccggacaaggtgtacctgggaggcctggacgtgtgtggtgaggacggccagttcacctactgctggcacgatgacatcatgcaagccgtcttccacatcgccaccctgatgcccaccaaggacgtggacaagcaccgctgcgacaagaagcgccacctgggcaacgactttgtgtccattgtctacaatgactccggtgaggacttcaagcttggcaccatcaagggccagttcaactttgtccacgtgatcgtcaccccgctggactacgagtgcaacctggtgtccctgcagtgcaggaaagacatggagggccttgtggacaccagcgtggccaagatcgtgtctgaccgcaacctgcccttcgtggcccgccagatggccctgcacgcaaatatggcctcacaggtgcatcatagccgctccaaccccaccgatatctacccctccaagtggattgcccggctccgccacatcaagcggctccgccagcggatctgcgaggaagccgcctactccaaccccagcctacctctggtgcaccctccgtcccatagcaaagcccctgcacagactccagccgagcccacacctggctatgaggtgggccagcggaagcgcctcatctcctcggtggaggacttcaccgagtttgtgtgaggccggggccctccctcctgcactggccttggacggtattgcctgtcagtgaaataaataaagtcctgaccccagtgcacagacatagaggcacagattgcagtcagacagctcttttattgactttgtctgcttggtgcgggggttgggggggtgtcgaggctctagaagcggccatgcccacagaagtggtacacagaagcaggcacagccagctccgagggccttgaggctgcctgggccatacagcacactcgcgcgtgcgcgcgcgcacacacacacacacacagtcaccttcctccaccctgggagccagcccccaggaggagtcttttcctctaaccaccctggggtcctctgacatgcctagtcctgctacttgcccagacctgatgccagcaggcctgggcgctgctctcttgctacctggcctggggcaagggaggatgacaaggcctctggggtgatgagagtgcctggcagacagctgtgcccccagcaccggcccaaggccaagctcgcatccaagcagcagccgggctgccataacgccaccacacctaccaagcgcagcaggtgttgggggaggccagctctgggcgcaggcccctcagccctagtgaaaatagtgacatacaaaaatatacacattttaacaccatataaattactgacacgagacacacagtgagacggtgcagggagtacggtaggaactggagaggtaataacttaggggcagggtggcggcggtgcaggctaaccctccctgaagccagcagccttagcagtgggggacatctgcccagggggtggggccgggcacagcccgctgtacctgaggactcggggaaataaattagcatctcagaggctagaaaccgtccaatactgctgtgtccttcccaagggagctggggaggggaccctgggtcctggttggccacacagcctctttaaagtgctgaagcccacagacagacagatgcccctgcctgctctctggggaacctacgtgcagccattctgcctggccctcggccttgacagcggcagaaagtaatactgagcggtgtccactccgactccacggcc

SEQ ID NO: 8631 - protein, 582 aa, Homo sapiens; identical to SEQ ID NO: 8629

SEQ ID NO: 8632 - DNA, 637 bp, Homo sapiens
caggaaatgctgctttgggacctcccaccctctctccttagcgtccccagctgtgggtctggcttggagttggagggtgagcctctgctcttgggagcagtctgtttgcaaacagggacttcccccacgtcacggagtctccgcagctctcctcggttacgagggctggtttcaggctcccgctcttttagagctgaggcccgtcgggcggagagcgtcttgcccctgcctacctggaggcacaggggtggctgctggtggacactagggtgggcagagccgattgcctgcccaacccccgggcactcatgcaggagaggcctgtgtcggggtcacgtgcaggccttcccagcgtcctccctgcccgctcggtggatggcagcagtaagcagagccctggggaggctcgcagggctgctgtccctctggtcaggagaaggctggttctcggaggccacgtcagggccagggcctggcccagccccacatccagcagccccgtctgtgtcctcccagactccgccgtggtcatggaggagggaagtccgggcgaggttcctgtgctggtggagcccccagggttggaggacgttgaggcagcgtctaccattcccccttctttggcgacgagtcaaac

SEQ ID NO: 8633 - protein, 209 aa, Homo sapiens [sequence omitted]

SEQ ID NO: 8634 - DNA, 1711 bp, Homo sapiens
gctttgggacctcccaccctctctccttagcgtccccagctgtgggtctggcttggagttggaggactccgccgtggtcatggaggagggaagtccgggcgaggttcctgtgctggtggagcccccagggttggaggacgttgaggcagcgctaggcatggacaggcgcacggatgcctacagcaggtcgtcctcagtctccagccaggaggagaagtcgctccacgcggaggagctggttggcaggggcatccccatcgagcgagtcgtctcctcggagggtggccggccctctgtggacctctccttccagccctcgcagcccctgagcaagtccagctcctctcccgagctgcagactctgcaggacatcctcggggaccctggggacaaggccgacgtgggccggctgagccctgaggttaaggcccggtcacagtcagggaccctggacggggaaagtgctgcctggtcggcctcgggcgaagacagtcggggccagcccgagggtcccttgccttccagctccccccgctcgcccagtggcctccggccccgaggttacaccatctccgactcggccccatcacgcaggggcaagagagtagagagggacgccttaaagagcagagccacagcctccaatgcagagaaagtgccaggcatcaaccccagtttcgtgttcctgcagctctaccattcccccttctttggcgacgagtcaaacaagccaatcctgctgcccaatgagtcacagtcctttgagcggtcggtgcagctcctcgaccagatcccatcatacgacacccacaagatcgccgtcctgtatgttggagaaggccagagcaacagcgagctcgccatcctgtccaatgagcatggctcctacaggtacacggagttcctgacgggcctgggccggctcatcgagctgaaggactgccagccggacaaggtgtacctgggaggcctggacgtgtgtggtgaggacggccagttcacctactgctggcacgatgacatcatgcaagccgtcttccacatcgccaccctgatgcccaccaaggacgtggacaagcaccgctgcgacaagaagcgccacctgggcaacgactttgtgtccattgtctacaatgactccggtgaggacttcaagcttggcaccatcaagggccagttcaactttgtccacgtgatcgtcaccccgctggactacgagtgcaacctggtgtccctgcagtgcaggaaagacatggagggccttgtggacaccagcgtggccaagatcgtgtctgaccgcaacctgcccttcgtggcccgccagatggccctgcacgcaaatatggcctcacaggtgcatcatagccgctccaaccccaccgatatctacccctccaagtggattgcccggctccgccacatcaagcggctccgccagcggatctgcgaggaagccgcctactccaaccccagcctacctctggtgcaccctccgtcccatagcaaagcccctgcacagactccagccgagcccacacctggctatgaggtgggccagcggaagcgcctcatctcctcggtggaggacttcaccgagtttgtgtgaggccggggccctccctcctgcactggccttggacggtattgcctgtcagtgaaataaataaagtcctgaccccagtgcacagacatagaggcacagattgcagtc

SEQ ID NO: 8635 - protein, 508 aa, Homo sapiens
MEEGSPGEVPVLVEPPGLEDVEAALGMDRRTDAYSRSSSVSSQEEKSLHAEELVGRGIPIERVVSSEGGRPSVDLSFQPSQPLSKSSSSPELQTLQDILGDPGDKADVGRLSPEVKARSQSGTLDGESAAWSASGEDSRGQPEGPLPSSSPRSPSGLRPRGYTISDSAPSRRGKRVERDALKSRATASNAEKVPGINPSFVFLQLYHSPFFGDESNKPILLPNESQSFERSVQLLDQIPSYDTHKIAVLYVGEGQSNSELAILSNEHGSYRYTEFLTGLGRLIELKDCQPDKVYLGGLDVCGEDGQFTYCWHDDIMQAVFHIATLMPTKDVDKHRCDKKRHLGNDFVSIVYNDSGEDFKLGTIKGQFNFVHVIVTPLDYECNLVSLQCRKDMEGLVDTSVAKIVSDRNLPFVARQMALHANMASQVHHSRSNPTDIYPSKWIARLRHIKRLRQRICEEAAYSNPSLPLVHPPSHSKAPAQTPAEPTPGYEVGQRKRLISSVEDFTEFV

SEQ ID NO: 8636 - DNA, 2701 bp, Homo sapiens
gctttgggacctcccaccctctctccttagcgtccccagctgtgggtctggcttggagttggaggactccgccgtggtcatggaggagggaagtccgggcgaggttcctgtgctggtggagcccccagggttggaggacgttgaggcagcgctaggcatggacaggcgcacggatgcctacagcaggtcgtcctcagtctccagccaggaggagaagtcgctccacgcggaggagctggttggcaggggcatccccatcgagcgagtcgtctcctcggagggtggccggccctctgtggacctctccttccagccctcgcagcccctgagcaagtccagctcctctcccgagctgcagactctgcaggacatcctcggggaccctggggacaaggccgacgtgggccggctgagccctgaggttaaggcccggtcacagtcagggaccctggacggggaaagtgctgcctggtcggcctcgggcgaagacagtcggggccagcccgagggtcccttgccttccagctccccccgctcgcccagtggcctccggccccgaggttacaccatctccgactcggccccatcacgcaggggcaagagagtagagagggacgccttaaagagcagagccacagcctccaatgcagagaaagtgccaggcatcaaccccagtttcgtgttcctgcagctctaccattcccccttctttggcgacgagtcaaacaagccaatcctgctgcccaatgagtcacagtcctttgagcggtcggtgcagctcctcgaccagatcccatcatacgacacccacaagatcgccgtcctgtatgttggagaaggccagagcaacagcgagctcgccatcctgtccaatgagcatggctcctacaggtacacggagttcctgacgggcctgggccggctcatcgagctgaaggactgccagccggacaaggtgtacctgggaggcctggacgtgtgtggtgaggacggccagttcacctactgctggcacgatgacatcatgcaagccgtcttccacatcgccaccctgatgcccaccaaggacgtggacaagcaccgctgcgacaagaagcgccacctgggcaacgactttgtgtccattgtctacaatgactccggtgaggacttcaagcttggcaccatcaagggccagttcaactttgtccacgtgatcgtcaccccgctggactacgagtgcaacctggtgtccctgcagtgcaggaaagacatggagggccttgtggacaccagcgtggccaagatcgtgtctgaccgcaacctgcccttcgtggcccgccagatggccctgcacgcaaatatggcctcacaggtgcatcatagccgctccaaccccaccgatatctacccctccaagtggattgcccggctccgccacatcaagcggctccgccagcggatctgcgaggaagccgcctactccaaccccagcctacctctggtgcaccctccgtcccatagcaaagcccctgcacagactccagccgagcccacacctggctatgaggtgggccagcggaagcgcctcatctcctcggtggaggacttcaccgagtttgtgtgaggccggggccctccctcctgcactggccttggacggtattgcctgtcagtgaaataaataaagtcctgaccccagtgcacagacatagaggcacagattgcagtcagacagctcttttattgactttgtctgcttggtgcgggggttgggggggtgtcgaggctctagaagcggccatgcccacagaagtggtacacagaagcaggcacagccagctccgagggccttgaggctgcctgggccatacagcacactcgcgcgtgcgcgcgcgcacacacacacacacacagtcaccttcctccaccctgggagccagcccccaggaggagtcttttcctctaaccaccctggggtcctctgacatgcctagtcctgctacttgcccagacctgatgccagcaggcctgggcgctgctctcttgctacctggcctggggcaagggaggatgacaaggcctctggggtgatgagagtgcctggcagacagctgtgcccccagcaccggcccaaggccaagctcgcatccaagcagcagccgggctgccataacgccaccacacctaccaagcgcagcaggtgttgggggaggccagctctgggcgcaggcccctcagccctagtgaaaatagtgacatacaaaaatatacacattttaacaccatataaattactgacacgagacacacagtgagacggtgcagggagtacggtaggaactggagaggtaataacttaggggcagggtggcggcggtgcaggctaaccctccctgaagccagcagccttagcagtgggggacatctgcccagggggtggggccgggcacagcccgctgtacctgaggactcggggaaataaattagcatctcagaggctagaaaccgtccaatactgctgtgtccttcccaagggagctggggaggggaccctgggtcctggttggccacacagcctctttaaagtgctgaagcccacagacagacagatgcccctgcctgctctctggggaacctacgtgcagccattctgcctggccctcggccttgacagcggcagaaagtaatactgagcggtgtccactccgactccacggcc

SEQ ID NO: 8637 - protein, 508 aa, Homo sapiens; identical to SEQ ID NO: 8635

SEQ ID NO: 8638 - DNA, 478 bp, Homo sapiens
cctgcagtgcaggaaagacatggagggccttgtggacaccagcgtggccaagatcgtgtctgaccgcaacctgcccttcgtggcccgccagatggccctgcacgcaaatatggcctcacaggtgcatcatagccgctccaaccccaccgatatctacccctccaagtggattgcccggctccgccacatcaagcggctccgccagcggatctgcgaggaagccgcctactccaaccccagcctacctctggtgcaccctccgtcccatagcaaagcccctgcacagactccagccgagcccacacctggctatgaggtgggccagcggaagcgcctcatctcctcggtggaggacttcaccgagtttgtgtgaggccggggccctccctcctgcactggccttggacggtattgcctgtcagtgaaataaataaagtcctgaccccagtgcacagacatagaggcacagattgcagtc

SEQ ID NO: 8639 - protein, 117 aa, Homo sapiens
MEGLVDTSVAKIVSDRNLPFVARQMALHANMASQVHHSRSNPTDIYPSKWIARLRHIKRLRQRICEEAAYSNPSLPLVHPPSHSKAPAQTPAEPTPGYEVGQRKRLISSVEDFTEFV

SEQ ID NO: 8640 - DNA, 1468 bp, Homo sapiens
cctgcagtgcaggaaagacatggagggccttgtggacaccagcgtggccaagatcgtgtctgaccgcaacctgcccttcgtggcccgccagatggccctgcacgcaaatatggcctcacaggtgcatcatagccgctccaaccccaccgatatctacccctccaagtggattgcccggctccgccacatcaagcggctccgccagcggatctgcgaggaagccgcctactccaaccccagcctacctctggtgcaccctccgtcccatagcaaagcccctgcacagactccagccgagcccacacctggctatgaggtgggccagcggaagcgcctcatctcctcggtggaggacttcaccgagtttgtgtgaggccggggccctccctcctgcactggccttggacggtattgcctgtcagtgaaataaataaagtcctgaccccagtgcacagacatagaggcacagattgcagtcagacagctcttttattgactttgtctgcttggtgcgggggttgggggggtgtcgaggctctagaagcggccatgcccacagaagtggtacacagaagcaggcacagccagctccgagggccttgaggctgcctgggccatacagcacactcgcgcgtgcgcgcgcgcacacacacacacacacagtcaccttcctccaccctgggagccagcccccaggaggagtcttttcctctaaccaccctggggtcctctgacatgcctagtcctgctacttgcccagacctgatgccagcaggcctgggcgctgctctcttgctacctggcctggggcaagggaggatgacaaggcctctggggtgatgagagtgcctggcagacagctgtgcccccagcaccggcccaaggccaagctcgcatccaagcagcagccgggctgccataacgccaccacacctaccaagcgcagcaggtgttgggggaggccagctctgggcgcaggcccctcagccctagtgaaaatagtgacatacaaaaatatacacattttaacaccatataaattactgacacgagacacacagtgagacggtgcagggagtacggtaggaactggagaggtaataacttaggggcagggtggcggcggtgcaggctaaccctccctgaagccagcagccttagcagtgggggacatctgcccagggggtggggccgggcacagcccgctgtacctgaggactcggggaaataaattagcatctcagaggctagaaaccgtccaatactgctgtgtccttcccaagggagctggggaggggaccctgggtcctggttggccacacagcctctttaaagtgctgaagcccacagacagacagatgcccctgcctgctctctggggaacctacgtgcagccattctgcctggccctcggccttgacagcggcagaaagtaatactgagcggtgtccactccgactccacggcc

SEQ ID NO: 8641 - protein, 117 aa, Homo sapiens; identical to SEQ ID NO: 8639

SEQ ID NO: 8642 - DNA, 14403 bp, Homo sapiens
gcactgcagcgccagcgtccgagcgggcggccgagctcccggagcggcctggccccgagccccgagcgggcgtcgctcagcagcaggtcgcggccgcagccccatccagccccgcgcccgccatgccgtccgcgggccccgcctgagctgcggcctccgcgcgcgggcgggcctggggacggcggggccatgcgcgcgctgccctaacgatgccgcccgccgcgcccgcccgcctggcgctggccctgggcctgggcctgtggctcggggcgctggcggggggccccgggcgcggctgcgggccctgcgagcccccctgcctctgcggcccagcgcccggcgccgcctgccgcgtcaactgctcgggccgcgggctgcggacgctcggtcccgcgctgcgcatccccgcggacgccacagcgctagacgtctcccacaacctgctccgggcgctggacgttgggctcctggcgaacctctcggcgctggcagagctggatataagcaacaacaagatttctacgttagaagaaggaatatttgctaatttatttaatttaagtgaaataaacctgagtgggaacccgtttgagtgtgactgtggcctggcgtggctgccgcgatgggcggaggagcagcaggtgcgggtggtgcagcccgaggcagccacgtgtgctgggcctggctccctggctggccagcctctgcttggcatccccttgctggacagtggctgtggtgaggagtatgtcgcctgcctccctgacaacagctcaggcaccgtggcagcagtgtccttttcagctgcccacgaaggcctgcttcagccagaggcctgcagcgccttctgcttctccaccggccagggcctcgcagccctctcggagcagggctggtgcctgtgtggggcggcccagccctccagtgcctcctttgcctgcctgtccctctgctccggccccccgccacctcctgcccccacctgtaggggccccaccctcctccagcacgtcttccctgcctccccaggggccaccctggtggggccccacggacctctggcctctggccagctagcagccttccacatcgctgccccgctccctgtcactgccacacgctgggacttcggagacggctccgccgaggtggatgccgctgggccggctgcctcgcatcgctatgtgctgcctgggcgctatcacgtgacggccgtgctggccctgggggccggctcagccctgctggggacagacgtgcaggtggaagcggcacctgccgccctggagctcgtgtgcccgtcctcggtgcagagtgacgagagcctcgacctcagcatccagaaccgcggtggttcaggcctggaggccgcctacagcatcgtggccctgggcgaggagccggcccgagcggtgcacccgctctgcccctcggacacggagatcttccctggcaacgggcactgctaccgcctggtggtggagaaggcggcctggctgcaggcgcaggagcagtgtcaggcctgggccggggccgccctggcaatggtggacagtcccgccgtgcagcgcttcctggtctcccgggtcaccaggagcctagacgtgtggatcggcttctcgactgtgcagggggtggaggtgggcccagcgccgcagggcgaggccttcagcctggagagctgccagaactggctgcccggggagccacacccagccacagccgagcactgcgtccggctcgggcccaccgggtggtgtaacaccgacctgtgctcagcgccgcacagctacgtctgcgagctgcagcccggaggcccagtgcaggatgccgagaacctcctcgtgggagcgcccagtggggacctgcagggacccctgacgcctctggcacagcaggacggcctctcagccccgcacgagcccgtggaggtcatggtattcccgggcctgcgtctgagccgtgaagccttcctcaccacggccgaatttgggacccaggagctccggcggcccgcccagctgcggctgcaggtgtaccggctcctcagcacagcagggaccccggagaacggcagcgagcctgagagcaggtccccggacaacaggacccagctggcccccgcgtgcatgccagggggacgctggtgccctggagccaacatctgcttgccgctggacgcctcctgccacccccaggcctgcgccaatggctgcacgtcagggccagggctacccggggccccctatgcgctatggagagagttcctcttctccgttcccgcggggccccccgcgcagtactcggtcaccctccacggccaggatgtcctcatgctccctggtgacctcgttggcttgcagcacgacgctggccctggcgccctcctgcactgctcgccggctcccggccaccctggtccccgggccccgtacctctccgccaacgcctcgtcatggctgccccacttgccagcccagctggagggcacttgggcctgccctgcctgtgccctgcggctgcttgcagccacggaacagctcaccgtgctgctgggcttgaggcccaaccctggactgcggctgcctgggcgctatgaggtccgggcagaggtgggcaatggcgtgtccaggcacaacctctcctgcagctttgacgtggtctccccagtggctgggctgcgggtcatctaccctgccccccgcgacggccgcctctacgtgcccaccaacggctcagccttggtgctccaggtggactctggtgccaacgccacggccacggctcgctggcctgggggcagtgtcagcgcccgctttgagaatgtctgccctgccctggtggccaccttcgtgcccggctgcccctgggagaccaacgataccctgttctcagtggtagcactgccgtggctcagtgagggggagcacgtggtggacgtggtggtggaaaacagcgccagccgggccaacctcagcctgcgggtgacggcggaggagcccatctgtggcctccgcgccacgcccagccccgaggcccgtgtactgcagggagtcctagtgaggtacagccccgtggtggaggccggctcggacatggtcttccggtggaccatcaacgacaagcagtccctgaccttccagaacgtggtcttcaatgtcatttatcagagcgcggcggtcttcaagctctcactgacggcctccaaccacgtgagcaacgtcaccgtgaactacaacgtaaccgtggagcggatgaacaggatgcagggtctgcaggtctccacagtgccggccgtgctgtcccccaatgccacgctagcactgacggcgggcgtgctggtggactcggccgtggaggtggccttcctgtggacctttggggatggggagcaggccctccaccagttccagcctccgtacaacgagtccttcccggttccagacccctcggtggcccaggtgctggtggagcacaatgtcatgcacacctacgctgccccaggtgagtacctcctgaccgtgctggcatctaatgccttcgagaacctgacgcagcaggtgcctgtgagcgtgcgcgcctccctgccctccgtggctgtgggtgtgagtgacggcgtcctggtggccggccggcccgtcaccttctacccgcacccgctgccctcgcctgggggtgttctttacacgtgggacttcggggacggctcccctgtcctgacccagagccagccggctgccaaccacacctatgcctcgaggggcacctaccacgtgcgcctggaggtcaacaacacggtgagcggtgcggcggcccaggcggatgtgcgcgtctttgaggagctccgcggactcagcgtggacatgagcctggccgtggagcagggcgcccccgtggtggtcagcgccgcggtgcagacgggcgacaacatcacgtggaccttcgacatgggggacggcaccgtgctgtcgggcccggaggcaacagtggagcatgtgtacctgcgggcacagaactgcacagtgaccgtgggtgcggccagccccgccggccacctggcccggagcctgcacgtgctggtcttcgtcctggaggtgctgcgcgttgaacccgccgcctgcatccccacgcagcctgacgcgcggctcacggcctacgtcaccgggaacccggcccactacctcttcgactggaccttcggggatggctcctccaacacgaccgtgcgggggtgcccgacggtgacacacaacttcacgcggagcggcacgttccccctggcgctggtgctgtccagccgcgtgaacagggcgcattacttcaccagcatctgcgtggagccagaggtgggcaacgtcaccctgcagccagagaggcagtttgtgcagctcggggacgaggcctggctggtggcatgtgcctggcccccgttcccctaccgctacacctgggactttggcaccgaggaagccgcccccacccgtgccaggggccctgaggtgacgttcatctaccgagacccaggctcctatcttgtgacagtcaccgcgtccaacaacatctctgctgccaatgactcagccctggtggaggtgcaggagcccgtgctggtcaccagcatcaaggtcaatggctcccttgggctggagctgcagcagccgtacctgttctctgctgtgggccgtgggcgccccgccagctacctgtgggatctgggggacggtgggtggctcgagggtccggaggtcacccacgcttacaacagcacaggtgacttcaccgttagggtggccggctggaatgaggtgagccgcagcgaggcctggctcaatgtgacggtgaagcggcgcgtgcgggggctcgtcgtcaatgcaagccgcacggtggtgcccctgaatgggagcgtgagcttcagcacgtcgctggaggccggcagtgatgtgcgctattcctgggtgctctgtgaccgctgcacgcccatccctgggggtcctaccatctcttacaccttccgctccgtgggcaccttcaatatcatcgtcacggctgagaacgaggtgggctccgcccaggacagcatcttcgtctatgtcctgcagctcatagaggggctgcaggtggtgggcggtggccgctacttccccaccaaccacacggtacagctgcaggccgtggttagggatggcaccaacgtctcctacagctggactgcctggagggacaggggcccggccctggccggcagcggcaaaggcttctcgctcaccgtgctcgaggccggcacctaccatgtgcagctgcgggccaccaacatgctgggcagcgcctgggccgactgcaccatggacttcgtggagcctgtggggtggctgatggtggccgcctccccgaacccagctgccgtcaacacaagcgtcaccctcagtgccgagctggctggtggcagtggtgtcgtatacacttggtccttggaggaggggctgagctgggagacctccgagccatttaccacccatagcttccccacacccggcctgcacttggtcaccatgacggcagggaacccgctgggctcagccaacgccaccgtggaagtggatgtgcaggtgcctgtgagtggcctcagcatcagggccagcgagcccggaggcagcttcgtggcggccgggtcctctgtgcccttttgggggcagctggccacgggcaccaatgtgagctggtgctgggctgtgcccggcggcagcagcaagcgtggccctcatgtcaccatggtcttcccggatgctggcaccttctccatccggctcaatgcctccaacgcagtcagctgggtctcagccacgtacaacctcacggcggaggagcccatcgtgggcctggtgctgtgggccagcagcaaggtggtggcgcccgggcagctggtccattttcagatcctgctggctgccggctcagctgtcaccttccgcctgcaggtcggcggggccaaccccgaggtgctccccgggccccgtttctcccacagcttcccccgcgtcggagaccacgtggtgagcgtgcggggcaaaaaccacgtgagctgggcccaggcgcaggtgcgcatcgtggtgctggaggccgtgagtgggctgcaggtgcccaactgctgcgagcctggcatcgccacgggcactgagaggaacttcacagcccgcgtgcagcgcggctctcgggtcgcctacgcctggtacttctcgctgcagaaggtccagggcgactcgctggtcatcctgtcgggccgcgacgtcacctacacgcccgtggccgcggggctgttggagatccaggtgcgcgccttcaacgccctgggcagtgagaaccgcacgctggtgctggaggttcaggacgccgtccagtatgtggccctgcagagcggcccctgcttcaccaaccgctcggcgcagtttgaggccgccaccagccccagcccccggcgtgtggcctaccactgggactttggggatgggtcgccagggcaggacacagatgagcccagggccgagcactcctacctgaggcctggggactaccgcgtgcaggtgaacgcctccaacctggtgagcttcttcgtggcgcaggccacggtgaccgtccaggtgctggcctgccgggagccggaggtggacgtggtcctgcccctgcaggtgctgatgcggcgatcacagcgcaactacttggaggcccacgttgacctgcgcgactgcgtcacctaccagactgagtaccgctgggaggtgtatcgcaccgccagctgccagcggccggggcgcccagcgcgtgtggccctgcccggcgtggacgtgagccggcctcggctggtgctgccgcggctggcgctgcctgtggggcactactgctttgtgtttgtcgtgtcatttggggacacgccactgacacagagcatccaggccaatgtgacggtggcccccgagcgcctggtgcccatcattgagggtggctcataccgcgtgtggtcagacacacgggacctggtgctggatgggagcgagtcctacgaccccaacctggaggacggcgaccagacgccgctcagtttccactgggcctgtgtggcttcgacacagagggaggctggcgggtgtgcgctgaactttgggccccgcgggagcagcacggtcaccattccacgggagcggctggcggctggcgtggagtacaccttcagcctgaccgtgtggaaggccggccgcaaggaggaggccaccaaccagacggtgctgatccggagtggccgggtgcccattgtgtccttggagtgtgtgtcctgcaaggcacaggccgtgtacgaagtgagccgcagctcctacgtgtacttggagggccgctgcctcaattgcagcagcggctccaagcgagggcggtgggctgcacgtacgttcagcaacaagacgctggtgctggatgagaccaccacatccacgggcagtgcaggcatgcgactggtgctgcggcggggcgtgctgcgggacggcgagggatacaccttcacgctcacggtgctgggccgctctggcgaggaggagggctgcgcctccatccgcctgtcccccaaccgcccgccgctggggggctcttgccgcctcttcccactgggcgctgtgcacgccctcaccaccaaggtgcacttcgaatgcacgggctggcatgacgcggaggatgctggcgccccgctggtgtacgccctgctgctgcggcgctgtcgccagggccactgcgaggagttctgtgtctacaagggcagcctctccagctacggagccgtgctgcccccgggtttcaggccacacttcgaggtgggcctggccgtggtggtgcaggaccagctgggagccgctgtggtcgccctcaacaggtctttggccatcaccctcccagagcccaacggcagcgcaacggggctcacagtctggctgcacgggctcaccgctagtgtgctcccagggctgctgcggcaggccgatccccagcacgtcatcgagtactcgttggccctggtcaccgtgctgaacgagtacgagcgggccctggacgtggcggcagagcccaagcacgagcggcagcaccgagcccagatacgcaagaacatcacggagactctggtgtccctgagggtccacactgtggatgacatccagcagatcgctgctgcgctggcccagtgcatggggcccagcagggagctcgtatgccgctcgtgcctgaagcagacgctgcacaagctggaggccatgatgctcatcctgcaggcagagaccaccgcgggcaccgtgacgcccaccgccatcggagacagcatcctcaacatcacaggagacctcatccacctggccagctcggacgtgcgggcaccacagccctcagagctgggagccgagtcaccatctcggatggtggcgtcccaggcctacaacctgacctctgccctcatgcgcatcctcatgcgctcccgcgtgctcaacgaggagcccctgacgctggcgggcgaggagatcgtggcccagggcaagcgctcggacccgcggagcctgctgtgctatggcggcgccccagggcctggctgccacttctccatccccgaggctttcagcggggccctggccaacctcagtgacgtggtgcagctcatctttctggtggactccaatccctttccctttggctatatcagcaactacaccgtctccaccaaggtggcctcgatggcattccagacacaggccggcgcccagatccccatcgagcggctggcctcagagcgcgccatcaccgtgaaggtgcccaacaactcggactgggctgcccggggccaccgcagctccgccaactccgccaactccgttgtggtccagccccaggcctccgtcggtgctgtggtcaccctggacagcagcaaccctgcggccgggctgcatctgcagctcaactatacgctgctggacggccactacctgtctgaggaacctgagccctacctggcagtctacctacactcggagccccggcccaatgagcacaactgctcggctagcaggaggatccgcccagagtcactccagggtgctgaccaccggccctacaccttcttcatttccccggggagcagagacccagcggggagttaccatctgaacctctccagccacttccgctggtcggcgctgcaggtgtccgtgggcctgtacacgtccctgtgccagtacttcagcgaggaggacatggtgtggcggacagaggggctgctgcccctggaggagacctcgccccgccaggccgtctgcctcacccgccacctcaccgccttcggcgccagcctcttcgtgcccccaagccatgtccgctttgtgtttcctgagccgacagcggatgtaaactacatcgtcatgctgacatgtgctgtgtgcctggtgacctacatggtcatggccgccatcctgcacaagctggaccagttggatgccagccggggccgcgccatccctttctgtgggcagcggggccgcttcaagtacgagatcctcgtcaagacaggctggggccggggctcaggtaccacggcccacgtgggcatcatgctgtatggggtggacagccggagcggccaccggcacctggacggcgacagagccttccaccgcaacagcctggacatcttccggatcgccaccccgcacagcctgggtagcgtgtggaagatccgagtgtggcacgacaacaaagggctcagccctgcctggttcctgcagcacgtcatcgtcagggacctgcagacggcacgcagcgccttcttcctggtcaatgactggctttcggtggagacggaggccaacgggggcctggtggagaaggaggtgctggccgcgagcgacgcagcccttttgcgcttccggcgcctgctggtggctgagctgcagcgtggcttctttgacaagcacatctggctctccatatgggaccggccgcctcgtagccgtttcactcgcatccagagggccacctgctgcgttctcctcatctgcctcttcctgggcgccaacgccgtgtggtacggggctgttggcgactctgcctacagcacggggcatgtgtccaggctgagcccgctgagcgtcgacacagtcgctgttggcctggtgtccagcgtggttgtctatcccgtctacctggccatcctttttctcttccggatgtcccggagcaaggtggctgggagcccgagccccacacctgccgggcagcaggtgctggacatcgacagctgcctggactcgtccgtgctggacagctccttcctcacgttctcaggcctccacgctgagcaggcctttgttggacagatgaagagtgacttgtttctggatgattctaagagtctggtgtgctggccctccggcgagggaacgctcagttggccggacctgctcagtgacccgtccattgtgggtagcaatctgcggcagctggcacggggccaggcgggccatgggctgggcccagaggaggacggcttctccctggccagcccctactcgcctgccaaatccttctcagcatcagatgaagacctgatccagcaggtccttgccgagggggtcagcagcccagcccctacccaagacacccacatggaaacggacctgctcagcagcctgtccagcactcctggggagaagacagagacgctggcgctgcagaggctgggggagctggggccacccagcccaggcctgaactgggaacagccccaggcagcgaggctgtccaggacaggactggtggagggtctgcggaagcgcctgctgccggcctggtgtgcctccctggcccacgggctcagcctgctcctggtggctgtggctgtggctgtctcagggtgggtgggtgcgagcttccccccgggcgtgagtgttgcgtggctcctgtccagcagcgccagcttcctggcctcattcctcggctgggagccactgaaggtcttgctggaagccctgtacttctcactggtggccaagcggctgcacccggatgaagatgacaccctggtagagagcccggctgtgacgcctgtgagcgcacgtgtgccccgcgtacggccaccccacggctttgcactcttcctggccaaggaagaagcccgcaaggtcaagaggctacatggcatgctgcggagcctcctggtgtacatgctttttctgctggtgaccctgctggccagctatggggatgcctcatgccatgggcacgcctaccgtctgcaaagcgccatcaagcaggagctgcacagccgggccttcctggccatcacgcggtctgaggagctctggccatggatggcccacgtgctgctgccctacgtccacgggaaccagtccagcccagagctggggcccccacggctgcggcaggtgcggctgcaggaagcactctacccagaccctcccggccccagggtccacacgtgctcggccgcaggaggcttcagcaccagcgattacgacgttggctgggagagtcctcacaatggctcggggacgtgggcctattcagcgccggatctgctgggggcatggtcctggggctcctgtgccgtgtatgacagcgggggctacgtgcaggagctgggcctgagcctggaggagagccgcgaccggctgcgcttcctgcagctgcacaactggctggacaacaggagccgcgctgtgttcctggagctcacgcgctacagcccggccgtggggctgcacgccgccgtcacgctgcgcctcgagttcccggcggccggccgcgccctggccgccctcagcgtccgcccctttgcgctgcgccgcctcagcgcgggcctctcgctgcctctgctcacctcggtgtgcctgctgctgttcgccgtgcacttcgccgtggccgaggcccgtacttggcacagggaagggcgctggcgcgtgctgcggctcggagcctgggcgcggtggctgctggtggcgctgacggcggccacggcactggtacgcctcgcccagctgggtgccgctgaccgccagtggacccgtttcgtgcgcggccgcccgcgccgcttcactagcttcgaccaggtggcgcagctgagctccgcagcccgtggcctggcggcctcgctgctcttcctgcttttggtcaaggctgcccagcagctacgcttcgtgcgccagtggtccgtctttggcaagacattatgccgagctctgccagagctcctgggggtcaccttgggcctggtggtgctcggggtagcctacgcccagctggccatcctgctcgtgtcttcctgtgtggactccctctggagcgtggcccaggccctgttggtgctgtgccctgggactgggctctctaccctgtgtcctgccgagtcctggcacctgtcacccctgctgtgtgtggggctctgggcactgcggctgtggggcgccctacggctgggggctgttattctccgctggcgctaccacgccttgcgtggagagctgtaccggccggcctgggagccccaggactacgagatggtggagttgttcctgcgcaggctgcgcctctggatgggcctcagcaaggtcaaggagttccgccacaaagtccgctttgaagggatggagccgctgccctctcgctcctccaggggctccaaggtatccccggatgtgcccccacccagcgctggctccgatgcctcgcacccctccacctcctccagccagctggatgggctgagcgtgagcctgggccggctggggacaaggtgtgagcctgagccctcccgcctccaagccgtgttcgaggccctgctcacccagtttgaccgactcaaccaggccacagaggacgtctaccagctggagcagcagctgcacagcctgcaaggccgcaggagcagccgggcgcccgccggatcttcccgtggcccatccccgggcctgcggccagcactgcccagccgccttgcccgggccagtcggggtgtggacctggccactggccccagcaggacaccccttcgggccaagaacaaggtccaccccagcagcacttagtcctccttcctggcgggggtgggccgtggagtcggagtggacaccgctcagtattactttctgccgctgtcaaggccgagggccaggcagaatggctgcacgtaggttccccagagagcaggcaggggcatctgtctgtctgtgggcttcagcactttaaagaggctgtgtggccaaccaggacccagggtcccctccccagctcccttgggaaggacacagcagtattggacggtttctagcctctgagatgctaatttatttccccgagtcctcaggtacagcgggctgtgcccggccccaccccctgggcagatgtcccccactgctaaggctgctggcttcagggagggttagcctgcaccgccgccaccctgcccctaagttattacctctccagttcctaccgtactccctgcaccgtctcactgtgtgtctcgtgtcagtaatttatatggtgttaaaatgtgtatatttttgtatgtcactattttcactagggctgaggggcctgcgcccagagctggcctcccccaacacctgctgcgcttggtaggtgtggtggcgttatggcagcccggctgctgcttggatgcgagcttggccttgggccggtgctgggggcacagctgtctgccaggcactctcatcaccccagaggccttgtcatcctcccttgccccaggccaggtagcaagagagcagcgcccaggcctgctggcatcaggtctgggcaagtagcaggactaggcatgtcagaggaccccagggtggttagaggaaaagactcctcctgggggctggctcccagggtggaggaaggtgactgtgtgtgtgtgtgtgtgcgcgcgcgcacgcgcgagtgtgctgtatggcccaggcagcctcaaggccctcggagctggctgtgcctgcttctgtgtaccacttctgtgggcatggccgcttctagagcctcgacacccccccaacccccgcaccaagcagacaaagtcaataaaagagctgtctgactgcaatctgtgcctctatgtctgtgcactggggtcaggactttatttatttcactgacaggcaataccgtccaaggccagtgcaggagggagggccccggcctcacacaaactcggtgaagtcctccaccgaggagatgaggcgcttccgctggcccacctcatagccaggtgtgggctcggctggagtctgtgcaggggctttgctatgggacggagggtgcaccagaggtaggctggggttggagtaggcggcttcctcgcagatc

SEQ ID NO: 8643 - protein, 4303 aa, Homo sapiens; identical to SEQ ID NO: 1307

SEQ ID NO: 8644 - DNA, 14309 bp, Homo sapiens
gcactgcagcgccagcgtccgagcgggcggccgagctcccggagcggcctggccccgagccccgagcgggcgtcgctcagcagcaggtcgcggccgcagccccatccagccccgcgcccgccatgccgtccgcgggccccgcctgagctgcggcctccgcgcgcgggcgggcctggggacggcggggccatgcgcgcgctgccctaacgattgcgagcccccctgcctctgcggcccagcgcccggcgccgcctgccgcgtcaactgctcgggccgcgggctgcggacgctcggtcccgcgctgcgcatccccgcggacgccacagcgctagacgtctcccacaacctgctccgggcgctggacgttgggctcctggcgaacctctcggcgctggcagagctggatataagcaacaacaagatttctacgttagaagaaggaatatttgctaatttatttaatttaagtgaaataaacctgagtgggaacccgtttgagtgtgactgtggcctggcgtggctgccgcgatgggcggaggagcagcaggtgcgggtggtgcagcccgaggcagccacgtgtgctgggcctggctccctggctggccagcctctgcttggcatccccttgctggacagtggctgtggtgaggagtatgtcgcctgcctccctgacaacagctcaggcaccgtggcagcagtgtccttttcagctgcccacgaaggcctgcttcagccagaggcctgcagcgccttctgcttctccaccggccagggcctcgcagccctctcggagcagggctggtgcctgtgtggggcggcccagccctccagtgcctcctttgcctgcctgtccctctgctccggccccccgccacctcctgcccccacctgtaggggccccaccctcctccagcacgtcttccctgcctccccaggggccaccctggtggggccccacggacctctggcctctggccagctagcagccttccacatcgctgccccgctccctgtcactgccacacgctgggacttcggagacggctccgccgaggtggatgccgctgggccggctgcctcgcatcgctatgtgctgcctgggcgctatcacgtgacggccgtgctggccctgggggccggctcagccctgctggggacagacgtgcaggtggaagcggcacctgccgccctggagctcgtgtgcccgtcctcggtgcagagtgacgagagcctcgacctcagcatccagaaccgcggtggttcaggcctggaggccgcctacagcatcgtggccctgggcgaggagccggcccgagcggtgcacccgctctgcccctcggacacggagatcttccctggcaacgggcactgctaccgcctggtggtggagaaggcggcctggctgcaggcgcaggagcagtgtcaggcctgggccggggccgccctggcaatggtggacagtcccgccgtgcagcgcttcctggtctcccgggtcaccaggagcctagacgtgtggatcggcttctcgactgtgcagggggtggaggtgggcccagcgccgcagggcgaggccttcagcctggagagctgccagaactggctgcccggggagccacacccagccacagccgagcactgcgtccggctcgggcccaccgggtggtgtaacaccgacctgtgctcagcgccgcacagctacgtctgcgagctgcagcccggaggcccagtgcaggatgccgagaacctcctcgtgggagcgcccagtggggacctgcagggacccctgacgcctctggcacagcaggacggcctctcagccccgcacgagcccgtggaggtcatggtattcccgggcctgcgtctgagccgtgaagccttcctcaccacggccgaatttgggacccaggagctccggcggcccgcccagctgcggctgcaggtgtaccggctcctcagcacagcagggaccccggagaacggcagcgagcctgagagcaggtccccggacaacaggacccagctggcccccgcgtgcatgccagggggacgctggtgccctggagccaacatctgcttgccgctggacgcctcctgccacccccaggcctgcgccaatggctgcacgtcagggccagggctacccggggccccctatgcgctatggagagagttcctcttctccgttcccgcggggccccccgcgcagtactcggtcaccctccacggccaggatgtcctcatgctccctggtgacctcgttggcttgcagcacgacgctggccctggcgccctcctgcactgctcgccggctcccggccaccctggtccccgggccccgtacctctccgccaacgcctcgtcatggctgccccacttgccagcccagctggagggcacttgggcctgccctgcctgtgccctgcggctgcttgcagccacggaacagctcaccgtgctgctgggcttgaggcccaaccctggactgcggctgcctgggcgctatgaggtccgggcagaggtgggcaatggcgtgtccaggcacaacctctcctgcagctttgacgtggtctccccagtggctgggctgcgggtcatctaccctgccccccgcgacggccgcctctacgtgcccaccaacggctcagccttggtgctccaggtggactctggtgccaacgccacggccacggctcgctggcctgggggcagtgtcagcgcccgctttgagaatgtctgccctgccctggtggccaccttcgtgcccggctgcccctgggagaccaacgataccctgttctcagtggtagcactgccgtggctcagtgagggggagcacgtggtggacgtggtggtggaaaacagcgccagccgggccaacctcagcctgcgggtgacggcggaggagcccatctgtggcctccgcgccacgcccagccccgaggcccgtgtactgcagggagtcctagtgaggtacagccccgtggtggaggccggctcggacatggtcttccggtggaccatcaacgacaagcagtccctgaccttccagaacgtggtcttcaatgtcatttatcagagcgcggcggtcttcaagctctcactgacggcctccaaccacgtgagcaacgtcaccgtgaactacaacgtaaccgtggagcggatgaacaggatgcagggtctgcaggtctccacagtgccggccgtgctgtcccccaatgccacgctagcactgacggcgggcgtgctggtggactcggccgtggaggtggccttcctgtggacctttggggatggggagcaggccctccaccagttccagcctccgtacaacgagtccttcccggttccagacccctcggtggcccaggtgctggtggagcacaatgtcatgcacacctacgctgccccaggtgagtacctcctgaccgtgctggcatctaatgccttcgagaacctgacgcagcaggtgcctgtgagcgtgcgcgcctccctgccctccgtggctgtgggtgtgagtgacggcgtcctggtggccggccggcccgtcaccttctacccgcacccgctgccctcgcctgggggtgttctttacacgtgggacttcggggacggctcccctgtcctgacccagagccagccggctgccaaccacacctatgcctcgaggggcacctaccacgtgcgcctggaggtcaacaacacggtgagcggtgcggcggcccaggcggatgtgcgcgtctttgaggagctccgcggactcagcgtggacatgagcctggccgtggagcagggcgcccccgtggtggtcagcgccgcggtgcagacgggcgacaacatcacgtggaccttcgacatgggggacggcaccgtgctgtcgggcccggaggcaacagtggagcatgtgtacctgcgggcacagaactgcacagtgaccgtgggtgcggccagccccgccggccacctggcccggagcctgcacgtgctggtcttcgtcctggaggtgctgcgcgttgaacccgccgcctgcatccccacgcagcctgacgcgcggctcacggcctacgtcaccgggaacccggcccactacctcttcgactggaccttcggggatggctcctccaacacgaccgtgcgggggtgcccgacggtgacacacaacttcacgcggagcggcacgttccccctggcgctggtgctgtccagccgcgtgaacagggcgcattacttcaccagcatctgcgtggagccagaggtgggcaacgtcaccctgcagccagagaggcagtttgtgcagctcggggacgaggcctggctggtggcatgtgcctggcccccgttcccctaccgctacacctgggactttggcaccgaggaagccgcccccacccgtgccaggggccctgaggtgacgttcatctaccgagacccaggctcctatcttgtgacagtcaccgcgtccaacaacatctctgctgccaatgactcagccctggtggaggtgcaggagcccgtgctggtcaccagcatcaaggtcaatggctcccttgggctggagctgcagcagccgtacctgttctctgctgtgggccgtgggcgccccgccagctacctgtgggatctgggggacggtgggtggctcgagggtccggaggtcacccacgcttacaacagcacaggtgacttcaccgttagggtggccggctggaatgaggtgagccgcagcgaggcctggctcaatgtgacggtgaagcggcgcgtgcgggggctcgtcgtcaatgcaagccgcacggtggtgcccctgaatgggagcgtgagcttcagcacgtcgctggaggccggcagtgatgtgcgctattcctgggtgctctgtgaccgctgcacgcccatccctgggggtcctaccatctcttacaccttccgctccgtgggcaccttcaatatcatcgtcacggctgagaacgaggtgggctccgcccaggacagcatcttcgtctatgtcctgcagctcatagaggggctgcaggtggtgggcggtggccgctacttccccaccaaccacacggtacagctgcaggccgtggttagggatggcaccaacgtctcctacagctggactgcctggagggacaggggcccggccctggccggcagcggcaaaggcttctcgctcaccgtgctcgaggccggcacctaccatgtgcagctgcgggccaccaacatgctgggcagcgcctgggccgactgcaccatggacttcgtggagcctgtggggtggctgatggtggccgcctccccgaacccagctgccgtcaacacaagcgtcaccctcagtgccgagctggctggtggcagtggtgtcgtatacacttggtccttggaggaggggctgagctgggagacctccgagccatttaccacccatagcttccccacacccggcctgcacttggtcaccatgacggcagggaacccgctgggctcagccaacgccaccgtggaagtggatgtgcaggtgcctgtgagtggcctcagcatcagggccagcgagcccggaggcagcttcgtggcggccgggtcctctgtgcccttttgggggcagctggccacgggcaccaatgtgagctggtgctgggctgtgcccggcggcagcagcaagcgtggccctcatgtcaccatggtcttcccggatgctggcaccttctccatccggctcaatgcctccaacgcagtcagctgggtctcagccacgtacaacctcacggcggaggagcccatcgtgggcctggtgctgtgggccagcagcaaggtggtggcgcccgggcagctggtccattttcagatcctgctggctgccggctcagctgtcaccttccgcctgcaggtcggcggggccaaccccgaggtgctccccgggccccgtttctcccacagcttcccccgcgtcggagaccacgtggtgagcgtgcggggcaaaaaccacgtgagctgggcccaggcgcaggtgcgcatcgtggtgctggaggccgtgagtgggctgcaggtgcccaactgctgcgagcctggcatcgccacgggcactgagaggaacttcacagcccgcgtgcagcgcggctctcgggtcgcctacgcctggtacttctcgctgcagaaggtccagggcgactcgctggtcatcctgtcgggccgcgacgtcacctacacgcccgtggccgcggggctgttggagatccaggtgcgcgccttcaacgccctgggcagtgagaaccgcacgctggtgctggaggttcaggacgccgtccagtatgtggccctgcagagcggcccctgcttcaccaaccgctcggcgcagtttgaggccgccaccagccccagcccccggcgtgtggcctaccactgggactttggggatgggtcgccagggcaggacacagatgagcccagggccgagcactcctacctgaggcctggggactaccgcgtgcaggtgaacgcctccaacctggtgagcttcttcgtggcgcaggccacggtgaccgtccaggtgctggcctgccgggagccggaggtggacgtggtcctgcccctgcaggtgctgatgcggcgatcacagcgcaactacttggaggcccacgttgacctgcgcgactgcgtcacctaccagactgagtaccgctgggaggtgtatcgcaccgccagctgccagcggccggggcgcccagcgcgtgtggccctgcccggcgtggacgtgagccggcctcggctggtgctgccgcggctggcgctgcctgtggggcactactgctttgtgtttgtcgtgtcatttggggacacgccactgacacagagcatccaggccaatgtgacggtggcccccgagcgcctggtgcccatcattgagggtggctcataccgcgtgtggtcagacacacgggacctggtgctggatgggagcgagtcctacgaccccaacctggaggacggcgaccagacgccgctcagtttccactgggcctgtgtggcttcgacacagagggaggctggcgggtgtgcgctgaactttgggccccgcgggagcagcacggtcaccattccacgggagcggctggcggctggcgtggagtacaccttcagcctgaccgtgtggaaggccggccgcaaggaggaggccaccaaccagacggtgctgatccggagtggccgggtgcccattgtgtccttggagtgtgtgtcctgcaaggcacaggccgtgtacgaagtgagccgcagctcctacgtgtacttggagggccgctgcctcaattgcagcagcggctccaagcgagggcggtgggctgcacgtacgttcagcaacaagacgctggtgctggatgagaccaccacatccacgggcagtgcaggcatgcgactggtgctgcggcggggcgtgctgcgggacggcgagggatacaccttcacgctcacggtgctgggccgctctggcgaggaggagggctgcgcctccatccgcctgtcccccaaccgcccgccgctggggggctcttgccgcctcttcccactgggcgctgtgcacgccctcaccaccaaggtgcacttcgaatgcacgggctggcatgacgcggaggatgctggcgccccgctggtgtacgccctgctgctgcggcgctgtcgccagggccactgcgaggagttctgtgtctacaagggcagcctctccagctacggagccgtgctgcccccgggtttcaggccacacttcgaggtgggcctggccgtggtggtgcaggaccagctgggagccgctgtggtcgccctcaacaggtctttggccatcaccctcccagagcccaacggcagcgcaacggggctcacagtctggctgcacgggctcaccgctagtgtgctcccagggctgctgcggcaggccgatccccagcacgtcatcgagtactcgttggccctggtcaccgtgctgaacgagtacgagcgggccctggacgtggcggcagagcccaagcacgagcggcagcaccgagcccagatacgcaagaacatcacggagactctggtgtccctgagggtccacactgtggatgacatccagcagatcgctgctgcgctggcccagtgcatggggcccagcagggagctcgtatgccgctcgtgcctgaagcagacgctgcacaagctggaggccatgatgctcatcctgcaggcagagaccaccgcgggcaccgtgacgcccaccgccatcggagacagcatcctcaacatcacaggagacctcatccacctggccagctcggacgtgcgggcaccacagccctcagagctgggagccgagtcaccatctcggatggtggcgtcccaggcctacaacctgacctctgccctcatgcgcatcctcatgcgctcccgcgtgctcaacgaggagcccctgacgctggcgggcgaggagatcgtggcccagggcaagcgctcggacccgcggagcctgctgtgctatggcggcgccccagggcctggctgccacttctccatccccgaggctttcagcggggccctggccaacctcagtgacgtggtgcagctcatctttctggtggactccaatccctttccctttggctatatcagcaactacaccgtctccaccaaggtggcctcgatggcattccagacacaggccggcgcccagatccccatcgagcggctggcctcagagcgcgccatcaccgtgaaggtgcccaacaactcggactgggctgcccggggccaccgcagctccgccaactccgccaactccgttgtggtccagccccaggcctccgtcggtgctgtggtcaccctggacagcagcaaccctgcggccgggctgcatctgcagctcaactatacgctgctggacggccactacctgtctgaggaacctgagccctacctggcagtctacctacactcggagccccggcccaatgagcacaactgctcggctagcaggaggatccgcccagagtcactccagggtgctgaccaccggccctacaccttcttcatttccccggggagcagagacccagcggggagttaccatctgaacctctccagccacttccgctggtcggcgctgcaggtgtccgtgggcctgtacacgtccctgtgccagtacttcagcgaggaggacatggtgtggcggacagaggggctgctgcccctggaggagacctcgccccgccaggccgtctgcctcacccgccacctcaccgccttcggcgccagcctcttcgtgcccccaagccatgtccgctttgtgtttcctgagccgacagcggatgtaaactacatcgtcatgctgacatgtgctgtgtgcctggtgacctacatggtcatggccgccatcctgcacaagctggaccagttggatgccagccggggccgcgccatccctttctgtgggcagcggggccgcttcaagtacgagatcctcgtcaagacaggctggggccggggctcaggtaccacggcccacgtgggcatcatgctgtatggggtggacagccggagcggccaccggcacctggacggcgacagagccttccaccgcaacagcctggacatcttccggatcgccaccccgcacagcctgggtagcgtgtggaagatccgagtgtggcacgacaacaaagggctcagccctgcctggttcctgcagcacgtcatcgtcagggacctgcagacggcacgcagcgccttcttcctggtcaatgactggctttcggtggagacggaggccaacgggggcctggtggagaaggaggtgctggccgcgagcgacgcagcccttttgcgcttccggcgcctgctggtggctgagctgcagcgtggcttctttgacaagcacatctggctctccatatgggaccggccgcctcgtagccgtttcactcgcatccagagggccacctgctgcgttctcctcatctgcctcttcctgggcgccaacgccgtgtggtacggggctgttggcgactctgcctacagcacggggcatgtgtccaggctgagcccgctgagcgtcgacacagtcgctgttggcctggtgtccagcgtggttgtctatcccgtctacctggccatcctttttctcttccggatgtcccggagcaaggtggctgggagcccgagccccacacctgccgggcagcaggtgctggacatcgacagctgcctggactcgtccgtgctggacagctccttcctcacgttctcaggcctccacgctgagcaggcctttgttggacagatgaagagtgacttgtttctggatgattctaagagtctggtgtgctggccctccggcgagggaacgctcagttggccggacctgctcagtgacccgtccattgtgggtagcaatctgcggcagctggcacggggccaggcgggccatgggctgggcccagaggaggacggcttctccctggccagcccctactcgcctgccaaatccttctcagcatcagatgaagacctgatccagcaggtccttgccgagggggtcagcagcccagcccctacccaagacacccacatggaaacggacctgctcagcagcctgtccagcactcctggggagaagacagagacgctggcgctgcagaggctgggggagctggggccacccagcccaggcctgaactgggaacagccccaggcagcgaggctgtccaggacaggactggtggagggtctgcggaagcgcctgctgccggcctggtgtgcctccctggcccacgggctcagcctgctcctggtggctgtggctgtggctgtctcagggtgggtgggtgcgagcttccccccgggcgtgagtgttgcgtggctcctgtccagcagcgccagcttcctggcctcattcctcggctgggagccactgaaggtcttgctggaagccctgtacttctcactggtggccaagcggctgcacccggatgaagatgacaccctggtagagagcccggctgtgacgcctgtgagcgcacgtgtgccccgcgtacggccaccccacggctttgcactcttcctggccaaggaagaagcccgcaaggtcaagaggctacatggcatgctgcggagcctcctggtgtacatgctttttctgctggtgaccctgctggccagctatggggatgcctcatgccatgggcacgcctaccgtctgcaaagcgccatcaagcaggagctgcacagccgggccttcctggccatcacgcggtctgaggagctctggccatggatggcccacgtgctgctgccctacgtccacgggaaccagtccagcccagagctggggcccccacggctgcggcaggtgcggctgcaggaagcactctacccagaccctcccggccccagggtccacacgtgctcggccgcaggaggcttcagcaccagcgattacgacgttggctgggagagtcctcacaatggctcggggacgtgggcctattcagcgccggatctgctgggggcatggtcctggggctcctgtgccgtgtatgacagcgggggctacgtgcaggagctgggcctgagcctggaggagagccgcgaccggctgcgcttcctgcagctgcacaactggctggacaacaggagccgcgctgtgttcctggagctcacgcgctacagcccggccgtggggctgcacgccgccgtcacgctgcgcctcgagttcccggcggccggccgcgccctggccgccctcagcgtccgcccctttgcgctgcgccgcctcagcgcgggcctctcgctgcctctgctcacctcggtgtgcctgctgctgttcgccgtgcacttcgccgtggccgaggcccgtacttggcacagggaagggcgctggcgcgtgctgcggctcggagcctgggcgcggtggctgctggtggcgctgacggcggccacggcactggtacgcctcgcccagctgggtgccgctgaccgccagtggacccgtttcgtgcgcggccgcccgcgccgcttcactagcttcgaccaggtggcgcagctgagctccgcagcccgtggcctggcggcctcgctgctcttcctgcttttggtcaaggctgcccagcagctacgcttcgtgcgccagtggtccgtctttggcaagacattatgccgagctctgccagagctcctgggggtcaccttgggcctggtggtgctcggggtagcctacgcccagctggccatcctgctcgtgtcttcctgtgtggactccctctggagcgtggcccaggccctgttggtgctgtgccctgggactgggctctctaccctgtgtcctgccgagtcctggcacctgtcacccctgctgtgtgtggggctctgggcactgcggctgtggggcgccctacggctgggggctgttattctccgctggcgctaccacgccttgcgtggagagctgtaccggccggcctgggagccccaggactacgagatggtggagttgttcctgcgcaggctgcgcctctggatgggcctcagcaaggtcaaggagttccgccacaaagtccgctttgaagggatggagccgctgccctctcgctcctccaggggctccaaggtatccccggatgtgcccccacccagcgctggctccgatgcctcgcacccctccacctcctccagccagctggatgggctgagcgtgagcctgggccggctggggacaaggtgtgagcctgagccctcccgcctccaagccgtgttcgaggccctgctcacccagtttgaccgactcaaccaggccacagaggacgtctaccagctggagcagcagctgcacagcctgcaaggccgcaggagcagccgggcgcccgccggatcttcccgtggcccatccccgggcctgcggccagcactgcccagccgccttgcccgggccagtcggggtgtggacctggccactggccccagcaggacaccccttcgggccaagaacaaggtccaccccagcagcacttagtcctccttcctggcgggggtgggccgtggagtcggagtggacaccgctcagtattactttctgccgctgtcaaggccgagggccaggcagaatggctgcacgtaggttccccagagagcaggcaggggcatctgtctgtctgtgggcttcagcactttaaagaggctgtgtggccaaccaggacccagggtcccctccccagctcccttgggaaggacacagcagtattggacggtttctagcctctgagatgctaatttatttccccgagtcctcaggtacagcgggctgtgcccggccccaccccctgggcagatgtcccccactgctaaggctgctggcttcagggagggttagcctgcaccgccgccaccctgcccctaagttattacctctccagttcctaccgtactccctgcaccgtctcactgtgtgtctcgtgtcagtaatttatatggtgttaaaatgtgtatatttttgtatgtcactattttcactagggctgaggggcctgcgcccagagctggcctcccccaacacctgctgcgcttggtaggtgtggtggcgttatggcagcccggctgctgcttggatgcgagcttggccttgggccggtgctgggggcacagctgtctgccaggcactctcatcaccccagaggccttgtcatcctcccttgccccaggccaggtagcaagagagcagcgcccaggcctgctggcatcaggtctgggcaagtagcaggactaggcatgtcagaggaccccagggtggttagaggaaaagactcctcctgggggctggctcccagggtggaggaaggtgactgtgtgtgtgtgtgtgtgcgcgcgcgcacgcgcgagtgtgctgtatggcccaggcagcctcaaggccctcggagctggctgtgcctgcttctgtgtaccacttctgtgggcatggccgcttctagagcctcgacacccccccaacccccgcaccaagcagacaaagtcaataaaagagctgtctgactgcaatctgtgcctctatgtctgtgcactggggtcaggactttatttatttcactgacaggcaataccgtccaaggccagtgcaggagggagggccccggcctcacacaaactcggtgaagtcctccaccgaggagatgaggcgcttccgctggcccacctcatagccaggtgtgggctcggctggagtctgtgcaggggctttgctatgggacggagggtgcaccagaggtaggctggggttggagtaggcggcttcctcgcagatc

SEQ ID NO: 8645 - protein, 3858 aa, Homo sapiens
MVDSPAVQRFLVSRVTRSLDVWIGFSTVQGVEVGPAPQGEAFSLESCQNWLPGEPHPATAEHCVRLGPTGWCNTDLCSAPHSYVCELQPGGPVQDAENLLVGAPSGDLQGPLTPLAQQDGLSAPHEPVEVMVFPGLRLSREAFLTTAEFGTQELRRPAQLRLQVYRLLSTAGTPENGSEPESRSPDNRTQLAPACMPGGRWCPGANICLPLDASCHPQACANGCTSGPGLPGAPYALWREFLFSVPAGPPAQYSVTLHGQDVLMLPGDLVGLQHDAGPGALLHCSPAPGHPGPRAPYLSANASSWLPHLPAQLEGTWACPACALRLLAATEQLTVLLGLRPNPGLRLPGRYEVRAEVGNGVSRHNLSCSFDVVSPVAGLRVIYPAPRDGRLYVPTNGSALVLQVDSGANATATARWPGGSVSARFENVCPALVATFVPGCPWETNDTLFSVVALPWLSEGEHVVDVVVENSASRANLSLRVTAEEPICGLRATPSPEARVLQGVLVRYSPVVEAGSDMVFRWTINDKQSLTFQNVVFNVIYQSAAVFKLSLTASNHVSNVTVNYNVTVERMNRMQGLQVSTVPAVLSPNATLALTAGVLVDSAVEVAFLWTFGDGEQALHQFQPPYNESFPVPDPSVAQVLVEHNVMHTYAAPGEYLLTVLASNAFENLTQQVPVSVRASLPSVAVGVSDGVLVAGRPVTFYPHPLPSPGGVLYTWDFGDGSPVLTQSQPAANHTYASRGTYHVRLEVNNTVSGAAAQADVRVFEELRGLSVDMSLAVEQGAPVVVSAAVQTGDNITWTFDMGDGTVLSGPEATVEHVYLRAQNCTVTVGAASPAGHLARSLHVLVFVLEVLRVEPAACIPTQPDARLTAYVTGNPAHYLFDWTFGDGSSNTTVRGCPTVTHNFTRSGTFPLALVLSSRVNRAHYFTSICVEPEVGNVTLQPERQFVQLGDEAWLVACAWPPFPYRYTWDFGTEEAAPTRARGPEVTFIYRDPGSYLVTVTASNNISAANDSALVEVQEPVLVTSIKVNGSLGLELQQPYLFSAVGRGRPASYLWDLGDGGWLEGPEVTHAYNSTGDFTVRVAGWNEVSRSEAWLNVTVKRRVRGLVVNASRTVVPLNGSVSFSTSLEAGSDVRYSWVLCDRCTPIPGGPTISYTFRSVGTFNIIVTAENEVGSAQDSIFVYVLQLIEGLQVVGGGRYFPTNHTVQLQAVVRDGTNVSYSWTAWRDRGPALAGSGKGFSLTVLEAGTYHVQLRATNMLGSAWADCTMDFVEPVGWLMVAASPNPAAVNTSVTLSAELAGGSGVVYTWSLEEGLSWETSEPFTTHSFPTPGLHLVTMTAGNPLGSANATVEVDVQVPVSGLSIRASEPGGSFVAAGSSVPFWGQLATGTNVSWCWAVPGGSSKRGPHVTMVFPDAGTFSIRLNASNAVSWVSATYNLTAEEPIVGLVLWASSKVVAPGQLVHFQILLAAGSAVTFRLQVGGANPEVLPGPRFSHSFPRVGDHVVSVRGKNHVSWAQAQVRIVVLEAVSGLQVPNCCEPGIATGTERNFTARVQRGSRVAYAWYFSLQKVQGDSLVILSGRDVTYTPVAAGLLEIQVRAFNALGSENRTLVLEVQDAVQYVALQSGPCFTNRSAQFEAATSPSPRRVAYHWDFGDGSPGQDTDEPRAEHSYLRPGDYRVQVNASNLVSFFVAQATVTVQVLACREPEVDVVLPLQVLMRRSQRNYLEAHVDLRDCVTYQTEYRWEVYRTASCQRPGRPARVALPGVDVSRPRLVLPRLALPVGHYCFVFVVSFGDTPLTQSIQANVTVAPERLVPIIEGGSYRVWSDTRDLVLDGSESYDPNLEDGDQTPLSFHWACVASTQREAGGCALNFGPRGSSTVTIPRERLAAGVEYTFSLTVWKAGRKEEATNQTVLIRSGRVPIVSLECVSCKAQAVYEVSRSSYVYLEGRCLNCSSGSKRGRWAARTFSNKTLVLDETTTSTGSAGMRLVLRRGVLRDGEGYTFTLTVLGRSGEEEGCASIRLSPNRPPLGGSCRLFPLGAVHALTTKVHFECTGWHDAEDAGAPLVYALLLRRCRQGHCEEFCVYKGSLSSYGAVLPPGFRPHFEVGLAVVVQDQLGAAVVALNRSLAITLPEPNGSATGLTVWLHGLTASVLPGLLRQADPQHVIEYSLALVTVLNEYERALDVAAEPKHERQHRAQIRKNITETLVSLRVHTVDDIQQIAAALAQCMGPSRELVCRSCLKQTLHKLEAMMLILQAETTAGTVTPTAIGDSILNITGDLIHLASSDVRAPQPSELGAESPSRMVASQAYNLTSALMRILMRSRVLNEEPLTLAGEEIVAQGKRSDPRSLLCYGGAPGPGCHFSIPEAFSGALANLSDVVQLIFLVDSNPFPFGYISNYTVSTKVASMAFQTQAGAQIPIERLASERAITVKVPNNSDWAARGHRSSANSANSVVVQPQASVGAVVTLDSSNPAAGLHLQLNYTLLDGHYLSEEPEPYLAVYLHSEPRPNEHNCSASRRIRPESLQGADHRPYTFFISPGSRDPAGSYHLNLSSHFRWSALQVSVGLYTSLCQYFSEEDMVWRTEGLLPLEETSPRQAVCLTRHLTAFGASLFVPPSHVRFVFPEPTADVNYIVMLTCAVCLVTYMVMAAILHKLDQLDASRGRAIPFCGQRGRFKYEILVKTGWGRGSGTTAHVGIMLYGVDSRSGHRHLDGDRAFHRNSLDIFRIATPHSLGSVWKIRVWHDNKGLSPAWFLQHVIVRDLQTARSAFFLVNDWLSVETEANGGLVEKEVLAASDAALLRFRRLLVAELQRGFFDKHIWLSIWDRPPRSRFTRIQRATCCVLLICLFLGANAVWYGAVGDSAYSTGHVSRLSPLSVDTVAVGLVSSVVVYPVYLAILFLFRMSRSKVAGSPSPTPAGQQVLDIDSCLDSSVLDSSFLTFSGLHAEQAFVGQMKSDLFLDDSKSLVCWPSGEGTLSWPDLLSDPSIVGSNLRQLARGQAGHGLGPEEDGFSLASPYSPAKSFSASDEDLIQQVLAEGVSSPAPTQDTHMETDLLSSLSSTPGEKTETLALQRLGELGPPSPGLNWEQPQAARLSRTGLVEGLRKRLLPAWCASLAHGLSLLLVAVAVAVSGWVGASFPPGVSVAWLLSSSASFLASFLGWEPLKVLLEALYFSLVAKRLHPDEDDTLVESPAVTPVSARVPRVRPPHGFALFLAKEEARKVKRLHGMLRSLLVYMLFLLVTLLASYGDASCHGHAYRLQSAIKQELHSRAFLAITRSEELWPWMAHVLLPYVHGNQSSPELGPPRLRQVRLQEALYPDPPGPRVHTCSAAGGFSTSDYDVGWESPHNGSGTWAYSAPDLLGAWSWGSCAVYDSGGYVQELGLSLEESRDRLRFLQLHNWLDNRSRAVFLELTRYSPAVGLHAAVTLRLEFPAAGRALAALSVRPFALRRLSAGLSLPLLTSVCLLLFAVHFAVAEARTWHREGRWRVLRLGAWARWLLVALTAATALVRLAQLGAADRQWTRFVRGRPRRFTSFDQVAQLSSAARGLAASLLFLLLVKAAQQLRFVRQWSVFGKTLCRALPELLGVTLGLVVLGVAYAQLAILLVSSCVDSLWSVAQALLVLCPGTGLSTLCPAESWHLSPLLCVGLWALRLWGALRLGAVILRWRYHALRGELYRPAWEPQDYEMVELFLRRLRLWMGLSKVKEFRHKVRFEGMEPLPSRSSRGSKVSPDVPPPSAGSDASHPSTSSSQLDGLSVSLGRLGTRCEPEPSRLQAVFEALLTQFDRLNQATEDVYQLEQQLHSLQGRRSSRAPAGSSRGPSPGLRPALPSRLARASRGVDLATGPSRTPLRAKNKVHPSST

SEQ ID NO: 8646 - DNA, 14044 bp, Homo sapiens
gcactgcagcgccagcgtccgagcgggcggccgagctcccggagcggcctggccccgagccccgagcgggcgtcgctcagcagcaggtcgcggccgcagccccatccagccccgcgcccgccatgccgtccgcgggccccgcctgagctgcggcctccgcgcgcgggcgggcctggggacggcggggccatgcgcgcgctgccctaacgattgcgagcccccctgcctctgcggcccagcgcccggcgccgcctgccgcgtcaactgctcgggccgcgggctgcggacgctcggtcccgcgctgcgcatccccgcggacgccacagcgctagacgtctcccacaacctgctccgggcgctggacgttgggctcctggcgaacctctcggcgctggcagagctggatataagcaacaacaagatttctacgttagaagaaggaatatttgctaatttatttaatttaagtgaaataaacctgagtgggaacccgtttgagtgtgactgtggcctggcgtggctgccgcgatgggcggaggagcagcaggtgcgggtggtgcagcccgaggcagccacgtgtgctgggcctggctccctggctggccagcctctgcttggcatccccttgctggacagtggctgtggtgaggagtatgtcgcctgcctccctgacaacagctcaggcaccgtggcagcagtgtccttttcagctgcccacgaaggcctgcttcagccagaggcctgcagcgccttctgcttctccaccggccagggcctcgcagccctctcggagcagggctggtgcctgtgtggggcggcccagccctccagtgcctcctttgcctgcctgtccctctgctccggccccccgccacctcctgcccccacctgtaggggccccaccctcctccagcacgtcttccctgcctccccaggggccaccctggtggggccccacggacctctggcctctggccagctagcagccttccacatcgctgccccgctccctgtcactgccacacgctgggacttcggagacggctccgccgaggtggatgccgctgggccggctgcctcgcatcgctatgtgctgcctgggcgctatcacgtgacggccgtgctggccctgggggccggctcagccctgctggggacagacgtgcaggtggaagcggcacctgccgccctggagctcgtgtgcccgtcctcggtgcagagtgacgagagcctcgacctcagcatccagaaccgcggtggttcaggcctggaggccgcctacagcatcgtggccctgggcgaggagccggcccgagcggtgcacccgctctgcccctcggacacggagatcttccctggcaacgggcactgctaccgcctggtggtggagaaggcggcctggctgcaggcgcaggagcagtgtcaggcctgggccggggccgccctggcaatggtggacagtcccgccgtgcagcgcttcctggtctcccgggtcaccaggagcctagacgtgtggatcggcttctcgactgtgcagggggtggaggtgggcccagcgccgcagggcgaggccttcagcctggagagctgccagaactggctgcccggggagccacacccagccacagccgagcactgcgtccggctcgggcccaccgggtggtgtaacaccgacctgtgctcagcgccgcacagctacgtctgcgagctgcagcccggaggcccagtgcaggatgccgagaacctcctcgtgggagcgcccagtggggacctgcagggacccctgacgcctctggcacagcaggacggcctctcagccccgcacgagcccgtggaggtcatggtattcccgggcctgcgtctgagccgtgaagccttcctcaccacggccgaatttgggacccaggagctccggcggcccgcccagctgcggctgcaggtgtaccggctcctcagcacagcagggaccccggagaacggcagcgagcctgagagcaggtccccggacaacaggacccagctggcccccgcgtgcatgccagggggacgctggtgccctggagccaacatctgcttgccgctggacgcctcctgccacccccaggcctgcgccaatggctgcacgtcagggccagggctacccggggccccctatgcgctatggagagagttcctcttctccgttcccgcggggccccccgcgcagtactcggtcaccctccacggccaggatgtcctcatgctccctggtgacctcgttggcttgcagcacgacgctggccctggcgccctcctgcactgctcgccggctcccggccaccctggtccccgggccccgtacctctccgccaacgcctcgtcatggctgccccacttgccagcccagctggagggcacttgggcctgccctgcctgtgccctgcggctgcttgcagccacggaacagctcaccgtgctgctgggcttgaggcccaaccctggactgcggctgcctgggcgctatgaggtccgggcagaggtgggcaatggcgtgtccaggcacaacctctcctgcagctttgacgtggtctccccagtggctgggctgcgggtcatctaccctgccccccgcgacggccgcctctacgtgcccaccaacggctcagccttggtgctccaggtggactctggtgccaacgccacggccacggctcgctggcctgggggcagtgtcagcgcccgctttgagaatgtctgccctgccctggtggccaccttcgtgcccggctgcccctgggagaccaacgataccctgttctcagtggtagcactgccgtggctcagtgagggggagcacgtggtggacgtggtggtggaaaacagcgccagccgggccaacctcagcctgcgggtgacggcggaggagcccatctgtggcctccgcgccacgcccagccccgaggcccgtgtactgcagggagtcctagtgaggtacagccccgtggtggaggccggctcggacatggtcttccggtggaccatcaacgacaagcagtccctgaccttccagaacgtggtcttcaatgtcatttatcagagcgcggcggtcttcaagctctcactgacggcctccaaccacgtgagcaacgtcaccgtgaactacaacgtaaccgtggagcggatgaacaggatgcagggtctgcaggtctccacagtgccggccgtgctgtcccccaatgccacgctagcactgacggcgggcgtgctggtggactcggccgtggaggtggccttcctgtggacctttggggatggggagcaggccctccaccagttccagcctccgtacaacgagtccttcccggttccagacccctcggtggcccaggtgctggtggagcacaatgtcatgcacacctacgctgccccaggtgagtacctcctgaccgtgctggcatctaatgccttcgagaacctgacgcagcaggtgcctgtgagcgtgcgcgcctccctgccctccgtggctgtgggtgtgagtgacggcgtcctggtggccggccggcccgtcaccttctacccgcacccgctgccctcgcctgggggtgttctttacacgtgggacttcggggacggctcccctgtcctgacccagagccagccggctgccaaccacacctatgcctcgaggggcacctaccacgtgcgcctggaggtcaacaacacggtgagcggtgcggcggcccaggcggatgtgcgcgtctttgaggagctccgcggactcagcgtggacatgagcctggccgtggagcagggcgcccccgtggtggtcagcgccgcggtgcagacgggcgacaacatcacgtggaccttcgacatgggggacggcaccgtgctgtcgggcccggaggcaacagtggagcatgtgtacctgcgggcacagaactgcacagtgaccgtgggtgcggccagccccgccggccacctggcccggagcctgcacgtgctggtcttcgtcctggaggtgctgcgcgttgaacccgccgcctgcatccccacgcagcctgacgcgcggctcacggcctacgtcaccgggaacccggcccactacctcttcgactggaccttcggggatggctcctccaacacgaccgtgcgggggtgcccgacggtgacacacaacttcacgcggagcggcacgttccccctggcgctggtgctgtccagccgcgtgaacagggcgcattacttcaccagcatctgcgtggagccagaggtgggcaacgtcaccctgcagccagagaggcagtttgtgcagctcggggacgaggcctggctggtggcatgtgcctggcccccgttcccctaccgctacacctgggactttggcaccgaggaagccgcccccacccgtgccaggggccctgaggtgacgttcatctaccgagacccaggctcctatcttgtgacagtcaccgcgtccaacaacatctctgctgccaatgactcagccctggtggaggtgcaggagcccgtgctggtcaccagcatcaaggtcaatggctcccttgggctggagctgcagcagccgtacctgttctctgctgtgggccgtgggcgccccgccagctacctgtgggatctgggggacggtgggtggctcgagggtccggaggtcacccacgcttacaacagcacaggtgacttcaccgttagggtggccggctggaatgaggtgagccgcagcgaggcctggctcaatgtgacggtgaagcggcgcgtgcgggggctcgtcgtcaatgcaagccgcacggtggtgcccctgaatgggagcgtgagcttcagcacgtcgctggaggccggcagtgatgtgcgctattcctgggtgctctgtgaccgctgcacgcccatccctgggggtcctaccatctcttacaccttccgctccgtgggcaccttcaatatcatcgtcacggctgagaacgaggtgggctccgcccaggacagcatcttcgtctatgtcctgcagctcatagaggggctgcaggtggtgggcggtggccgctacttccccaccaaccacacggtacagctgcaggccgtggttagggatggcaccaacgtctcctacagctggactgcctggagggacaggggcccggccctggccggcagcggcaaaggcttctcgctcaccgtgctcgaggccggcacctaccatgtgcagctgcgggccaccaacatgctgggcagcgcctgggccgactgcaccatggacttcgtggagcctgtggggtggctgatggtggccgcctccccgaacccagctgccgtcaacacaagcgtcaccctcagtgccgagctggctggtggcagtggtgtcgtatacacttggtccttggaggaggggctgagctgggagacctccgagccatttaccacccatagcttccccacacccggcctgcacttggtcaccatgacggcagggaacccgctgggctcagccaacgccaccgtggaagtggatgtgcaggtgcctgtgagtggcctcagcatcagggccagcgagcccggaggcagcttcgtggcggccgggtcctctgtgcccttttgggggcagctggccacgggcaccaatgtgagctggtgctgggctgtgcccggcggcagcagcaagcgtggccctcatgtcaccatggtcttcccggatgctggcaccttctccatccggctcaatgcctccaacgcagtcagctgggtctcagccacgtacaacctcacggcggaggagcccatcgtgggcctggtgctgtgggccagcagcaaggtggtggcgcccgggcagctggtccattttcagatcctgctggctgccggctcagctgtcaccttccgcctgcaggtcggcggggccaaccccgaggtgctccccgggccccgtttctcccacagcttcccccgcgtcggagaccacgtggtgagcgtgcggggcaaaaaccacgtgagctgggcccaggcgcaggtgcgcatcgtggtgctggaggccgtgagtgggctgcaggtgcccaactgctgcgagcctggcatcgccacgggcactgagaggaacttcacagcccgcgtgcagcgcggctctcgggtcgcctacgcctggtacttctcgctgcagaaggtccagggcgactcgctggtcatcctgtcgggccgcgacgtcacctacacgcccgtggccgcggggctgttggagatccaggtgcgcgccttcaacgccctgggcagtgagaaccgcacgctggtgctggaggttcaggacgccgtccagtatgtggccctgcagagcggcccctgcttcaccaaccgctcggcgcagtttgaggccgccaccagccccagcccccggcgtgtggcctaccactgggactttggggatgggtcgccagggcaggacacagatgagcccagggccgagcactcctacctgaggcctggggactaccgcgtgcaggtgaacgcctccaacctggtgagcttcttcgtggcgcaggccacggtgaccgtccaggtgctggcctgccgggagccggaggtggacgtggtcctgcccctgcaggtgctgatgcggcgatcacagcgcaactacttggaggcccacgttgacctgcgcgactgcgtcacctaccagactgagtaccgctgggaggtgtatcgcaccgccagctgccagcggccggggcgcccagcgcgtgtggccctgcccggcgtggacgtgagccggcctcggctggtgctgccgcggctggcgctgcctgtggggcactactgctttgtgtttgtcgtgtcatttggggacacgccactgacacagagcatccaggccaatgtgacggtggcccccgagcgcctggtgcccatcattgagggtggctcataccgcgtgtggtcagacacacgggacctggtgctggatgggagcgagtcctacgaccccaacctggaggacggcgaccagacgccgctcagtttccactgggcctgtgtggcttcgacacagagggaggctggcgggtgtgcgctgaactttgggccccgcgggagcagcacggtcaccattccacgggagcggctggcggctggcgtggagtacaccttcagcctgaccgtgtggaaggccggccgcaaggaggaggccaccaaccagacggtgctgatccggagtggccgggtgcccattgtgtccttggagtgtgtgtcctgcaaggcacaggccgtgtacgaagtgagccgcagctcctacgtgtacttggagggccgctgcctcaattgcagcagcggctccaagcgagggcggtgggctgcacgtacgttcagcaacaagacgctggtgctggatgagaccaccacatccacgggcagtgcaggcatgcgactggtgctgcggcggggcgtgctgcgggacggcgagggatacaccttcacgctcacggtgctgggccgctctggcgaggaggagggctgcgcctccatccgcctgtcccccaaccgcccgccgctggggggctcttgccgcctcttcccactgggcgctgtgcacgccctcaccaccaaggtgcacttcgaatgcacgggctggcatgacgcggaggatgctggcgccccgctggtgtacgccctgctgctgcggcgctgtcgccagggccactgcgaggagttctgtgtctacaagggcagcctctccagctacggagccgtgctgcccccgggtttcaggccacacttcgaggtgggcctggccgtggtggtgcaggaccagctgggagccgctgtggtcgccctcaacaggtctttggccatcaccctcccagagcccaacggcagcgcaacggggctcacagtctggctgcacgggctcaccgctagtgtgctcccagggctgctgcggcaggccgatccccagcacgtcatcgagtactcgttggccctggtcaccgtgctgaacgagtacgagcgggccctggacgtggcggcagagcccaagcacgagcggcagcaccgagcccagatacgcaagaacatcacggagactctggtgtccctgagggtccacactgtggatgacatccagcagatcgctgctgcgctggcccagtgcatggggcccagcagggagctcgtatgccgctcgtgcctgaagcagacgctgcacaagctggaggccatgatgctcatcctgcaggcagagaccaccgcgggcaccgtgacgcccaccgccatcggagacagcatcctcaacatcacaggagacctcatccacctggccagctcggacgtgcgggcaccacagccctcagagctgggagccgagtcaccatctcggatggtggcgtcccaggcctacaacctgacctctgccctcatgcgcatcctcatgcgctcccgcgtgctcaacgaggagcccctgacgctggcgggcgaggagatcgtggcccagggcaagcgctcggacccgcggagcctgctgtgctatggcggcgccccagggcctggctgccacttctccatccccgaggctttcagcggggccctggccaacctcagtgacgtggtgcagctcatctttctggtggactccaatccctttccctttggctatatcagcaactacaccgtctccaccaaggtggcctcgatggcattccagacacaggccggcgcccagatccccatcgagcggctggcctcagagcgcgccatcaccgtgaaggtgcccaacaactcggactgggctgcccggggccaccgcagctccgccaactccgccaactccgttgtggtccagccccaggcctccgtcggtgctgtggtcaccctggacagcagcaaccctgcggccgggctgcatctgcagctcaactatacgctgctggacggccactacctgtctgaggaacctgagccctacctggcagtctacctacactcggagccccggcccaatgagcacaactgctcggctagcaggaggatccgcccagagtcactccagggtgctgaccaccggccctacaccttcttcatttccccggggagcagagacccagcggggagttaccatctgaacctctccagccacttccgctggtcggcgctgcaggtgtccgtgggcctgtacacgtccctgtgccagtacttcagcgaggaggacatggtgtggcggacagaggggctgctgcccctggaggagacctcgccccgccaggccgtctgcctcacccgccacctcaccgccttcggcgccagcctcttcgtgcccccaagccatgtccgctttgtgtttcctgagccgacagcggatgtaaactacatcgtcatgctgacatgtgctgtgtgcctggtgacctacatggtcatggccgccatcctgcacaagctggaccagttggatgccagccggggccgcgccatccctttctgtgggcagcggggccgcttcaagtacgagatcctcgtcaagacaggctggggccggggctcaggtaccacggcccacgtgggcatcatgctgtatggggtggacagccggagcggccaccggcacctggacggcgacagagccttccaccgcaacagcctggacatcttccggatcgccaccccgcacagcctgggtagcgtgtggaagatccgagtgtggcacgacaacaaagggctcagccctgcctggttcctgcagcacgtcatcgtcagggacctgcagacggcacgcagcgccttcttcctggtcaatgactggctttcggtggagacggaggccaacgggggcctggtggagaaggaggtgctggccgcgagcgacgcagcccttttgcgcttccggcgcctgctggtggctgagctgcagcgtggcttctttgacaagcacatctggctctccatatgggaccggccgcctcgtagccgtttcactcgcatccagagggccacctgctgcgttctcctcatctgcctcttcctgggcgccaacgccgtgtggtacggggctgttggcgactctgcctacagcacggggcatgtgtccaggctgagcccgctgagcgtcgacacagtcgctgttggcctggtgtccagcgtggttgtctatcccgtctacctggccatcctttttctcttccggatgtcccggagcaaggtggctgggagcccgagccccacacctgccgggcagcaggtgctggacatcgacagctgcctggactcgtccgtgctggacagctccttcctcacgttctcaggcctccacgctgagcaggcctttgttggacagatgaagagtgacttgtttctggatgattctaagagtctggtgtgctggccctccggcgagggaacgctcagttggccggacctgctcagtgacccgtccattgtgggtagcaatctgcggcagctggcacggggccaggcgggccatgggctgggcccagaggaggacggcttctccctggccagcccctactcgcctgccaaatccttctcagcatcagatgaagacctgatccagcaggtccttgccgagggggtcagcagcccagcccctacccaagacacccacatggaaacggacctgctcagcagcctgtccagcactcctggggagaagacagagacgctggcgctgcagaggctgggggagctggggccacccagcccaggcctgaactgggaacagccccaggcagcgaggctgtccaggacaggactggtggagggtctgcggaagcgcctgctgccggcctggtgtgcctccctggcccacgggctcagcctgctcctggtggctgtggctgtggctgtctcagggtgggtgggtgcgagcttccccccgggcgtgagtgttgcgtggctcctgtccagcagcgccagcttcctggcctcattcctcggctgggagccactgaaggtcttgctggaagccctgtacttctcactggtggccaagcggctgcacccggatgaagatgacaccctggtagagagcccggctgtgacgcctgtgagcgcacgtgtgccccgcgtacggccaccccacggctttgcactcttcctggccaaggaagaagcccgcaaggtcaagaggctacatggcatgctgcggagcctcctggtgtacatgctttttctgctggtgaccctgctggccagctatggggatgcctcatgccatgggcacgcctaccgtctgcaaagcgccatcaagcaggagctgcacagccgggccttcctggccatcacgcggtctgaggagctctggccatggatggcccacgtgctgctgccctacgtccacgggaaccagtccagcccagagctggggcccccacggctgcggcaggtgcggctgcaggaagcactctacccagaccctcccggccccagggtccacacgtgctcggccgcaggaggcttcagcaccagcgattacgacgttggctgggagagtcctcacaatggctcggggacgtgggcctattcagcgccggatctgctgggggcatggtcctggggctcctgtgccgtgtatgacagcgggggctacgtgcaggagctgggcctgagcctggaggagagccgcgaccggctgcgcttcctgcagctgcacaactggctggacaacaggagccgcgctgtgttcctggagctcacgcgctacagcccggccgtggggctgcacgccgccgtcacgctgcgcctcgagttcccggcggccggccgcgccctggccgccctcagcgtccgcccctttgcgctgcgccgcctcagcgcgggcctctcgctgcctctgctcacctcggtgtgcctgctgctgttcgccgtgcacttcgccgtggccgaggcccgtacttggcacagggaagggcgctggcgcgtgctgcggctcggagcctgggcgcggtggctgctggtggcgctgacggcggccacggcactggtacgcctcgcccagctgggtgccgctgaccgccagtggacccgtttcgtgcgcggccgcccgcgccgcttcactagcttcgaccaggtggcgcagctgagctccgcagcccgtggcctggcggcctcgctgctcttcctgcttttggtcaaggctgcccagcagctacgcttcgtgcgccagtggtccgtctttggcaagacattatgccgagctctgccagagctcctgggggtcaccttgggcctggtggtgctcggggtagcctacgcccagctggccatcctgctcgtgtcttcctgtgtggactccctctggagcgtggcccaggccctgttggtgctgtgccctgggactgggctctctaccctgtgtcctgccgagtcctggcacctgtcacccctgctgtgtgtggggctctgggcactgcggctgtggggcgccctacggctgggggctgttattctccgctggcgctaccacgccttgcgtggagagctgtaccggccggcctgggagccccaggactacgagatggtggagttgttcctgcgcaggctgcgcctctggatgggcctcagcaaggtcaaggagttccgccacaaagtccgctttgaagggatggagccgctgccctctcgctcctccaggggctccaaggtatccccggatgtgcccccacccagcgctggctccgatgcctcgcacccctccacctcctccagccagctggatgggctgagcgtgagcctgggccggctggggacaaggtgtgagcctgagccctcccgcctccaagccgtgttcgaggccctgctcacccagtttgaccgactcaaccaggccacagaggacgtctaccagctggagcagcagctgcacagcctgcaaggccgcaggagcagccgggcgcccgccggatcttcccgtggcccatccccgggcctgcggccagcactgcccagccgccttgcccgggccagtcggggtgtggacctggccactggccccagcaggacaccccttcgggccaagaacaaggtccaccccagcagcacttagtcctccttcctggcgggggtgggccgtggagtcggagtggacaccgctcagtattactttctgccgctgtcaaggccgagggccaggcagaatggctgcacgtaggttccccagagagcaggcaggggcatctgtctgtctgtgggcttcagcactttaaagaggctgtgtggccaaccaggacccagggtcccctccccagctcccttgggaaggacacagcagtattggacggtttctagcctctgagatgctaatttatttccccgagtcctcaggtacagcgggctgtgcccggccccaccccctgggcagatgtcccccactgctaaggctgctggcttcagggagggttagcctgcaccgccgccaccctgcccctaagttattacctctccagttcctaccgtactccctgcaccgtctcactgtgtgtctcgtgtcagtaatttatatggtgttaaaatgtgtatatttttgtatgtcactattttcactagggctgaggggcctgcgcccagagctggcctcccccaacacctgctgcgcttggtaggtgtggtggcgttatggcagcccggctgctgcttggatgcgagcttggccttgggccggtgctgggggcacagctgtctgccaggcactctcatcaccccagaggccttgtcatcctcccttgccccaggccaggtagcaagagagcagcgcccaggcctgctggcatcaggtctgggcaagtagcaggactaggcatgtcagaggaccccagggtggttagaggaaaagactcctcctgggggctggctcccagggtggaggaaggtgactgtgtgtgtgtgtgtgtgcgcgcgcgcacgcgcgagtgtgctgtatggcccaggcagcctcaaggccctcggagctggctgtgcctgcttctgtgtaccacttctgtgggcatggccgcttctagagcctcgacacccccccaacccccgcaccaagcagacaaagtcaataaaagagctgtctgactgc

SEQ ID NO: 8647 - protein, 3858 aa, Homo sapiens; identical to SEQ ID NO: 8645

SEQ ID NO: 8648 - DNA, 14138 bp, Homo sapiens; identical to SEQ ID NO: 1306

SEQ ID NO: 8649 - protein, 4303 aa, Homo sapiens; identical to SEQ ID NO: 1307

SEQ ID NO: 8650 - DNA, 705 bp, Homo sapiens
ggcagcgagaggcccgcgctgaggcggcgcagcgcaaaggggcggacgctgagggcggccagggcgcggccggccgccgggaactcgaggcgcagcgtgacggcggcgtgcagccccacggccgggctgtagcgcgtgagctccaggaacacagcgcggctcctgcgcagagggtgcggggtctggctggactaaaggcaaaactaaagcccagaagacagaccagtgcaccggatgcccgtaccgcgtgatggccaggaaggcccggctgtgcagctcctgcttgatggcgctttgcagacggagccagtgaccaccgaggctgtgccactgcatcgggccaccatgctgatatgcccggtcccagagctgctagagaagaggtacagaggcagcgaagacacgttgagggggaggacgagaccaactgcgagacgccgagtcccgggctctcaggacgctctcccgtacctgcgccctcgtcagcccatcaccgaaagaacggcctgacccagggtcacactgcactgaatgcttcctgttttgctgtctctcggaggataaaagacactcttggctgggcgcagtgtctcaagcctgtaatcccagcacttcaggaggctgaggcaggaggatcacttgagctcaggagttggagacagtgagaccctgtctttacaaaaaattaaaaaatgacctagcctc

SEQ ID NO: 8651 - protein, 91 aa, Homo sapiens
MPVPRDGQEGPAVQLLLDGALQTEPVTTEAVPLHRATMLICPVPELLEKRYRGSEDTLRGRTRPTARRRVPGSQDALPYLRPRQPITERTA

SEQ ID NO: 8652 - DNA, 575 bp, Homo sapiens
tttgcctttagtccagccagaccctaggggacatgtggacatgtgtagatacctttgtggctgctagaactggaggtaggtgctgctggcatcagtaggcagaggggagggacacaggtccgtgtcttgcagtgcacaggacgggcccatgacagacaactgtctgccccagaacatccccaggataaggctgagaagcccaggtctagccgtggccagcagggcagtgggagccatgttccctgggtctctggtggccgctcactcgaggcgggcatggggcagtaggggctggagcgtgtgactgatgctgtggcaggtctgaggagctctggccatggatggcccacgtgctgctgccctacgtccacgggaaccagtccagcccagagctggggcccccacggctgcggcaggtgcggctgcaggaagcactctacccagaccctcccggccccagggtccacacgtgctcggccgcaggaggcttcagcaccagcgattacgacgttggctgggagagtcctcacaatggctcggggacgtgggcctattcagcgccggatctgctgggg

SEQ ID NO: 8653 - protein, 78 aa, Homo sapiens
MDGPRAAALRPREPVQPRAGAPTAAAGAAAGSTLPRPSRPQGPHVLGRRRLQHQRLRRWLGESSQWLGDVGLFSAGSA

SEQ ID NO: 8654 - DNA, 683 bp, Homo sapiens
caccccctcatccctcacctggggcagcgtaggtgtgcatgacattgtgctccaccagcacctgggccaccgaggggtctggaaccgggaaggactcgttgtacggaggctggaactggtggagggcctgctccccatccccaaaggtccacctgccggggcggtgggacgcaccatggcagcgtcctcgggcagcatgaagcagagcagaaggcagaggtgaaggtggagcccgcccccgccctgccccgccccatcccctcccctccccacccccgcccacctactgagagcttgaagaccgccgcgctctgataaatgacattgaagaccacgttctggaaggtcagggactgcttgtcgttgatggtccaccggaagaccatgtccgagccggcctccaccacggggctgtacctctgcggggggaatggtgtcagcctgggctctgtggaggactctgcccttagcctgtcgcctcctggacacacctcccgtcgggctggagagtcccacgcggggcacagaggagaggaggtgcccggggctctgcatgccatgggagccaagcccgggctgggacactcactgtccggctctccagccagccatgtagtactactaatgcctcaacctctctgtgcctcagtttccccatctgtaaagcaaacctagtaccagct

SEQ ID NO: 8655 - protein, 53 aa, Homo sapiens
MTLCSTSTWATEGSGTGKDSLYGGWNWWRACSPSPKVHLPGRWDAPWQRPRAA

SEQ ID NO: 8656 - DNA, 541 bp, Homo sapiens
atgcgggccctctgccccagcacccacatctcaggacaccccttcctcccaggaagaagacccccaagagcaaaggggccagcacccccgctgcctccacgctgcccaccgccaacggggcccgaccggcgcgctccgggactgcgctttccggccccgacgcgccgcccaacgggcccttgcagcccggccggccctcgcttggcggcggtgtcgacttctacgacgtcgccttcaaggtcatgctggtgggggactcgggtgtggggaagacctgtctgctggtgcgattcaaggatggtgctttcctggcggggaccttcatctccaccgtaggcattgacttccggcagggtctcactctgtcgccctggctggagtgcagtggtgatcatggtggactgcaacctccaacttctgggttcaagccatcctgagtctttcaaattagcaaaaagagctactgggaaggctgaggcgttgcagctcgttagttactgcacccatttgcagatgaggaaaccgaggcagtgtcaaacaa

SEQ ID NO: 8657 - protein, 111 aa, Homo sapiens
MRALCPSTHISGHPFLPGRRPPRAKGPAPPLPPRCPPPTGPDRRAPGLRFPAPTRRPTGPCSPAGPRLAAVSTSTTSPSRSCWWGTRVWGRPVCWCDSRMVLSWRGPSSPP

SEQ ID NO: 8658 - DNA, 1649 bp, Homo sapiens
ggcgcgagccgggcgcccgggatgatgccgccgccgccgccgccgccgccgccgccgccaggggaagggttcgggtccgggtcgggctcggcgggcgcggggtgcgggacggcccagggcacggcggctgcagcgggagcacactgagcgcccgcccgccatgtccaggaagaagacccccaagagcaaaggggccagcacccccgctgcctccacgctgcccaccgccaacggggcccgaccggcgcgctccgggactgcgctttccggccccgacgcgccgcccaacgggcccttgcagcccggccggccctcgcttggcggcggtgtcgacttctacgacgtcgccttcaaggtcatgctggtgggggactcgggtgtggggaagacctgtctgctggtgcgattcaaggatggtgctttcctggcggggaccttcatctccaccgtaggcattgacttccggaacaaagttctggacgtggatggtgtgaaggtgaagctgcagatgtgggacacagctggtcaggagcggttccgcagtgttacccatgcctactaccgggatgctcatgctctgctgctgctctacgatgtcaccaacaaggcctcctttgacaacatccaggcctggctgaccgagatccacgagtacgcccagcacgacgtggcgctcatgctgctggggaacaaggtggactctgcccatgagcgtgtggtgaagagggaggacggggagaagctggccaaggagtatggactgcccttcatggagaccagcgccaagacgggcctcaacgtggacttggccttcacagccatagcaaaggagttgaagcagcgctccatgaaggctcccagcgagccgcgcttccggctgcatgattacgttaagagggagggtcgaggggcctcctgctgccgcccttgaacctggctgagctcagtcctctggaggaagccgtccagtccctagaaggctggacagagggtctccaggcccttctgactttgttgcccagtggccaacgcccgagtgtctgttttcaggagccccaggtcaagccttgtcccttcctcctcccagcaacagtcccaacaagcaggcttctgagagcccgtggccgcacactggccgccacggaaaagcagtcttctgcacgggacggggagcggcaagtggacagactttgccacggtgctctgctgccccctcctgggcacgtccaggtgagggagggctggggctggcaccacgcacagtgcctaaccctagaaaagccatgtcttcagccgcacatgctcaggcagctaagggaggacgcctgcccacgcctgggacagaaggcttcactgctaatcacatcgtgcatctgtgtgtcctgggagctgcctgctcccggcccaccctctaggaggctctggctcaaacagcaatagggtcttcctcactgaccttggaggatgcctgtggccttgtgataaaatgtgggaaatcacagaaaacaccagaaacaacaactgccagcccggcctggccacaggtgaggtctgtgatttccgagcacgctccaccttgcactcaacttggccttttgattgcacaagcctttgttttcagtcctagtgaataaagttgtgttttctgg

SEQ ID NO: 8659 - protein, 256 aa, Homo sapiens; identical to SEQ ID NO: 1309

SEQ ID NO: 8660 - DNA, 1751 bp, Homo sapiens
ggcgcgagccgggcgcccgggatgatgccgccgccgccgccgccgccgccgccgccgccaggggaagggttcgggtccgggtcgggctcggcgggcgcggggtgcgggacggcccagggcacggcggctgcagcgggagcacactgagcgcccgcccgccatgtccaggaagaagacccccaagagcaaaggggccagcacccccgctgcctccacgctgcccaccgccaacggggcccgaccggcgcgctccgggactgcgctttccggccccgacgcgccgcccaacgggcccttgcagcccggccggccctcgcttggcggcggtgtcgacttctacgacgtcgccttcaaggtcatgctggtgggggactcgggtgtggggaagacctgtctgctggtgcgattcaaggatggtgctttcctggcggggaccttcatctccaccgtaggcattgacttccggaacaaagttctggacgtggatggtgtgaaggtgaagctgcagatgtgggacacagctggtcaggagcggttccgcagtgttacccatgcctactaccgggatgctcatgctctgctgctgctctacgatgtcaccaacaaggcctcctttgacaacatccaggcctggctgaccgagatccacgagtacgcccagcacgacgtggcgctcatgctgctggggaacaaggtggactctgcccatgagcgtgtggtgaagagggaggacggggagaagctggccaaggtgagtcagggcaggggggtggtgagggggtgcccctggaggctgcgagcctaggctgtccccgccaggccaccacctggctggcagcagctgtttacaggagtatggactgcccttcatggagaccagcgccaagacgggcctcaacgtggacttggccttcacagccatagcaaaggagttgaagcagcgctccatgaaggctcccagcgagccgcgcttccggctgcatgattacgttaagagggagggtcgaggggcctcctgctgccgcccttgaacctggctgagctcagtcctctggaggaagccgtccagtccctagaaggctggacagagggtctccaggcccttctgactttgttgcccagtggccaacgcccgagtgtctgttttcaggagccccaggtcaagccttgtcccttcctcctcccagcaacagtcccaacaagcaggcttctgagagcccgtggccgcacactggccgccacggaaaagcagtcttctgcacgggacggggagcggcaagtggacagactttgccacggtgctctgctgccccctcctgggcacgtccaggtgagggagggctggggctggcaccacgcacagtgcctaaccctagaaaagccatgtcttcagccgcacatgctcaggcagctaagggaggacgcctgcccacgcctgggacagaaggcttcactgctaatcacatcgtgcatctgtgtgtcctgggagctgcctgctcccggcccaccctctaggaggctctggctcaaacagcaatagggtcttcctcactgaccttggaggatgcctgtggccttgtgataaaatgtgggaaatcacagaaaacaccagaaacaacaactgccagcccggcctggccacaggtgaggtctgtgatttccgagcacgctccaccttgcactcaacttggccttttgattgcacaagcctttgttttcagtcctagtgaataaagttgtgttttctggag

SEQ ID NO: 8661 - protein, 214 aa, Homo sapiens
MSRKKTPKSKGASTPAASTLPTANGARPARSGTALSGPDAPPNGPLQPGRPSLGGGVDFYDVAFKVMLVGDSGVGKTCLLVRFKDGAFLAGTFISTVGIDFRNKVLDVDGVKVKLQMWDTAGQERFRSVTHAYYRDAHALLLLYDVTNKASFDNIQAWLTEIHEYAQHDVALMLLGNKVDSAHERVVKREDGEKLAKVSQGRGVVRGCPWRLRA

SEQ ID NO: 8662 - DNA, 1669 bp, Homo sapiens
ggcgcgagccgggcgcccgggatgatgccgccgccgccgccgccgccgccgccgccgccaggggaagggttcgggtccgggtcgggctcggcgggcgcggggtgcgggacggcccagggcacggcggctgcagcgggagcacactgagcgcccgcccgccatgtccaggaagaagacccccaagagcaaaggggccagcacccccgctgcctccacgctgcccaccgccaacggggcccgaccggcgcgctccgggactgcgctttccggccccgacgcgccgcccaacgggcccttgcagcccggccggccctcgcttggcggcggtgtcgacttctacgacgtcgccttcaaggtcatgctggtgggggactcgggtgtggggaagacctgtctgctggtgcgattcaaggatggtgctttcctggcggggaccttcatctccaccgtaggcattgacttccggaacaaagttctggacgtggatggtgtgaaggtgaagctgcagatgtgggacacagctggtcaggagcggttccgcagtgttacccatgcctactaccgggatgctcatgctctgctgctgctctacgatgtcaccaacaaggcctcctttgacaacatccaggcctggctgaccgagatccacgagtacgcccagcacgacgtggcgctcatgctgctggggaacaaggtggactctgcccatgagcgtgtggtgaagagggaggacggggagaagctggccaaggagtatggactgcccttcatggagaccagcgccaagacgggcctcaacgtggacttggccttcacagccatagcaaaggagttgaagcagcgctccatgaaggctcccagcgagccgcgcttccggctgcatgattacgttaagagggagggtcgaggggcctcctgctgccgcccttgaacctggctgagctcagtcctctggaggaagccgtccagtccctagaaggctggacagagggtctccaggcccttctgactttgttgcccagtggccaacgcccgagtgtctgttttcaggagccccaggtcaagccttgtcccttcctcctcccagcaacagtcccaacaagcaggcttctgagagcccgtggccgcacactggccgccacggaaaagcagtcttctgcacgggacggggagcggcaagtggacagactttgccacggtgctctgctgccccctcctgggcacgtccaggtgagggagggctggggctggcaccacgcacagtgcctaaccctagaaaagccatgtcttcagccgcacatgctcaggcagctaagggaggacgcctgcccacgcctgggacagaaggcttcactgctaatcacatcgtgcatctgtgtgtcctgggagctgcctgctcccggcccaccctctaggaggctctggctcaaacagcaatagggtcttcctcactgaccttggaggatgcctgtggccttgtgataaaatgtgggaaatcacagaaaacaccagaaacaacaactgccagcccggcctggccacaggtgaggtctgtgatttccgagcacgctccaccttgcactcaacttggccttttgattgcacaagcctttgttttcagtcctagtgaataaagttgtgttttctggagcgtctgtctcatctgttg

SEQ ID NO: 8663 - protein, 256 aa, Homo sapiens; identical to SEQ ID NO: 1309

SEQ ID NO: 8664 - DNA, 759 bp, Homo sapiens
gaggctgcgagcctaggctgtccccgccaggccaccacctggctggcagcagctgtttacaggagtatggactgcccttcatggagaccagcgccaagacgggcctcaacgtggacttggccttcacagccatagcaaagtaagtcctgccagtcaccaggactcccccagcccagggcctgaatcctcattagagtccaggccatcgtgtccccttgtcacccccactccgcagggagttgaagcagcgctccatgaaggctcccagcgagccgcgcttccggctgcatgattacgttaagagggagggtcgaggggcctcctgctgccgcccttgaacctggctgagctcagtcctctggaggaagccgtccagtcccctagaaaagccatgtcttcagccgcacatgctcaggcagctaagggaggacgcctgcccacgcctgggacagaaggcttcactgctaatcacatcgtgcatctgtgtgtcctgggagctgcctgctcccggcccaccctctaggaggctctggctcaaacagcaatagggtcttcctcactgaccttggaggatgcctgtggccttgtgataaaatgtgggaaatcacagaaaacaccagaaacaacaactgccagcccggcctggccacaggtgaggtctgtgatttccgagcacgctccaccttgcactcaacttggccttttgattgcacaagcctttgttttcagtcctagtgaataaagttgtgttttctggag

SEQ ID NO: 8665 - protein, 46 aa, Homo sapiens
MWEITENTRNNNCQPGLATGEVCDFRARSTLHSTWPFDCTSLCFQS

SEQ ID NO: 8666 - DNA, 341 bp, Homo sapiens
ttttcggggtcgagtccgagggggaagaggtttgttaatacgttcgccatgtgctacgatcttgggacgaactgagccacgagcgtggctttgagggccgtccgaacgctgcaggccggccaggtccctgggcgtccaggcctggcctacgcaccactttgtcccttagcgtttaaaggtttcttcccgaatctcaggccctcagctacctgcaggtttcgtcgcgagccggctgcaagttttgaacctaagtaaacctcaatccggagggcctagcggtaaggtgggcgctgtgtctattgaagtgcttagcaataaagaaaggtagtgagttgattcgg

SEQ ID NO: 8667 - protein, 59 aa, Homo sapiens
ATSVALRAVRTLQAGQVPGRPGLAYAPLCPLAFKGFFPNLRPSATCRFRREPAASFEPK

SEQ ID NO: 8668 - DNA, 2527 bp, Homo sapiens
ttccggctcgcgcgtctagtccctttcccggccggcggccgagggggcatcatgaagcgggctggcggcgctgccgctcccgggcggccgcgggcgggaggtgcttcccaaggaccgtagatgcctctctagagcatgagctcaggcaagagtgcccgctacaaccgcttctccggggggcccagcaatcttcccaccccagacgtcaccacagggaccagaatggaaacgaccttcggacccgccttttcagccgtcaccaccatcacaaaagctgacgggaccagcacctacaagcagcactgcaggacaccctcctcctccagcacccttgcctactccccgcgggacgaggaggacagcatgccccccatcagcactccccgccgctccgactccgccatctctgtccgctccctgcactcagagtccagcatgtctctgcgctccacattctcactgcccgaggaggaggaggagccggagccactggtgtttgcggagcagccctcggtgaagctgtgctgtcagctctgctgcagcgtcttcaaagaccccgtgatcaccacgtgtgggcacacgttctgtaggagatgcgccttgaagtcagagaagtgtcccgtggacaacgtcaaactgaccgtggtggtgaacaacatcgcggtggccgagcagatcggggagctcttcatccactgccggcacggctgccgggtagcgggcagcgggaagccccccatctttgaggtggacccccgagggtgccccttcaccatcaagctcagcgcccggaaggaccacgagggcagctgtgactacaggcctgtgcggtgtcccaacaaccccagctgccccccgctgctcaggatgaacctggaggcccacctcaaggagtgcgagcacatcaaatgcccccactccaagtacgggtgcacgttcatcgggaaccaggacacttacgagacccacctggagacttgccgcttcgagggcctgaaggagtttctgcagcagacggatgaccgcttccacgagatgcacgtggctctggcccagaaggaccaggagatcgccttcctgcgctccatgctgggaaagctctcggagaagatcgaccagctagagaagagcctggagctcaagtttgacgtcctggacgaaaaccagagcaagctcagcgaggacctcatggagttccggcgggacgcatccatgttaaatgacgagctgtcccacatcaacgcgcggctgaacatgggcatcctaggctcctacgaccctcagcagatcttcaagtgcaaagggacctttgtgggccaccagggccctgtgtggtgtctctgcgtctactccatgggtgacctgctcttcagtggctcctctgacaagaccatcaaggtgtgggacacatgtaccacctacaagtgtcagaagacactggagggccatgatggcatcgtgctggctctctgcatccaggggtgcaaactctacagcggctctgcagactgcaccatcattgtgtgggacatccagaacctgcagaaggtgaacaccatccgggcccatgacaacccggtgtgcacgctggtctcctcacacaacgtgctcttcagcggctccctgaaggccatcaaggtctgggacatcgtgggcactgagctgaagttgaagaaggagctcacaggcctcaaccactgggtgcgggccctggtggctgcccagagctacctgtacagcggctcctaccagacaatcaagatctgggacatccgaacccttgactgcatccacgtcctgcagacgtctggtggcagcgtctactccattgctgtgacaaatcaccacattgtctgtggcacctacgagaacctcatccacgtgtgggacattgagtccaaggagcaggtgcggaccctcacgggccacgtgggcaccgtgtatgccctggcggtcatctcgacgccagaccagaccaaagtcttcagtgcatcctacgaccggtccctcagggtctggagtatggacaacatgatctgcacgcagaccctgctgcgtcaccagggcagtgtcaccgcgctggctgtgtcccggggccgactcttctcaggggctgtggatagcactgtgaaggtttggacttgctaacaggatccaggccaggctgtggtttcccctgaaccagccctggacctttctgagccaggctggccacatggggtggtctcggggtttctgcctgccccgtgggcataggtggacaggctctggcagccgggcagtgccctccccgtcccatgctcggcgagcctccctctactcggcactgtccttgctgcccagcccctctctgggtgccaggtacgacgcttgccccggcccaccctccatccccaccctccatccccaccctagatggagcgagggcctttttactcaccttttctaccgtttttagactgtatgtagatttggttacctcctggttgaaataaatgctccacagactgtggctgtgagtggggac

SEQ ID NO: 8669 - protein, 670 aa, Homo sapiens; identical to SEQ ID NO: 1312

SEQ ID NO: 8670 - DNA, 3633 bp, Homo sapiens
ttccggctcgcgcgtctagtccctttcccggccggcggccgagggggcatcatgaagcgggctggcggcgctgccgctcccgggcggccgcgggcgggaggtgcttcccaaggaccgtagatgcctctctagagcatgagctcaggcaagagtgcccgctacaaccgcttctccggggggcccagcaatcttcccaccccagacgtcaccacagggaccagaatggaaacgaccttcggacccgccttttcagccgtcaccaccatcacaaaagctgacgggaccagcacctacaagcagcactgcaggacaccctcctcctccagcacccttgcctactccccgcgggacgaggaggacagcatgccccccatcagcactccccgccgctccgactccgccatctctgtccgctccctgcactcagagtccagcatgtctctgcgctccacattctcactgcccgaggaggaggaggagccggagccactggtgtttgcggagcagccctcggtgaagctgtgctgtcagctctgctgcagcgtcttcaaagaccccgtgatcaccacgtgtgggcacacgttctgtaggagatgcgccttgaagtcagagaagtgtcccgtggacaacgtcaaactgaccgtggtggtgaacaacatcgcggtggccgagcagatcggggagctcttcatccactgccggcacggctgccgggtagcgggcagcgggaagccccccatctttgaggtggacccccgagggtgccccttcaccatcaagctcagcgcccggaaggaccacgagggcagctgtgactacaggcctgtgcggtgtcccaacaaccccagctgccccccgctgctcaggatgaacctggaggcccacctcaaggagtgcgagcacatcaaatgcccccactccaagtacgggtgcacgttcatcgggaaccaggacacttacgagacccacctggagacttgccgcttcgagggcctgaaggagtttctgcagcagacggatgaccgcttccacgagatgcacgtggctctggcccagaaggaccaggagatcgccttcctgcgctccatgctgggaaagctctcggagaagatcgaccagctagagaagagcctggagctcaagtttgacgtcctggacgaaaaccagagcaagctcagcgaggacctcatggagttccggcgggacgcatccatgttaaatgacgagctgtcccacatcaacgcgcggctgaacatgggcatcctaggctcctacgaccctcagcagatcttcaagtgcaaagggacctttgtgggccaccagggccctgtgtggtgtctctgcgtctactccatgggtgacctgctcttcagtggctcctctgacaagaccatcaaggtgtgggacacatgtaccacctacaagtgtcagaagacactggagggccatgatggcatcgtgctggctctctgcatccaggggtgcaaactctacagcggctctgcagactgcaccatcattgtgtgggacatccagaacctgcagaaggtgaacaccatccgggcccatgacaacccggtgtgcacgctggtctcctcacacaacgtgctcttcagcggctccctgaaggccatcaaggtctgggacatcgtgggcactgagctgaagttgaagaaggagctcacaggcctcaaccactgggtgcgggccctggtggctgcccagagctacctgtacagcggctcctaccagacaatcaagatctgggacatccgaacccttgactgcatccacgtcctgcagacgtctggtggcagcgtctactccattgctgtgacaaatcaccacattgtctgtggcacctacgagaacctcatccacgtgtgggacattgagtccaaggagcaggtgcggaccctcacgggccacgtgggcaccgtgtatgccctggcggtcatctcgacgccagaccagaccaaagtcttcagtgcatcctacgaccggtccctcagggtctggagtatggacaacatgatctgcacgcagaccctgctgcgtcaccagggcagtgtcaccgcgctggctgtgtcccggggccgactcttctcaggggctgtggatagcactgtgaaggtttggacttgctaacaggatccaggccaggctgtggtttcccctgaaccagccctggacctttctgagccaggctggccacatggggtggtctcggggtttctgcctgccccgtgggcataggtggacaggctctggcagccgggcagtgccctccccgtcccatgctcggcgagcctccctctactcggcactgtccttgctgcccagcccctctctgggtgccaggtacgacgcttgccccggcccaccctccatccccaccctccatccccaccctagatggagcgagggcctttttactcaccttttctaccgtttttagactgtatgtagatttggttacctcctggttgaaataaatgctccacagactgtggctgtgagtggggacagctcctcgggacaagggggctgtgtgtggccttgaggttggtgtgcacaggcactggctgctgtgagtgggggggcatggggcagtttcctttggtggaccccaggacttcggcccactccggggcctcccctccctgctaggaggcaactcgtcacacccaagctgctggcctccagtcccatctcccccaacacatgtgcccccaaaaagtgagccaggcacctctgtttcctgctgtttattgacagccgacggcagcgccttgcccagacctcccctgcccacctgctggagcccagcctgtgccgccctctgaggagaggcctggggggacagctgggcacgtccactcgcagggaaacacggggtgagacagcaggaaggggccctgcacgccgggacgccacctccgccagccgcctccacccgccccacaccacaatcgctggttttcggcattttttaaattttttttttaagaaacgtcaaagttgtgcccaacactgtggatcagcaaacacgatagaggagaccagtcagtacttcttggagggggcaggaggagagaggaaaagggagggcgagaatgaccacacaacacagccttggaccatgagcagaagcgtccgtgggaactccactggggtggatgggctgcctgcacagcccctggagagggggccaggcacaccctcagaggagctgcaagcccgtggcctggcctgctacatgccctgcttccacgtggctgccacgctgacacacccacattcaccaaacccacccgcgccctgggacgcagccacgccaggaggaggacacggccgccgagagcaaggcacaacctcgagttcttggggcgcagagaacttaggagagaagcacggaggagcccccggcagagcacccgcccccgggccccagccttccacctgtgctagcagcctggggcctccactctggccggaggaaggaccgcaggcagacagcctgggcctctaacagcttttgtccggagctagacttcgtgtcctttcagttggtaaatggttttctatagaatcaataatatttctttctttaaatatatatttgttaaagtt

SEQ ID NO: 8671 - protein, 670 aa, Homo sapiens; identical to SEQ ID NO: 1312

SEQ ID NO: 8672 - DNA, 3703 bp, Homo sapiens
ttccggctcgcgcgtctagtccctttcccggccggcggccgagggggcatcatgaagcgggctggcggcgctgccgctcccgggcggccgcgggcgggaggtgcttcccaaggaccgtagatgcctctctagagcatgagctcaggcaagagtgcccgctacaaccgcttctccggggggcccagcaatcttcccaccccagacgtcaccacagggaccagaatggaaacgaccttcggacccgccttttcagccgtcaccaccatcacaaaagctgacgggaccagcacctacaagcagcactgcaggacaccctcctcctccagcacccttgcctactccccgcgggacgaggaggacagcatgccccccatcagcactccccgccgctccgactccgccatctctgtccgctccctgcactcagagtccagcatgtctctgcgctccacattctcactgcccgaggaggaggaggagccggagccactggtgtttgcggagcagccctcggtgaagctgtgctgtcagctctgctgcagcgtcttcaaagaccccgtgatcaccacgtgtgggcacacgttctgtaggagatgcgccttgaagtcagagaagtgtcccgtggacaacgtcaaactgaccgtggtggtgaacaacatcgcggtggccgagcagatcggggagctcttcatccactgccggcacggctgccgggtagcgggcagcgggaagccccccatctttgaggtggacccccgagggtgccccttcaccatcaagctcagcgcccggaaggaccacgagggcagctgtgactacaggcctgtgcggtgtcccaacaaccccagctgccccccgctgctcaggatgaacctggaggcccacctcaaggagtgcgagcacatcaaatgcccccactccaagtacgggtgcacgttcatcgggaaccaggacacttacgagacccacctggagacttgccgcttcgagggcctgaaggagtttctgcagcagacggatgaccgcttccacgagatgcacgtggctctggcccagaaggaccaggagatcgccttcctgcgctccatgctgggaaagctctcggagaagatcgaccagctagagaagagcctggagctcaagtttgacgtcctggacgaaaaccagagcaagctcagcgaggacctcatggagttccggcgggacgcatccatgttaaatgacgagctgtcccacatcaacgcgcggctgaacatgggcatcctaggctcctacgaccctcagcagatcttcaagtgcaaagggacctttgtgggccaccagggccctgtgtggtgtctctgcgtctactccatgggtgacctgctcttcagtggctcctctgacaagaccatcaaggtgtgggacacatgtaccacctacaagtgtcagaagacactggagggccatgatggcatcgtgctggctctctgcatccaggggtgcaaactctacagcggctctgcagactgcaccatcattgtgtgggacatccagaacctgcagaaggtgaacaccatccgggcccatgacaacccggtgtgcacgctggtctcctcacacaacgtgctcttcagcggctccctgaaggccatcaaggtctgggacatcgtgggcactgagctgaagttgaagaaggagctcacaggcctcaaccactgggtgcgggccctggtggctgcccagagctacctgtacagcggctcctaccagacaatcaagatctgggacatccgaacccttgactgcatccacgtcctgcagacgtctggtggcagcgtctactccattgctgtgacaaatcaccacattgtctgtggcacctacgagaacctcatccacgtgtgggacattgagtccaaggagcaggtgcggaccctcacgggccacgtgggcaccgtgtatgccctggcggtcatctcgacgccagaccagaccaaagtcttcagtgcatcctacgaccggtccctcagggtctggagtatggacaacatgatctgcacgcagaccctgctgcgtcaccagggcagtgtcaccgcgctggctgtgtcccggggccgactcttctcaggggctgtggatagcactgtgaaggtttggacttgctaacaggatccaggccaggctgtggtttcccctgaaccagccctggacctttctgagccaggctggccacatggggtggtctcggggtttctgcctgccccgtgggcataggtggacaggctctggcagccgggcagtgccctccccgtcccatgctcggcgagcctccctctactcggcactgtccttgctgcccagcccctctctgggtgccaggtacgacgcttgccccggcccaccctccatccccaccctccatccccaccctagatggagcgagggcctttttactcaccttttctaccgtttttagactgtatgtagatttggttacctcctggttgaaataaatgctccacagactgtggctgtgagtggggacagctcctcgggacaagggggctgtgtgtggccttgaggttggtgtgcacaggcactggctgctgtgagtgggggggcatggggcagtttcctttggtggaccccaggacttcggcccactccggggcctcccctccctgctaggaggcaactcgtcacacccaagctgctggcctccagtcccatctcccccaacacatgtgcccccaaaaagtgagccaggcacctctgtttcctgctgtttattgacagccgacggcagcgccttgcccagacctcccctgcccacctgctggagcccagcctgtgccgccctctgaggagaggcctggggggacagctgggcacgtccactcgcagggaaacacggggtgagacagcaggaaggggccctgcacgccgggacgccacctccgccagccgcctccacccgccccacaccacaatcgctggttttcggcattttttaaattttttttttaagaaacgtcaaagttgtgcccaacactgtggatcagcaaacacgatagaggagaccagtcagtacttcttggagggggcaggaggagagaggaaaagggagggcgagaatgaccacacaacacagccttggaccatgagcagaagcgtccgtgggaactccactggggtggatgggctgcctgcacagcccctggagagggggccaggcacaccctcagaggagctgcaagcccgtggcctggcctgctacatgccctgcttccacgtggctgccacgctgacacacccacattcaccaaacccacccgcgccctgggacgcagccacgccaggaggaggacacggccgccgagagcaaggcacaacctcgagttcttggggcgcagagaacttaggagagaagcacggaggagcccccggcagagcacccgcccccgggccccagccttccacctgtgctagcagcctggggcctccactctggccggaggaaggaccgcaggcagacagcctgggcctctaacagcttttgtccggagctagacttcgtgtcctttcagttggtaaatggttttctatagaatcaataatatttctttctttaaatatatatttgttaaagttatacctttttgtttctctggggaaatccgcctcagctcattcccaataaattaatactcttgatagctta

SEQ ID NO: 8673 - protein, 670 aa, Homo sapiens; identical to SEQ ID NO: 1312

SEQ ID NO: 8674 - DNA, 670 bp, Homo sapiens
gggggcatcatgaagcgggctggcggcgctgccgctcccgggcggccgcgggcgggaggtgcttcccaaggaccgtagatgcctctctagagcatgagctcaggcaagagtgcccgctacaaccgcttctccggggggcccagcaatcttcccaccccagacgtcaccacagggaccagaatggaaacgaccttcggacccgccttttcagccgtcaccaccatcacaaaagctgacgggaccagcacctacaagcagcactgcaggacaccctcctcctccagcacccttgcctactccccgcgggacgaggaggacagcatggtaggtccctacccccaggagcccgtgtgagcctcagcctccccccatcctccctcctgggggaaccaggtcccaggaggagttgacagtgagctggtgaggcacaggagaagaagagcacctgtggataccctgaggcctcggcagacatggcaagtctgtgagaaaggaggctcctgtggctggactgtgggtggcagggggcagccagtgagggcagctgggtcagagggcctggcacctgcaggccaggatgaggcatatttggctccatcttaagggaggtggaaaccacagaaagttcagtcaggaggatagcacaataaaatacatgctttgaaagctt

SEQ ID NO: 8675 - protein, 86 aa, Homo sapiens
MSSGKSARYNRFSGGPSNLPTPDVTTGTRMETTFGPAFSAVTTITKADGTSTYKQHCRTPSSSSTLAYSPRDEEDSMVGPYPQEPV

SEQ ID NO: 8676 - DNA, 568 bp, Homo sapiens
ggaggtgcttcccaaggaccgtagatgcctctctagagcatgagctcaggcaagagtgcccgctacaaccgcttctccggggggcccagcaatcttcccaccccagacgtcaccacagggaccagaatggaaacgaccttcggacccgccttttcagccgtcaccaccatcacaaaagctgacgggaccagcacctacaagcagcactgcaggacaccctcctcctccagcacccttgcctactccccgcgggacgaggaggacagcatgccccccatcagcactccccgccgctccgactccgccatctctgtccgctccctgcactcagaaacttaggagagaagcacggaggagcccccggcagagcacccgcccccgggccccagccttccacctgtgctagcagcctggggcctccactctggccggaggaaggaccgcaggcagacagcctgggcctctaacagcttttgtccggagctagacttcgtgtcctttcagttggtaaatggttttctatagaatcaataatatttctttctttaaatatatatttgttaaagtt

SEQ ID NO: 8677 - protein, 99 aa, Homo sapiens
MSSGKSARYNRFSGGPSNLPTPDVTTGTRMETTFGPAFSAVTTITKADGTSTYKQHCRTPSSSSTLAYSPRDEEDSMPPISTPRRSDSAISVRSLHSET

SEQ ID NO: 8678 - DNA, 3558 bp, Homo sapiens
ggaggtgcttcccaaggaccgtagatgcctctctagagcatgagctcaggcaagagtgcccgctacaaccgcttctccggggggcccagcaatcttcccaccccagacgtcaccacagggaccagaatggaaacgaccttcggacccgccttttcagccgtcaccaccatcacaaaagctgacgggaccagcacctacaagcagcactgcaggacaccctcccccccatcagcactccccgccgctccgactccgccatctctgtccgctccctgcactcagagtccagcatgtctctgcgctccacattctcactgcccgaggaggaggaggagccggagccactggtgtttgcggagcagccctcggtgaagctgtgctgtcagctctgctgcagcgtcttcaaagaccccgtgatcaccacgtgtgggcacacgttctgtaggagatgcgccttgaagtcagagaagtgtcccgtggacaacgtcaaactgaccgtggtggtgaacaacatcgcggtggccgagcagatcggggagctcttcatccactgccggcacggctgccgggtagcgggcagcgggaagccccccatctttgaggtggacccccgagggtgccccttcaccatcaagctcagcgcccggaaggaccacgagggcagctgtgactacaggcctgtgcggtgtcccaacaaccccagctgccccccgctgctcaggatgaacctggaggcccacctcaaggagtgcgagcacatcaaatgcccccactccaagtacgggtgcacgttcatcgggaaccaggacacttacgagacccacctggagacttgccgcttcgagggcctgaaggagtttctgcagcagacggatgaccgcttccacgagatgcacgtggctctggcccagaaggaccaggagatcgccttcctgcgctccatgctgggaaagctctcggagaagatcgaccagctagagaagagcctggagctcaagtttgacgtcctggacgaaaaccagagcaagctcagcgaggacctcatggagttccggcgggacgcatccatgttaaatgacgagctgtcccacatcaacgcgcggctgaacatgggcatcctaggctcctacgaccctcagcagatcttcaagtgcaaagggacctttgtgggccaccagggccctgtgtggtgtctctgcgtctactccatgggtgacctgctcttcagtggctcctctgacaagaccatcaaggtgtgggacacatgtaccacctacaagtgtcagaagacactggagggccatgatggcatcgtgctggctctctgcatccaggggtgcaaactctacagcggctctgcagactgcaccatcattgtgtgggacatccagaacctgcagaaggtgaacaccatccgggcccatgacaacccggtgtgcacgctggtctcctcacacaacgtgctcttcagcggctccctgaaggccatcaaggtctgggacatcgtgggcactgagctgaagttgaagaaggagctcacaggcctcaaccactgggtgcgggccctggtggctgcccagagctacctgtacagcggctcctaccagacaatcaagatctgggacatccgaacccttgactgcatccacgtcctgcagacgtctggtggcagcgtctactccattgctgtgacaaatcaccacattgtctgtggcacctacgagaacctcatccacgtgtgggacattgagtccaaggagcaggtgcggaccctcacgggccacgtgggcaccgtgtatgccctggcggtcatctcgacgccagaccagaccaaagtcttcagtgcatcctacgaccggtccctcagggtctggagtatggacaacatgatctgcacgcagaccctgctgcgtcaccagggcagtgtcaccgcgctggctgtgtcccggggccgactcttctcaggggctgtggatagcactgtgaaggtttggacttgctaacaggatccaggccaggctgtggtttcccctgaaccagccctggacctttctgagccaggctggccacatggggtggtctcggggtttctgcctgccccgtgggcataggtggacaggctctggcagccgggcagtgccctccccgtcccatgctcggcgagcctccctctactcggcactgtccttgctgcccagcccctctctgggtgccaggtacgacgcttgccccggcccaccctccatccccaccctccatccccaccctagatggagcgagggcctttttactcaccttttctaccgtttttagactgtatgtagatttggttacctcctggttgaaataaatgctccacagactgtggctgtgagtggggacagctcctcgggacaagggggctgtgtgtggccttgaggttggtgtgcacaggcactggctgctgtgagtgggggggcatggggcagtttcctttggtggaccccaggacttcggcccactccggggcctcccctccctgctaggaggcaactcgtcacacccaagctgctggcctccagtcccatctcccccaacacatgtgcccccaaaaagtgagccaggcacctctgtttcctgctgtttattgacagccgacggcagcgccttgcccagacctcccctgcccacctgctggagcccagcctgtgccgccctctgaggagaggcctggggggacagctgggcacgtccactcgcagggaaacacggggtgagacagcaggaaggggccctgcacgccgggacgccacctccgccagccgcctccacccgccccacaccacaatcgctggttttcggcattttttaaattttttttttaagaaacgtcaaagttgtgcccaacactgtggatcagcaaacacgatagaggagaccagtcagtacttcttggagggggcaggaggagagaggaaaagggagggcgagaatgaccacacaacacagccttggaccatgagcagaagcgtccgtgggaactccactggggtggatgggctgcctgcacagcccctggagagggggccaggcacaccctcagaggagctgcaagcccgtggcctggcctgctacatgccctgcttccacgtggctgccacgctgacacacccacattcaccaaacccacccgcgccctgggacgcagccacgccaggaggaggacacggccgccgagagcaaggcacaacctcgagttcttggggcgcagagaacttaggagagaagcacggaggagcccccggcagagcacccgcccccgggccccagccttccacctgtgctagcagcctggggcctccactctggccggaggaaggaccgcaggcagacagcctgggcctctaacagcttttgtccggagctagacttcgtgtcctttcagttggtaaatggttttctatagaatcaataatatttctttctttaaatatatatttgttaaagttatacctttttgtttctctggggaaatccgcctcagctcattcccaataaattaatactcttgatagctta

SEQ ID NO: 8679 - protein, 570 aa, Homo sapiens
MSLRSTFSLPEEEEEPEPLVFAEQPSVKLCCQLCCSVFKDPVITTCGHTFCRRCALKSEKCPVDNVKLTVVVNNIAVAEQIGELFIHCRHGCRVAGSGKPPIFEVDPRGCPFTIKLSARKDHEGSCDYRPVRCPNNPSCPPLLRMNLEAHLKECEHIKCPHSKYGCTFIGNQDTYETHLETCRFEGLKEFLQQTDDRFHEMHVALAQKDQEIAFLRSMLGKLSEKIDQLEKSLELKFDVLDENQSKLSEDLMEFRRDASMLNDELSHINARLNMGILGSYDPQQIFKCKGTFVGHQGPVWCLCVYSMGDLLFSGSSDKTIKVWDTCTTYKCQKTLEGHDGIVLALCIQGCKLYSGSADCTIIVWDIQNLQKVNTIRAHDNPVCTLVSSHNVLFSGSLKAIKVWDIVGTELKLKKELTGLNHWVRALVAAQSYLYSGSYQTIKIWDIRTLDCIHVLQTSGGSVYSIAVTNHHIVCGTYENLIHVWDIESKEQVRTLTGHVGTVYALAVISTPDQTKVFSASYDRSLRVWSMDNMICTQTLLRHQGSVTALAVSRGRLFSGAVDSTVKVWTC

SEQ ID NO: 8680 - DNA, 638 bp, Homo sapiens
ggaggtgcttcccaaggaccgtagatgcctctctagagcatgagctcaggcaagagtgcccgctacaaccgcttctccggggggcccagcaatcttcccaccccagacgtcaccacagggaccagaatggaaacgaccttcggacccgccttttcagccgtcaccaccatcacaaaagctgacgggaccagcacctacaagcagcactgcaggacaccctcctcctccagcacccttgcctactccccgcgggacgaggaggacagcatgccccccatcagcactccccgccgctccgactccgccatctctgtccgctccctgcactcagaaacttaggagagaagcacggaggagcccccggcagagcacccgcccccgggccccagccttccacctgtgctagcagcctggggcctccactctggccggaggaaggaccgcaggcagacagcctgggcctctaacagcttttgtccggagctagacttcgtgtcctttcagttggtaaatggttttctatagaatcaataatatttctttctttaaatatatatttgttaaagttatacctttttgtttctctggggaaatccgcctcagctcattcccaataaattaatactcttgatagctta

SEQ ID NO: 8681 - protein, 99 aa, Homo sapiens; identical to SEQ ID NO: 8677

SEQ ID NO: 8682 - DNA, 483 bp, Homo sapiens
tcagcagatcttcaagtgcaaagggacctttgtgggccaccagggccctgtgtggtgtctctgcgtctactccatggaggagctgcaagcccgtggcctggcctgctacatgccctgcttccacgtggctgccacgctgacacacccacattcaccaaacccacccgcgccctgggacgcagccacgccaggaggaggacacggccgccgagagcaaggcacaacctcgagttcttggggcgcagagaacttaggagagaagcacggaggagcccccggcagagcacccgcccccgggccccagccttccacctgtgctagcagcctggggcctccactctggccggaggaaggaccgcaggcagacagcctgggcctctaacagcttttgtccggagctagacttcgtgtcctttcagttggtaaatggttttctatagaatcaataatatttctttctttaaatatatatttgttaaagtt

SEQ ID NO: 8683 - protein, 102 aa, Homo sapiens [sequence omitted]

SEQ ID NO: 8684 - DNA, 553 bp, Homo sapiens
tcagcagatcttcaagtgcaaagggacctttgtgggccaccagggccctgtgtggtgtctctgcgtctactccatggaggagctgcaagcccgtggcctggcctgctacatgccctgcttccacgtggctgccacgctgacacacccacattcaccaaacccacccgcgccctgggacgcagccacgccaggaggaggacacggccgccgagagcaaggcacaacctcgagttcttggggcgcagagaacttaggagagaagcacggaggagcccccggcagagcacccgcccccgggccccagccttccacctgtgctagcagcctggggcctccactctggccggaggaaggaccgcaggcagacagcctgggcctctaacagcttttgtccggagctagacttcgtgtcctttcagttggtaaatggttttctatagaatcaataatatttctttctttaaatatatatttgttaaagttatacctttttgtttctctggggaaatccgcctcagctcattcccaataaattaatactcttgatagctta

SEQ ID NO: 8685 - protein, 102 aa, Homo sapiens [sequence omitted]

SEQ ID NO: 8686 - DNA, 1342 bp, Homo sapiens
ggtttggacttgctaacaggatccaggccaggctgtggtttcccctgaaccagccctggacctttctgagccaggctggccacatggggtggtctcggggtttctgcctgccccgtgggcataggtggacaggctctggcagccgggcagtgccctccccgtcccatgctcggcgagcctccctctactcggcactgtccttgctgcccagcccctctctgggtgccaggtacgacgcttgccccggcccaccctccatccccaccctccatccccaccctagatggagcgagggcctttttactcaccttttctaccgtttttagactgtatgtagatttggttacctcctggttgaaataaatgctccacagactgtggctgtgagtggggacagctcctcgggacaagggggctgtgtgtggccttgaggttggtgtgcacaggcactggctgctgtgagtgggggggcatggggcagtttcctttggtggaccccaggacttcggcccactccggggcctcccctccctgctaggaggcaactcgtcacacccaagctgctggcctccagtcccatctcccccaacacatgtgcccccaaaaagtgagccaggcacctctgtttcctgctgtttattgacagccgacggcagcgccttgcccagacctcccctgcccacctgctggagcccagcctgtgccgccctctgaggagaggcctggggggacagctgggcacgtccactcgcagggaaacacggggtgagacagcaggaaggggccctgcacgccgggacgccacctccgccagccgcctccacccgccccacaccacaatcgctggttttcggcattttttaaattttttttttaagaaacgtcaaagttgtgcccaacactgtggatcagcaaacacgatagaggagaccagtcagtacttcttggagggggcaggaggagagaggaaaagggagggcgagaatgaccacacaacacagccttggaccatgagcagaagcgtccgtgggaactccactggggtggatgggctgcctgcacagcccctggagagggggccaggcacaccctcagaggagctgcaagcccgtggcctggcctgctacatgccctgcttccacgtggctgccacgctgacacacccacattcaccaaacccacccgcgccctgggacgcagccacgccaggaggaggacacggccgccgagagcaaggcacaacctcgagttcttgggctagacttcgtgtcctttcagttggtaaatggttttctatagaatcaataatatttctttctttaaatatatatttgttaaagtt

SEQ ID NO: 8687 - protein, 109 aa, Homo sapiens
MSRSVRGNSTGVDGLPAQPLERGPGTPSEELQARGLACYMPCFHVAATLTHPHSPNPPAPWDAATPGGGHGRREQGTTSSSWARLRVLSVGKWFSIESIIFLSLNIYLL

SEQ ID NO: 8688 - DNA, 2202 bp, Homo sapiens
ccaagccgcccggtacgccgccctcgctgggcgccagccccgccaagcccccgtcccccggcgcgcccgcgcgcctcgccaggggacagcgcccggcagaaactggaggagacaagcgcgtgcctggccgcggcgctgcaggcggtggaggagaagatccggcaggaggacgcgcagggcccgcgcgactcggcggcggaaaagagcactggcagcatcctggacgacatcggcagcatgttcgacgacctggccgaccagctggatgccatgctggagtgaacgccgcctggccgggccctcccgcgccgcccgggccctccccgcacactgacctatacctcaggatgggcgcgtctgggcgcggcgcgagcggccgggcagggccctgcagaagcacaactccggcccctggacccgggccggggcgcccaccggggaccgcctggccgggggctccaagggctctaggcagaccctgcgcccgcgggtcctccccacctgctgctccccgtgcaatacctgctgggcctcctgcccgcgcgggaggggagggcgccccgggaccagggatggggcagcgcacaggcccgggcccagcacagaactgcccatcgggacgcccggccagccgctcgggcgcagcacaagggacaggggaccaaggtcagggcccccctgccccaccgcacccccagaatataagctatcaagagtattaatttattgggaatgagctgaggcggatttccccagagaaacaaaaaggtataactttaacaaatatatatttaaagaaagaaatattattgattctatagaaaaccatttaccaactgaaaggacacgaagtctagctccggacaaaagctgttagaggcccaggctgtctgcctgcggtccttcctccggccagagtggaggccccaggctgctagcacaggtggaaggctggggcccgggggcgggtgctctgccgggggctcctccgtgcttctctcctaagttctctgcgccccaagaactcgaggttgtgccttgctctcggcggccgtgtcctcctcctggcgtggctgcgtcccagggcgcgggtgggtttggtgaatgtgggtgtgtcagcgtggcagccacgtggaagcagggcatgtagcaggccaggccacgggcttgcagctcctctgagggtgtgcctggccccctctccaggggctgtgcaggcagcccatccaccccagtggagttcccacggacgcttctgctcatggtccaaggctgtgttgtgtggtcattctcgccctcccttttcctctctcctcctgccccctccaagaagtactgactggtctcctctatcgtgtttgctgatccacagtgttgggcacaactttgacgtttcttaaaaaaaaaatttaaaaaatgccgaaaaccagcgattgtggtgtggggcgggtggaggcggctggcggaggtggcgtcccggcgtgcagggccccttcctgctgtctcaccccgtgtttccctgcgagtggacgtgcccagctgtccccccaggcctctcctcagagggcggcacaggctgggctccagcaggtgggcaggggaggtctgggcaaggcgctgccgtcggctgtcaataaacagcaggaaacagaggtgcctggctcactttttgggggcacatgtgttgggggagatgggactggaggccagcagcttgggtgtgacgagttgcctcctagcagggaggggaggccccggagtgggccgaagtcctggggtccaccaaaggaaactgccccatgcccccccactcacagcagccagtgcctgtgcacaccaacctcaaggccacacacagcccccttgtcccgaggagctgtccccactcacagccacagtctgtggagcatttatttcaaccaggaggtaaccaaatctacatacagtctaaaaacggtagaaaaggtgagtaaaaaggccctcgctccatctagggtggggatggagggtggggatggagggtgggccggggcaagcgtcgtacctggcacccagagaggggctgggcagcaaggacagtgccgagtagagggaggctcgccgagcatgggacggggagggcactgcccggctgccagagcctgtccacctatgcccacggggcaggcagaaaccccgagaccaccccatgtggccagcctg

SEQ ID NO: 8689 - protein, 261 aa, Homo sapiens
MPKTSDCGVGRVEAAGGGGVPACRAPSCCLTPCFPASGRAQLSPQASPQRAAQAGLQQVGRGGLGKALPSAVNKQQETEVPGSLFGGTCVGGDGTGGQQLGCDELPPSREGRPRSGPKSWGPPKETAPCPPTHSSQCLCTPTSRPHTAPLSRGAVPTHSHSLWSIYFNQEVTKSTYSLKTVEKVSKKALAPSRVGMEGGDGGWAGASVVPGTQRGAGQQGQCRVEGGSPSMGRGGHCPAARACPPMPTGQAETPRPPHVAS

SEQ ID NO: 8690 - DNA, 1386 bp, Homo sapiens
aagcgcaggcccaaggccaaggagcgggaggccgggcctgagccaccaccgccactgtccgtgtaccataatggcactggcaccgtgcgccgccgaccggcctcggagcaggctgggcctccggagctgcctccaccgcccccgcctgccgaacccccgcccaccgacctggcgcacctacccccattgcccccgcccgagggcgaagcccggaagccggccaagccgcctgtctctcccaagcccgtcctgacgcagcctgtgcccaagctccagggctcgcccacacccacctccaagaaggtgccgctgccaggccctggcagcccagaggtgaagcgcgcccacggcacgccaccgcccgtgtctcccaagccgccgccgccgcccacagcgcccaagccccccatccaccccagtggagttcccacggacgcttctgctcatggtccaaggctgtgttgtgtggtcattctcgccctcccttttcctctctcctcctgccccctccaagaagtactgactggtctcctctatcgtgtttgctgatccacagtgttgggcacaactttgacgtttcttaaaaaaaaaatttaaaaaatgccgaaaaccagcgattgtggtgtggggcgggtggaggcggctggcggaggtggcgtcccggcgtgcagggccccttcctgctgtctcaccccgtgtttccctgcgagtggacgtgcccagctgtccccccaggcctctcctcagagggcggcacaggctgggctccagcaggtgggcaggggaggtctgggcaaggcgctgccgtcggctgtcaataaacagcaggaaacagaggtgcctggctcactttttgggggcacatgtgttgggggagatgggactggaggccagcagcttgggtgtgacgagttgcctcctagcagggaggggaggccccggagtgggccgaagtcctggggtccaccaaaggaaactgccccatgcccccccactcacagcagccagtgcctgtgcacaccaacctcaaggccacacacagcccccttgtcccgaggagctgtccccactcacagccacagtctgtggagcatttatttcaaccaggaggtaaccaaatctacatacagtctaaaaacggtagaaaaggtgagtaaaaaggccctcgctccatctagggtggggatggagggtggggatggagggtgggccggggcaagcgtcgtacctggcacccagagaggggctgggcagcaaggacagtgccgagtagagggaggctcgccgagcatgggacggggagggcactgcccggctgccagagcctgtccacctatgcccacggggcaggcagaaaccccgagaccaccccatgtggccagcctg

SEQ ID NO: 8691 - protein, 261 aa, Homo sapiens; identical to SEQ ID NO: 8689

SEQ ID NO: 8692 - DNA, 6290 bp, Homo sapiens
cgcggggccgccgccgcctctgagccgcgccgagctcacgagcgcagccgcgtcgctgcggccccggccgcgccatggggaaggagcaggagctggtgcaggcggtgaaggcggaggacgtagggaccgcgcagaggctgctgcagaggccgcggcccgggaaggccaagctcctgggttccaccaagaagatcaatgtcaacttccaggacccggatggcttctcggctctgcaccatgcggccctgaacggcaacacggaattgatcagcctgctgctggaggcccaggccgctgtggacatcaaggacaacaaaggcatgcggccgctgcactatgcggcctggcagggccggaaggagcccatgaagctggtgctgaaggcgggctcggccgtgaacatcccgtctgatgagggccacatccccctgcacctggcggcccagcatggtcactatgatgtgtctgagatgctgctacagcaccagtctaacccgtgcatggtggacaactcggggaagacgcccctggacctggcctgcgagttcggccgcgttggggtggtccagctgctcctcagcagcaatatgtgtgcggcgctgctggagccccggccgggagacgccaccgaccccaacggcaccagccctttgcacctcgcagctaaaaacggccacatcgacatcatcaggctcctcctccaagccggcatcgacattaaccgccagaccaagtccggcacggccctgcacgaggctgcgctctgcggaaagacagaggtggtgcggctgctgctggatagcgggatcaatgcccacgtgaggaacacctacagccagacagccctggacatcgtgcaccagttcaccacgtcccaggccagcagggagatcaagcagctgttgcgagaggcctcagcggccctgcaggtccgggcgaccaaggattattgcaacaattacgacctgaccagcctcaacgtgaaggcaggggacatcatcacagtcctcgagcagcatccggatggccggtggaagggctgcatccatgacaaccggacgggcaatgaccgggtgggctacttcccgtcctccctgggcgaggccattgtcaagcgagcaggttcccgagcaggcactgaaccaagcctgccccagggaagcagctcatcgggaccctctgcacccccagaggagatctgggtgctgaggaagccttttgcaggtggggaccgaagcggcagcattagcggcatggctggcggccggggcagcgggggtcacgccctacacgcgggctctgaaggcgtcaagctcctggcaacggtgctttcccagaagtccgtctctgagtccggcccgggggacagccccgccaagcctccggaaggctctgcaggtgtggcccggtcccagcctccagtggcccacgccgggcaggtctatggggagcagccgcccaagaagctggagccagcatcggagggcaagagctctgaggccgtgagccagtggctcaccgcgttccagctgcagctctacgcccccaacttcatcagcgccggctacgacctgcccaccatcagccgcatgactcccgaggacctcacggccattggtgtcaccaagccgggccaccggaagaagatcgcggcagagatcagcggcctaagcatccctgactggctgcctgagcacaaacccgctaacctggccgtgtggctgtccatgatcggcctggcccagtactacaaggtgttggtggacaatggctacgagaacattgatttcatcaccgacatcacctgggaggacctgcaggagatcggcatcaccaagctggggcaccagaagaagctgatgctcgctgtgaggaagctggcagagctgcagaaggctgaatacgccaagtatgaggggggccccctgcgccggaaggcgccccagtctcttgaagtgatggccatcgagtcgccgcccccgcctgagcccacaccggccgactgccagtcccctaaaatgaccaccttccaggacagcgagctcagtgacgagctgcaggctgccatgactggcccggctgaggtggggcccaccactgagaagccctccagccacctgccacccaccccgagggccaccacgcggcaggactccagcctgggtggtcgggcacggcacatgagcagctcgcaggagctgctgggagatgggccccctgggcccagcagccccatgtctcgaagccaggagtacctcctggatgagggccccgcccccggcaccccgcccagggaggcccggcccggccgccacggccacagcatcaagagggccagcgtgccccccgtgcctggcaagccacggcaggtcctcccaccaggcactagccacttcacgcccccccagacgcccaccaaaacccgaccaggctctccccaggcccttgggggacctcatggtccagccccagctacggccaaggtgaagcccaccccgcagctgctgccgccgacagagcgccccatgtcaccccgctccctgcctcagtcaccgacgcaccgcggctttgcctacgtgctgccccagcccgtggagggcgaggtggggccggctgccccggggcctgcgcccccacccgtgccgacggctgtgcccacactgtgcctgccccctgaggccgacgcggagccggggcggcccaagaagcgggcccacagcctgaatcgctatgcggcgtccgacagcgagccggagcgggacgagctgctggtgcctgcggctgccggcccctatgccacggtccagcggcgcgtgggccgcagccactcagtgagggcgcccgcaggtgccgacaagaacgtcaaccgcagccagtcctttgccgtgcggccccgaaagaaggggcccccgccgcccccacccaagcgctccagctcggccctggctagtgccaacctggcggatgagccggtgcctgacgccgagcctgaggatggcctgctgggggtccgggcacagtgccggcgggccagtgacctggccggcagcgtggacacgggtagtgccggcagtgtgaagagcatcgcggccatgctggagctgtcctccattgggggtgggggccgggctgcccgcaggcctcctgagggccaccccactccccgccctgccagcccagagccgggccgggtggccaccgtgctggcctcagtgaaacacaaagaggccatcgggcctggcggggaggtggtgaaccggcgccgcacgctcagcgggccagtcaccggacttctggccactgcccgccgggggcctggggagtcggcagacccaggcccctttgtggaggatggcactggccggcagcggcctcggggtccctccaagggcgaggcgggtgtcgaaggcccgcccttggccaaggtggaagccagcgccacactcaagaggcgcatccgggccaagcagaaccagcaggagaacgtcaagttcatcctgaccgagtctgacacggtcaagcgcaggcccaaggccaaggagcgggaggccgggcctgagccaccaccgccactgtccgtgtaccataatggcactggcaccgtgcgccgccgaccggcctcggagcaggctgggcctccggagctgcctccaccgcccccgcctgccgaacccccgcccaccgacctggcgcacctacccccattgcccccgcccgagggcgaagcccggaagccggccaagccgcctgtctctcccaagcccgtcctgacgcagcctgtgcccaagctccagggctcgcccacacccacctccaagaaggtgccgctgccaggccctggcagcccagaggtgaagcgcgcccacggcacgccaccgcccgtgtctcccaagccgccgccgccgcccacagcgcccaagcccgtcaaggcggtcgcggggctgccttcgggcagcgccggcccttcacccgcaccctcgcccgcgcgacagccgcccgccgccctcgccaagccgcccggtacgccgccctcgctgggcgccagccccgccaagcccccgtcccccggcgcgcccgcgctgcacgtgcccgccaagcccccgcgagccgccgccgccgccgccgccgccgccgccgcgccccccgccccgcccgaaggcgcctcgccaggggacagcgcccggcagaaactggaggagacaagcgcgtgcctggccgcggcgctgcaggcggtggaggagaagatccggcaggaggacgcgcagggcccgcgcgactcggcggcggaaaagagcactggcagcatcctggacgacatcggcagcatgttcgacgacctggccgaccagctggatgccatgctggagtgaacgccgcctggccgggccctcccgcgccgcccgggccctccccgcacactgacctatacctcaggatgggcgcgtctgggcgcggcgcgagcggccgggcagggccctgcagaagcacaactccggcccctggacccgggccggggcgcccaccggggaccgcctggccgggggctccaagggctctaggcagaccctgcgcccgcgggtcctccccacctgctgctccccgtgcaatacctgctgggcctcctgcccgcgcgggaggggagggcgccccgggaccagggatggggcagcgcacaggcccgggcccagcacagaactgcccatcgggacgcccggccagccgctcgggcgcagcacaagggacaggggaccaaggtcagggcccccctgccccaccgcacccccagaatataagctatcaagagtattaatttattgggaatgagctgaggcggatttccccagagaaacaaaaaggtataactttaacaaatatatatttaaagaaagaaatattattgattctatagaaaaccatttaccaactgaaaggacacgaagtctagctccggacaaaagctgttagaggcccaggctgtctgcctgcggtccttcctccggccagagtggaggccccaggctgctagcacaggtggaaggctggggcccgggggcgggtgctctgccgggggctcctccgtgcttctctcctaagttctctgcgccccaagaactcgaggttgtgccttgctctcggcggccgtgtcctcctcctggcgtggctgcgtcccagggcgcgggtgggtttggtgaatgtgggtgtgtcagcgtggcagccacgtggaagcagggcatgtagcaggccaggccacgggcttgcagctcctctgagggtgtgcctggccccctctccaggggctgtgcaggcagcccatccaccccagtggagttcccacggacgcttctgctcatggtccaaggctgtgttgtgtggtcattctcgccctcccttttcctctctcctcctgccccctccaagaagtactgactggtctcctctatcgtgtttgctgatccacagtgttgggcacaactttgacgtttcttaaaaaaaaaatttaaaaaatgccgaaaaccagcgattgtggtgtggggcgggtggaggcggctggcggaggtggcgtcccggcgtgcagggccccttcctgctgtctcaccccgtgtttccctgcgagtggacgtgcccagctgtccccccaggcctctcctcagagggcggcacaggctgggctccagcaggtgggcaggggaggtctgggcaaggcgctgccgtcggctgtcaataaacagcaggaaacagaggtgcctggctcactttttgggggcacatgtgttgggggagatgggactggaggccagcagcttgggtgtgacgagttgcctcctagcagggaggggaggccccggagtgggccgaagtcctggggtccaccaaaggaaactgccccatgcccccccactcacagcagccagtgcctgtgcacaccaacctcaaggccacacacagcccccttgtcccgaggagctgtccccactcacagccacagtctgtggagcatttatttcaaccaggaggtaaccaaatctacatacagtctaaaaacggtagaaaaggtgagtaaaaaggccctcgctccatctagggtggggatggagggtggggatggagggtgggccggggcaagcgtcgtacctggcacccagagaggggctgggcagcaaggacagtgccgagtagagggaggctcgccgagcatgggacggggagggcactgcccggctgccagagcctgtccacctatgcccacggggcaggcagaaaccccgagaccaccccatgtggccagcctg

SEQ ID NO: 8693 - protein, 1431 aa, Homo sapiens; identical to SEQ ID NO: 1314

SEQ ID NO: 8694 - DNA, 381 bp, Homo sapiens
ggctcggccgtgaacatcccgtctgatgagggccacatccccctgcacctggcggcccagcatggtcactatgatgtgtctgagatgctgctacagcaccagtctaacccgtgcatggtggacaactcggggaagacgcccctggacctggcctgcgagttcggccgcgttggggtggtccagctgctcctcagcagcaatatgtgtgcggcgctgctggagccccggccgggagacgccaccgaccccaacggcaccagccctttgcacctcgcagctaaaaacggccacatcgacatcatcaggtagagccggtagcagggagggcctcagccttagggtccccagggttcagcagcagcctggggctcagggcaccag

SEQ ID NO: 8695 - protein, 117 aa, Homo sapiens
MRATSPCTWRPSMVTMMCLRCCYSTSLTRAWWTTRGRRPWTWPASSAALGWSSCSSAAICVRRCWSPGRETPPTPTAPALCTSQLKTATSTSSGRAGSREGLSLRVPRVQQQPGAQG

SEQ ID NO: 8696 - DNA, 512 bp, Homo sapiens
gtaatcccagcactttgggaggctgaggtaggcggatcacttgaggtcaggagtttgagaccagccttgcgaacatggtgaaatcccgtctccactaaaaatacaaaaatcagccaggctaaccggcaggaaggagaggaggtgaaggtataggaaggaaggctccatgggaactatggcctggtcaagggacaagatgcaccccctctgcggccagaggaaggggtgcagccaggtctgtaagagcagcaggaaaaaaccatgcgacagcctgtctcaaggccaatcctagcccagcgtggcgcagtagtgggtcagggagggcaccggaacagcgcgacccgacagcccgggaaacggacagccgtgtcagaagggcaggtgccagtgggcaggaggccggagagaaagccgcagcttccttccacctcgcgccgggcccgcggccgcgcacggggaccgctccgagttcctcccggcgggaaccccccgccccagaactttggtctcgt

SEQ ID NO: 8697 - protein, 82 aa, Homo sapiens
MRQPVSRPILAQRGAVVGQGGHRNSATRQPGKRTAVSEGQVPVGRRPERKPQLPSTSRRARGRARGPLRVPPGGNPPPQNFG

SEQ ID NO: 8698 - DNA, 1403 bp, Homo sapiens
agatgactggggttgcggaatgagtgggaggtgaggacgtggaactagaaaaatggtgaggaccgctctttgaagaagataatttgggattgttttatggtgtttttttaaaggctaaccggcaggaaggagaggaggtgaaggtataggaaggaaggctccatgggaactatggcctggtcaagggacaagatgcaccccctctgcggccagaggaaggggtgcagccaggtctgtaagagcagcaggaaaaaaccatgcgacagcctgtctcaagggtgagggcaccggcgtggagctcacagagctggaatgagggcctgtggttttgagggggaccctgggctcagtgggatgtcctgagggtcaggctggggctggggtgccagatctagcaagtaaaactacaggatacccaataaaatttttttagcataagtatttcccatgcaatgtcctggatatacttacactaaaaaaaaaattattcgttacttgtctgaattcaagtcctgtaattttcagccaatcctagcccagcgtggcgcagtagtgggtcagggagggcaccggaacagcgcgacccgacagcccgggaaacggacagccgtgtcagaagggcaggtgccagtgggcaggaggccggagagaaagccgcagcttccttccacctcgcgccgggcccgcggccgcgcacggggaccgctccgagttcctcccggcgggaaccccccgccccagaactttggtctcgtcccacccacccccgcccgcgccatggtctcgccctagggagccatcgataactctacgctcggcctcgatcgactcgctccggctcccctcgccgtcctggacacggcggagtgcggagccgcccgtaagatgctctgacctttgacccctgccgttcagctctagggcccgtgcaggccacaccatgaacacctccccaggcacggtgggcagtgacccggtcatcctggccactgcaggctacgaccacaccgtgcgcttctggcaggcccacagcggcatctgcacccggacggtgcagcaccaggactcccaggtgaatgccttggaggtcacaccggaccgcagcatgattgctgctgcaggttaccagcacatccgcatgtatgatctcaactccaataaccctaaccccatcatcagctacgacggcgtcaacaagaacatcgcgtctgtgggcttccacgaagacggccgctggatgtacacgggcggcgaggactgcacagccaggatctgggacctcaggtgcggtggggagggggcgtgctgcccggggctggggtgggctgctctgggagaccgttttaggttgggttctcttcaagcagaggctgagacagggagcttcctgtgggcgacttact

SEQ ID NO: 8699 - protein, 153 aa, Homo sapiens
MNTSPGTVGSDPVILATAGYDHTVRFWQAHSGICTRTVQHQDSQVNALEVTPDRSMIAAAGYQHIRMYDLNSNNPNPIISYDGVNKNIASVGFHEDGRWMYTGGEDCTARIWDLRCGGEGACCPGLGWAALGDRFRLGSLQAEAETGSFLWAT

SEQ ID NO: 8700 - DNA, 1709 bp, Homo sapiens
atgagtgggaggtgaggacgtggaactagaaaaatgggagccatcgataactctacgctcggcctcgatcgactcgctccggctcccctcgccgtcctggacacggcggagtgcggagccgcccgtaagatgctctgacctttgacccctgccgttcagctctagggcccgtgcaggccacaccatgaacacctccccaggcacggtgggcagtgacccggtcatcctggccactgcaggctacgaccacaccgtgcgcttctggcaggcccacagcggcatctgcacccggacggtgcagcaccaggactcccaggtgaatgccttggaggtcacaccggaccgcagcatgattgctgctgcaggttaccagcacatccgcatgtatgatctcaactccaataaccctaaccccatcatcagctacgacggcgtcaacaagaacatcgcgtctgtgggcttccacgaagacggccgctggatgtacacgggcggcgaggactgcacagccaggatctgggacctcaggtcccggaacctgcagtgccagcggatcttccaggtgaacgcacccattaactgcgtgtgcctgcaccccaaccaggcagagctcatcgtgggtgaccagagcggggctatccacatctgggacttgaaaacagaccacaacgagcagctgatccctgagcccgaggtctccatcacgtccgcccacatcgatcccgacgccagctacatggcagctgtcaatagcaccggaaactgctatgtctggaatctgacggggggcattggtgacgaggtgacccagctcatccccaagactaagatccctgcccacacgcgctacgccctgcagtgtcgcttcagccccgactccacgctcctcgccacctgctcggctgatcagacgtgcaagatctggaggacgtccaacttctccctgatgacggagctgagcatcaagagcggcaaccccggggagtcctcccgcggctggatgtggggctgcgccttctcgggggactcccagtacatcgtcactgcttcctcggacaacctggcccggctctggtgtgtggagactggagagatcaagagagagtatggcggccaccagaaggctgttgtctgcctggccttcaatgacagtgtgctgggctagcctgtgacccctcgggactgcctggtgcaggtggtggcagctggagggacccatgcagcacccaggtcagagcagaccctcccctgccggcctgcgccagctggacctgatggccccctgtggcgccttgacctgctgggccaggctgccctgggactctcagcccccagttgcttatccagatgtgacagagctcgacccaagccaggctgcacactcctggactgggctagcctgcactgcctgggaaagtcggccgagggcccaaagctgctgaggggtctgaggctggtgcccacccccaagctagtgtgttctctgcccctccctgcccgcgtttcagggcctcggtccatagagaacaccaccaccatggccaggtggaagggtttattagtccctgccagcagctgtcctccctggtgcaggtggcctggccagcccactggattggggacgggccaggctgggccaggtcgggggctcagtctgggaggtaataaaagcagaccgacacgcagatgttgctcgggaagcagatgtc

SEQ ID NO: 8701 - protein, 326 aa, Homo sapiens; identical to SEQ ID NO: 1316

SEQ ID NO: 8702 - DNA, 851 bp, Homo sapiens
agcgcgacccgacagcccgggaaacggacagccgtgtcagaagggcaggtgccagtgggcaggaggccggagagaaagccgcagcttccttccacctcgcgccgggcccgcggccgcgcacggggaccgctccgagttcctcccggcgggaaccccccgccccagaactttggtctcgtcccacccacccccgcccgcgccatggtctcgccctagggagccatcgataactctacgctcggcctcgatcgactcgctccggctcccctcgccgtcctggacacggcggagtgcggagccgcccgtaagatgctctgacctttgacccctgccgttcagctctagggcccgtgcaggccacaccatgaacacctccccaggcacggtgggcagtgacccggtcatcctggccactgcaggctacgaccacaccgtgcgcttctggcaggcccacagcggcatctgcacccggacggtgcagcaccaggactcccaggtgaatgccttggaggtcacaccggaccgcagcatgattgctgctgcaggttaccagcacatccgcatgtatgatctcaactccaataaccctaaccccatcatcagctacgacggcgtcaacaagaacatcgcgtctgtgggcttccacgaagacggccgctggatgtacacgggcggcgaggactgcacagccaggatctgggacctcaggtcccggaacctgcagtgccagcggatcttccaggtgaacgcacccattaactgcgtgtgcctgcaccccaaccaggcagagctcatcgtgggtgaccagagcggggctatccacatctgggacttgaaaacagaccacaacg

SEQ ID NO: 8703 - protein, 161 aa, Homo sapiens
MNTSPGTVGSDPVILATAGYDHTVRFWQAHSGICTRTVQHQDSQVNALEVTPDRSMIAAAGYQHIRMYDLNSNNPNPIISYDGVNKNIASVGFHEDGRWMYTGGEDCTARIWDLRSRNLQCQRIFQVNAPINCVCLHPNQAELIVGDQSGAIHIWDLKTDH

SEQ ID NO: 8704 - DNA, 1889 bp, Homo sapiens
agcgcgacccgacagcccgggaaacggacagccgtgtcagaagggcaggtgccagtgggcaggaggccggagagaaagccgcagcttccttccacctcgcgccgggcccgcggccgcgcacggggaccgctccgagttcctcccggcgggaaccccccgccccagaactttggtctcgtcccacccacccccgcccgcgccatggtctcgccctagggagccatcgataactctacgctcggcctcgatcgactcgctccggctcccctcgccgtcctggacacggcggagtgcggagccgcccgtaagatgctctgacctttgacccctgccgttcagctctagggcccgtgcaggccacaccatgaacacctccccaggcacggtgggcagtgacccggtcatcctggccactgcaggctacgaccacaccgtgcgcttctggcaggcccacagcggcatctgcacccggacggtgcagcaccaggactcccaggtgaatgccttggaggtcacaccggaccgcagcatgattgctgctgcaggttaccagcacatccgcatgtatgatctcaactccaataaccctaaccccatcatcagctacgacggcgtcaacaagaacatcgcgtctgtgggcttccacgaagacggccgctggatgtacacgggcggcgaggactgcacagccaggatctgggacctcaggtcccggaacctgcagtgccagcggatcttccaggtgaacgcacccattaactgcgtgtgcctgcaccccaaccaggcagagctcatcgtgggtgaccagagcggggctatccacatctgggacttgaaaacagaccacaacgagcagctgatccctgagcccgaggtctccatcacgtccgcccacatcgatcccgacgccagctacatggcagctgtcaatagcaccggaaactgctatgtctggaatctgacggggggcattggtgacgaggtgacccagctcatccccaagactaagatccctgcccacacgcgctacgccctgcagtgtcgcttcagccccgactccacgctcctcgccacctgctcggctgatcagacgtgcaagatctggaggacgtccaacttctccctgatgacggagctgagcatcaagagcggcaaccccggggagtcctcccgcggctggatgtggggctgcgccttctcgggggactcccagtacatcgtcactgcttcctcggacaacctggcccggctctggtgtgtggagactggagagatcaagagagagtatggcggccaccagaaggctgttgtctgcctggccttcaatgacagtgtgctgggctagcctgtgacccctcgggactgcctggtgcaggtggtggcagctggagggacccatgcagcacccaggtcagagcagaccctcccctgccggcctgcgccagctggacctgatggccccctgtggcgccttgacctgctgggccaggctgccctgggactctcagcccccagttgcttatccagatgtgacagagctcgacccaagccaggctgcacactcctggactgggctagcctgcactgcctgggaaagtcggccgagggcccaaagctgctgaggggtctgaggctggtgcccacccccaagctagtgtgttctctgcccctccctgcccgcgtttcagggcctcggtccatagagaacaccaccaccatggccaggtggaagggtttattagtccctgccagcagctgtcctccctggtgcaggtggcctggccagcccactggattggggacgggccaggctgggccaggtcgggggctcagtctgggaggtaataaaagcagaccgacacgcagatgttgctcgggaagcagatgtc

SEQ ID NO: 8705 - protein, 326 aa, Homo sapiens; identical to SEQ ID NO: 1316

SEQ ID NO: 8706 - DNA, 2064 bp, Homo sapiens
agtgggcaggaggccggagagaaagccgcagcttccttccacctcgcgccgggcccgcggccgcgcacggggaccgctccgagttcctcccggcgggaaccccccgccccagaactttggtctcgtcccacccacccccgcccgcgccatggtctcgccctagggagccatcgataactctacgctcggcctcgatcgactcgctccggctcccctcgccgtcctggacacggcggagtgcggagccgcccgtaagatgctctgacctttgacccctgccgttcagctctagggcccgtgcaggccacaccatgaacacctccccaggcacggtgggcagtgacccggtcatcctggccactgcaggctacgaccacaccgtgcgcttctggcaggcccacagcggcatctgcacccggacggtgcagcaccaggactcccaggtgaatgccttggaggtcacaccggaccgcagcatgattgctgctgcaggtatctgtgatccttgatctctaaactcctgagctctggtgggtcgacctcagcacagccaagcttcagttcagcctgtgtccctaggttaccagcacatccgcatgtatgatctcaactccaataaccctaaccccatcatcagctacgacggcgtcaacaagaacatcgcgtctgtgggcttccacgaagacggccgctggatgtacacgggcggcgaggactgcacagccaggatctgggacctcaggtcccggaacctgcagtgccagcggatcttccaggtgaacgcacccattaactgcgtgtgcctgcaccccaaccaggcagagctcatcgtgggtgaccagagcggggctatccacatctgggacttgaaaacagaccacaacgagcagctgatccctgagcccgaggtctccatcacgtccgcccacatcgatcccgacgccagctacatggcagctgtcaatagcaccggaaactgctatgtctggaatctgacggggggcattggtgacgaggtgacccagctcatccccaagactaagatccctgcccacacgcgctacgccctgcagtgtcgcttcagccccgactccacgctcctcgccacctgctcggctgatcagacgtgcaagatctggaggacgtccaacttctccctgatgacggagctgagcatcaagagcggcaaccccggggagtcctcccgcggctggatgtggggctgcgccttctcgggggactcccagtacatcgtcactggtgagccccgccctggcctcccccatccctggcccccggcgctggcctccagagccagcccacctcggctgcagcttcccctctgctggggccgcctgcttggcctgcacctgcgctcttagccctgcacaatctccccctccagcttcctcggacaacctggcccggctctggtgtgtggagactggagagatcaagagagagtatggcggccaccagaaggctgttgtctgcctggccttcaatgacagtgtgctgggctagcctgtgacccctcgggactgcctggtgcaggtggtggcagctggagggacccatgcagcacccaggtcagagcagaccctcccctgccggcctgcgccagctggacctgatggccccctgtggcgccttgacctgctgggccaggctgccctgggactctcagcccccagttgcttatccagatgtgacagagctcgacccaagccaggctgcacactcctggactgggctagcctgcactgcctgggaaagtcggccgagggcccaaagctgctgaggggtctgaggctggtgcccacccccaagctagtgtgttctctgcccctccctgcccgcgtttcagggcctcggtccatagagaacaccaccaccatggccaggtggaagggtttattagtccctgccagcagctgtcctccctggtgcaggtggcctggccagcccactggattggggacgggccaggctgggccaggtcgggggctcagtctgggaggtaataaaagcagaccgacacgcagatgttgctcgggaagcaga

SEQ ID NO: 8707 - protein, 261 aa, Homo sapiens
MYDLNSNNPNPIISYDGVNKNIASVGFHEDGRWMYTGGEDCTARIWDLRSRNLQCQRIFQVNAPINCVCLHPNQAELIVGDQSGAIHIWDLKTDHNEQLIPEPEVSITSAHIDPDASYMAAVNSTGNCYVWNLTGGIGDEVTQLIPKTKIPAHTRYALQCRFSPDSTLLATCSADQTCKIWRTSNFSLMTELSIKSGNPGESSRGWMWGCAFSGDSQYIVTGEPRPGLPHPWPPALASRASPPRLQLPLCWGRLLGLHLRS

SEQ ID NO: 8708 - DNA, 1923 bp, Homo sapiens
agtgggcaggaggccggagagaaagccgcagcttccttccacctcgcgccgggcccgcggccgcgcacggggaccgctccgagttcctcccggcgggaaccccccgccccagaactttggtctcgtcccacccacccccgcccgcgccatggtctcgccctagggagccatcgataactctacgctcggcctcgatcgactcgctccggctcccctcgccgtcctggacacggcggagtgcggagccgcccgtaagatgctctgacctttgacccctgccgttcagctctagggcccgtgcaggccacaccatgaacacctccccaggcacggtgggcagtgacccggtcatcctggccactgcaggctacgaccacaccgtgcgcttctggcaggcccacagcggcatctgcacccggacggtgcagcaccaggactcccaggtgaatgccttggaggtcacaccggaccgcagcatgattgctgctgcaggtatctgtgatccttgatctctaaactcctgagctctggtgggtcgacctcagcacagccaagcttcagttcagcctgtgtccctaggttaccagcacatccgcatgtatgatctcaactccaataaccctaaccccatcatcagctacgacggcgtcaacaagaacatcgcgtctgtgggcttccacgaagacggccgctggatgtacacgggcggcgaggactgcacagccaggatctgggacctcaggtcccggaacctgcagtgccagcggatcttccaggtgaacgcacccattaactgcgtgtgcctgcaccccaaccaggcagagctcatcgtgggtgaccagagcggggctatccacatctgggacttgaaaacagaccacaacgagcagctgatccctgagcccgaggtctccatcacgtccgcccacatcgatcccgacgccagctacatggcagctgtcaatagcaccggaaactgctatgtctggaatctgacggggggcattggtgacgaggtgacccagctcatccccaagactaagatccctgcccacacgcgctacgccctgcagtgtcgcttcagccccgactccacgctcctcgccacctgctcggctgatcagacgtgcaagatctggaggacgtccaacttctccctgatgacggagctgagcatcaagagcggcaaccccggggagtcctcccgcggctggatgtggggctgcgccttctcgggggactcccagtacatcgtcactgcttcctcggacaacctggcccggctctggtgtgtggagactggagagatcaagagagagtatggcggccaccagaaggctgttgtctgcctggccttcaatgacagtgtgctgggctagcctgtgacccctcgggactgcctggtgcaggtggtggcagctggagggacccatgcagcacccaggtcagagcagaccctcccctgccggcctgcgccagctggacctgatggccccctgtggcgccttgacctgctgggccaggctgccctgggactctcagcccccagttgcttatccagatgtgacagagctcgacccaagccaggctgcacactcctggactgggctagcctgcactgcctgggaaagtcggccgagggcccaaagctgctgaggggtctgaggctggtgcccacccccaagctagtgtgttctctgcccctccctgcccgcgtttcagggcctcggtccatagagaacaccaccaccatggccaggtggaagggtttattagtccctgccagcagctgtcctccctggtgcaggtggcctggccagcccactggattggggacgggccaggctgggccaggtcgggggctcagtctgggaggtaataaaagcagaccgacacgcagatgttgctcgggaagcagatgtc

SEQ ID NO: 8709 - protein, 260 aa, Homo sapiens
MYDLNSNNPNPIISYDGVNKNIASVGFHEDGRWMYTGGEDCTARIWDLRSRNLQCQRIFQVNAPINCVCLHPNQAELIVGDQSGAIHIWDLKTDHNEQLIPEPEVSITSAHIDPDASYMAAVNSTGNCYVWNLTGGIGDEVTQLIPKTKIPAHTRYALQCRFSPDSTLLATCSADQTCKIWRTSNFSLMTELSIKSGNPGESSRGWMWGCAFSGDSQYIVTASSDNLARLWCVETGEIKREYGGHQKAVVCLAFNDSVLG

SEQ ID NO: 8710 - DNA, 1831 bp, Homo sapiens
cgactcgctccggctcccctcgccgtcctggacacggcggagtgcggagccgcccgtaagatgctctgacctttgacccctgccgttcagctctagggcccgtgcaggccacaccatgaacacctccccaggcacggtgggcagtgacccggtcatcctggccactgcaggctacgaccacaccgtgcgcttctggcaggcccacagcggcatctgcacccggacggtgcagcaccaggactcccaggtgaatgccttggaggtcacaccggaccgcagcatgattgctgctgcaggttaccagcacatccgcatgtatgatctcaactccaataaccctaaccccatcatcagctacgacggcgtcaacaagaacatcgcgtctgtgggcttccacgaagacggccgctggatgtacacgggcggcgaggactgcacagccaggatctgggacctcagaggctgagacagggagcttcctgtgggcgacttactgagagaagtgaggacaggaggagagtgaattgcatcagagcgcgagtcctgccttgagcccggagccagcttgttattccccttccaccagccactggcttaggctccctgctggagcagagggccctgcgtcccaagtatttcccaagaggcaggtcccggaacctgcagtgccagcggatcttccaggtgaacgcacccattaactgcgtgtgcctgcaccccaaccaggcagagctcatcgtgggtgaccagagcggggctatccacatctgggacttgaaaacagaccacaacgagcagctgatccctgagcccgaggtctccatcacgtccgcccacatcgatcccgacgccagctacatggcagctgtcaatagcaccggaaactgctatgtctggaatctgacggggggcattggtgacgaggtgacccagctcatccccaagactaagatccctgcccacacgcgctacgccctgcagtgtcgcttcagccccgactccacgctcctcgccacctgctcggctgatcagacgtgcaagatctggaggacgtccaacttctccctgatgacggagctgagcatcaagagcggcaaccccggggagtcctcccgcggctggatgtggggctgcgccttctcgggggactcccagtacatcgtcactgcttcctcggacaacctggcccggctctggtgtgtggagactggagagatcaagagagagtatggcggccaccagaaggctgttgtctgcctggccttcaatgacagtgtgctgggctagcctgtgacccctcgggactgcctggtgcaggtggtggcagctggagggacccatgcagcacccaggtcagagcagaccctcccctgccggcctgcgccagctggacctgatggccccctgtggcgccttgacctgctgggccaggctgccctgggactctcagcccccagttgcttatccagatgtgacagagctcgacccaagccaggctgcacactcctggactgggctagcctgcactgcctgggaaagtcggccgagggcccaaagctgctgaggggtctgaggctggtgcccacccccaagctagtgtgttctctgcccctccctgcccgcgtttcagggcctcggtccatagagaacaccaccaccatggccaggtggaagggtttattagtccctgccagcagctgtcctccctggtgcaggtggcctggccagcccactggattggggacgggccaggctgggccaggtcgggggctcagtctgggaggtaataaaagcagaccgacacgcagatgttgctcgggaagcagatgtc

SEQ ID NO: 8711 - protein, 142 aa, Homo sapiens
MAAVNSTGNCYVWNLTGGIGDEVTQLIPKTKIPAHTRYALQCRFSPDSTLLATCSADQTCKIWRTSNFSLMTELSIKSGNPGESSRGWMWGCAFSGDSQYIVTASSDNLARLWCVETGEIKREYGGHQKAVVCLAFNDSVLG

SEQ ID NO: 8712 - DNA, 974 bp, Homo sapiens
gactcgctccggctcccctcgccgtcctggacacggcggagtgcggagccgcccgtaaggtacggaggccgcgagccaggggccgggaaccggctgctgggtggctgggagagcacggccaggggaagccggccagcaggacggagcaagggcggtcaccggaggaaaggggagctcgggggtccagccagactgcgccctttcccatcagggcctgccgctggcctgctacgcatgcgcagccgcagcgctcggctttccccggcccatccgccgccttgcgcacgcgcagcccgcccctgcggcagagtggcgcccgcgcgtgactcccccctgccggctgcggaggtgggggggggacggcgcccccgccgtgtgcgtggggcggggatggagcacgcgccctggagccccggagccaggtatcacgcgtgtgacgcgtgtccctgaacctacctgcgcttcttgtcccaactctaaaatgggaatgataagcgccattcggcagcgccttgtgggtctataatctacttagcacagagagtgtcttctaagtacttcacatccttctctgcagatgctctgacctttgacccctgccgttcagctctagggcccgtgcaggccacaccatgaacacctccccaggcacggtgggcagtgacccggtcatcctggccactgcaggctacgaccacaccgtgcgcttctggcaggcccacagcggcatctgcacccggacggtgcagcaccaggactcccaggtgaatgccttggaggtcacaccggaccgcagcatgattgctgctgcaggttaccagcacatccgcatgtatgatctcaactccaataaccctaaccccatcatcagctacgacggcgtcaacaagaacatcgcgtctgtgggcttccacgaagacggccgctggatgtacacgggcggcgaggactgcacagccaggatctgggacctc

SEQ ID NO: 8713 - protein, 113 aa, Homo sapiens
MNTSPGTVGSDPVILATAGYDHTVRFWQAHSGICTRTVQHQDSQVNALEVTPDRSMIAAAGYQHIRMYDLNSNNPNPIISYDGVNKNIASVGFHEDGRWMYTGGEDCTARIWD

SEQ ID NO: 8714 - DNA, 1184 bp, Homo sapiens
gactcgctccggctcccctcgccgtcctggacacggcggagtgcggagccgcccgtaaggtacggaggccgcgagccaggggccgggaaccggctgctgggtggctgggagagcacggccaggggaagccggccagcaggacggagcaagggcggtcaccggaggaaaggggagctcgggggtccagccagactgcgccctttcccatcagggcctgccgctggcctgctacgcatgcgcagccgcagcgctcggctttccccggcccatccgccgccttgcgcacgcgcagcccgcccctgcggcagagtggcgcccgcgcgtgactcccccctgccggctgcggaggtgggggggggacggcgcccccgccgtgtgcgtggggcggggatggagcacgcgccctggagccccggagccaggtatcacgcgtgtgacgcgtgtccctgaacctacctgcgcttcttgtcccaactctaaaatgggaatgataagcgccattcggcagcgccttgtgggtctataatctacttagcacagagagtgtcttctaagtacttcacatccttctctgcagatgctctgacctttgacccctgccgttcagctctagggcccgtgcaggccacaccatgaacacctccccaggcacggtgggcagtgacccggtcatcctggccactgcaggctacgaccacaccgtgcgcttctggcaggcccacagcggcatctgcacccggacggtgcagcaccaggactcccaggtgaatgccttggaggtcacaccggaccgcagcatgattgctgctgcaggtatctgtgatccttgatctctaaactcctgagctctggtgggtcgacctcagcacagccaagcttcagttcagcctgtgtccctaggttaccagcacatccgcatgtatgatctcaactccaataaccctaaccccatcatcagctacgacggcgtcaacaagaacatcgcgtctgtgggcttccacgaagacggccgctggatgtacacgggcggcgaggactgcacagccaggatctgggacctcaggtcccggaacctgcagtgccagcggatcttccaggtgaacgcacccattaactgcgtgtgcctgcaccccaaccaggcagagctcatcgtgggtgaccagagcggggctatccacatctgg

SEQ ID NO: 8715 - protein, 88 aa, Homo sapiens
MYDLNSNNPNPIISYDGVNKNIASVGFHEDGRWMYTGGEDCTARIWDLRSRNLQCQRIFQVNAPINCVCLHPNQAELIVGDQSGAIHI

SEQ ID NO: 8716 - DNA, 1210 bp, Homo sapiens
gactcgctccggctcccctcgccgtcctggacacggcggagtgcggagccgcccgtaaggtacggaggccgcgagccaggggccgggaaccggctgctgggtggctgggagagcacggccaggggaagccggccagcaggacggagcaagggcggtcaccggaggaaaggggagctcgggggtccagccagactgcgccctttcccatcagggcctgccgctggcctgctacgcatgcgcagccgcagcgctcggctttccccggcccatccgccgccttgcgcacgcgcagcccgcccctgcggcagagtggcgcccgcgcgtgactcccccctgccggctgcggaggtgggggggggacggcgcccccgccgtgtgcgtggggcggggatggagcacgcgccctggagccccggagccaggtatcacgcgtgtgacgcgtgtccctgaacctacctgcgcttcttgtcccaactctaaaatgggaatgataagcgccattcggcagcgccttgtgggtctataatctacttagcacagagagtgtcttctaagtacttcacatccttctctgcagatgctctgacctttgacccctgccgttcagctctagggcccgtgcaggccacaccatgaacacctccccaggcacggtgggcagtgacccggtcatcctggccactgcaggctacgaccacaccgtgcgcttctggcaggcccacagcggcatctgcacccggacggtgcagcaccaggactcccaggtgaatgccttggaggtcacaccggaccgcagcatgattgctgctgcaggttaccagcacatccgcatgtatgatctcaactccaataaccctaaccccatcatcagctacgacggcgtcaacaagaacatcgcgtctgtgggcttccacgaagacggccgctggatgtacacgggcggcgaggactgcacagccaggatctgggacctcaggtcccggaacctgcagtgccagcggatcttccaggtgaacgcacccattaactgcgtgtgcctgcaccccaaccaggcagagctcatcgtgggtgaccagagcggggctatccacatctgggacttgaaaacagaccacaacgagcagctgtcaatagcaccggaaactgctatgtctggaatctgacggggggcattggtgacgaggtgacccagctcatccccaagactaag

SEQ ID NO: 8717 - protein, 176 aa, Homo sapiens
MNTSPGTVGSDPVILATAGYDHTVRFWQAHSGICTRTVQHQDSQVNALEVTPDRSMIAAAGYQHIRMYDLNSNNPNPIISYDGVNKNIASVGFHEDGRWMYTGGEDCTARIWDLRSRNLQCQRIFQVNAPINCVCLHPNQAELIVGDQSGAIHIWDLKTDHNEQLSIAPETAMSGI

SEQ ID NO: 8718 - DNA, 1330 bp, Homo sapiens
gactcgctccggctcccctcgccgtcctggacacggcggagtgcggagccgcccgtaaggtacggaggccgcgagccaggggccgggaaccggctgctgggtggctgggagagcacggccaggggaagccggccagcaggacggagcaagggcggtcaccggaggaaaggggagctcgggggtccagccagactgcgccctttcccatcagggcctgccgctggcctgctacgcatgcgcagccgcagcgctcggctttccccggcccatccgccgccttgcgcacgcgcagcccgcccctgcggcagagtggcgcccgcgcgtgactcccccctgccggctgcggaggtgggggggggacggcgcccccgccgtgtgcgtggggcggggatggagcacgcgccctggagccccggagccaggtatcacgcgtgtgacgcgtgtccctgaacctacctgcgcttcttgtcccaactctaaaatgggaatgataagcgccattcggcagcgccttgtgggtctataatctacttagcacagagagtgtcttctaagtacttcacatccttctctgcagatgctctgacctttgacccctgccgttcagctctagggcccgtgcaggccacaccatgaacacctccccaggcacggtgggcagtgacccggtcatcctggccactgcaggctacgaccacaccgtgcgcttctggcaggcccacagcggcatctgcacccggacggtgcagcaccaggactcccaggtgaatgccttggaggtcacaccggaccgcagcatgattgctgctgcaggttaccagcacatccgcatgtatgatctcaactccaataaccctaaccccatcatcagctacgacggcgtcaacaagaacatcgcgtctgtgggcttccacgaagacggccgctggatgtacacgggcggcgaggactgcacagccaggatctgggacctcaggtcccggaacctgcagtgccagcggatcttccaggtgaacgcacccattaactgcgtgtgcctgcaccccaaccaggcagagctcatcgtgggtgaccagagcggggctatccacatctgggacttgaaaacagaccacaacgagcagctgatccctgagcccgaggtctccatcacgtccgcccacatcgatcccgacgccagctacatggcagctgtcaatagcaccggaaactgctatgtctggaatctgacggggggcattggtgacgaggtgacccagctcatccccaagactaagatccctgcccacacgcgctacgccctgcagtgtcgcttcagccccgactccac

SEQ ID NO: 8719 - protein, 231 aa, Homo sapiens
MNTSPGTVGSDPVILATAGYDHTVRFWQAHSGICTRTVQHQDSQVNALEVTPDRSMIAAAGYQHIRMYDLNSNNPNPIISYDGVNKNIASVGFHEDGRWMYTGGEDCTARIWDLRSRNLQCQRIFQVNAPINCVCLHPNQAELIVGDQSGAIHIWDLKTDHNEQLIPEPEVSITSAHIDPDASYMAAVNSTGNCYVWNLTGGIGDEVTQLIPKTKIPAHTRYALQCRFSPD

SEQ ID NO: 8720 - DNA, 1684 bp, Homo sapiens
gactcgctccggctcccctcgccgtcctggacacggcggagtgcggagccgcccgtaagatgctctgacctttgacccctgccgttcagctctagggcccgtgcaggccacaccatgaacacctccccaggcacggtgggcagtgacccggtcatcctggccactgcaggctacgaccacaccgtgcgcttctggcaggcccacagcggcatctgcacccggacggtgcagcaccaggactcccaggtgaatgccttggaggtcacaccggaccgcagcatgattgctgctgcaggttaccagcacatccgcatgtatgatctcaactccaataaccctaaccccatcatcagctacgacggcgtcaacaagaacatcgcgtctcggatcttccaggtgaacgcacccattaactgcgtgtgcctgcaccccaaccaggcagagctcatcgtgggtgaccagagcggggctatccacatctgggacttgaaaacagaccacaacgagcagctgatccctgagcccgaggtctccatcacgtccgcccacatcgatcccgacgccagctacatggcagctgtcaatagcaccggaaactgctatgtctggaatctgacggggggcattggtgacgaggtgacccagctcatccccaagactaagatccctgcccacacgcgctacgccctgcagtgtcgcttcagccccgactccacgctcctcgccacctgctcggctgatcagacgtgcaagatctggaggacgtccaacttctccctgatgacggagctgagcatcaagagcggcaaccccggggagtcctcccgcggctggatgtggggctgcgccttctcgggggactcccagtacatcgtcactggtgagccccgccctggcctcccccatccctggcccccggcgctggcctccagagccagcccacctcggctgcagcttcccctctgctggggccgcctgcttggcctgcacctgcgctcttagccctgcacaatctccccctccagcttcctcggacaacctggcccggctctggtgtgtggagactggagagatcaagagagagtatggcggccaccagaaggctgttgtctgcctggccttcaatgacagtgtgctgggctagcctgtgacccctcgggactgcctggtgcaggtggtggcagctggagggacccatgcagcacccaggtcagagcagaccctcccctgccggcctgcgccagctggacctgatggccccctgtggcgccttgacctgctgggccaggctgccctgggactctcagcccccagttgcttatccagatgtgacagagctcgacccaagccaggctgcacactcctggactgggctagcctgcactgcctgggaaagtcggccgagggcccaaagctgctgaggggtctgaggctggtgcccacccccaagctagtgtgttctctgcccctccctgcccgcgtttcagggcctcggtccatagagaacaccaccaccatggccaggtggaagggtttattagtccctgccagcagctgtcctccctggtgcaggtggcctggccagcccactggattggggacgggccaggctgggccaggtcgggggctcagtctgggaggtaataaaagcagaccgacacgcagatgttgctcgggaagcaga

SEQ ID NO: 8721 - protein, 295 aa, Homo sapiens
MNTSPGTVGSDPVILATAGYDHTVRFWQAHSGICTRTVQHQDSQVNALEVTPDRSMIAAAGYQHIRMYDLNSNNPNPIISYDGVNKNIASRIFQVNAPINCVCLHPNQAELIVGDQSGAIHIWDLKTDHNEQLIPEPEVSITSAHIDPDASYMAAVNSTGNCYVWNLTGGIGDEVTQLIPKTKIPAHTRYALQCRFSPDSTLLATCSADQTCKIWRTSNFSLMTELSIKSGNPGESSRGWMWGCAFSGDSQYIVTGEPRPGLPHPWPPALASRASPPRLQLPLCWGRLLGLHLRS

SEQ ID NO: 8722 - DNA, 2157 bp, Homo sapiens
gactcgctccggctcccctcgccgtcctggacacggcggagtgcggagccgcccgtaaggtacggaggccgcgagccaggggccgggaaccggctgctgggtggctgggagagcacggccaggggaagccggccagcaggacggagcaagggcggtcaccggaggaaaggggagctcgggggtccagccagactgcgccctttcccatcagggcctgccgctggcctgctacgcatgcgcagccgcagcgctcggctttccccggcccatccgccgccttgcgcacgcgcagcccgcccctgcggcagagtggcgcccgcgcgtgactcccccctgccggctgcggaggtgggggggggacggcgcccccgccgtgtgcgtggggcggggatggagcacgcgccctggagccccggagccaggtatcacgcgtgtgacgcgtgtccctgaacctacctgcgcttcttgtcccaactctaaaatgggaatgataagcgccattcggcagcgccttgtgggtctataatctacttagcacagagagtgtcttctaagtacttcacatccttctctgcagatgctctgacctttgacccctgccgttcagctctagggcccgtgcaggccacaccatgaacacctccccaggcacggtgggcagtgacccggtcatcctggccactgcaggctacgaccacaccgtgcgcttctggcaggcccacagcggcatctgcacccggacggtgcagcaccaggactcccaggtgaatgccttggaggtcacaccggaccgcagcatgattgctgctgcaggttaccagcacatccgcatgtatgatctcaactccaataaccctaaccccatcatcagctacgacggcgtcaacaagaacatcgcgtctgtgggcttccacgaagacggccgctggatgtacacgggcggcgaggactgcacagccaggatctgggacctcaggtcccggaacctgcagtgccagcggatcttccaggtgaacgcacccattaactgcgtgtgcctgcaccccaaccaggcagagctcatcgtgggtgaccagagcggggctatccacatctgggacttgaaaacagaccacaacgagcagctgatccctgagcccgaggtctccatcacgtccgcccacatcgatcccgacgccagctacatggcagctgtcaatagcaccggaaactgctatgtctggaatctgacggggggcattggtgacgaggtgacccagctcatccccaagactaagatccctgcccacacgcgctacgccctgcagtgtcgcttcagccccgactccacgctcctcgccacctgctcggctgatcagacgtgcaagatctggaggacgtccaacttctccctgatgacggagctgagcatcaagagcggcaaccccggggagtcctcccgcggctggatgtggggctgcgccttctcgggggactcccagtacatcgtcactgcttcctcggacaacctggcccggctctggtgtgtggagactggagagatcaagagagagtatggcggccaccagaaggctgttgtctgcctggccttcaatgacagtgtgctgggctagcctgtgacccctcgggactgcctggtgcaggtggtggcagctggagggacccatgcagcacccaggtcagagcagaccctcccctgccggcctgcgccagctggacctgatggccccctgtggcgccttgacctgctgggccaggctgccctgggactctcagcccccagttgcttatccagatgtgacagagctcgacccaagccaggctgcacactcctggactgggctagcctgcactgcctgggaaagtcggccgagggcccaaagctgctgaggggtctgaggctggtgcccacccccaagctagtgtgttctctgcccctccctgcccgcgtttcagggcctcggtccatagagaacaccaccaccatggccaggtggaagggtttattagtccctgccagcagctgtcctccctggtgcaggtggcctggccagcccactggattggggacgggccaggctgggccaggtcgggggctcagtctgggaggtaataaaagcagaccgacacgcagatgttgctcgggaagcagatgtc

SEQ ID NO: 8723 - protein, 326 aa, Homo sapiens; identical to SEQ ID NO: 1316

SEQ ID NO: 8724 - DNA, 608 bp, Homo sapiens
tcgctccggctcccctcgccgtcctggacacggcggagtgcggagccgcccgtaagatgctctgacctttgacccctgccgttcagctctagggcccgtgcaggccacaccatgaacacctccccaggcacggtgggcagtgacccggtcatcctggccactgcaggctacgaccacaccgtgcgcttctggcaggcccacagcggcatctgcacccggacggtgcagcaccaggactcccaggtgaatgccttggaggtcacaccggaccgcagcatgattgctgctgcaggtatctgtgatccttgatctctaaactcctgagctctggtgggtcgacctcagcacagccaagcttcagttcagcctgtgtccctaggttaccagcacatccgcatgtatgatctcaactccaataaccctaaccccatcatcagctacgacggcgtcaacaagaacatcgcgtctgtgggcttccacgaagacggccgctggatgtacacgggcggcgaggactgcacagccaggatctgggacctcaggtgcggtggggagggggcgtgctgcccggggctggggtgggctgctctgggagaccgttttaggtt

SEQ ID NO: 8725 - protein, 65 aa, Homo sapiens
MNTSPGTVGSDPVILATAGYDHTVRFWQAHSGICTRTVQHQDSQVNALEVTPDRSMIAAAGICDP

SEQ ID NO: 8726 - DNA, 803 bp, Homo sapiens
cctcgccgtcctggacacggcggagtgcggagccgcccgtaaggtacggaggccgcgagccaggggccgggaaccggctgctgggtggctgggagagcacggccaggggaagccggccagcaggacggagcaagggcggtcaccggaggaaaggggagctcgggggtccagccagactgcgccctttcccatcagggcctgccgctggcctgctacgcatgcgcagccgcagcgctcggctttccccggcccatccgccgccttgcgcacgcgcagcccgcccctgcggcagagtggcgcccgcgcgtgactcccccctgccggctgcggaggtgggggggggacggcgcccccgccgtgtgcgtggggcggggatggagcacgcgccctggagccccggagccagatgctctgacctttgacccctgccgttcagctctagggcccgtgcaggccacaccatgaacacctccccaggcacggtgggcagtgacccggtcatcctggccactgcaggctacgaccacaccgtgcgcttctggcaggcccacagcggcatctgcacccggacggtgcagcaccaggactcccaggtgaatgccttggaggtcacaccggaccgcagcatgattgctgctgcaggttaccagcacatccgcatgtatgatctcaactccaataaccctaaccccatcatcagctacgacggcgtcaacaagaacatcgcgtctgtgggcttccacgaagacggccgctggatgtacacgggcggcgaggactgcacagccaggatctgggacctc

SEQ ID NO: 8727 - protein, 113 aa, Homo sapiens; identical to SEQ ID NO: 8713

SEQ ID NO: 8728 - DNA, 1861 bp, Homo sapiens
cctcgccgtcctggacacggcggagtgcggagccgcccgtaaggtacggaggccgcgagccaggggccgggaaccggctgctgggtggctgggagagcacggccaggggaagccggccagcaggacggagcaagggcggtcaccggaggaaaggggagctcgggggtccagccagactgcgccctttcccatcagggcctgccgctggcctgctacgcatgcgcagccgcagcgctcggctttccccggcccatccgccgccttgcgcacgcgcagcccgcccctgcggcagagtggcgcccgcgcgtgactcccccctgccggctgcggaggtgggggggggacggcgcccccgccgtgtgcgtggggcggggatggagcacgcgccctggagccccggagccagatgctctgacctttgacccctgccgttcagctctagggcccgtgcaggccacaccatgaacacctccccaggcacggtgggcagtgacccggtcatcctggccactgcaggctacgaccacaccgtgcgcttctggcaggcccacagcggcatctgcacccggacggtgcagcaccaggactcccaggtgaatgccttggaggtcacaccggaccgcagcatgattgctgctgcaggttaccagcacatccgcatgtatgatctcaactccaataaccctaaccccatcatcagctacgacggcgtcaacaagaacatcgcgtctgtgggcttccacgaagacggccgctggatgtacacgggcggcgaggactgcacagccaggatctgggacctcaggtcccggaacctgcagtgccagcggatcttccaggtgaacgcacccattaactgcgtgtgcctgcaccccaaccaggcagagctcatcgtgggtgaccagagcggggctatccacatctgggacttgaaaacagaccacaacgagcagctgatccctgagcccgaggtctccatcacgtccgcccacatcgatcccgacgccagctacatggcagctgtcaatagcaccgctcctcgccacctgctcggctgatcagacgtgcaagatctggaggacgtccaacttctccctgatgacggagctgagcatcaagagcggcaaccccggggagtcctcccgcggctggatgtggggctgcgccttctcgggggactcccagtacatcgtcactgcttcctcggacaacctggcccggctctggtgtgtggagactggagagatcaagagagagtatggcggccaccagaaggctgttgtctgcctggccttcaatgacagtgtgctgggctagcctgtgacccctcgggactgcctggtgcaggtggtggcagctggagggacccatgcagcacccaggtcagagcagaccctcccctgccggcctgcgccagctggacctgatggccccctgtggcgccttgacctgctgggccaggctgccctgggactctcagcccccagttgcttatccagatgtgacagagctcgacccaagccaggctgcacactcctggactgggctagcctgcactgcctgggaaagtcggccgagggcccaaagctgctgaggggtctgaggctggtgcccacccccaagctagtgtgttctctgcccctccctgcccgcgtttcagggcctcggtccatagagaacaccaccaccatggccaggtggaagggtttattagtccctgccagcagctgtcctccctggtgcaggtggcctggccagcccactggattggggacgggccaggctgggccaggtcgggggctcagtctgggaggtaataaaagcagaccgacacgcagatgttgctcgggaagcagatgtc

SEQ ID NO: 8729 - protein, 198 aa, Homo sapiens
MNTSPGTVGSDPVILATAGYDHTVRFWQAHSGICTRTVQHQDSQVNALEVTPDRSMIAAAGYQHIRMYDLNSNNPNPIISYDGVNKNIASVGFHEDGRWMYTGGEDCTARIWDLRSRNLQCQRIFQVNAPINCVCLHPNQAELIVGDQSGAIHIWDLKTDHNEQLIPEPEVSITSAHIDPDASYMAAVNSTAPRHLLG

SEQ ID NO: 8730 - DNA, 1986 bp, Homo sapiens
cctcgccgtcctggacacggcggagtgcggagccgcccgtaaggtacggaggccgcgagccaggggccgggaaccggctgctgggtggctgggagagcacggccaggggaagccggccagcaggacggagcaagggcggtcaccggaggaaaggggagctcgggggtccagccagactgcgccctttcccatcagggcctgccgctggcctgctacgcatgcgcagccgcagcgctcggctttccccggcccatccgccgccttgcgcacgcgcagcccgcccctgcggcagagtggcgcccgcgcgtgactcccccctgccggctgcggaggtgggggggggacggcgcccccgccgtgtgcgtggggcggggatggagcacgcgccctggagccccggagccagatgctctgacctttgacccctgccgttcagctctagggcccgtgcaggccacaccatgaacacctccccaggcacggtgggcagtgacccggtcatcctggccactgcaggctacgaccacaccgtgcgcttctggcaggcccacagcggcatctgcacccggacggtgcagcaccaggactcccaggtgaatgccttggaggtcacaccggaccgcagcatgattgctgctgcaggttaccagcacatccgcatgtatgatctcaactccaataaccctaaccccatcatcagctacgacggcgtcaacaagaacatcgcgtctgtgggcttccacgaagacggccgctggatgtacacgggcggcgaggactgcacagccaggatctgggacctcaggtcccggaacctgcagtgccagcggatcttccaggtgaacgcacccattaactgcgtgtgcctgcaccccaaccaggcagagctcatcgtgggtgaccagagcggggctatccacatctgggacttgaaaacagaccacaacgagcagctgatccctgagcccgaggtctccatcacgtccgcccacatcgatcccgacgccagctacatggcagctgtcaatagcaccggaaactgctatgtctggaatctgacggggggcattggtgacgaggtgacccagctcatccccaagactaagatccctgcccacacgcgctacgccctgcagtgtcgcttcagccccgactccacgctcctcgccacctgctcggctgatcagacgtgcaagatctggaggacgtccaacttctccctgatgacggagctgagcatcaagagcggcaaccccggggagtcctcccgcggctggatgtggggctgcgccttctcgggggactcccagtacatcgtcactgcttcctcggacaacctggcccggctctggtgtgtggagactggagagatcaagagagagtatggcggccaccagaaggctgttgtctgcctggccttcaatgacagtgtgctgggctagcctgtgacccctcgggactgcctggtgcaggtggtggcagctggagggacccatgcagcacccaggtcagagcagaccctcccctgccggcctgcgccagctggacctgatggccccctgtggcgccttgacctgctgggccaggctgccctgggactctcagcccccagttgcttatccagatgtgacagagctcgacccaagccaggctgcacactcctggactgggctagcctgcactgcctgggaaagtcggccgagggcccaaagctgctgaggggtctgaggctggtgcccacccccaagctagtgtgttctctgcccctccctgcccgcgtttcagggcctcggtccatagagaacaccaccaccatggccaggtggaagggtttattagtccctgccagcagctgtcctccctggtgcaggtggcctggccagcccactggattggggacgggccaggctgggccaggtcgggggctcagtctgggaggtaataaaagcagaccgacacgcagatgttgctcgggaagcagatgtc

SEQ ID NO: 8731 - protein, 326 aa, Homo sapiens; identical to SEQ ID NO: 1316

SEQ ID NO: 8732 - DNA, 726 bp, Homo sapiens
agcccgcccctgcggcagagtggcgcccgcgcgtgactcccccctgccggctgcggaggtgggggggggacggcgcccccgccgtgtgcgtggggcggggatggaactggagagatcaagagagagtatggcggccaccagaaggctgttgtctgcctggccttcaatgacagtgtgctgggctagcctgtgacccctcgggactgcctggtgcaggtggtggcagctggagggacccatgcagcacccaggtcagagcagaccctcccctgccggcctgcgccagctggacctgatggccccctgtggcgccttgacctgctgggccaggctgccctgggactctcagcccccagttgcttatccagatgtgacagagctcgacccaagccaggctgcacactcctggactgggctagcctgcactgcctgggaaagtcggccgagggcccaaagctgctgaggggtctgaggctggtgcccacccccaagctagtgtgttctctgcccctccctgcccgcgtttcagggcctcggtccatagagaacaccaccaccatggccaggtggaagggtttattagtccctgccagcagctgtcctccctggtgcaggtggcctggccagcccactggattggggacgggccaggctgggccaggtcgggggctcagtctgggaggtaataaaagcagaccgacacgcagatgttgctcgggaagcaga

SEQ ID NO: 8733 - protein, 30 aa, Homo sapiens [sequence omitted]

SEQ ID NO: 8734 - DNA, 1774 bp, Homo sapiens
ccctgccggctgcggaggtgggggggggacggcgcccccgccgtgtgcgtggggcggggatggagcacgcgccctggagccccggagccagatgctctgacctttgacccctgccgttcagctctagggcccgtgcaggccacaccatgaacacctccccaggcacggtgggcagtgacccggtcatcctggccactgcaggctacgaccacaccgtgcgcttctggcaggcccacagcggcatctgcacccggacggtgcagcaccaggactcccaggtgaatgccttggaggtcacaccggaccgcagcatgattgctgctgcaggtatctgtgatccttgatctctaaactcctgagctctggtgggtcgacctcagcacagccaagcttcagttcagcctgtgtccctaggttaccagcacatccgcatgtatgatctcaactccaataaccctaaccccatcatcagctacgacggcgtcaacaagaacatcgcgtctgtgggcttccacgaagacggccgctggatgtacacgggcggcgaggactgcacagccaggatctgggacctcaggtcccggaacctgcagtgccagcggatcttccaggtgaacgcacccattaactgcgtgtgcctgcaccccaaccaggcagagctcatcgtgggtgaccagagcggggctatccacatctgggacttgaaaacagaccacaacgagcagctgatccctgagcccgaggtctccatcacgtccgcccacatcgatcccgacgccagctacatggcagctgtcaatagcaccgctcctcgccacctgctcggctgatcagacgtgcaagatctggaggacgtccaacttctccctgatgacggagctgagcatcaagagcggcaaccccggggagtcctcccgcggctggatgtggggctgcgccttctcgggggactcccagtacatcgtcactggtgagccccgccctggcctcccccatccctggcccccggcgctggcctccagagccagcccacctcggctgcagcttcccctctgctggggccgcctgcttggcctgcacctgcgctcttagccctgcacaatctccccctccagcttcctcggacaacctggcccggctctggtgtgtggagactggagagatcaagagagagtatggcggccaccagaaggctgttgtctgcctggccttcaatgacagtgtgctgggctagcctgtgacccctcgggactgcctggtgcaggtggtggcagctggagggacccatgcagcacccaggtcagagcagaccctcccctgccggcctgcgccagctggacctgatggccccctgtggcgccttgacctgctgggccaggctgccctgggactctcagcccccagttgcttatccagatgtgacagagctcgacccaagccaggctgcacactcctggactgggctagcctgcactgcctgggaaagtcggccgagggcccaaagctgctgaggggtctgaggctggtgcccacccccaagctagtgtgttctctgcccctccctgcccgcgtttcagggcctcggtccatagagaacaccaccaccatggccaggtggaagggtttattagtccctgccagcagctgtcctccctggtgcaggtggcctggccagcccactggattggggacgggccaggctgggccaggtcgggggctcagtctgggaggtaataaaagcagaccgacacgcagatgttgctcgggaagcaga

SEQ ID NO: 8735 - protein, 132 aa, Homo sapiens
MYDLNSNNPNPIISYDGVNKNIASVGFHEDGRWMYTGGEDCTARIWDLRSRNLQCQRIFQVNAPINCVCLHPNQAELIVGDQSGAIHIWDLKTDHNEQLIPEPEVSITSAHIDPDASYMAAVNSTAPRHLLG

SEQ ID NO: 8736 - DNA, 1255 bp, Homo sapiens
ggccaggccgaggccatctgggtagggcaccaacaagcccagatggacagcatgtgccccggcccggcccgcaggtcccggaacctgcagtgccagcggatcttccaggtgaacgcacccattaactgcgtgtgcctgcaccccaaccaggcagagctcatcgtgggtgaccagagcggggctatccacatctgggacttgaaaacagaccacaacgagcagctgatccctgagcccgaggtctccatcacgtccgcccacatcgatcccgacgccagctacatggcagctgtcaatagcaccggaaactgctatgtctggaatctgacggggggcattggtgacgaggtgacccagctcatccccaagactaagatccctgcccacacgcgctacgccctgcagtgtcgcttcagccccgactccacgctcctcgccacctgctcggctgatcagacgtgcaagatctggaggacgtccaacttctccctgatgacggagctgagcatcaagagcggcaaccccggggagtcctcccgcggctggatgtggggctgcgccttctcgggggactcccagtacatcgtcactgcttcctcggacaacctggcccggctctggtgtgtggagactggagagatcaagagagagtatggcggccaccagaaggctgttgtctgcctggccttcaatgacagtgtgctgggctagcctgtgacccctcgggactgcctggtgcaggtggtggcagctggagggacccatgcagcacccaggtcagagcagaccctcccctgccggcctgcgccagctggacctgatggccccctgtggcgccttgacctgctgggccaggctgccctgggactctcagcccccagttgcttatccagatgtgacagagctcgacccaagccaggctgcacactcctggactgggctagcctgcactgcctgggaaagtcggccgagggcccaaagctgctgaggggtctgaggctggtgcccacccccaagctagtgtgttctctgcccctccctgcccgcgtttcagggcctcggtccatagagaacaccaccaccatggccaggtggaagggtttattagtccctgccagcagctgtcctccctggtgcaggtggcctggccagcccactggattggggacgggccaggctgggccaggtcgggggctcagtctgggaggtaataaaagcagaccgacacgcagatgttgctcgggaagcagatgtc

SEQ ID NO: 8737 - protein, 222 aa, Homo sapiens
MDSMCPGPARRSRNLQCQRIFQVNAPINCVCLHPNQAELIVGDQSGAIHIWDLKTDHNEQLIPEPEVSITSAHIDPDASYMAAVNSTGNCYVWNLTGGIGDEVTQLIPKTKIPAHTRYALQCRFSPDSTLLATCSADQTCKIWRTSNFSLMTELSIKSGNPGESSRGWMWGCAFSGDSQYIVTASSDNLARLWCVETGEIKREYGGHQKAVVCLAFNDSVLG

SEQ ID NO: 8738 - DNA, 1687 bp, Homo sapiens
tttcactctgttgcctcctggtcccagtcacccttgtttctggtgacggctgacacactctctgaggcttcctttccccctccctgacctcccctggcccctgacacgttctctcttggatgcttctagtggtgcctggtcagtatcagccaggtggcgtcattcccctgaggagacccggggctgctggcctcgcccgtaggctgctgtggcgtggcccctgctcttctctccagcctcattttttttcattaacttcatttaatcccagtgcatcacttgtacctcttgcccccggatttcccttctgctggcctttgtcatgctgtctctctagctggtgcccttctcctgtctacttccgttggccatcggcatcctccaggaaggagaatttgagtccttggccaggcgtggcctcctgttcttggcttgccaggtgtggcccttgcttggggccaggcttcccaggtgccttctgcaggcaggaccagaggggcctgcctgcccctcacccggggtccccatgcacagttggcccccagtgttggcccccagggcatccttccctgtgtctcagacctgaggccttgggccctccgtgacggtcctcctgacctctagggaaactgctatgtctggaatctgacggggggcattggtgacgaggtgacccagctcatccccaagactaagatccctgcccacacgcgctacgccctgcagtgtcgcttcagccccgactccacgtgcgtgcagggcctgctggcccgggaggggacctgcctgggctgggggctggagaggggaggggctgctggatggagtggctgctgctggacacgccccatgcccacccactaggctcctcgccacctgctcggctgatcagacgtgcaagatctggaggacgtccaacttctccctgatgacggagctgagcatcaagagcggcaaccccggggagtcctcccgcggctggatgtggggctgcgccttctcgggggactcccagtacatcgtcactgcttcctcggacaacctggcccggctctggtgtgtggagactggagagatcaagagagagtatggcggccaccagaaggctgttgtctgcctggccttcaatgacagtgtgctgggctagcctgtgacccctcgggactgcctggtgcaggtggtggcagctggagggacccatgcagcacccaggtcagagcagaccctcccctgccggcctgcgccagctggacctgatggccccctgtggcgccttgacctgctgggccaggctgccctgggactctcagcccccagttgcttatccagatgtgacagagctcgacccaagccaggctgcacactcctggactgggctagcctgcactgcctgggaaagtcggccgagggcccaaagctgctgaggggtctgaggctggtgcccacccccaagctagtgtgttctctgcccctccctgcccgcgtttcagggcctcggtccatagagaacaccaccaccatggccaggtggaagggtttattagtccctgccagcagctgtcctccctggtgcaggtggcctggccagcccactggattggggacgggccaggctgggccaggtcgggggctcagtctgggaggtaataaaagcagaccgacacgcagatgttgctcgggaagcaga

SEQ ID NO: 8739 - protein, 72 aa, Homo sapiens
MTELSIKSGNPGESSRGWMWGCAFSGDSQYIVTASSDNLARLWCVETGEIKREYGGHQKAVVCLAFNDSVLG

SEQ ID NO: 8740 - DNA, 1717 bp, Homo sapiens
tttcactctgttgcctcctggtcccagtcacccttgtttctggtgacggctgacacactctctgaggcttcctttccccctccctgacctcccctggcccctgacacgttctctcttggatgcttctagtggtgcctggtcagtatcagccaggtggcgtcattcccctgaggagacccggggctgctggcctcgcccgtaggctgctgtggcgtggcccctgctcttctctccagcctcattttttttcattaacttcatttaatcccagtgcatcacttgtacctcttgcccccggatttcccttctgctggcctttgtcatgctgtctctctagctggtgcccttctcctgtctacttccgttggccatcggcatcctccaggaaggagaatttgagtccttggccaggcgtggcctcctgttcttggcttgccaggtgtggcccttgcttggggccaggcttcccaggtgccttctgcaggcaggaccagaggggcctgcctgcccctcacccggggtccccatgcacagttggcccccagtgttggcccccagggcatccttccctgtgtctcagacctgaggccttgggccctccgtgacggtcctcctgacctctagggaaactgctatgtctggaatctgacggggggcattggtgacgaggtgacccagctcatccccaagactaagatccctgcccacacgcgctacgccctgcagtgtcgcttcagccccgactccacgctcctcgccacctgctcggctgatcagacgtgcaagatctggaggacgtccaacttctccctgatgacggagctgagcatcaagagcggcaaccccggggagtcctcccgcggctggatgtggggctgcgccttctcgggggactcccagtacatcgtcactggtgagccccgccctggcctcccccatccctggcccccggcgctggcctccagagccagcccacctcggctgcagcttcccctctgctggggccgcctgcttggcctgcacctgcgctcttagccctgcacaatctccccctccagcttcctcggacaacctggcccggctctggtgtgtggagactggagagatcaagagagagtatggcggccaccagaaggctgttgtctgcctggccttcaatgacagtgtgctgggctagcctgtgacccctcgggactgcctggtgcaggtggtggcagctggagggacccatgcagcacccaggtcagagcagaccctcccctgccggcctgcgccagctggacctgatggccccctgtggcgccttgacctgctgggccaggctgccctgggactctcagcccccagttgcttatccagatgtgacagagctcgacccaagccaggctgcacactcctggactgggctagcctgcactgcctgggaaagtcggccgagggcccaaagctgctgaggggtctgaggctggtgcccacccccaagctagtgtgttctctgcccctccctgcccgcgtttcagggcctcggtccatagagaacaccaccaccatggccaggtggaagggtttattagtccctgccagcagctgtcctccctggtgcaggtggcctggccagcccactggattggggacgggccaggctgggccaggtcgggggctcagtctgggaggtaataaaagcagaccgacacgcagatgttgctcgggaagcaga

SEQ ID NO: 8741 - protein, 161 aa, Homo sapiens [sequence omitted]

SEQ ID NO: 8742 - DNA, 2380 bp, Homo sapiens
tgccgtctcaccacgggtgggaggactcaaagtagatgggtaactggggttccaactccagagctggaatgccaactgcccactcccagcctggttcagaggaagatgttttgaagaatgagggaaagccaggcacaaagggaagccagggaagcaaagggccctggagtgaagctggtgggctgccgtgtcagagcgcccagggcagggagcagagctcagaagtaatgctggcccgggcgcagtggctcacacccgtaatcccaacgctttggaaggctgaggcaggtggattacttgagatcaggagttcaagaccagcctggccaaaatggtgaaaacccatctctactaaaaatacaaaaattagcgggacttggtggcatgtatctgtaatcccagctactagggaggctgaggcatgagaattgtgtgaacccgggaggcagaggttgcagtgagctgagatcacgccactgcactccagcctgggggacacagcgagactccgtctcaaaaaaaaaaaagttgggctaggcgggcccccgaggctggcctgactgtcccaggggcacaggctccagcaggctgcctgtctgtggtccaggcttcaggaacccccggtcttgggtgtgcgggggctgggaagtggctgggggtgcacagtcccacacctgtcattcactgaacaggcacgtattgacagcttgtggcgtgtcaggccctgtgcccaactctgggagtcaaggataacctgacagactcaggccactttaggaaaacgaaatccaccccaaccacacttagcgagtcaccctggccgggcctgggctgccctccagtcggtcagccggactggatttccacgcggccgagccctacgcctcccagaccctgagctccagtctgcacaggccaggtgtctggagccgggcctggtgacaggcatcccccaggtgggaggaggggctgtcctggctctgacctggatatcagatccagagctgagggggaggcgcagggtcaggaggggaggggttctgttctgagtttcccctggccaaggctgcagacaagggacgcagacaatcggcacattgtgagcaggggctgcaggatggaaccagcaagctgctgtgctgagcgccccaaacctgggcctacaggggtgaagaccaagccctcctgcgggggctggagagccgtgagcctgctcctgctgctgctgctgctggtgctggccgctgtgggggttgtggctggagggcttcttggctctgctcagggccctcccaagccaaggctgcagacgctgcgaatgaccctcccgagcccccacatgccccggcccaaccaaaccatcctggtggacgtggcccggaacgcggcgaccatcacagtgaccccacctcagagcaaccacagctgggcggtgctgttcgacgggcagagcggctgcatctgttaccgccctgaggagcaccaggtctgcttcctccgcctgatggaggacagtgatcgggagaccctgcggctgctggtggatacctccaaggtccaagaggcttgggtccccagccaggacacccaccacacccaggagctgctggcagtgcaggggagcctcgaagtggaccccgcccaggcgggggctttggtgcagcgcctgtgcatgaggacccccatctactgggcccggcgagcagaggggccccggagacagcggctgatttatctctgcatcgacatctgcttcccgagcaacatctgcgtgtcggtctgcttttattacctcccagactgagcccccgacctggcccagcctggcccgtccccaatccagtgggctggccaggccacctgcaccagggaggacagctgctggcagggactaataaacccttccacctggccatggtggtggtgttctctatggaccgaggccctgaaacgcgggcagggaggggcagagaacacactagcttgggggtgggcaccagcctcagacccctcagcagctttgggccctcggccgactttcccaggcagtgcaggctagcccagtccaggagtgtgcagcctggcttgggtcgagctctgtcacatctggataagcaactgggggctgagagtcccagggcagcctggcccagcaggtcaaggcgccacagggggccatcaggtccagctggcgcaggccggcaggggagggtctgctctgacctgggtgctgcatgggtccctccagctgccaccacctgcaccaggcagtcccgaggggtcacaggctagcccagcacactgtcattgaaggccaggcagacaacagccttctggtggccgccatactctctcttgatctctccagtctccacacacc

SEQ ID NO: 8743 - protein, 228 aa, Homo sapiens
MEPASCCAERPKPGPTGVKTKPSCGGWRAVSLLLLLLLLVLAAVGVVAGGLLGSAQGPPKPRLQTLRMTLPSPHMPRPNQTILVDVARNAATITVTPPQSNHSWAVLFDGQSGCICYRPEEHQVCFLRLMEDSDRETLRLLVDTSKVQEAWVPSQDTHHTQELLAVQGSLEVDPAQAGALVQRLCMRTPIYWARRAEGPRRQRLIYLCIDICFPSNICVSVCFYYLPD

SEQ ID NO: 8744 - DNA, 2476 bp, Homo sapiens
tgccgtctcaccacgggtgggaggactcaaagtagatgggtaactggggttccaactccagagctggaatgccaactgcccactcccagcctggttcagaggaagatgttttgaagaatgagggaaagccaggcacaaagggaagccagggaagcaaagggccctggagtgaagctggtgggctgccgtgtcagagcgcccagggcagggagcagagctcagaagtaatgctggcccgggcgcagtggctcacacccgtaatcccaacgctttggaaggctgaggcaggtggattacttgagatcaggagttcaagaccagcctggccaaaatggtgaaaacccatctctactaaaaatacaaaaattagcgggacttggtggcatgtatctgtaatcccagctactagggaggctgaggcatgagaattgtgtgaacccgggaggcagaggttgcagtgagctgagatcacgccactgcactccagcctgggggacacagcgagactccgtctcaaaaaaaaaaaagttgggctaggcgggcccccgaggctggcctgactgtcccaggggcacaggctccagcaggctgcctgtctgtggtccaggcttcaggaacccccggtcttgggtgtgcgggggctgggaagtggctgggggtgcacagtcccacacctgtcattcactgaacaggcacgtattgacagcttgtggcgtgtcaggccctgtgcccaactctgggagtcaaggataacctgacagactcaggccactttaggaaaacgaaatccaccccaaccacacttagcgagtcaccctggccgggcctgggctgccctccagtcggtcagccggactggatttccacgcggccgagccctacgcctcccagaccctgagctccagtctgcacaggccaggtgtctggagccgggcctggtgacaggcatcccccaggtgggaggaggggctgtcctggctctgacctggatatcagatccagagctgagggggaggcgcagggtcaggaggggaggggttctgttctgagtttcccctggccaaggctgcagacaagggacgcagacaatcggcacattgtgagcaggggctgcaggatggaaccagcaagctgctgtgctgagcgccccaaacctgggcctacaggggtgaagaccaagccctcctgcgggggctggagagccgtgagcctgctcctgctgctgctgctgctggtgctggccgctgtgggggttgtggctggagggcttcttggctctgctcagggccctcccaagccaaggctgcagacgctgcgaatgaccctcccgagcccccacatgccccggcccaaccaaaccatcctggtggacgtggcccggaacgcggcgaccatcacagtgaccccacctcagagcaaccacagctgggcggtgctgttcgacgggcagagcggctgcatctgttaccgccctgaggagcaccaggtctgcttcctccgcctgatggaggacagtgatcgggagaccctgcggctgctggtggatacctccaaggtccaagaggcttgggtccccagccaggacacccaccacacccaggagctgctggcagtgcaggggagcctcgaagtggaccccgcccaggcgggggctttggtgcagcgcctgtgcatgaggacccccatctactgggcccggcgagcagagggtgagtcaggaccgctgtgggggaaggccaggccctcgggatggtttgaggagctgggggcggagcccttggagattcacggcaccctcgccacagggccccggagacagcggctgatttatctctgcatcgacatctgcttcccgagcaacatctgcgtgtcggtctgcttttattacctcccagactgagcccccgacctggcccagcctggcccgtccccaatccagtgggctggccaggccacctgcaccagggaggacagctgctggcagggactaataaacccttccacctggccatggtggtggtgttctctatggaccgaggccctgaaacgcgggcagggaggggcagagaacacactagcttgggggtgggcaccagcctcagacccctcagcagctttgggccctcggccgactttcccaggcagtgcaggctagcccagtccaggagtgtgcagcctggcttgggtcgagctctgtcacatctggataagcaactgggggctgagagtcccagggcagcctggcccagcaggtcaaggcgccacagggggccatcaggtccagctggcgcaggccggcaggggagggtctgctctgacctgggtgctgcatgggtccctccagctgccaccacctgcaccaggcagtcccgaggggtcacaggctagcccagcacactgtcattgaaggccaggcagacaacagccttctggtggccgccatactctctcttgatctctccagtctccacacacc

SEQ ID NO: 8745 - protein, 260 aa, Homo sapiens
MEPASCCAERPKPGPTGVKTKPSCGGWRAVSLLLLLLLLVLAAVGVVAGGLLGSAQGPPKPRLQTLRMTLPSPHMPRPNQTILVDVARNAATITVTPPQSNHSWAVLFDGQSGCICYRPEEHQVCFLRLMEDSDRETLRLLVDTSKVQEAWVPSQDTHHTQELLAVQGSLEVDPAQAGALVQRLCMRTPIYWARRAEGESGPLWGKARPSGWFEELGAEPLEIHGTLATGPRRQRLIYLCIDICFPSNICVSVCFYYLPD

SEQ ID NO: 8746 - DNA, 1913 bp, Homo sapiens
tgccgtctcaccacgggtgggaggactcaaagtagatgggtaactggggttccaactccagagctggaatgccaactgcccactcccagcctggttcagaggaagatgttttgaagaatgagggaaagccaggcacaaagggaagccagggaagcaaagggccctggagtgaagctggtgggctgccgtgtcagagcgcccagggcagggagcagagctcagaagtaatgctggcccgggcgcagtggctcacacccgtaatcccaacgctttggaaggctgaggcaggtggattacttgagatcaggagttcaagaccagcctggccaaaatggtgaaaacccatctctactaaaaatacaaaaattagcgggacttggtggcatgtatctgtaatcccagctactagggaggctgaggcatgagaattgtgtgaacccgggaggcagaggttgcagtgagctgagatcacgccactgcactccagcctgggggacacagcgagactccgtctcaaaaaaaaaaaagttgggctaggcgggcccccgaggctggcctgactgtcccaggggcacaggctccagcaggctgcctgtctgtggtccaggcttcaggaacccccggtcttgggtgtgcgggggctgggaagtggctgggggtgcacagtcccacacctgtcattcactgaacaggcacgtattgacagcttgtggcgtgtcaggccctgtgcccaactctgggagtcaaggataacctgacagactcaggccactttaggaaaacgaaatccaccccaaccacacttagcgagtcaccctggccgggcctgggctgccctccagtcggtcagccggactggatttccacgcggccgagccctacgcctcccagaccctgagctccagtctgcacaggccaggtgtctggagccgggcctggtgacaggcatcccccaggtgggaggaggggctgtcctggctctgacctggatatcagatccagagctgagggggaggcgcagggtcaggaggggaggggttctgttctgagtttcccctggccaaggctgcagacaagggacgcagacaatcggcacattgtgagcaggggctgcaggatggaaccagcaagctgctgtgctgagcgccccaaacctgggcctacaggggtgaagaccaagccctcctgcgggggctggagagccgtgagcctgctcctgctgctgctgctgctggtgctggccgctgtgggggttgtggctggagggcttcttggctctgctcagggccctcccaagccaaggctgcagacgctgcgaatgaccctcccgagcccccacatgccccggcccaaccaaaccatcctggtggacgtggcccggaacgcggcgaccatcacagtgaccccacctcagagcaaccacagctgggcggtgctgttcgacgggcagagcggctgcatctgttaccgccctgaggagcaccaggtctgcttcctccgcctgatggaggacagtgatcgggagaccctgcggctgctggtggatacctccaaggtccaagaggcttgggtccccagccaggacacccaccacacccaggagctgctggcagtgcaggggagcctcgaagtggaccccgcccaggcgggggctttggtgcagcgcctgtgcatgaggacccccatctactgggcccggcgagcagaggggccccggagacagcggctgatttatctctgcatcgacatctgcttcccgagcaacatctgcgtgtcggtctgcttttattacctcccagactgagcccccgacctggcccagcctggcccgtccccaatccagtgggctggccaggccacctgcaccagggaggacagctgctggcagggactaataaacccttccacctggc

SEQ ID NO: 8747 - protein, 228 aa, Homo sapiens; identical to SEQ ID NO: 8743

SEQ ID NO: 8748 - DNA, 241 bp, Homo sapiens
gacgggcagagcgtgagtgggcagggaggggtcaccctggcaggtgtcggtctggggggccccgcctcacccccctgcctccccagggctgcatctgttaccgccctgaggagcaccaggtctgcttcctccgcctgatggaggacagtgatcgggagaccctgcggctgctggtggatacctccaaggtccaagaggcttgggtccccagccaggacacccaccacacccaggagctgct

SEQ ID NO: 8749 - protein, 33 aa, Homo sapiens
MEDSDRETLRLLVDTSKVQEAWVPSQDTHHTQE

SEQ ID NO: 8750 - DNA, 1600 bp, Homo sapiens
tgccgtctcaccacgggtgggaggactcaaagtagatgggtaactggggttccaactccagagctggaatgccaactgcccactcccagcctggttcagaggaagatgttttgaagaatgagggaaagccaggcacaaagggaagccagggaagcaaagggccctggagtgaagctggtgggctgccgtgtcagagcgcccagggcagggagcagagctcagaagtaatgctggcccgggcgcagtggctcacacccgtaatcccaacgctttggaaggctgaggcaggtggattacttgagatcaggagttcaagaccagcctggccaaaatggtgaaaacccatctctactaaaaatacaaaaattagcgggacttggtggcatgtatctgtaatcccagctactagggaggctgaggcatgagaattgtgtgaacccgggaggcagaggttgcagtgagctgagatcacgccactgcactccagcctgggggacacagcgagactccgtctcaaaaaaaaaaaagttgggctaggcgggcccccgaggctggcctgactgtcccaggggcacaggctccagcaggctgcctgtctgtggtccaggcttcaggaacccccggtcttgggtgtgcgggggctgggaagtggctgggggtgcacagtcccacacctgtcattcactgaacaggcacgtattgacagcttgtggcgtgtcaggccctgtgcccaactctgggagtcaaggataacctgacagactcaggccactttaggaaaacgaaatccaccccaaccacacttagcgagtcaccctggccgggcctgggctgccctccagtcggtcagccggactggatttccacgcggccgagccctacgcctcccagaccctgagctccagtctgcacaggccaggtgtctggagccgggcctggtgacaggcatcccccaggtgggaggaggggctgtcctggctctgacctggatatcagatccagagctgagggggaggcgcagggtcaggaggggaggggttctgttctgagtttcccctggccaaggctgcagacaagggacgcagacaatcggcacattgtgagcaggggctgcaggatggaaccagcaagctgctgtgctgagcgccccaaacctgggcctacaggggtgaagaccaagccctcctgcgggggctggagagccgtgagcctgctcctgctgctgctgctgctggtgctggccgctgtgggggttgtggctggagggcttcttggctctgctcagggccctcccaagccaaggctgcagacgctgcgaatgaccctcccgagcccccacatgccccggcccaaccaaaccatcctggtggacgtggcccggaacgcggcgaccatcacagtgaccccacctcagagcaaccacagctgggcggtgctgttcgacgggcagagcgtgagtgggcagggaggggtcaccctggcaggtgtcggtctggggggccccgcctcacccccctgcctccccagggctgcatctgttaccgccctgaggagcaccaggtctgcttcctccgcctgatggaggacagtgatcgggaga

SEQ ID NO: 8751 - protein, 153 aa, Homo sapiens
MEPASCCAERPKPGPTGVKTKPSCGGWRAVSLLLLLLLLVLAAVGVVAGGLLGSAQGPPKPRLQTLRMTLPSPHMPRPNQTILVDVARNAATITVTPPQSNHSWAVLFDGQSVSGQGGVTLAGVGLGGPASPPCLPRAASVTALRSTRSASSA

SEQ ID NO: 8752 - DNA, 2613 bp, Homo sapiens
tcaaagagtgtaattggagttaagcaaaggcattcattgttaaccttgtaagtacacgtttgggggacgattttgtttacagatgcttgtaatcgaagatgcacttttaggcttggaaggcgttgtgggctgggttctgggccttgggtggggttggcaggggcaggctctgcacctgtccgggattcaggtaaccagggcctgccgatgggactgaggcgggtctaggggtgtgtgtcctgtattttattgaaaaactcattcagggatccagcccctcagggggcagagggactgattattctgactgttgggagaggcttgcatggaccagagccccatcagtatgactgaaagtccagcggagccttctgtgtccctgtgcctcccagcagggtgggagtggaggaggcggctgctcccaggtggcatctccctgcccttgggtgcaaagtgctgccctcaccactctcccacctcccttacttccttgaaaaccactctgatgtcacaactgagtgtctgttccgtttcagatacccagggctgctgcccagttctgtaaacgcagcccagctaaagctctgctgtctcaagtgtgcatttatacccaggtgatttggacggagcagctaccatggcgtggacgccttcactgaactccgggctgcagtgcagggagctcagagcagtgctgctaccagtttttaactttgaacaactgtgtcaggcaatggatttgaattttaagtgtattaatagctgtgctctgtgtcgtaggcaaaattccactgaaggagcctctgtgccctgcagccggcagcgcggctgaagcatgtgttggccaaggaatgcctgtcatccaggtgccctgcagccagcagcgcggctcaagcatgtgttggccaaggaatgcctgtcagtcatccagggctctgggaggggacgagagttatgtccccaagaacaggaagtcctttacaaagcatccagtctcttcctgtcctccccttccctaggctggggtaggggttagagactggtggcccaggaggtcacctgccttgccctggattccctcttcagtggccagcaggacttggcagggccaccagctcgccaaggttctgggcggggctccagcctctcctgcctgctccttggctctgctgacctttcacaggcctgacagggtgcagtcacaccaggagcgcatggcagatgcagcctcagtgatgcctctcttgccgggtaggggctgggagtccccgtgcatcctgtctctggcccatgaggggctgcagcactgtgggcgccagagcacagattaaactctcaaacccacactggctcaggtgtccttgctctcaccttgcattggcccgggtgatgccgtctcaccacgggtgggaggactcaaagtagatgggtaactggggttccaactccagagctggaatgccaactgcccactcccagcctggttcagaggaagatgttttgaagaatgagggaaagccaggcacaaagggaagccagggaagcaaagggccctggagtgaagctggtgggctgccgtgtcagagcgcccagggcagggagcagagctcagaagtaatgctggcccgggcgcagtggctcacacccgtaatcccaacgctttggaaggctgaggcaggtggattacttgagatcaggagttcaagaccagcctggccaaaatggtgaaaacccatctctactaaaaatacaaaaattagcgggacttggtggcatgtatctgtaatcccagctactagggaggctgaggcatgagaattgtgtgaacccgggaggcagaggttgcagtgagctgagatcacgccactgcactccagcctgggggacacagcgagactccgtctcaaaaaaaaaaaagttgggctaggcgggcccccgaggctggcctgactgtcccaggggcacaggctccagcaggctgcctgtctgtggtccaggcttcaggaacccccggtcttgggtgtgcgggggctgggaagtggctgggggtgcacagtcccacacctgtcattcactgaacaggcacgtattgacagcttgtggcgtgtcaggccctgtgcccaactctgggagtcaaggataacctgacagactcaggccactttaggaaaacgaaatccaccccaaccacacttagcgagtcaccctggccgggcctgggctgccctccagtcggtcagccggactggatttccacgcggccgagccctacgcctcccagaccctgagctccagtctgcacaggccaggtgtctggagccgggcctggtgacaggcatcccccaggtgggaggaggggctgtcctggctctgacctggatatcagatccagagctgagggggaggcgcagggtcaggaggggaggggttctgttctgagtttcccctggccaaggctgcagacaagggacgcagacaatcggcacattgtgagcaggggctgcaggatggaaccagcaagctgctgtgctgagcgccccaaacctgggcctacaggggtgagtgcctcccgttactcctgcagcaaggacccagggggtgccccaggccacc

SEQ ID NO: 8753 - protein, 100 aa, Homo sapiens [sequence omitted]

SEQ ID NO: 8754 - DNA, 3496 bp, Homo sapiens
ggcggcggcggaggccggtggcgacgacgcccgctgcgtgcggctgagcgccgagcgggcacaggcgctgctggccgacgtggacacgctgctgttcgactgcgacggcgtgctgtggcgcggggagaccgccgtgcctggcgcgcccgaggccctgcgggcgctgcgagcccgcggcaagcgcctgggcttcatcaccaacaacagcagcaagacccgcgctgcctacgccgagaagctccgcttcattttcgactgcgtgtcccaggaatacggcatcaaccccgagcgcaccgtcatggtgggagaccgcctggacacagacatcctcctaggcgccacctgtggcctgaagaccatcctgaccctcaccggagtctccactctaggggatgtgaagaataatcaggaaagtgactgcgtgtctaagaagaaaatggtccctgacttctatgttgacagcatagccgaccttttgcctgcccttcaaggttaaagattgagtgtctttaatctgcagaataaaaaaaaagaaattgaaaaccagttacccaaattaataggtggggcttaagcatctgctcggctaagtggcttcaaagagtgtaattggagttaagcaaaggcattcattgttaaccttgtaagtacacgtttgggggacgattttgtttacagatgcttgtaatcgaagatgcacttttaggcttggaaggcgttgtgggctgggttctgggccttgggtggggttggcaggggcaggctctgcacctgtccgggattcaggtaaccagggcctgccgatgggactgaggcgggtctaggggtgtgtgtcctgtattttattgaaaaactcattcagggatccagcccctcagggggcagagggactgattattctgactgttgggagaggcttgcatggaccagagccccatcagtatgactgaaagtccagcggagccttctgtgtccctgtgcctcccagcagggtgggagtggaggaggcggctgctcccaggtggcatctccctgcccttgggtgcaaagtgctgccctcaccactctcccacctcccttacttccttgaaaaccactctgatgtcacaactgagtgtctgttccgtttcagatacccagggctgctgcccagttctgtaaacgcagcccagctaaagctctgctgtctcaagtgtgcatttatacccaggtgatttggacggagcagctaccatggcgtggacgccttcactgaactccgggctgcagtgcagggagctcagagcagtgctgctaccagtttttaactttgaacaactgtgtcaggcaatggatttgaattttaagtgtattaatagctgtgctctgtgtcgtaggcaaaattccactgaaggagcctctgtgccctgcagccggcagcgcggctgaagcatgtgttggccaaggaatgcctgtcatccaggtgccctgcagccagcagcgcggctcaagcatgtgttggccaaggaatgcctgtcagtcatccagggctctgggaggggacgagagttatgtccccaagaacaggaagtcctttacaaagcatccagtctcttcctgtcctccccttccctaggctggggtaggggttagagactggtggcccaggaggtcacctgccttgccctggattccctcttcagtggccagcaggacttggcagggccaccagctcgccaaggttctgggcggggctccagcctctcctgcctgctccttggctctgctgacctttcacaggcctgacagcagactcagcagggccatcccgggatgctgcaccttctggctggctccctaccagcgcctttccctgtacctggcagcttctctcttggccccacagtcacagcactccacttggtcacaaagacttcagagcaataagaggcgtcctgagccttcagcacctcccaggcctgggatatcgggttcagagggtgctgcagagcagcatgagggtggctccacccatgaggctggtgacactgacgctggcttggctaagttggctcaagccgggtctggcctgacagggtgcagtcacaccaggagcgcatggcagatgcagcctcagtgatgcctctcttgccgggtaggggctgggagtccccgtgcatcctgtctctggcccatgaggggctgcagcactgtgggcgccagagcacagattaaactctcaaacccacactggctcaggtgtccttgctctcaccttgcattggcccgggtgatgccgtctcaccacgggtgggaggactcaaagtagatgggtaactggggttccaactccagagctggaatgccaactgcccactcccagcctggttcagaggaagatgttttgaagaatgagggaaagccaggcacaaagggaagccagggaagcaaagggccctggagtgaagctggtgggctgccgtgtcagagcgcccagggcagggagcagagctcagaagtaatgctggcccgggcgcagtggctcacacccgtaatcccaacgctttggaaggctgaggcaggtggattacttgagatcaggagttcaagaccagcctggccaaaatggtgaaaacccatctctactaaaaatacaaaaattagcgggacttggtggcatgtatctgtaatcccagctactagggaggctgaggcatgagaattgtgtgaacccgggaggcagaggttgcagtgagctgagatcacgccactgcactccagcctgggggacacagcgagactccgtctcaaaaaaaaaaaagttgggctaggcgggcccccgaggctggcctgactgtcccaggggcacaggctccagcaggctgcctgtctgtggtccaggcttcaggaacccccggtcttgggtgtgcgggggctgggaagtggctgggggtgcacagtcccacacctgtcattcactgaacaggcacgtattgacagcttgtggcgtgtcaggccctgtgcccaactctgggagtcaaggataacctgacagactcaggccactttaggaaaacgaaatccaccccaaccacacttagcgagtcaccctggccgggcctgggctgccctccagtcggtcagccggactggatttccacgcggccgagccctacgcctcccagaccctgagctccagtctgcacaggccaggtgtctggagccgggcctggtgacaggcatcccccaggtgggaggaggggctgtcctggctctgacctggatatcagatccagagctgagggggaggcgcagggtcaggaggggaggggttctgttctgagtttcccctggccaaggctgcagacaagggacgcagacaatcggcacattgtgagcaggggctgcaggatggaaccagcaagctgctgtgctgagcgccccaaacctgggcctacaggggtgagtgcctcccgttactcctgcagcaaggacccagggggtgccccaggccacc

SEQ ID NO: 8755 - protein, 100 aa, Homo sapiens [sequence omitted]

SEQ ID NO: 8756 - DNA, 3235 bp, Homo sapiens
gggagggcgccgcggcgggcggctgcgaggagcggccggcgggcggcggcggccggcgggcggcgatggcggcggcggaggccggtggcgacgacgcccgctgcgtgcggctgagcgccgagcgggcacaggcgctgctggccgacgtggacacgctgctgttcgactgcgacggcgtgctgtggcgcggggagaccgccgtgcctggcgcgcccgaggccctgcgggcgctgcgagcccgcggcaagcgcctgggcttcatcaccaacaacagcagcaagacccgcgctgcctacgccgagaagctgcggcgcctgggcttcggcggccccgcggggcccggcgccagcctggaggtcttcggcacggcctactgcaccgcgctctacctgcgccagcgcctggccggcgcccccgcgcccaaggcctacgtgctgggcagcccagccctggccgcggagctggaggccgtgggcgtcgccagcgtgggcgtggggcccgagccactgcagggcgagggtcccggcgactggctgcacgcgccgctggagcccgacgtgcgcgcggtggtggtgggctttgacccgcacttcagctacatgaagctcaccaaggccctgcgctacctgcagcagcccggctgcctgctcgtgggcaccaacatggacaaccggcttccgcttgagaacggccgcttcatcgcgggtaccgggtgtctggtccgagccgtggagatggccgcccagcgccaggccgacatcatcgggaagcccagccgcttcattttcgactgcgtgtcccaggaatacggcatcaaccccgagcgcaccgtcatggtgggagaccgcctggacacagacatcctcctaggcgccacctgtggcctgaagaccatcctgaccctcaccggagtctccactctaggggatgtgaagaataatcaggaaagtgactgcgtgtctaagaagaaaatggtccctgacttctatgttgacagcatagccgaccttttgcctgcccttcaaggttaaagattgagtgtctttaatctgcagaataaaaaaaaagaaattgaaaaccagttacccaaattaataggtggggcttaagcatctgctcggctaagtggcttcaaagagtgtaattggagttaagcaaaggcattcattgttaaccttgccaaggaatgcctgtcatccaggtgccctgcagccagcagcgcggctcaagcatgtgttggccaaggaatgcctgtcagtcatccagggctctgggaggggacgagagttatgtccccaagaacaggaagtcctttacaaagcatccagtctcttcctgtcctccccttccctaggctggggtaggggttagagactggtggcccaggaggtcacctgccttgccctggattccctcttcagtggccagcaggacttggcagggccaccagctcgccaaggttctgggcggggctccagcctctcctgcctgctccttggctctgctgacctttcacaggcctgacagcagactcagcagggccatcccgggatgctgcaccttctggctggctccctaccagcgcctttccctgtacctggcagcttctctcttggccccacagtcacagcactccacttggtcacaaagacttcagagcaataagaggcgtcctgagccttcagcacctcccaggcctgggatatcgggttcagagggtgctgcagagcagcatgagggtggctccacccatgaggctggtgacactgacgctggcttggctaagttggctcaagccgggtctggcctgacagggtgcagtcacaccaggagcgcatggcagatgcagcctcagtgatgcctctcttgccgggtaggggctgggagtccccgtgcatcctgtctctggcccatgaggggctgcagcactgtgggcgccagagcacagattaaactctcaaacccacactggctcaggtgtccttgctctcaccttgcattggcccgggtgatgccgtctcaccacgggtgggaggactcaaagtagatgggtaactggggttccaactccagagctggaatgccaactgcccactcccagcctggttcagaggaagatgttttgaagaatgagggaaagccaggcacaaagggaagccagggaagcaaagggccctggagtgaagctggtgggctgccgtgtcagagcgcccagggcagggagcagagctcagaagtaatgctggcccgggcgcagtggctcacacccgtaatcccaacgctttggaaggctgaggcaggtggattacttgagatcaggagttcaagaccagcctggccaaaatggtgaaaacccatctctactaaaaatacaaaaattagcgggacttggtggcatgtatctgtaatcccagctactagggaggctgaggcatgagaattgtgtgaacccgggaggcagaggttgcagtgagctgagatcacgccactgcactccagcctgggggacacagcgagactccgtctcaaaaaaaaaaaagttgggctaggcgggcccccgaggctggcctgactgtcccaggggcacaggctccagcaggctgcctgtctgtggtccaggcttcaggaacccccggtcttgggtgtgcgggggctgggaagtggctgggggtgcacagtcccacacctgtcattcactgaacaggcacgtattgacagcttgtggcgtgtcaggccctgtgcccaactctgggagtcaaggataacctgacagactcaggccactttaggaaaacgaaatccaccccaaccacacttagcgagtcaccctggccgggcctgggctgccctccagtcggtcagccggactggatttccacgcggccgagccctacgcctcccagaccctgagctccagtctgcacaggccaggtgtctggagccgggcctggtgacaggcatcccccaggtgggaggaggggctgtcctggctctgacctggatatcagatccagagctgagggggaggcgcagggtcaggaggggaggggttctgttctgagtttcccctggccaaggctgcagacaagggacgcagacaatcggcacattgtgagcaggggctgcaggatggaaccagcaagctgctgtgctgagcgccccaaacctgggcctacaggggtgagtgcctcccgttactcctgcagcaaggacccagggggtgccccaggccacc

SEQ ID NO: 8757 - protein, 321 aa, Homo sapiens
MAAAEAGGDDARCVRLSAERAQALLADVDTLLFDCDGVLWRGETAVPGAPEALRALRARGKRLGFITNNSSKTRAAYAEKLRRLGFGGPAGPGASLEVFGTAYCTALYLRQRLAGAPAPKAYVLGSPALAAELEAVGVASVGVGPEPLQGEGPGDWLHAPLEPDVRAVVVGFDPHFSYMKLTKALRYLQQPGCLLVGTNMDNRLPLENGRFIAGTGCLVRAVEMAAQRQADIIGKPSRFIFDCVSQEYGINPERTVMVGDRLDTDILLGATCGLKTILTLTGVSTLGDVKNNQESDCVSKKKMVPDFYVDSIADLLPALQG

SEQ ID NO: 8758 - DNA, 3298 bp, Homo sapiens
gggagggcgccgcggcgggcggctgcgaggagcggccggcgggcggcggcggccggcgggcggcgatggcggcggcggaggccggtggcgacgacgcccgctgcgtgcggctgagcgccgagcgggcacaggcgctgctggccgacgtggacacgctgctgttcgactgcgacggcgtgctgtggcgcggggagaccgccgtgcctggcgcgcccgaggccctgcgggcgctgcgagcccgcggcaagcgcctgggcttcatcaccaacaacagcagcaagacccgcgctgcctacgccgagaagctgcggcgcctgggcttcggcggccccgcggggcccggcgccagcctggaggtcttcggcacggcctactgcaccgcgctctacctgcgccagcgcctggccggcgcccccgcgcccaaggcctacgtgctgggcagcccagccctggccgcggagctggaggccgtgggcgtcgccagcgtgggcgtggggcccgagccactgcagggcgagggtcccggcgactggctgcacgcgccgctggagcccgacgtgcgcgcggtggtggtgggctttgacccgcacttcagctacatgaagctcaccaaggccctgcgctacctgcagcagcccggctgcctgctcgtgggcaccaacatggacaaccggcttccgcttgagaacggccgcttcatcgcgggtaccgggtgtctggtccgagccgtggagatggccgcccagcgccaggccgacatcatcgggaagcccagccgcttcattttcgactgcgtgtcccaggaatacggcatcaaccccgagcgcaccgtcatggtgggagaccgcctggacacagacatcctcctaggcgccacctgtggcctgaagaccatcctgaccctcaccggagtctccactctaggggatgtgaagaataatcaggaaagtgactgcgtgtctaagaagaaaatggtccctgacttctatgttgacagcatagccgaccttttgcctgcccttcaaggttaaagattgagtgtctttaatctgcagaataaaaaaaaagaaattgaaaaccagttacccaaattaataggtggggcttaagcatctgctcggctaagtggcttcaaagagtgtaattggagttaagcaaaggcattcattgttaaccttgcaaaattccactgaaggagcctctgtgccctgcagccggcagcgcggctgaagcatgtgttggccaaggaatgcctgtcatccaggtgccctgcagccagcagcgcggctcaagcatgtgttggccaaggaatgcctgtcagtcatccagggctctgggaggggacgagagttatgtccccaagaacaggaagtcctttacaaagcatccagtctcttcctgtcctccccttccctaggctggggtaggggttagagactggtggcccaggaggtcacctgccttgccctggattccctcttcagtggccagcaggacttggcagggccaccagctcgccaaggttctgggcggggctccagcctctcctgcctgctccttggctctgctgacctttcacaggcctgacagcagactcagcagggccatcccgggatgctgcaccttctggctggctccctaccagcgcctttccctgtacctggcagcttctctcttggccccacagtcacagcactccacttggtcacaaagacttcagagcaataagaggcgtcctgagccttcagcacctcccaggcctgggatatcgggttcagagggtgctgcagagcagcatgagggtggctccacccatgaggctggtgacactgacgctggcttggctaagttggctcaagccgggtctggcctgacagggtgcagtcacaccaggagcgcatggcagatgcagcctcagtgatgcctctcttgccgggtaggggctgggagtccccgtgcatcctgtctctggcccatgaggggctgcagcactgtgggcgccagagcacagattaaactctcaaacccacactggctcaggtgtccttgctctcaccttgcattggcccgggtgatgccgtctcaccacgggtgggaggactcaaagtagatgggtaactggggttccaactccagagctggaatgccaactgcccactcccagcctggttcagaggaagatgttttgaagaatgagggaaagccaggcacaaagggaagccagggaagcaaagggccctggagtgaagctggtgggctgccgtgtcagagcgcccagggcagggagcagagctcagaagtaatgctggcccgggcgcagtggctcacacccgtaatcccaacgctttggaaggctgaggcaggtggattacttgagatcaggagttcaagaccagcctggccaaaatggtgaaaacccatctctactaaaaatacaaaaattagcgggacttggtggcatgtatctgtaatcccagctactagggaggctgaggcatgagaattgtgtgaacccgggaggcagaggttgcagtgagctgagatcacgccactgcactccagcctgggggacacagcgagactccgtctcaaaaaaaaaaaagttgggctaggcgggcccccgaggctggcctgactgtcccaggggcacaggctccagcaggctgcctgtctgtggtccaggcttcaggaacccccggtcttgggtgtgcgggggctgggaagtggctgggggtgcacagtcccacacctgtcattcactgaacaggcacgtattgacagcttgtggcgtgtcaggccctgtgcccaactctgggagtcaaggataacctgacagactcaggccactttaggaaaacgaaatccaccccaaccacacttagcgagtcaccctggccgggcctgggctgccctccagtcggtcagccggactggatttccacgcggccgagccctacgcctcccagaccctgagctccagtctgcacaggccaggtgtctggagccgggcctggtgacaggcatcccccaggtgggaggaggggctgtcctggctctgacctggatatcagatccagagctgagggggaggcgcagggtcaggaggggaggggttctgttctgagtttcccctggccaaggctgcagacaagggacgcagacaatcggcacattgtgagcaggggctgcaggatggaaccagcaagctgctgtgctgagcgccccaaacctgggcctacaggggtgagtgcctcccgttactcctgcagcaaggacccagggggtgccccaggccacc

SEQ ID NO: 8759 - protein, 321 aa, Homo sapiens; identical to SEQ ID NO: 8757

SEQ ID NO: 8760 - DNA, 1242 bp, Homo sapiens
gagggactgattattctgactgttgggagaggcttgcatggaccagagccccatcagtatgactgaaagtccagcggagccttctgtgtccctgtgcctcccagcagggtgggagtggaggaggcggctgctcccaggtggcatctccctgcccttgggtgcaaagtgctgccctcaccactctcccacctcccttacttccttgaaaaccactctgatgtcacaactgagtgtctgttccgtttcagatacccagggctgctgcccagttctgtaaacgcagcccagctaaagctctgctgtctcaagtgtgcatttatacccaggtgatttggacggagcagctaccatggcgtggacgccttcactgaactccgggctgcagtgcagggagctcagagcagtgctgctaccagtttttaactttgaacaactgtgtcaggcaatggatttgaattttaagtgtattaatagctgtgctctgtgtcgtaggcaaaattccactgaaggagcctctgtgccctgcagccggcagcgcggctgaagcatgtgttggccaaggaatgcctgtcatccaggtgccctgcagccagcagcgcggctcaagcatgtgttggccaaggaatgcctgtcagtcatccagggctctgggaggggacgagagttatgtccccaagaacaggaagtcctttacaaagcatccagtctcttcctgtcctccccttccctaggctggggtaggggttagagactggtggcccaggaggtcacctgccttgccctggattccctcttcagtggccagcaggacttggcagggccaccagctcgccaaggttctgggcggggtccctaccagcgcctttccctgtacctggcagcttctctcttggccccacagtcacagcactccacttggtcacaaagacttcagagcaataagaggcgtcctgagccttcagcacctcccaggcctgggatatcgggttcagagggtgctgcagagcagcatgagggtggctccacccatgaggctggtgacactgacgctggcttggctaagttggctcaagccgggtctggcctgacagggtgcagtcacaccaggagcgcatggcagatgcagcctcagtgatgcctctcttgccgggtaggggctgggagtccccgtgcatcctgtctctggcccatgaggggctgcagcactgtgggcgccagagcacagattaaactctcaaaccc

SEQ ID NO: 8761 - protein, 79 aa, Homo sapiens [sequence omitted]

SEQ ID NO: 8762 - DNA, 2226 bp, Homo sapiens
ggcggcggcggaggccggtggcgacgacgcccgctgcgtgcggctgagcgccgagcgggcacaggcgctgctggccgacgtggacacgctgctgttcgactgcgacggcgtgctgtggcgcggggagaccgccgtgcctggcgcgcccgaggccctgcgggcgctgcgagcccgcggcaagcgcctgggcttcatcaccaacaacagcagcaagacccgcgctgcctacgccgagaagctccgcttcattttcgactgcgtgtcccaggaatacggcatcaaccccgagcgcaccgtcatggtgggagaccgcctggacacagacatcctcctaggcgccacctgtggcctgaagaccatcctgaccctcaccggagtctccactctaggggatgtgaagaataatcaggaaagtgactgcgtgtctaagaagaaaatggtccctgacttctatgttgacagcatagccgaccttttgcctgcccttcaaggttaaagattgagtgtctttaatctgcagaataaaaaaaaagaaattgaaaaccagttacccaaattaataggtggggcttaagcatctgctcggctaagtggcttcaaagagtgtaattggagttaagcaaaggcattcattgttaaccttgtaagtacacgtttgggggacgattttgtttacagatgcttgtaatcgaagatgcacttttaggcttggaaggcgttgtgggctgggttctgggccttgggtggggttggcaggggcaggctctgcacctgtccgggattcaggtaaccagggcctgccgatgggactgaggcgggtctaggggtgtgtgtcctgtattttattgaaaaactcattcagggatccagcccctcagggggcagagggactgattattctgactgttgggagaggcttgcatggaccagagccccatcagtatgactgaaagtccagcggagccttctgtgtccctgtgcctcccagcagggtgggagtggaggaggcggctgctcccaggtggcatctccctgcccttgggtgcaaagtgctgccctcaccactctcccacctcccttacttccttgaaaaccactctgatgtcacaactgagtgtctgttccgtttcagatacccagggctgctgcccagttctgtaaacgcagcccagctaaagctctgctgtctcaagtgtgcatttatacccaggtgatttggacggagcagctaccatggcgtggacgccttcactgaactccgggctgcagtgcagggagctcagagcagtgctgctaccagtttttaactttgaacaactgtgtcaggcaatggatttgaattttaagtgtattaatagctgtgctctgtgtcgtaggcaaaattccactgaaggagcctctgtgccctgcagccggcagcgcggctgaagcatgtgttggccaaggaatgcctgtcatccaggtgccctgcagccagcagcgcggctcaagcatgtgttggccaaggaatgcctgtcagtcatccagggctctgggaggggacgagagttatgtccccaagaacaggaagtcctttacaaagcatccagtctcttcctgtcctccccttccctaggctggggtaggggttagagactggtggcccaggaggtcacctgccttgccctggattccctcttcagtggccagcaggacttggcagggccaccagctcgccaaggttctgggcggggctccagcctctcctgcctgctccttggctctgctgacctttcacaggcctgacagcagactcagcagggccatcccgggatgctgcaccttctggctggctccctaccagcgcctttccctgtacctggcagcttctctcttggccccacagtcacagcactccacttggtcacaaagacttcagagcaataagaggcgtcctgagccttcagcacctcccaggcctgggatatcgggttcagagggtgctgcagagcagcatgagggtggctccacccatgaggctggtgacactgacgctggcttggctaagttggctcaagccgggtctggcctgacagggtgcagtcacaccaggagcgcatggcagatgcagcctcagtgatgcctctcttgccgggtaggggctgggagtccccgtgcatcctgtctctggcccatgaggggctgcagcactgtgggcgccagagcacagattaaactctcaaaccc

SEQ ID NO: 8763 - protein, 79 aa, Homo sapiens [sequence omitted]

SEQ ID NO: 8764 - DNA, 1965 bp, Homo sapiens
gggagggcgccgcggcgggcggctgcgaggagcggccggcgggcggcggcggccggcgggcggcgatggcggcggcggaggccggtggcgacgacgcccgctgcgtgcggctgagcgccgagcgggcacaggcgctgctggccgacgtggacacgctgctgttcgactgcgacggcgtgctgtggcgcggggagaccgccgtgcctggcgcgcccgaggccctgcgggcgctgcgagcccgcggcaagcgcctgggcttcatcaccaacaacagcagcaagacccgcgctgcctacgccgagaagctgcggcgcctgggcttcggcggccccgcggggcccggcgccagcctggaggtcttcggcacggcctactgcaccgcgctctacctgcgccagcgcctggccggcgcccccgcgcccaaggcctacgtgctgggcagcccagccctggccgcggagctggaggccgtgggcgtcgccagcgtgggcgtggggcccgagccactgcagggcgagggtcccggcgactggctgcacgcgccgctggagcccgacgtgcgcgcggtggtggtgggctttgacccgcacttcagctacatgaagctcaccaaggccctgcgctacctgcagcagcccggctgcctgctcgtgggcaccaacatggacaaccggcttccgcttgagaacggccgcttcatcgcgggtaccgggtgtctggtccgagccgtggagatggccgcccagcgccaggccgacatcatcgggaagcccagccgcttcattttcgactgcgtgtcccaggaatacggcatcaaccccgagcgcaccgtcatggtgggagaccgcctggacacagacatcctcctaggcgccacctgtggcctgaagaccatcctgaccctcaccggagtctccactctaggggatgtgaagaataatcaggaaagtgactgcgtgtctaagaagaaaatggtccctgacttctatgttgacagcatagccgaccttttgcctgcccttcaaggttaaagattgagtgtctttaatctgcagaataaaaaaaaagaaattgaaaaccagttacccaaattaataggtggggcttaagcatctgctcggctaagtggcttcaaagagtgtaattggagttaagcaaaggcattcattgttaaccttgccaaggaatgcctgtcatccaggtgccctgcagccagcagcgcggctcaagcatgtgttggccaaggaatgcctgtcagtcatccagggctctgggaggggacgagagttatgtccccaagaacaggaagtcctttacaaagcatccagtctcttcctgtcctccccttccctaggctggggtaggggttagagactggtggcccaggaggtcacctgccttgccctggattccctcttcagtggccagcaggacttggcagggccaccagctcgccaaggttctgggcggggctccagcctctcctgcctgctccttggctctgctgacctttcacaggcctgacagcagactcagcagggccatcccgggatgctgcaccttctggctggctccctaccagcgcctttccctgtacctggcagcttctctcttggccccacagtcacagcactccacttggtcacaaagacttcagagcaataagaggcgtcctgagccttcagcacctcccaggcctgggatatcgggttcagagggtgctgcagagcagcatgagggtggctccacccatgaggctggtgacactgacgctggcttggctaagttggctcaagccgggtctggcctgacagggtgcagtcacaccaggagcgcatggcagatgcagcctcagtgatgcctctcttgccgggtaggggctgggagtccccgtgcatcctgtctctggcccatgaggggctgcagcactgtgggcgccagagcacagattaaactctcaaaccc

SEQ ID NO: 8765 - protein, 321 aa, Homo sapiens; identical to SEQ ID NO: 8757

SEQ ID NO: 8766 - DNA, 2028 bp, Homo sapiens
gggagggcgccgcggcgggcggctgcgaggagcggccggcgggcggcggcggccggcgggcggcgatggcggcggcggaggccggtggcgacgacgcccgctgcgtgcggctgagcgccgagcgggcacaggcgctgctggccgacgtggacacgctgctgttcgactgcgacggcgtgctgtggcgcggggagaccgccgtgcctggcgcgcccgaggccctgcgggcgctgcgagcccgcggcaagcgcctgggcttcatcaccaacaacagcagcaagacccgcgctgcctacgccgagaagctgcggcgcctgggcttcggcggccccgcggggcccggcgccagcctggaggtcttcggcacggcctactgcaccgcgctctacctgcgccagcgcctggccggcgcccccgcgcccaaggcctacgtgctgggcagcccagccctggccgcggagctggaggccgtgggcgtcgccagcgtgggcgtggggcccgagccactgcagggcgagggtcccggcgactggctgcacgcgccgctggagcccgacgtgcgcgcggtggtggtgggctttgacccgcacttcagctacatgaagctcaccaaggccctgcgctacctgcagcagcccggctgcctgctcgtgggcaccaacatggacaaccggcttccgcttgagaacggccgcttcatcgcgggtaccgggtgtctggtccgagccgtggagatggccgcccagcgccaggccgacatcatcgggaagcccagccgcttcattttcgactgcgtgtcccaggaatacggcatcaaccccgagcgcaccgtcatggtgggagaccgcctggacacagacatcctcctaggcgccacctgtggcctgaagaccatcctgaccctcaccggagtctccactctaggggatgtgaagaataatcaggaaagtgactgcgtgtctaagaagaaaatggtccctgacttctatgttgacagcatagccgaccttttgcctgcccttcaaggttaaagattgagtgtctttaatctgcagaataaaaaaaaagaaattgaaaaccagttacccaaattaataggtggggcttaagcatctgctcggctaagtggcttcaaagagtgtaattggagttaagcaaaggcattcattgttaaccttgcaaaattccactgaaggagcctctgtgccctgcagccggcagcgcggctgaagcatgtgttggccaaggaatgcctgtcatccaggtgccctgcagccagcagcgcggctcaagcatgtgttggccaaggaatgcctgtcagtcatccagggctctgggaggggacgagagttatgtccccaagaacaggaagtcctttacaaagcatccagtctcttcctgtcctccccttccctaggctggggtaggggttagagactggtggcccaggaggtcacctgccttgccctggattccctcttcagtggccagcaggacttggcagggccaccagctcgccaaggttctgggcggggctccagcctctcctgcctgctccttggctctgctgacctttcacaggcctgacagcagactcagcagggccatcccgggatgctgcaccttctggctggctccctaccagcgcctttccctgtacctggcagcttctctcttggccccacagtcacagcactccacttggtcacaaagacttcagagcaataagaggcgtcctgagccttcagcacctcccaggcctgggatatcgggttcagagggtgctgcagagcagcatgagggtggctccacccatgaggctggtgacactgacgctggcttggctaagttggctcaagccgggtctggcctgacagggtgcagtcacaccaggagcgcatggcagatgcagcctcagtgatgcctctcttgccgggtaggggctgggagtccccgtgcatcctgtctctggcccatgaggggctgcagcactgtgggcgccagagcacagattaaactctcaaaccc

SEQ ID NO: 8767 - protein, 321 aa, Homo sapiens; identical to SEQ ID NO: 8757

SEQ ID NO: 8768 - DNA, 982 bp, Homo sapiens
gcgggcggctgcgaggagcggccggcgggcggcggcggccggcgggcggcgatggcggcggcggaggccggtggcgacgacgcccgctgcgtgcggctgagcgccgagcgggcacaggcgctgctggccgacgtggacacgctgctgttcgactgcgacggcgtgctgtggcgcggggagaccgccgtgcctggcgcgcccgaggccctgcgggcgctgcgagcccgcggcaagcgcctgggcttcatcaccaacaacagcagcaagacccgcgctgcctacgccgagaagctgcggcgcctgggcttcggcggccccgcggggcccggcgccagcctggaggtcttcggcacggcctactgcaccgcgctctacctgcgccagcgcgtgggcgtggggcccgagccactgcagggcgagggtcccggcgactggctgcacgcgccgctggagcccgacgtgcgcgcggtggtggtgggctttgacccgcacttcagctacatgaagctcaccaaggccctgcgctacctgcagcagcccggctgcctgctcgtgggcaccaacatggacaaccggcttccgcttgagaacggccgcttcatcgcgggtaccgggtgtctggtccgagccgtggagatggccgcccagcgccaggccgacatcatcgggaagcccagccgcttcattttcgactgcgtgtcccaggaatacggcatcaaccccgagcgcaccgtcatggtgggagaccgcctggacacagacatcctcctaggcgccacctgtggcctgaagaccatcctgaccctcaccggagtctccactctaggggatgtgaagaataatcaggaaagtgactgcgtgtctaagaagaaaatggtccctgacttctatgttgacagcatagccgaccttttgcctgcccttcaaggttaaagattgagtgtctttaatctgcagaataaaaaaaaagaaattgaaaacc

SEQ ID NO: 8769 - protein, 293 aa, Homo sapiens
MAAAEAGGDDARCVRLSAERAQALLADVDTLLFDCDGVLWRGETAVPGAPEALRALRARGKRLGFITNNSSKTRAAYAEKLRRLGFGGPAGPGASLEVFGTAYCTALYLRQRVGVGPEPLQGEGPGDWLHAPLEPDVRAVVVGFDPHFSYMKLTKALRYLQQPGCLLVGTNMDNRLPLENGRFIAGTGCLVRAVEMAAQRQADIIGKPSRFIFDCVSQEYGINPERTVMVGDRLDTDILLGATCGLKTILTLTGVSTLGDVKNNQESDCVSKKKMVPDFYVDSIADLLPALQG

SEQ ID NO: 8770 - DNA, 1080 bp, Homo sapiens
gggagggcgccgcggcgggcggctgcgaggagcggccggcgggcggcggcggccggcgggcggcgatggcggcggcggaggccggtggcgacgacgcccgctgcgtgcggctgagcgccgagcgggcacaggcgctgctggccgacgtggacacgctgctgttcgactgcgacggcgtgctgtggcgcggggagaccgccgtgcctggcgcgcccgaggccctgcgggcgctgcgagcccgcggcaagcgcctgggcttcatcaccaacaacagcagcaagacccgcgctgcctacgccgagaagctgcggcgcctgggcttcggcggccccgcggggcccggcgccagcctggaggtcttcggcacggcctactgcaccgcgctctacctgcgccagcgcctggccggcgcccccgcgcccaaggcctacgtgctgggcagcccagccctggccgcggagctggaggccgtgggcgtcgccagcgtgggcgtggggcccgagccactgcagggcgagggtcccggcgactggctgcacgcgccgctggagcccgacgtgcgcgcggtggtggtgggctttgacccgcacttcagctacatgaagctcaccaaggccctgcgctacctgcagcagcccggctgcctgctcgtgggcaccaacatggacaaccggcttccgcttgagaacggccgcttcatcgcgggtaccgggtgtctggtccgagccgtggagatggccgcccagcgccaggccgacatcatcgggaagcccagccgcttcattttcgactgcgtgtcccaggaatacggcatcaaccccgagcgcaccgtcatggtgggagaccgcctggacacagacatcctcctaggcgccacctgtggcctgaagaccatcctgaccctcaccggagtctccactctaggggatgtgaagaataatcaggaaagtgactgcgtgtctaagaagaaaatggtccctgacttctatgttgacagcatagccgaccttttgcctgcccttcaaggttaaagattgagtgtctttaatctgcagaataaaaaaaaagaaattgaaaacc

SEQ ID NO: 8771 - protein, 321 aa, Homo sapiens; identical to SEQ ID NO: 8757

SEQ ID NO: 8772 - DNA, 2520 bp, Homo sapiens
atgacgacatggtcgtaaatccgccatcttcctgcggcgcgttgcgacatggagggcgcgatggcagtgcgggtgacggccgctcatacggcagaagcccaggccgaagccgggcgggaagcgggcgagggtgcagttgcggcggtggcggcggccttggcccccagcggcttcctcggcctcccggcgcccttcagcgaggaagatgaggacgatgtgcacagatgcggccgctgccaggcagagttcaccgccttggaggattttgttcagcacaagattcagaaggcctgccagcgggcccctccggaggccctgcctgccacccctgccaccacagcgttgctgggccaggaggtggtgccggcagcaccaggcccagaggagcccatcactgtggcccacatcgtggtggaggcggcctctctggcagcagacatcagccacgcatctgaccttgttggtggtgggcacatcaaagaggtcatcgtggctgctgaggcggagctgggagacggtgagatggccgaggccccgggcagcccccgccagcaggggctggggctcgcaggggagggtgagcaggcccaggtgaagctactggtgaacaaggatggccgctatgtgtgtgcgctgtgccacaagaccttcaagacgggcagcatcctcaaggcccacatggtcactcacagcagccgcaaggaccacgagtgcaagctctgtggggcctccttccgcaccaagggctcactcatccggcaccaccggcggcacacggatgagcgcccctacaagtgctccaagtgtggaaagagcttccgggagtcgggtgcactgacccggcacctcaagtctctcaccccctgcacagagaaaatccgcttcagtgtgagcaaggacgtggttgtcagcaaagaggacgcacgtgcaggttctggagctggagctgccggcttggggacagccacatcatcggtgacaggcgagcctatagagacttcacccgtgattcacctggtgacagatgccaagggcaccgtcatccacgaagtccacgtccagatgcaggagctgtccctgggcatgaaagccctggccccagagccccccgtctcccaggagctcccctgctccagcgagggcagccgtgagaacctgctgcaccaggccatgcagaactccggcatcgtccttgagcgcgctgctggggaggagggtgccctggagccagctcctgctgccgggtccagtccccagcccctggcagtggcagccccgcagctgccggtactggaagtgcagccgctggagacacaggtggccagcgaggcctcagcggtgcccaggacccacccatgtcctcagtgcagtgagaccttcccgacagcagccaccctggaggcccacaagaggggccacaccgggccgaggccgttcgcctgcgcgcagtgtggcaaggccttccccaaggcctacctgctcaagaagcaccaggaggtgcacgtgcgtgagcgccgcttccgctgtggcgactgcgggaagctctacaagaccattgcccatgtgcgtggccaccggcgcgtccactcagacgagcggccctacccttgtcccaagtgtggcaagcgctacaagactaagaacgcacagcaggtgcacttcaggacacacctggaggagaagccgcacgtgtgccagttctgcagccgtggcttccgagagaagggctcactggtgcggcacgtgcgacaccacacaggcgagaagccgttcaagtgctacaagtgcggccgtggcttcgccgagcacggcacgctgaaccggcacctgcgcaccaaagggggctgcctgctggaggtggaggagttgctggtgtctgaggacagccccgcggcagccaccaccgtcctcacggaagacccgcacacagtgccactgcggacgatgcggagaccagtgaggccacggagatcatcgagggcacccagacagaggtggacagccacatcatgaaggtggtgcagcagatcgtgcaccaggctagcgccggccaccagatcatcgtgcagaacgtcaccatggacgaggagacggcgctgggcccagaggcggctgccgccgacaccatcaccatcgccacccccgagagcctgacagagcaggtggccatgacgctggcctcggccatcagcgagggcactgtgcttgccgcccgggcagggacaagtggcactgaacaggccactgtgaccatggtgtcatcagaggacatcgagatcctggagcatgcaggcgagctggtcatcgcctcgccggagggccagctggaggtgcagacggtcatcgtctagcatgaggtctgcggggtcctggccgggcagggacagggcagaggactctgagcgccccacccatgcctgcctggcctggtagagaagatggcacaggatggaggcgccccaagacggacagtgtacataagagtttcttgttgctttacaataaaacatgagaacctgc

SEQ ID NO: 8773 - protein, 654 aa, Homo sapiens
MEGAMAVRVTAAHTAEAQAEAGREAGEGAVAAVAAALAPSGFLGLPAPFSEEDEDDVHRCGRCQAEFTALEDFVQHKIQKACQRAPPEALPATPATTALLGQEVVPAAPGPEEPITVAHIVVEAASLAADISHASDLVGGGHIKEVIVAAEAELGDGEMAEAPGSPRQQGLGLAGEGEQAQVKLLVNKDGRYVCALCHKTFKTGSILKAHMVTHSSRKDHECKLCGASFRTKGSLIRHHRRHTDERPYKCSKCGKSFRESGALTRHLKSLTPCTEKIRFSVSKDVVVSKEDARAGSGAGAAGLGTATSSVTGEPIETSPVIHLVTDAKGTVIHEVHVQMQELSLGMKALAPEPPVSQELPCSSEGSRENLLHQAMQNSGIVLERAAGEEGALEPAPAAGSSPQPLAVAAPQLPVLEVQPLETQVASEASAVPRTHPCPQCSETFPTAATLEAHKRGHTGPRPFACAQCGKAFPKAYLLKKHQEVHVRERRFRCGDCGKLYKTIAHVRGHRRVHSDERPYPCPKCGKRYKTKNAQQVHFRTHLEEKPHVCQFCSRGFREKGSLVRHVRHHTGEKPFKCYKCGRGFAEHGTLNRHLRTKGGCLLEVEELLVSEDSPAAATTVLTEDPHTVPLRTMRRPVRPRRSSRAPRQRWTATS

SEQ ID NO: 8774 - DNA, 2572 bp, Homo sapiens
atgacgacatggtcgtaaatccgccatcttcctgcggcgcgttgcgacatggagggcgcgatggcagtgcgggtgacggccgctcatacggcagaagcccaggccgaagccgggcgggaagcgggcgagggtgcagttgcggcggtggcggcggccttggcccccagcggcttcctcggcctcccggcgcccttcagcgaggaagatgaggacgatgtgcacagatgcggccgctgccaggcagagttcaccgccttggaggattttgttcagcacaagattcagaaggcctgccagcgggcccctccggaggccctgcctgccacccctgccaccacagcgttgctgggccaggaggtggtgccggcagcaccaggcccagaggagcccatcactgtggcccacatcgtggtggaggcggcctctctggcagcagacatcagccacgcatctgaccttgttggtggtgggcacatcaaagaggtcatcgtggctgctgaggcggagctgggagacggtgagatggccgaggccccgggcagcccccgccagcaggggctggggctcgcaggggagggtgagcaggcccaggtgaagctactggtgaacaaggatggccgctatgtgtgtgcgctgtgccacaagaccttcaagacgggcagcatcctcaaggcccacatggtcactcacagcagccgcaaggaccacgagtgcaagctctgtggggcctccttccgcaccaagggctcactcatccggcaccaccggcggcacacggatgagcgcccctacaagtgctccaagtgtggaaagagcttccgggagtcgggtgcactgacccggcacctcaagtctctcaccccctgcacagagaaaatccgcttcagtgtgagcaaggacgtggttgtcagcaaagaggacgcacgtgcaggttctggagctggagctgccggcttggggacagccacatcatcggtgacaggcgagcctatagagacttcacccgtgattcacctggtgacagatgccaagggcaccgtcatccacgaagtccacgtccagatgcaggagctgtccctgggcatgaaagccctggccccagagccccccgtctcccaggagctcccctgctccagcgagggcagccgtgagaacctgctgcaccaggccatgcagaactccggcatcgtccttgagcgcgctgctggggaggagggtgccctggagccagctcctgctgccgggtccagtccccagcccctggcagtggcagccccgcagctgccggtactggaagtgcagccgctggagacacaggtggccagcgaggcctcagcggtgcccaggacccacccatgtcctcagtgcagtgagaccttcccgacagcagccaccctggaggcccacaagaggggccacaccgggccgaggccgttcgcctgcgcgcagtgtggcaaggccttccccaaggcctacctgctcaagaagcaccaggaggtgcacgtgcgtgagcgccgcttccgctgtggcgactgcgggaagctctacaagaccattgcccatgtgcgtggccaccggcgcgtccactcagacgagcggccctacccttgtcccaagtgtggcaagcgctacaagactaagaacgcacagcaggtgcacttcaggacacacctggaggagaagccgcacgtgtgccagttctgcagccgtggcttccgagagaagggctcactggtgcggcacgtgcgacaccacacaggcgagaagccgttcaagtgctacaagtgcggccgtggcttcgccgagcacggcacgctgaaccggcacctgcgcaccaaagggggctgcctgctggaggtggaggagttgctggtgtctgaggacagccccgcggcagccaccaccgtcctcacggaagacccgcacacagtgttggtggagttctcgtccgtggtagctgacacccaggagtatatcatcgaggccactgcggacgatgcggagaccagtgaggccacggagatcatcgagggcacccagacagaggtggacagccacatcatgaaggtggtgcagcagatcgtgcaccaggctagcgccggccaccagatcatcgtgcagaacgtcaccatggacgaggagacggcgctgggcccagaggcggctgccgccgacaccatcaccatcgccacccccgagagcctgacagagcaggtggccatgacgctggcctcggccatcagcgagggcactgtgcttgccgcccgggcagggacaagtggcactgaacaggccactgtgaccatggtgtcatcagaggacatcgagatcctggagcatgcaggcgagctggtcatcgcctcgccggagggccagctggaggtgcagacggtcatcgtctagcatgaggtctgcggggtcctggccgggcagggacagggcagaggactctgagcgccccacccatgcctgcctggcctggtagagaagatggcacaggatggaggcgccccaagacggacagtgtacataagagtttcttgttgctttacaataaaacatgagaacctgc

SEQ ID NO: 8775 - protein, 784 aa, Homo sapiens; identical to SEQ ID NO: 1320

SEQ ID NO: 8776 - DNA, 3213 bp, Homo sapiens
atgacgacatggtcgtaaatccgccatcttcctgcggcgcgttgcgacatggagggcgcgatggcagtgcgggtgacggccgctcatacggcagaagcccaggccgaagccgggcgggaagcgggcgagggtgcagttgcggcggtggcggcggccttggcccccagcggcttcctcggcctcccggcgcccttcagcgaggaagatgaggacgatgtgcacagatgcggccgctgccaggcagagttcaccgccttggaggattttgttcagcacaagattcagaaggcctgccagcgggcccctccggaggccctgcctgccacccctgccaccacagcgttgctgggccaggaggtggtgccggcagcaccaggcccagaggagcccatcactgtggcccacatcgtggtggaggcggcctctctggcagcagacatcagccacgcatctgaccttgttggtggtgggcacatcaaagaggtcatcgtggctgctgaggcggagctgggagacggtgagatggccgaggccccgggcagcccccgccagcaggggctggggctcgcaggggagggtgagcaggcccaggtgaagctactggtgaacaaggatggccgctatgtgtgtgcgctgtgccacaagaccttcaagacgggcagcatcctcaaggcccacatggtcactcacagcagccgcaaggaccacgagtgcaagctctgtggggcctccttccgcaccaagggctcactcatccggcaccaccggcggcacacggatgagcgcccctacaagtgctccaagtgtggaaagagcttccgggagtcgggtgcactgacccggcacctcaagtctctcaccccctgcacagagaaaatccgcttcagtgtgagcaaggacgtggttgtcagcaaagaggacgcacgtgcaggttctggagctggagctgccggcttggggacagccacatcatcggtgacaggcgagcctatagagacttcacccgtgattcacctggtgacagatgccaagggcaccgtcatccacgaagtccacgtccagatgcaggagctgtccctgggcatgaaagccctggccccagagccccccgtctcccaggagctcccctgctccagcgagggcagccgtgagaacctgctgcaccaggccatgcagaactccggcatcgtccttgagcgcgctgctggggaggagggtgccctggagccagctcctgctgccgggtccagtccccagcccctggcagtggcagccccgcagctgccggtactggaagtgcagccgctggagacacaggtggccagcgaggcctcagcggtgcccaggacccacccatgtcctcagtgcagtgagaccttcccgacagcagccaccctggaggcccacaagaggggccacaccgggccgaggccgttcgcctgcgcgcagtgtggcaaggccttccccaaggcctacctgctcaagaagcaccaggaggtgcacgtgcgtgagcgccgcttccgctgtggcgactgcgggaagctctacaagaccattgcccatgtgcgtggccaccggcgcgtccactcagacgagcggccctacccttgtcccaagtgtggcaagcgctacaagactaagaacgcacagcaggtgcacttcaggacacacctggaggagaagccgcacgtgtgccagttctgcagccgtggcttccgagagaagggctcactggtgcggcacgtgcgacaccacacaggcgagaagccgttcaagtgctacaagtgcggccgtggcttcgccgagcacggcacgctgaaccggcacctgcgcaccaaagggggctgcctgctggaggtggaggagttgctggtgtctgaggacagccccgcggcagccaccaccgtcctcacggaagacccgcacacagtgttggtggagttctcgtccgtggtagctgacacccaggagtatatcatcgaggccactgcggacgatgcggagaccagtgaggccacggagatcatcgagggcacccagacagaggtggacagccacatcatgaaggtggtgcagcagatcgtgcaccaggctagcgccggccaccagatcatcgtgcagaacgtcaccatggacgaggagacggcgctgggcccagaggcggctgccgccgacaccatcaccatcgccacccccgagagcctgacagagcaggtggccatgacgctggcctcggccatcagcgagggcactgtgcttgccgcccgggcagggacaagtggcactgaacaggccactgtgaccatggtgtcatcagaggacatcgagatcctggagcatgcaggcgagctggtcatcgcctcgccggagggccagctggaggtgcagacggtcatcgtctagcatgaggtctgcggggtcctggccgggcagggacagggcagaggactctgagcgccccacccatgcctgcctggcctggtagagaagatggcacaggatggaggcgccccaagacggacagtgtacataagagtttcttgttgctttacaataaaacatgagaacctgcagcttgtgatgttgtggcagtggcagcctccgcggctggtgccaccacctttgcccaggcccccgcagcagcacctgcctcccaggccactcctagactcacgtgcctggccgccccacccaggggcttctgccagccctggcggcgccttggtgctgtgtgggtgtcattggcatgttgaccaacagcctcctgccctgcccagctggagctgtgcccccagctgcgctgcctgaggcctgtgggtgggtgggaggaccagggacggggacagggagatctgggagcctcggcctccaccgcagggtgagcaggtggagcagcagcaggagatgctgggtagggagtgtggctggtcctacctgcgctgccttgctttccctgaagggattctgctcagggaggcagagtctaggcgacctaatttctaggggcgaggacaagaacacagccgcaccgggatgtggctgaccgtctacctccctcctagggggctggcaggggcttctgggacggttttgggacaggtctggggcaccagaaccggctcaggcaggtctcccaccccttaccctgggggtctccatgggaatgaaagccaggagttcatcaggcacccagctgagtcgagggggcgggac

SEQ ID NO: 8777 - protein, 784 aa, Homo sapiens; identical to SEQ ID NO: 1320

SEQ ID NO: 8778 - DNA, 2210 bp, Homo sapiens
tgcctgcctggcctggtagagaagatggcacaggatggaggcgccccaagacggacagtgtacataagagtttcttgttgctttacaataaaacatgagaacctgcagcttgtgatgttgtggcagtggcagcctccgcggctggtgccaccacctttgcccaggcccccgcagcagcacctgcctcccaggccactcctagactcacgtgcctggccgccccacccaggggcttctgccagccctggcggcgccttggtgctgtgtgggtgtcattggcatgttgaccaacagcctcctgccctgcccagctggagctgtgcccccagctgcgctgcctgaggcctgtgggtgggtgggaggaccagggacggggacagggagatctgggagcctcggcctccaccgcagggtgagcaggtggagcagcagcaggagatgctgggtagggagtgtggctggtcctacctgcgctgccttgctttccctgaagggattctgctcagggaggcagagtctaggcgacctaatttctaggggcgaggacaagaacacagccgcaccgggatgtggctgaccgtctacctccctcctagggggctggcaggggcttctgggacggttttgggacaggtctggggcaccagaaccggctcaggcaggtctcccaccccttaccctgggggtctccatgggaatgaaagccaggagttcatcaggcacccagctgagtcgagggggcgggacccagtgcagcccggcccctccctggcccaggacctcaaataccggcccctgccttggtgccagagctactgccagagggagtcagtgcagtcctgtgtcggacacgcccgcagcctggacccgggatccccatccccctaggatctctgagcctcgggcctctgcacccacatccaaggtgagtctctcggctgccctgagctggggctggatgggccggaccctccattccggctgcagcttcccgcgcagtgagaaggcagcggtccctgagagcccagcagtgccctgggagcctgcagaacgcaggggcggattccgcgtcgcactggccgtcaaggggcggccgcggagggaaggggtgggtcggtgggtctgacagcgggtctgcgtaggcggcagcgtctgtccctcccagcctctcgctccgcgccatgggcgggccccgggctctgctggccgcactctgggcgctggaagccgccgggaccgccgcgcttcgcatcggagccttcaacattcagagcttcggtgacagcaaagtgtcggaccccgcttgcggcagcatcatcgcgaagatcctggctggctatgacctcgcgctggtgcaggaggtgcgagacccagacctcagcgccgtgtccgcgctcatggagcagatcaacagcgtgtccgagcacgagtacagctttgtgagcagccagcccctgggccgggaccagtacaaggagatgtacctgttcgtgtacaggaaagacgcggtgtcggtcgtggacacctacctgtacccagaccccgaggacgtcttcagccgcgagcccttcgtggtcaagttctcggcccccggcaccggtgagcgggccccgcccctcccctcccgccgagctctgacgcccccaccccttcccgcagcagcacagaacctggtgctgatcccgctgcacgcggcgccgcatcaagccgtggcggagatcgacgcgctctacgacgtgtacctggacgtgatcgacaagtggggcaccgacgacatgctgttcctgggcgacttcaacgccgactgcagctatgtgcgggcgcaggactgggccgccatccgtctgaggagcagtgaggtcttcaagtggctcatccctgacagcgccgacaccacggtgggcaactcagactgcgcctacgaccgcattgtggcctgtggcgcccgcctgcgccggagcctgaagccccagtcggccaccgtgcacgacttccaggaggaattcggcctggaccagactcaggctcttgccatcagcgaccactttccagtggaggtgaccctcaagttccaccgatgactcgaggcctggctggggcatgccacctgcagaccctggctctgaggaatggcccaacagtggccccttcagggtggcagccacccttcagtgaggccccaaggcagagtcggctgggcgtggaccagg

SEQ ID NO: 8779 - protein, 299 aa, Homo sapiens; identical to SEQ ID NO: 1322

SEQ ID NO: 8780 - DNA, 546 bp, Homo sapiens
gtgcagtcctgtgtcggacacgcccgcagcctggacccgggatccccatccccctaggatctctgagcctcgggcctctgcacccacatccaaggcggcagcgtctgtccctcccagcctctcgctccgcgccatgggcgggccccgggctctgctggccgcactctgggcgctggaagccgccgggaccgccgcgcttcgcatcggagccttcaacattcagagcttcggtgacagcaaagtgtcggaccccgcttgcggcagcatcatcgcgaagatcctggctggctatgacctcgcgctggtgcaggaggtgcgagacccagacctcagcgccgtgtccgcgctcatggagcagatcaacagcgtgtccgagcacgagtacagctttgtgagcagccagcccctgggccgggaccagtacaaggagatgtacctgttcgtgtacaggaaagacgcggtgtcggtcgtggacacctacctgtacccagaccccgaggacgtcttcagccgcgagcccttcgtggtcaagttctcggcccccgg

SEQ ID NO: 8781 - protein, 136 aa, Homo sapiens
MGGPRALLAALWALEAAGTAALRIGAFNIQSFGDSKVSDPACGSIIAKILAGYDLALVQEVRDPDLSAVSALMEQINSVSEHEYSFVSSQPLGRDQYKEMYLFVYRKDAVSVVDTYLYPDPEDVFSREPFVVKFSA

SEQ ID NO: 8782 - DNA, 1162 bp, Homo sapiens
gtgcagtcctgtgtcggacacgcccgcagcctggacccgggatccccatccccctaggatctctgagcctcgggcctctgcacccacatccaaggcggcagcgtctgtccctcccagcctctcgctccgcgccatgggcgggccccgggctctgctggccgcactctgggcgctggaagccgccgggaccgccgcgcttcgcatcggagccttcaacattcagagcttcggtgacagcaaagtgtcggaccccgcttgcggcagcatcatcgcgaagatcctggctggctatgacctcgcgctggtgcaggaggtgcgagacccagacctcagcgccgtgtccgcgctcatggagcagatcaacagcgtgtccgagcacgagtacagctttgtgagcagccagcccctgggccgggaccagtacaaggagatgtacctgttcgtgtacaggaaagacgcggtgtcggtcgtggacacctacctgtacccagaccccgaggacgtcttcagccgcgagcccttcgtggtcaagttctcggcccccggcaccggtgagcgggccccgcccctcccctcccgccgagctctgacgcccccaccccttcccgcagcagcacagaacctggtgctgatcccgctgcacgcggcgccgcatcaagccgtggcggagatcgacgcgctctacgacgtgtacctggacgtgatcgacaagtggggcaccgacgacatgctgttcctgggcgacttcaacgccgactgcagctatgtgcgggcgcaggactgggccgccatccgtctgaggagcagtgaggtcttcaagtggctcatccctgacagcgccgacaccacggtgggcaactcagactgcgcctacgaccgcattgtggcctgtggcgcccgcctgcgccggagcctgaagccccagtcggccaccgtgcacgacttccaggaggaattcggcctggaccagactcaggctcttgccatcagcgaccactttccagtggaggtgaccctcaagttccaccgatgactcgaggcctggctggggcatgccacctgcagaccctggctctgaggaatggcccaacagtggccccttcagggtggcagccacccttcagtgaggccccaaggcagagtcggctgggcgtggaccagg

SEQ ID NO: 8783 - protein, 299 aa, Homo sapiens; identical to SEQ ID NO: 1322

SEQ ID NO: 8784 - DNA, 1058 bp, Homo sapiens
gcggccgcggagggaaggggtgggtcggtgggtctgacagcgggtctgcgtaggcggcagcgtctgtccctcccagcctctcgctccgcgccatgggcgggccccgggctctgctggccgcactctgggcgctggaagccgccgggaccgccgcgcttcgcatcggagccttcaacattcagagcttcggtgacagcaaagtgtcggaccccgcttgcggcagcatcatcgcgaagatcctggctggctatgacctcgcgctggtgcaggaggtgcgagacccagacctcagcgccgtgtccgcgctcatggagcagatcaacagcgtgtccgagcacgagtacagctttgtgagcagccagcccctgggccgggaccagtacaaggagatgtacctgttcgtgtacaggaaagacgcggtgtcggtcgtggacacctacctgtacccagaccccgaggacgtcttcagccgcgagcccttcgtggtcaagttctcggcccccggcaccgcacagaacctggtgctgatcccgctgcacgcggcgccgcatcaagccgtggcggagatcgacgcgctctacgacgtgtacctggacgtgatcgacaagtggggcaccgacgacatgctgttcctgggcgacttcaacgccgactgcagctatgtgcgggcgcaggactgggccgccatccgtctgaggagcagtgaggtcttcaagtggctcatccctgacagcgccgacaccacggtgggcaactcagactgcgcctacgaccgcattgtggcctgtggcgcccgcctgcgccggagcctgaagccccagtcggccaccgtgcacgacttccaggaggaattcggcctggaccagactcaggctcttgccatcagcgaccactttccagtggaggtgaccctcaagttccaccgatgactcgaggcctggctggggcatgccacctgcagaccctggctctgaggaatggcccaacagtggccccttcagggtggcagccacccttcagtgaggccccaaggcagagtcggctgggcgtggaccagg

SEQ ID NO: 8785 - protein, 278 aa, Homo sapiens
MGGPRALLAALWALEAAGTAALRIGAFNIQSFGDSKVSDPACGSIIAKILAGYDLALVQEVRDPDLSAVSALMEQINSVSEHEYSFVSSQPLGRDQYKEMYLFVYRKDAVSVVDTYLYPDPEDVFSREPFVVKFSAPGTAQNLVLIPLHAAPHQAVAEIDALYDVYLDVIDKWGTDDMLFLGDFNADCSYVRAQDWAAIRLRSSEVFKWLIPDSADTTVGNSDCAYDRIVACGARLRRSLKPQSATVHDFQEEFGLDQTQALAISDHFPVEVTLKFHR

SEQ ID NO: 8786 - DNA, 1433 bp, Homo sapiens
tgcggtcaagatggcgctggtggcttctgtgcgagtcccggcgcgcgttctgctccgcgcgggttcgggagccagcgggtgctggtggagccggacgcgggcgcaggggtcgctgtgatgaaattcaagaaccccccagtgaacagcctgagcctggagtttctgacggagctggtcatcagcctggagaagctggagaatgacaagagcttccgcggtgtcattctgacctcggaccgcccgggtgtcttctcggccggcctggacctgacggagatgtgtgggaggagccccgcccactacgctgggtactggaaggccgttcaggagctgtggctgcggttgtaccagtccaacctggtgctggtctccgccatcaacggagcctgccccgctggaggctgcctggtggccctgacctgtgactaccgcatcctggcggacaaccccaggtactgcataggactcaatgagacccagctgggcatcatcgcccctttctggttgaaagacaccctggagaacaccatcgggcaccgggcggcggagcgtgccctgcagctggggctgctcttcccgccggcggaggccctgcaggtgggcatagtggaccaggtggtcccggaggagcaggtgcagagcactgcgctgtcagcgatagcccagtggatggccattccagaccatgctcgacagctgaccaaggccatgatgcgaaaggccacggccagccgcctggtcacgcagcgcgatgcggacgtgcagaacttcgtcagcttcatctccaaagactccatccagaagtccctgcagatgtacttagagaggctcaaagaagaaaaaggctaacgattgggctgccacaggcttacggccacacgtgcccctgtgggtcccagggaggtcttaaacaaggtatttttcaacttaaaagtactgccagcgtttcattttgctgatgttacgtagaagttcctgttcctcatagcccagtggcccaaggcccagccacacacaaacacacatgggtgcctgtgcccgtcaggcaaggggagttggagggcagccttttgacttgggattgtgactggcaggggatgccattctggacctggtgaggttgccacggagtgtctctgttcccaaggcagaatcgtaagtcaagtccctggtcatccattctggcctttggactgcctgctcttaggtgtaaggccaggtggtcttggcccccatgacccacacagaactccccagggaaaagccctttggtcactgcccttactcatcaggatgaagagcgcacagtgaatcagagcaactgggggatcctgagccagcgggagtgggactctggaggcagctgtgctgccagggatccaaatgtcccttaagaaggattttgcaagaaccaaactcatccaaacccttga

SEQ ID NO: 8787 - protein, 243 aa, Homo sapiens
MKFKNPPVNSLSLEFLTELVISLEKLENDKSFRGVILTSDRPGVFSAGLDLTEMCGRSPAHYAGYWKAVQELWLRLYQSNLVLVSAINGACPAGGCLVALTCDYRILADNPRYCIGLNETQLGIIAPFWLKDTLENTIGHRAAERALQLGLLFPPAEALQVGIVDQVVPEEQVQSTALSAIAQWMAIPDHARQLTKAMMRKATASRLVTQRDADVQNFVSFISKDSIQKSLQMYLERLKEEKG

SEQ ID NO: 8788 - DNA, 1529 bp, Homo sapiens
cagcccgcgacctttatcccgcgcgttgcggtcaagatggcgctggtggcttctgtgcgagtcccggcgcgcgttctgctccgcgcgggggcccggctcccgggcgcggccctcgggcggacggagcgggcggccggcggcggagacggcgcgcggcgcttcgggagccagcgggtgctggtggagccggacgcgggcgcaggggtcgctgtgatgaaattcaagaaccccccagtgaacagcctgagcctggagtttctgacggagctggtcatcagcctggagaagctggagaatgacaagagcttccgcggtgtcattctgacctcggaccgcccgggtgtcttctcggccggcctggacctgacggagatgtgtgggaggagccccgcccactacgctgggtactggaaggccgttcaggagctgtggctgcggttgtaccagtccaacctggtgctggtctccgccatcaacggagcctgccccgctggaggctgcctggtggccctgacctgtgactaccgcatcctggcggacaaccccaggtactgcataggactcaatgagacccagctgggcatcatcgcccctttctggttgaaagacaccctggagaacaccatcgggcaccgggcggcggagcgtgccctgcagctggggctgctcttcccgccggcggaggccctgcaggtgggcatagtggaccaggtggtcccggaggagcaggtgcagagcactgcgctgtcagcgatagcccagtggatggccattccagaccatgctcgacagctgaccaaggccatgatgcgaaaggccacggccagccgcctggtcacgcagcgcgatgcggacgtgcagaacttcgtcagcttcatctccaaagactccatccagaagtccctgcagatgtacttagagaggctcaaagaagaaaaaggctaacgattgggctgccacaggcttacggccacacgtgcccctgtgggtcccagggaggtcttaaacaaggtatttttcaacttaaaagtactgccagcgtttcattttgctgatgttacgtagaagttcctgttcctcatagcccagtggcccaaggcccagccacacacaaacacacatgggtgcctgtgcccgtcaggcaaggggagttggagggcagccttttgacttgggattgtgactggcaggggatgccattctggacctggtgaggttgccacggagtgtctctgttcccaaggcagaatcgtaagtcaagtccctggtcatccattctggcctttggactgcctgctcttaggtgtaaggccaggtggtcttggcccccatgacccacacagaactccccagggaaaagccctttggtcactgcccttactcatcaggatgaagagcgcacagtgaatcagagcaactgggggatcctgagccagcgggagtgggactctggaggcagctgtgctgccagggatccaaatgtcccttaagaaggattttgcaagaaccaaactcatccaaacccttga

SEQ ID NO: 8789 - protein, 302 aa, Homo sapiens; identical to SEQ ID NO: 1324

SEQ ID NO: 8790 - DNA, 956 bp, Homo sapiens
tgcggtcaagatggcgctggtggcttctgtgcgagtcccggcgcgcgttctgctccgcgcgggttcgggagccagcgggtgctggtggagccggacgcgggcgcaggggtcgctgtgatgaaattcaagaaccccccagtgaacagcctgagcctggagtttctgacggagctggtcatcagcctggagaagctggagaatgacaagagcttccgcggtgtcattctgacctcggaccgcccgggtgtcttctcggccggcctggacctgacggagatgtgtgggaggagccccgcccactacgctgggtactggaaggccgttcaggagctgtggctgcggttgtaccagtccaacctggtgctggtctccgccatcaacggagcctgccccgctggaggctgcctggtggccctgacctgtgactaccgcatcctggcggacaaccccaggtactgcataggactcaatgagacccagctgggcatcatcgcccctttctggttgaaagacaccctggagaacaccatcgggcaccgggcggcggagcgtgccctgcagctggggctgctcttcccgccggcggaggccctgcaggtgggcatagtggaccaggtggtcccggaggagcaggtgcagagcactgcgctgtcagcgatagcccagtggatggccattccagaccatgctcgacagctgaccaaggccatgatgcgaaaggccacggccagccgcctggtcacgcagcgcgatgcggacgtgcagaacttcgtcagcttcatctccaaagactccatccagaagtccctgcagatgtacttagagaggctcaaagaagaaaaaggctaacgattgggctgccacaggcttacggccacacgtgcccctgtgggtcccagggaggtcttaaacaaggtatttttcaacttaaaagtactgccagcgtttcattttgc

SEQ ID NO: 8791 - protein, 243 aa, Homo sapiens; identical to SEQ ID NO: 8787

SEQ ID NO: 8792 - DNA, 1052 bp, Homo sapiens
cagcccgcgacctttatcccgcgcgttgcggtcaagatggcgctggtggcttctgtgcgagtcccggcgcgcgttctgctccgcgcgggggcccggctcccgggcgcggccctcgggcggacggagcgggcggccggcggcggagacggcgcgcggcgcttcgggagccagcgggtgctggtggagccggacgcgggcgcaggggtcgctgtgatgaaattcaagaaccccccagtgaacagcctgagcctggagtttctgacggagctggtcatcagcctggagaagctggagaatgacaagagcttccgcggtgtcattctgacctcggaccgcccgggtgtcttctcggccggcctggacctgacggagatgtgtgggaggagccccgcccactacgctgggtactggaaggccgttcaggagctgtggctgcggttgtaccagtccaacctggtgctggtctccgccatcaacggagcctgccccgctggaggctgcctggtggccctgacctgtgactaccgcatcctggcggacaaccccaggtactgcataggactcaatgagacccagctgggcatcatcgcccctttctggttgaaagacaccctggagaacaccatcgggcaccgggcggcggagcgtgccctgcagctggggctgctcttcccgccggcggaggccctgcaggtgggcatagtggaccaggtggtcccggaggagcaggtgcagagcactgcgctgtcagcgatagcccagtggatggccattccagaccatgctcgacagctgaccaaggccatgatgcgaaaggccacggccagccgcctggtcacgcagcgcgatgcggacgtgcagaacttcgtcagcttcatctccaaagactccatccagaagtccctgcagatgtacttagagaggctcaaagaagaaaaaggctaacgattgggctgccacaggcttacggccacacgtgcccctgtgggtcccagggaggtcttaaacaaggtatttttcaacttaaaagtactgccagcgtttcattttgc

SEQ ID NO: 8793 - protein, 302 aa, Homo sapiens; identical to SEQ ID NO: 1324

SEQ ID NO: 8794 - DNA, 979 bp, Homo sapiens
agcccgcgacctttatcccgcgcgttgcggtcaagatggcgctggtggcttctgtgcgagtcccggcgcgcgttctgctccgcgcgggggcccggctcccgggcgcggccctcgggcggacggagcgggcggccggcggcggagacggcgcgcggcgcttcgggagccagcgggtgctggtggagccggacgcgggcgcaggggtcgctgtgatgaaattcaagaaccccccagtgaacagcctgagcctggagtttctgacggagctggtcatcagcctggagaagctggagaatgacaagagcttccgcggtgtcattctgacctcggaccgcccgggtgtcttctcggccggcctggacctgacggagatgtgtgggaggagccccgcccactacgctgggtactggaaggccgttcaggagctgtggctgcggttgtaccagtccaacctggtgctggtctccgccatcaacggagcctgccccgctggaggctgcctggtggccctgacctgtgactaccgcatcctggcggacaaccccaggttgaaagacaccctggagaacaccatcgggcaccgggcggcggagcgtgccctgcagctggggctgctcttcccgccggcggaggccctgcaggtgggcatagtggaccaggtggtcccggaggagcaggtgcagagcactgcgctgtcagcgatagcccagtggatggccattccagaccatgctcgacagctgaccaaggccatgatgcgaaaggccacggccagccgcctggtcacgcagcgcgatgcggacgtgcagaacttcgtcagcttcatctccaaagactccatccagaagtccctgcagatgtacttagagaggctcaaagaagaaaaaggctaacgattgggctgccacaggcttacggccacacgtgcccctgtgggtcccagggaggtcttaaacaaggtatttttcaacttaaaagt

SEQ ID NO: 8795 - protein, 285 aa, Homo sapiens
MALVASVRVPARVLLRAGARLPGAALGRTERAAGGGDGARRFGSQRVLVEPDAGAGVAVMKFKNPPVNSLSLEFLTELVISLEKLENDKSFRGVILTSDRPGVFSAGLDLTEMCGRSPAHYAGYWKAVQELWLRLYQSNLVLVSAINGACPAGGCLVALTCDYRILADNPRLKDTLENTIGHRAAERALQLGLLFPPAEALQVGIVDQVVPEEQVQSTALSAIAQWMAIPDHARQLTKAMMRKATASRLVTQRDADVQNFVSFISKDSIQKSLQMYLERLKEEKG

SEQ ID NO: 8796 - DNA, 976 bp, Homo sapiens
ctttatcccgcgcgttgcggtcaagatggcgctggtggcttctgtgcgagtcccggcgcgcgttctgctccgcgcgggtgcgaaacccggggtgggcagggatcgggccggggccggggccaggaccgggaactaacgggctcccccacgctgccttcgcaggggcccggctcccgggcgcggccctcgggcggacggagcgggcggccggcggcggagacggcgcgcggcgcttcgggagccagcgggtgctggtggagccggacgcgggcgcaggggtcgctgtgatgaaattcaagaaccccccagtgaacagcctgagcctggagtttctgacggagctggtcatcagcctggagaagctggagaatgacaagagcttccgcggtgtcattctgacctcggaccgcccgggtgtcttctcggccggcctggacctgacggagatgtgtgggaggagccccgcccactacgctgggtactggaaggccgttcaggagctgtggctgcggttgtaccagtccaacctggtgctggtctccgccatcaacggagcctgccccgctggaggctgcctggtggccctgacctgtgactaccgcatcctggcggacaaccccaggtactgcataggactcaatgagacccagctgggcatcatcgcccctttctggtaaggccctgggctgcagccacgctccatgcttgttgtggagggaacagacccgcctggggccatgtggtgagtgggtgtctgcatttccaggttgaaagacaccctggagaacaccatcgggcaccgggcggcggagcgtgccctgcagctggggctgctcttcccgccggcggaggccctgcaggtgggcatagtggaccaggtggtcccggaggagcaggtgcagagcactgcgctgtcagcgatagcccagtggatggccattccaggtgaggcacggggcatggcgggcgcccgatg

SEQ ID NO: 8797 - protein, 129 aa, Homo sapiens
MKFKNPPVNSLSLEFLTELVISLEKLENDKSFRGVILTSDRPGVFSAGLDLTEMCGRSPAHYAGYWKAVQELWLRLYQSNLVLVSAINGACPAGGCLVALTCDYRILADNPRYCIGLNETQLGIIAPFW

SEQ ID NO: 8798 - DNA, 1328 bp, Homo sapiens
acctttatcccgcgcgttgcggtcaagatggcgctggtggcttctgtgcgagtcccggcgcgcgttctgctccgcgcgggggcccggctcccgggcgcggccctcgggcggacggagcgggcggccggcggcggagacggcgcgcggcgcttcgggagccagcgggtgctggtggagccggacgcgggcgcaggggtcgctgtgatgaaattcaagaaccccccagtgaacagcctgagcctggagtttctgacggagctggtcatcagcctggagaagctggagaatgacaagagcttccgcggtgtcattctgacctcggaccgcccgggtgtcttctcggccggcctggacctgacggagatgtgtgggaggagccccgcccactacgctgggtactggaaggccgttcaggagctgtggctgcggttgtaccagtccaacctggtgctggtctccgccatcaacgtgagtgtccccactcccaggtggcctcgctggctgttctgggccagcgccagggggtgggacagacactgtcctgcccttggaatctctcacaggggaaggggacggttggagaggccctgagatgtgcacaggtgagcgccatcgcagaccacggggcgtgttgagaaaggtgggcctcgggtgagggccctggcctgggtcaatcagacaagacccagaaaagagccagtgggtagggaccagggcctggggttgatgccagcctgggtggaggctgtgtgggtgagtgggtgatcggacccacattttggaaacatcactccatcccttctgggggaaggccagggaagccgagaacaacacgggggcttaacctcaggaaccagggtgtcctgcggggtggctgtgacaagccgggtgtgggccggagcctggtggaggggagggctggtgtgagaggaagcctcaagggtgcacggccatgcagacaggatgggtcctgcgcggggcagtgggtacctgcagtgaccacagggtgagtgtggggttcccaggacatcctggttgcgctagctgctggggtggtatcggggcccccttggggcatgacagttatgactaaatgcttgtgtggcattttagcattgagtaaaagcactgagaggacaagcgacttgctcccctaactgaatggtttttaaaagtgatttatctgttgccgaagaactaatgaccctcggctgaggacgagcctcagaccctccttgccgagcgctaaggggccagttccttcctcatccatttcccagtgcacacccagcccagcccagaccattgtgggtgttgaaccctgcggg

SEQ ID NO: 8799 - protein, 187 aa, Homo sapiens
MALVASVRVPARVLLRAGARLPGAALGRTERAAGGGDGARRFGSQRVLVEPDAGAGVAVMKFKNPPVNSLSLEFLTELVISLEKLENDKSFRGVILTSDRPGVFSAGLDLTEMCGRSPAHYAGYWKAVQELWLRLYQSNLVLVSAINVSVPTPRWPRWLFWASARGWDRHCPALGISHRGRGRLERP

SEQ ID NO: 8800 - DNA, 7726 bp, Homo sapiens
gcggccgcggcgggagcggcggcgcactcggggggaagcaggccccactagacgggccgcgccgacgggctccgcgcactcgcagcccggggcgcccccacccccagcgcccgccgccgcgggcagggccggcccggagcgcggggggcggccggggagcgcgagccgggggcgcccgccgaagctcgctgctccgggtcggggtccgggcccggggccggccgcgcgccgcctttgacgcatcggagcgcggctcctgcaggatggagggctccgcgccgccagcggagttgtttgtgcgcaggcggctcgcggggctgggagcgctcaaggtctgaacttccctccggagccgcagctggaggaggcgagcgcgcgaggaggagaagccgcgcggcgcggaggccaccctcggggcgagaggcgcggaaggcgagcgagcaaagcggtcccggagccacggcggccacgcggcggggacccccgggcgttctaggtactggtgaccccggccggggcaggccccgggactcgacaacatggcttccccaccccaccagcagctgctgcatcaccacagcaccgaggtgagctgcgactccagcggggacagcaacagcgtgcgcgtcaagatcaaccccaagcagctgtcctccaacagccaccccaagcactgcaaatacagcatctcctctagctgcagcagctctggggactccgggggcgtcccccggcgagtgggcggcggaggccggctgcgcaggcagaagaagctgccccagctgttcgagagggcctccagccgctggtgggaccccaagttcgactcggtgaacctggaggaggcctgcctggagcgctgcttcccgcagacccagcgccggttccggtatgcgctcttctacatcggcttcgcctgccttctgtggagcatctattttgcggtccacatgagatccagactgatcgtcatggtcgcccccgcgctgtgcttcctcctggtgtgtgtgggcttctttctgtttaccttcaccaagctgtacgcccggcattacgcgtggacctcgctggctctcaccctgctggtgttcgccctgaccctggctgcgcagttccaggtcttgacgcctgtctcaggacgcggcgacagctccaaccttacggccacagcccggcccacagatacttgcttatctcaagtggggagcttctccatgtgcatcgaagtgctctttttgctctataccgtcatgcacttacctttgtacctgagtttgtgtctgggggtggcctactctgtccttttcgagacctttggctaccatttccgggatgaagcctgcttcccctcgcccggagccggggccctgcactgggagctgctgagcagggggctgctccacggctgcatccacgccatcggggtccacctgttcgtcatgtcccaggtgaggtccaggagcaccttcctcaaggtggggcaatccattatgcacgggaaggacctggaagtggaaaaagccctcaaagagaggatgattcattccgtgatgccaagaatcatagccgatgacttaatgaagcagggagatgaggagagtgagaattctgtcaagaggcatgccacctcgagccccaagaacaggaagaaaaagtcttccatccaaaaagctcctatagccttccgcccttttaagatgcagcagatcgaagaagtcagtattttatttgcagatatcgtgggcttcaccaagatgagtgccaacaagtctgcccacgccctggtgggtctcctgaacgatctgttcggtcgcttcgaccgcctgtgtgaggagaccaagtgtgagaaaatcagcaccctgggagactgttactactgcgtggcgggctgtcccgagccccgggccgaccatgcctactgctgcatcgagatgggcctgggcatgatcaaggccatcgagcagttctgccaggagaagaaggagatggtgaacatgagagtcggggtgcacacgggcaccgtcctttgcggcatcctgggcatgaggaggtttaaatttgacgtgtggtccaacgatgtgaacctggccaatctcatggagcagctgggagtggccggcaaagttcacatttctgaggccaccgcaaaatacttagatgaccggtacgaaatggaagatgggaaagttattgaacggctgggccagagcgtggttgctgaccagttgaaaggtttgaagacatacctgatatcgggtcagagagccaaggagtctcgctgcagctgtgcagaggccttgctttctggctttgaggtcattgacggctcacaggtgtcctcaggccctaggggacaggggacagcgtcatcagggaatgtcagtgacttggcgcagactgtcaaaacctttgataaccttaagacctgcccttcgtgcggaatcacatttgctcccaaatctgaagccggcgccgagggaggagcacctcaaaacggctgccaagacgagcataaaaacagcaccaaggcttctggaggacctaatcccaaaactcagaacgggctcctcagccctccccaagaggagaagctcaccaacagtcagacttctctgtgtgagatcttgcaggagaagggaaggtgggcaggggtgagcctggaccagtcggctctccttccgctgaggttcaagaacatccgggagaaaacggacgcccactttgtggacgttatcaaagaagacagcctgatgaaagattacttttttaagccgcccattaatcagttcagcctgaacttcctggatcaggagctggagcgatcctacaggaccagctatcaggaagaggtcataaagaactcccccgtgaagacgtttgctagtcccaccttcagctccctcctggatgtgtttctgtcgaccacagtgtttctgacgctgtccaccacctgcttcctgaagtacgaggcggccaccgtgcctcccccgcccgccgccctggcggtcttcagtgcagccctgctgctggaggtgctgtccctcgcggtgtccatcaggatggtgttcttcctggaggacgtcatggcctgcaccaagcgcctgctggagtggatcgccggctggctaccacgtcactgcatcggggccatcctggtgtcgcttcccgcactggccgtctactcccatgtcacctccgaatatgagaccaacatacacttcccagtgttcacaggctcggccgcgctgattgccgtcgtgcactactgtaacttctgccagctcagctcctggatgaggtcctccctcgccaccgtcgtgggggccgggccgctgctcctgctctacgtctccctgtgcccagacagttctgtattaacttcgccccttgacgcagtacagaatttcagttccgagaggaacccgtgcaatagttcggtgccgcgtgacctccggcggcccgccagcctcatcggccaggaggtggttctcgtcttctttctcctgctcttgttggtctggttcctgaatcgcgaatttgaagtcagctaccgcctccactaccacggagacgtggaagcggatcttcaccgcaccaagatccagagcatgcgggaccaggcagactggctgctgaggaacatcatcccctaccacgtggctgagcagctgaaggtgtcccagacctactccaagaaccatgacagcggaggggtgatcttcgccagcatcgtcaacttcagcgagttctacgaggagaactacgagggcggcaaggagtgctaccgggtcctcaacgagctcatcggggactttgacgagctcctaagcaagccggactacagcagcatcgagaagatcaagaccatcggagccacgtacatggcggcgtcagggctgaacaccgcgcaggcccaggacggcagccacccgcaggagcacctgcagatcctgttcgagttcgccaaggagatgatgcgcgtggtggacgacttcaacaacaacatgctgtggttcaacttcaagctccgcgtcggcttcaaccatgggcccctcacggccggggtcatcggcaccaccaagctgctgtacgacatctggggagacaccgtcaacatcgccagcaggatggacaccaccggcgtggagtgccgcatccaggtgagcgaagagagctaccgcgtcttgagcaagatgggctatgacttcgactacagagggaccgtgaatgtcaaggggaaaggccagatgaagacctacctgtacccaaagtgcacggatcacagggtcatcccacagcaccagctgtccatctccccagacatccgcgtccaggtggatggcagcatcggacggtctcccacagacgagattgccaacctggtgccttctgtccagtatgtggacaagacatctctgggttctgacagcagcacgcaggccaaggatgcccacctgtcccccaagagaccgtggaaggagcccgtcaaagccgaagaaaggggtcgatttggcaaagccatagagaaagacgactgtgacgaaacaggaatagaagaagccaacgaactcaccaagctcaacgtttcaaagagtgtgtgaggcggcgcccacccgctgcccgaggtgctctgtttgtcgaaacacagtaatatttgtatttggctgttgtgctttccaagcgccacagttgccctccccggacgtggtgttatgtggtcatttcagccctaacttctgtgtggatcacagttattcagggttcattttcatccattcttccctttcgctcccttccctggaaaccccgctgcctctgggtcatccgttcagcacgtggtggagaacaagtgccttcagggctggcctcggcctcgagtctcgggacagaggccgccagtggagatcatggctttgggtattatttgacttttagaacaaaagctgtggttaagatctcatttttattgctttttcccacgtcccacgagacactattttcggttctctggctaataccctgtttttgagtttattttgtttctgtctatgtcacagtgttcctctacgacccgacctctctatgtaagcacacatgcgcacacacacttgcattcatgaatctgatataaagtgccagtaatccgccaagagggggtgcgaagggggcatgtcacgacagctccgccaccccccattgcccacccgcactttcccgagcaccgcgccccgtgggctgtgggtgagccgcgctccctgcactgagcgggtttaggggctcgcccacatgcatgcaggccaagacagcaaatgccagccgggcacgacgcccgtgtgcccaggcctcgggggtctcagagccgcctctcacccccgaccctccacccaggggtctccccatcgggagtggaggtgttggtcctggaagctgactcatcggagagggaaataccaaataaacatccgaggttgcatttatttatttatttatttacccggaagcatgtgcgctcccgggaggggtgctgggtcctcagggtggggggtcatagccacaggggagggcagttcccaggaaggtaaccagatgtctcttttgtgttttggccacctggggccgcccccaacctccccaccccaagaggggtctgagtgggacctcaaagcatggccagtgcaattctgaggctaggggaataggagaagcccaccagctgcccctgccacccacgggggctcctccctgccggggtccagctcagaaccacgggggtctgtgccggcagcaccggtgccatcttggcttccacaaattccagaagtttcttggctgcctcccgctctcagatggcacagggcctatcagtggcaggatttaatctggggagcaaattccagctctgaaatggagttctcacaccgtatctagggacagaggcatctggatgcaaacgcggggtttgttaggggcggaatcccgagggtggtgtgggggagctccgtccgggcagttggctgctggtcctgtctgattatgttttgccatattgagtctgaagtttgtgtggaagtgagctcgcccgagttgtccggtcggagttgtagccagtctttcaggggaccccgggacgctgatgaggcccagggtgcactccttgtcagtcttgcccgttgtccctgtgcattttgctttccgctgtcaaatctcactgtctcgttttcacaccgcatcagtccccatcatcactactcctccccagagacatacagattgccctccccggcatgaagaagtcacaattctgacccgccacctctccaggggcggtgcctgggatggccacccatcaggacagccagagccagggtcccggcgtcctgagagtccagggcacctccccccattagctgtaaggtttcctgtcaggtgtgactgtcagtttgctggtcttccaataccgaagaaagggtggttgtgacaatacctcttgcttctaaagaatgtattataaaacaccgcagatttttttttttccttaaaaaacactacctgatgctttccttgttcgtggggattgtggtcacatgaagctctttctgcatcagtattaaggtgtatatttgaatgtcctcccctcccctttcccctccaggctgtgtagctttgaggggctgggcgtttgctcacgaccttgctgtctcgctcagaacatgctccgcaaagttctccgcacacacttcttccccatcaagcccatttccttccccaaccacaaaggtgtttgtgattcctcaccccgggaaaccaaggagctgcaaagtggagtctggttcagccccgtgcagactcacccagagcttaacgttgtctttcaaacaccctgagccttcctaaacagccagtgcagacgttctctctgggccacgaagcccctcgggtcctccccgtcccctgctccgatgcatacctcagtgcagaaccacagaatctctgcagcggaaacgccgtgcatctcttgtctgttggcagcgagcacatcgtgctggagacacgagtttctaagcagctggcacgagggctgctgacggcatgggtcgtgcttcagggtggcaatacctcttaggaacttagggcaggaagcaatacttcagcattgaatgtgtgtaaatagttgctttgagttgcaattgctattttcttctcagtcccagctcagatcgaattatatatccatatatatatatatatatatatatatatatatatatatatatatatggtaaacaagcacacacaattttatccaatgcaaacaaatgtagagcatcagttacaaaaccctcgaatagcttgagagccccacaggctctgccacacccgtgacttcatccacactgacgtcacccgcgggggctccccctgcacatttgcacacgatccggagagccgaaggccgcgtgcttcctgtcacatgggctgtaatcatttgtagtttccaaagacacgtctgcatttgaatttctagattttcgaggtaaggagttttttttaattggttgtttggaaaatcacatcatgcctagaatctgaaattgaattagcaagaaccgactgtttgcattttccatatatccttttatctgctctttttaaattgttaattctaataatttcaaaatgcattcactgaagaaatggacattaaaatattctaaaatttaaatat

SEQ ID NO: 8801 - protein, 1353 aa, Homo sapiens; identical to SEQ ID NO: 1326

SEQ ID NO: 8802 - DNA, 4949 bp, Homo sapiens
cccgggactcgacaacatggcttccccaccccaccagcagctgctgcatcaccacagcaccgaggtgagctgcgactccagcggggacagcaacagcgtgcgcgtcaagatcaaccccaagcagctgtcctccaacagccaccccaagcactgcaaatacagcatctcctctagctgcagcagctctggggactccgggggcgtcccccggcgagtgggcggcggaggccggctgcgcaggcagaagaagctgccccagctgttcgagagggcctccagccgctggtgggaccccaagttcgactcggtgaacctggaggaggcctgcctggagcgctgcttcccgcagacccagcgccggttccggtatgcgctcttctacatcggcttcgcctgccttctgtggagcatctattttgcggtccacatgagatccagactgatcgtcatggtcgcccccgcgctgtgcttcctcctggtgtgtgtgggcttctttctgtttaccttcaccaagctgtacgcccggcattacgcgtggacctcgctggctctcaccctgctggtgttcgccctgaccctggctgcgcagttccaggtcttgacgcctgtctcaggacgcggcgacagctccaaccttacggccacagcccggcccacagatacttgcttatctcaagtggggagcttctccatgtgcatcgaagtgctctttttgctctataccgtcatgcacttacctttgtacctgagtttgtgtctgggggtggcctactctgtccttttcgagacctttggctaccatttccgggatgaagcctgcttcccctcgcccggagccggggccctgcactgggagctgctgagcagggggctgctccacggctgcatccacgccatcggggtccacctgttcgtcatgtcccaggtgaggtccaggagcaccttcctcaaggtggggcaatccattatgcacgggaaggacctggaagtggaaaaagccctcaaagagaggatgattcattccgtgatgccaagaatcatagccgatgacttaatgaagcagggagatgaggagagtgagaattctgtcaagaggcatgccacctcgagccccaagaacaggaagaaaaagtcttccatccaaaaagctcctatagccttccgcccttttaagatgcagcagatcgaagaagtcagtattttatttgcagatatcgtgggcttcaccaagatgagtgccaacaagtctgcccacgccctggtgggtctcctgaacgatctgttcggtcgcttcgaccgcctgtgtgaggagaccaagtgtgagaaaatcagcaccctgggagactgttactactgcgtggcgggctgtcccgagccccgggccgaccatgcctactgctgcatcgagatgggcctgggcatgatcaaggccatcgagcagttctgccaggagaagaaggagatggtgaacatgagagtcggggtgcacacgggcaccgtcctttgcggcatcctgggcatgaggaggtttaaatttgacgtgtggtccaacgatgtgaacctggccaatctcatggagcagctgggagtggccggcaaagttcacatttctgaggccaccgcaaaatacttagatgaccggtacgaaatggaagatgggaaagttattgaacggctgggccagagcgtggttgctgaccagttgaaaggtttgaagacatacctgatatcgggtcagagagccaaggagtctcgctgcagctgtgcagaggccttgctttctggctttgaggtcattgacggctcacaggtgtcctcaggccctaggggacaggggacagcgtcatcagggaatgtcagtgacttggcgcagactgtcaaaacctttgataaccttaagacctgcccttcgtgcggaatcacatttgctcccaaatctgaagccggcgccgagggaggagcacctcaaaacggctgccaagacgagcataaaaacagcaccaaggcttctggaggacctaatcccaaaactcagaacgggctcctcagccctccccaagaggagaagctcaccaacagtcagacttctctgtgtgagatcttgcaggagaagggaaggtgggcaggggtgagcctggaccagtcggctctccttccgctgaggttcaagaacatccgggagaaaacggacgcccactttgtggacgttatcaaagaagacagcctgatgaaagattacttttttaagccgcccattaatcagttcagcctgaacttcctggatcaggagctggagcgatcctacaggaccagctatcaggaagaggtcataaagaactcccccgtgaagacgtttgctagtcccaccttcagctccctcctggatgtgtttctgtcgaccacagtgtttctgacgctgtccaccacctgcttcctgaagtacgaggcggccaccgtgcctcccccgcccgccgccctggcggtcttcagtgcagccctgctgctggaggtgctgtccctcgcggtgtccatcaggatggtgttcttcctggaggacgtcatggcctgcaccaagcgcctgctggagtggatcgccggctggctaccacgtcactgcatcggggccatcctggtgtcgcttcccgcactggccgtctactcccatgtcacctccgaatatgagaccaacatacacttcccagtgttcacaggctcggccgcgctgattgccgtcgtgcactactgtaacttctgccagctcagctcctggatgaggtcctccctcgccaccgtcgtgggggccgggccgctgctcctgctctacgtctccctgtgcccagacagttctgtattaacttcgccccttgacgcagtacagaatttcagttccgagaggaacccgtgcaatagttcggtgccgcgtgacctccggcggcccgccagcctcatcggccaggaggtggttctcgtcttctttctcctgctcttgttggtctggttcctgaatcgcgaatttgaagtcagctaccgcctccactaccacggagacgtggaagcggatcttcaccgcaccaagatccagagcatgcgggaccaggcagactggctgctgaggaacatcatcccctaccacgtggctgagcagctgaaggtgtcccagacctactccaagaaccatgacagcggaggggtgatcttcgccagcatcgtcaacttcagcgagttctacgaggagaactacgagggcggcaaggagtgctaccgggtcctcaacgagctcatcggggactttgacgagctcctaagcaagccggactacagcagcatcgagaagatcaagaccatcggagccacgtacatggcggcgtcagggctgaacaccgcgcaggcccaggacggcagccacccgcaggagcacctgcagatcctgttcgagttcgccaaggagatgatgcgcgtggtggacgacttcaacaacaacatgctgtggttcaacttcaagctccgcgtcggcttcaaccatgggcccctcacggccggggtcatcggcaccaccaagctgctgtacgacatctggggagacaccgtcaacatcgccagcaggatggacaccaccggcgtggagtgccgcatccaggtgagcgaagagagctaccgcgtcttgagcaagatgggctatgacttcgactacagagggaccgtgaatgtcaaggggaaaggccagatgaagacctacctgtacccaaagtgcacggatcacagggtcatcccacagcaccagctgtccatctccccagacatccgcgtccaggtggatggcagcatcggacggtctcccacagacgagattgccaacctggtgccttctgtccagtatgtggacaagacatctctgggttctgacagcagcacgcaggccaaggatgcccacctgtcccccaagagaccgtggaaggagcccgtcaaagccgaagaaaggggtcgatttggcaaagccatagagaaagacgactgtgacgaaacaggaatagaagaagccaacgaactcaccaagctcaacgtttcaaagagtgtgtgaggcggcgcccacccgctgcccgaggtgctctgtttgtcgaaacacagtaatatttgtatttggctgttgtgctttccaagcgccacagttgccctccccggacgtggtgttatgtggtcatttcagccctaacttctgtgtggatcacagttattcagggttcattttcatccattcttccctttcgctcccttccctggaaaccccgctgcctctgggtcatccgttcagcacgtggtggagaacaagtgccttcagggctggcctcggcctcgagtctcgggacagaggccgccagtggagatcatggctttgggtattatttgacttttagaacaaaagctgtggttaagatctcatttttattgctttttcccacgtcccacgagacactattttcggttctctggctaataccctgtttttgagtttattttgtttctgtctatgtcacagtgttcctctacgacccgacctctctatgtaagcacacatgcgcacacacacttgcattcatgaatctgatataaagtgccagtaatccgccaagagggggtgcgaagggggcatgtcacgacagctccgccaccccccattgcccacccgcactttcccgagcaccgcgccccgtgggctgtgggtgagccgcgctccctgcactgagcgggtttaggggctcgcccacatgcatgcaggccaagacagcaaatgccagccgggcacgacgcccgtgtgcccaggcctcgggggtctcagagccgcctctcacccccgaccctccacccaggggtctccccatcgggagtggaggtgttggtcctggaagctgactcatcggagagggaaataccaaataaacatccgaggttgc

SEQ ID NO: 8803 - protein, 1353 aa, Homo sapiens; identical to SEQ ID NO: 1326

SEQ ID NO: 8804 - DNA, 1556 bp, Homo sapiens
ccggcccacagatacttgcttatctcaagtggggagcttctccatgtgcatcgaagtgctctttttgctctataccgtcatgcacttacctttgtacctgagtttgtgtctgggggtggcctactctgtccttttcgagacctttggctaccatttccgggatgaagcctgcttcccctcgcccggagccggggccctgcactgggagctgctgagcagggggctgctccacggctgcatccacgccatcggggtccacctgttcgtcatgtcccaggtgaggtccaggagcaccttcctcaaggtggggcaatccattatgcacgggaaggacctggaagtggaaaaagccctcaaagagaggatgattcattccgtgatgccaagaatcatagccgatgacttaatgaagcagggagatgaggagagtgagaattctgtcaagaggcatgccacctcgagccccaagaacaggaagaaaaagtcttccatccaaaaagctcctatagccttccgcccttttaagatgcagcagatcgaagaagtcagtattttatttgcagatatcgtgggcttcaccaagatgagtgccaacaagtctgcccacgccctggtgggtctcctgaacgatctgttcggtcgcttcgaccgcctgtgtgaggagaccaagtgtgagaaaatcagcaccctgggagactgttactactgcgtggcgggctgtcccgagccccgggccgaccatgcctactgctgcatcgagatgggcctgggcatgatcaaggccatcgagcagttctgccaggagaagaaggagatggtgaacatgagagtcggggtgcacacgggcaccgtcctttgcggcatcctgggcatgaggaggtttaaatttgacgtgtggtccaacgatgtgaacctggccaatctcatggagcagctgggagtggccggcaaagttcacatttctgaggccaccgcaaaatacttagatgaccggtacgaaatggaagatgggaaagttattgaacggctgggccagagcgtggttgctgaccagttgaaaggtttgaagacatacctgatatcgggtcagagagccaaggagtctcgctgcagctgtgcagaggccttgctttctggctttgaggtcattgacggctcacaggtgtcctcaggccctaggggacaggggacagcgtcatcagggaatgtcagtgacttggcgcagactgtcaaaacctttgataaccttaagacctgcccttcgtgcggaatcacatttgctcccaaatctgaagccggcgccgagggaggagcacctcaaaacggctgccaagacgagcataaaaacagcaccaaggtaacaagctcatggctgttgttcctgtcagttcctctcctggcgcatccacccaaggcttctggaggacctaatcccaaaactcagaacgggctcctcagccctccccaagaggagaagctcaccaacagtcagacttctctgtgtgagatcttgcaggagaagggaaggtgggcaggggtgagcctggaccagtcgg

SEQ ID NO: 8805 - protein, 503 aa, Homo sapiens
MCIEVLFLLYTVMHLPLYLSLCLGVAYSVLFETFGYHFRDEACFPSPGAGALHWELLSRGLLHGCIHAIGVHLFVMSQVRSRSTFLKVGQSIMHGKDLEVEKALKERMIHSVMPRIIADDLMKQGDEESENSVKRHATSSPKNRKKKSSIQKAPIAFRPFKMQQIEEVSILFADIVGFTKMSANKSAHALVGLLNDLFGRFDRLCEETKCEKISTLGDCYYCVAGCPEPRADHAYCCIEMGLGMIKAIEQFCQEKKEMVNMRVGVHTGTVLCGILGMRRFKFDVWSNDVNLANLMEQLGVAGKVHISEATAKYLDDRYEMEDGKVIERLGQSVVADQLKGLKTYLISGQRAKESRCSCAEALLSGFEVIDGSQVSSGPRGQGTASSGNVSDLAQTVKTFDNLKTCPSCGITFAPKSEAGAEGGAPQNGCQDEHKNSTKVTSSWLLFLSVPLLAHPPKASGGPNPKTQNGLLSPPQEEKLTNSQTSLCEILQEKGRWAGVSLDQ

SEQ ID NO: 8806 - DNA, 6664 bp, Homo sapiens
gggattcgtgcgtgtggctcaccggcggctctccagcgcctggacagggctgacccccagcaggcgctctgtgaaggtgtgcagagtgggcgaaggtgcatgcgcgggccgtggggcggggacaggtggaggagccagtcagacccaagtgcagcgggacgagggcgaggttaatctgagcaagaaaagcgatctccgctgtcccgggtcctggagctctctcggcccggcaggtttcgctcccgcccctccggccttccacagctgtcctggccgcagggtgttcaaggcgggacacaccaggctagagatccgcgatcgggccccgcctcaggctctgtgcacacccctgcctggtgacctccattggtgctccagcgtgaacatggtgcaaagataccagtctcctgtccgagtctacaagtacccgtttgagctggtcatggcggcctacgagaagcgtttccccacgtgcccacagatcccagtcttcctgggcagcgaggtcttgcgcgagtcccgcagcccggacggggctgtgcacgtggtggagcggagctgccggctgcgcgtggacgccccgcggctgctgcggaagatcgcaggtgttgagcacgtggtcttcgtgcagacaaacatcttgaactggaaggagaggacgctcctcatcgaagcgcacaatgagaccttcgccaaccgcgtggtggtgaacgagcactgcagctacacggtccaccctgagaatgaagactggacttgcttcgagcagtctgcctcactggacattcggtctttctttggctttgaaaatgccttggagaagatcgccatgaagcagtacaccgccaacgtcaagagggggaaggaggtgattgagcattacctgaatgagctcatctcccagggtacctcgcacattccgcgctggacgcctgccccagtccgtgaggaggatgcccgcaaccaggctggaccgagggaccccagctccctggaggcccacgggccccgtagcaccctggggcccgctctggaggcggtcagtatggacggggacaagctggatgcggactacattgagaggtgcctgggccacctcacgcccatgcaggagagctgcctgatccagcttcggcactggttacaggagacccacaaaggcaagattcccaaagatgagcacatccttcggttcctgcgggctcatgacttccacctggacaaggcccgggaaatgctgcgccagtccttgagctggcgcaagcagcaccaggtggatctcctccttcagacctggcaaccccctgccctgctggaggagttctatgcagggggctggcattaccaggacatagatggccgccccctctacatcctccgcctgggccagatggacaccaaaggcttgatgaaggccgtgggggaggaggcgctgctgcggcatgttctctccgtcaacgaggaaggacagaagcggtgtgaggggagcacaaggcagctgggccgtcccatcagctcctggacctgcctgctagacctggagggactcaacatgcggcacctgtggcggccgggggtgaaggccctgctgcggatgattgaggtggttgaggacaattacccagagaccctgggtcggctgctcatcgtgcgagccccccgagtcttccccgtgctctggacactgatcagccccttcatcaatgagaacaccaggcggaagttcctcatctacagtggcagcaactaccagggacccggaggccttgtggactatctggatagagaagtgatccctgacttccttgggggagagagtgtgtgtaatgtccccgaaggagggctggtccccaagtccctctacatgacagaagaggagcaggagcacacggaccagctgtggcagtggagtgagacctaccattcagccagcgtgctccgcggagccccccacgaggtggccgtggagatcctggaaggagagtcggtcatcacctgggactttgacatcctgcgaggggacgtggtgttcagcctgtaccacaccaagcaggcgcccaggctgggcgcccgggaaccggggaccagggccagcgggcagctgatcgacaaaggctgggtcctgggcagggattacagccgtgtggaggctccccttgtctgccgggagggggagagcatccagggctcccatgtgacccggtggcccggcgtctacctgctccagtggcaaatgcacagcccccccagcagcgtggcctgcagcctcccgggtgtggacgatgtcctgacggctctgcacagccccgggcccaagtgcaaacttctctactactgtgaggtgctcgcctctgaggacttcaggggctccatgtccagcctggaatcctgcaccagcggcttctcccagctcagcgccgccacctcgtcctcctcctccggccagtctcatagcagctccctggtctccagatagccgggcccagtgtttcagggccgcccgctcgcctccagtgtccagaaatgtccagaatgagaagccagctaactgcagggcctgggaccatgtgggctggagccccaggcctagatgctgcccaagttggggtgtctggagcggatggcaaggatccagaactggcctgtgggtggtgtcagggctcttgaaattgcaaggacagaaccatctccttccggcttcgtgtaaggaagaccaagccaaggccaaggtgtctaccataccacacctttgggacatccgggcttagcgacgtcagccaggcccatctcctctctgtccacctcttgctctgctttcgccatgcaggggaccatcactatcaggtgcccttctcctccctgcagcttgcctgcataagagagcctcttcctcccaaaggctccagcccacttcccagagctgagtcttagcctggaagggggagcgattgccaggtcaattcctgaaccaatcacagttgccaggcacactggagaatgctgattggccagcagggtcatgcccaatctggaccaatcaccgtgatccagggttgcagtgaggtgcagtgattggccagcctggatcacatgcacatctctggaaccaaccacctgctctcaaaagcactagtgggtgcctcgaggagtactggggtcccccctaagaagaaggaggaaggatgctggggaggcagaaatgaagggtgtttaccttggcatctgattgcataacgttctgttatgcagtatcaagatgtgcttggtgagcagttaagtgagttacaggcgctgctctttgtggggaacagcacatcctgaagtgaaaatccatgttccctgcacttggccagcatggcctaagcctgaccatccctgattggagagggtgggagagccctgggtttctgctaagttccaggcagtgatggggtgactgaggctgtctgtataccccactggagatgcctttctctcctagggaactgtttaattatgactgtttttggttgtaagccacagagacccatgcccaggtgcttcaacacaaaagcatgatcattcatgggtgcatagaactggccagtccaggagggcttgcttcaggtaaggctagatccagggtctcaacatggagtctcgattccccccgcgagtggaggctgctgtgtttgccctggggcagatatgactctggaactaggttcaatattgacatgagttcccctagttactacacaggagcgtcttgggtctccttggggcctgaggacatttctcctttcctttcctggactccccaaaaggcagccagtcaggggtcaccaacttgaagcctgatctggcctgcttttagtgttgcttttttgcctttagaatggtttaaaaattgaggcatttcgcatcgaaatcaggatttctggcttcccttaggcatttgggagcaccagcagaatggggtcactattgttgcatgaagacaacacctctgcacccctggatgtggccacgccagtccctaccccattgacttgcgcccagcccacattacacatcctcatgacctgcgtggcaggagtctcactgacatggctctgtcagcagtggctggtacccttgtctcctggccttgcttagagttggggctcatctctgctgcagtaactgagccaaggggtggttttgtggccacaagaatcatctttatgcaggctcagcaatgcagggccaggaaacttatatctacgccagcctcaaccccaaacccaaggaagagagaaagtgtcatcttttcagatacatccttcttcctgctgggagagagccttgcccaccttcctgttggctctctgtccgcttctcaggtatctgaacaaaatagattgctttgcactctgcgtcaaggtgtgtgtgcacatgtgtgcataagagaccgactgattggaaggagacgttctcaaaactaattgctcccatatcaccaggcatttattgctgagagcaacttgcaatattttcaactatctttaagtgaatttctagcttttctcttaaaaactaggtgttatcctacaagtatgctgggataagctgccctggcagtctttatacatttattgtctagccccagagaaggacacagaagccttttacggaaggaagctggaactgcctgttccagaggcgggtggggggaggggagtctgctatcagctgtccacccttaacagtgggggtgaggaacctcaggccctttcagttctgctcttgagagtgctctctccctagggaaaaccagcccaaactggcttaagcaacaaagcaaattccctgggtcctgtactagggatggctgaaggtgggtgctgcttcagatatggctggatccaggagcttaatgtcctcaggcctctcaactgcacccaggcctcttgactctgcatctctttgcatgctgacctcattctttcttccacctggcgggaaagatggctgccagcagccccaagcctataatttcaggattcacactctaagagatgcttttccatctcaaatctcatggaaggctctgattggcccagctcgagtcacatgcttattcctgtgggccacactggcaaggaactagggtcccgtgattgacattccctgcagaagccgcagcaggattggggagggccattcccccaatggacaagagaagctggaccacagaaccagcaggtatccatggtggcatctgctacggccggctctcctcccatgtggaggtctcggggacccacgtggaagcattatcaaggtcattcttcttgccttcgggaggactggaattaaaaataatccaaggaagggattgccaagcttttggcttttgaatttcccctgagccacaaaggctggaagtgccttggcttgggcttcttgcatcattagttcattaatccattgtgaccaggacagaagcaacccacaagcagcattactgttggtgtttgggcacctgggccttgaatttaggccaggactcaaaccccagccttcctttcactagctgtgtaaccttgaccaggtgacttaacctctctgtgcctcagtttcctcatctgtaaagtgaggatagcagtgcctacctcaataggttgtagtgggacgaaatgagggagtagctgtaaagctttcagcacagctcccagaacacagaaagcgctccattaatgtcagtggtcattctgattacttaatgcttcgcatccaaagactcgttttcttcctgaggtcgcctatccctgtttttcgttattgcacccagagaaaagtaggtgtcaagaattattgccctctgagttgggtgtgcagtctttctcttttagaaactgcttgtgtgggcggggcgtggtggctcatgcctataatcccaacactttgggaggctgaggccggctgatcgcttgagtgcaggagttcaagaccagcctgggcaacatagtgagaccctgtctctacaaaaaattaaaaaatgagccaggcgtggtggtgcgtgcctatagtctcagctgctcgggaggctgaggcagaaggattgcttggaggtcaaggctggagtgagccatgatctcacccctgtacttcatcctgggtgacaaagcaagaccctgtctcaaaaaaagaagaaagaagctgcttgtgttttctgggtaagtccacccatctgagggagtgtattctgagtggtatttcccttggcagttagaaaatgttttttcccagaggttgaagtatggagagtttgagactctttttttctaccctgcactctctggaattccccctccctgctgtaaaatttattgtccaatgagaatagtataattgttttcaacaaagtctctttgagccagtgaaacacgatgggtttttttgtttgcctgatcacttgctccaaccagcagcattaaatgttttccatttggataaacttgcatcgtcagcttcctaaaaccctggaggtttcccgtgggctcgttcaagaactttccagctgttgtttaaaagactttagagctagcttgttcagcctgtggcctgcaggctgcacgcggccccggactgctttgaatgtgctccaacacgagttcgtaaactttcttaaaatactgag

SEQ ID NO: 8807 - protein, 696 aa, Homo sapiens
MVQRYQSPVRVYKYPFELVMAAYEKRFPTCPQIPVFLGSEVLRESRSPDGAVHVVERSCRLRVDAPRLLRKIAGVEHVVFVQTNILNWKERTLLIEAHNETFANRVVVNEHCSYTVHPENEDWTCFEQSASLDIRSFFGFENALEKIAMKQYTANVKRGKEVIEHYLNELISQGTSHIPRWTPAPVREEDARNQAGPRDPSSLEAHGPRSTLGPALEAVSMDGDKLDADYIERCLGHLTPMQESCLIQLRHWLQETHKGKIPKDEHILRFLRAHDFHLDKAREMLRQSLSWRKQHQVDLLLQTWQPPALLEEFYAGGWHYQDIDGRPLYILRLGQMDTKGLMKAVGEEALLRHVLSVNEEGQKRCEGSTRQLGRPISSWTCLLDLEGLNMRHLWRPGVKALLRMIEVVEDNYPETLGRLLIVRAPRVFPVLWTLISPFINENTRRKFLIYSGSNYQGPGGLVDYLDREVIPDFLGGESVCNVPEGGLVPKSLYMTEEEQEHTDQLWQWSETYHSASVLRGAPHEVAVEILEGESVITWDFDILRGDVVFSLYHTKQAPRLGAREPGTRASGQLIDKGWVLGRDYSRVEAPLVCREGESIQGSHVTRWPGVYLLQWQMHSPPSSVACSLPGVDDVLTALHSPGPKCKLLYYCEVLASEDFRGSMSSLESCTSGFSQLSAATSSSSSGQSHSSSLVSR

SEQ ID NO: 8808 - DNA, 3409 bp, Homo sapiens
gccccctcaccttcccacaggatgagggttctgagatctttgccgattccaagaactcatcatcttcagctttaggcctcacctttcctgaaccctagataggatacaaggaaatggtcacaaagtgagcagggagaagatcttggttccaatcccagcttagccatcgatgacttgtctacccacctatgccgtagacaagtccctcggcctccctgagcctcatttctagcccctgtaaagagagtgttttggtttgctctggttgcataaccagcacaaatttagcaacactcagcagggaatgttcttttgtttgtttgtttctttgagacagggtcttactccgtcgcccaggccagagtgcagtggtgcaatctcagctcactgcaacctctacctctcaggttcaggtgatcctcccaccttagcctcccaggtaactgggattacgggcacccgccaccacacccagctaatttttgtatttttagtagagatggggtttcatcatgttggccaggctggtctcgaactcctgacctcaggtgatccatctacctcggccttccaaagtgctggaattaacaggcgtgagtcaccgcacctggctaatttttgtatttttagtagacacagggtttcatcatgttggccaggctggtcaacttggaatgttctatgttcagggtgtcccatggacaaaaccaagatgctggttaggcagggctcttctcttatctggaaagaatcctcttgtttaggttgttggaagaatccccgtcgcctcctcagttgtgactgaggtcttggtttccctgctggccgccatctggggcctcagctccttcaagctgcccaggttccttcccatgtgtgtcctctcccccagttgtccggccaccctctcatccccctcgtatttcaaatctcacttcctattctgtcaccagccagagaaggctctctgtgttgaacactcctgtgattccagtggctgcacccagatcctccgggccgtttcccctcccttaaggattcctatgccatgtaacagcacaggcatgggtgtgatctcacgtgttcacagcttccgggggctaggatgagacatgcttgggggcgggggccacttagaaatgtgcctgcactgtgggcgtgatgctctgcactgtggaaggaaaaggagttaaatgagaaatgatggtgggcgctgagcctgagcagcgccgctttgtgccgcagcatcaacctgtgggaaatggcggagttcctgctgaaacaggacgtggtcaacgccatcaacctggatgggggtggctctgccacctttgtgctcaacgggaccttggccagttacccgtcagatcactggtaagcacgtgagagccgccttcgtgagggctgaagtccaggtctgccccagcctgtctcattcagccaatattgagtgcctgctatgtgccaggccccgggggttcaagagagcagaaattgctgcagtccctcccccaggatgccagtactacccaggcctaggagcagggtcagttggtcagcaaagacctccctgaggatgacagaataagaactgagatctgaaggaggtggtagctgggtgggggtgggagagccttccgggcagagggcaccacatgtgaaaggcccagggctgggagggattgtagggagcggaggaacctataaaagactggagagggctgggcacaggggctcacgcctggaatcccagtgctttgggaggccgaggtgggaggttcgcttgggcccaggagtttaagaccagtgtgggcaacatagaccctgtctttatgaaaaaataaaaaaaaattaggcaggcgtgatggtgcacaccttacggttacagctgctcaggaggctcgggtggaaggatcgcaatacctcatctcaaaaatagatagacgccatcttgtaggtaggtaggtagacaggtgagaatggagagaggggtggttgggggcagcctggagggagttgaggggccgtctgggggtgtcctctcctcacacatcacatccctctacagccaggacaacatgtggcgctgtccccgccaagtgtccaccgtggtgtgtgtgcacgaaccccgctgccagccgcctgactgccacggccacgggacctgcgtggacgggcactgccaatgcaccgggcacttctggcggggtcccggctgtgatgagctggactgtggcccctctaactgcagccagcacggactgtgcacggagaccggctgccgctgtgatgccggatggaccgggtccaactgcagtgaagagtgtccccttggctggcatgggccgggctgccagaggccttgtaagtgtgagcaccattgtccctgtgaccccaagactggcaactgcagcgtctccagaggtacctatccctccaaggggaggggtatgggcagacgctcctgctccggccccttcagcctgtctctggtatgttacagtaaagcagtgtctccagccacctgaagccaccctgagggcgggagaactctcctttttcaccaggaccgcctggctagccctcaccctggcgctggccttcctcctgctgatcagcactgcagcaaacctgtccttgctcctgtccagagcagagaggaaccggcgcctgcatggggactatgcataccacccgctgcaggagatgaacggggagcctctggccgcagagaaggagcagccagggggcgcccacaaccccttcaaggactgaagcctcaagctgcccggggtggcacgtcgcgaaagcttgtttccccacggtctggcttctgcaggggaaatttcaaggccactggcgtggaccatctgggtgtcctcagcccctgtggggcagccaagttcctgatagcacttgtgcctcagcccctcacctggccacctgccagggcacctgcaaccctagcaataccatgctcgctggagaggctcagctgcctgcttctggcctgcctgtgtctgctgccgagaagcccgtgcccccgggagggctgccgcactgccaaagagtctccctcctcctggggaaggggctgccaacgaaccagactcagtgaccacgtcatgacagaacagcacatcctggccagcacccctggctggagtgggttaaagggacgagtctgccttcctggctgtgacacgggaccccttttctacagacctcatcactggatttgccaactagaattcgatttcctgtcataggaagctccttggaagaagggatggggggatgagatcatgtttacagacctgttttgtcatcctgctgccaagaagttttttaatcacttgaataaattgatataataaaaggagccaccaggtggtgtgtggattctgaa

SEQ ID NO: 8809 - protein, 184 aa, Homo sapiens
MSWTVAPLTAASTDCARRPAAAVMPDGPGPTAVKSVPLAGMGRAARGLVSVSTIVPVTPRLATAASPEVPIPPRGGVWADAPAPAPSACLWYVTVKQCLQPPEATLRAGELSFFTRTAWLALTLALAFLLLISTAANLSLLLSRAERNRRLHGDYAYHPLQEMNGEPLAAEKEQPGGAHNPFKD

SEQ ID NO: 8810 - DNA, 1922 bp, Homo sapiens
acatgacccgaggccccggtccaatatggcgacctccacgggtcgctggcttctcctccggcttgcactattcggcttcctctgggaagcgtccggcggcctcgactcggggtgagtgcagctccctgggccagcctggttcggggggtcccccctgtcctccgagctcacgaggacagccccctgagctcacggccgcccgtccccgcagggcctcccgcgacgacgacttgctactgccctatccacgcgcgcgcgcgcgcctcccccgggactgcacacgggtgcgcgccggcaaccgcgagcacgagagttggcctccgcctcccgcgactcccggcgccggcggtctggccgtgcgcaccttcgtgtcgcacttcagggaccgcgcggtggccggccacctgacgcgggccgttgagcccctgcgcaccttctcggtgctggagcccggtggacccggcggctgcgcggcgagacgacgcgccaccgtggaggagacggcgcgggcggccgactgccgtgtcgcccagaacggcggcttcttccgcatgaactcgggcgagtgcctggggaacgtggtgagcgacgagcggcgggtgagcagctccggggggctgcagaacgcgcagttcgggatccgccgcgacgggaccctggtcaccggcatcaacctgtgggaaatggcggagttcctgctgaaacaggacgtggtcaacgccatcaacctggatgggggtggctctgccacctttgtgctcaacgggaccttggccagttacccgtcagatcactgccaggacaacatgtggcgctgtccccgccaagtgtccaccgtggtgtgtgtgcacgaaccccgctgccagccgcctgactgccacggccacgggacctgcgtggacgggcactgccaatgcaccgggcacttctggcggggtcccggctgtgatgagctggactgtggcccctctaactgcagccagcacggactgtgcacggagaccggctgccgctgtgatgccggatggaccgggtccaactgcagtgaagagtgtccccttggctggcatgggccgggctgccagaggccttgtaagtgtgagcaccattgtccctgtgaccccaagactggcaactgcagcgtctccagagtaaagcagtgtctccagccacctgaagccaccctgagggcgggagaactctcctttttcaccaggagatgaacggggagcctctggccgcagagaaggagcagccagggggcgcccacaaccccttcaaggactgaagcctcaagctgcccggggtggcacgtcgcgaaagcttgtttccccacggtctggcttctgcaggggaaatttcaaggccactggcgtggaccatctgggtgtcctcagcccctgtggggcagccaagttcctgatagcacttgtgcctcagcccctcacctggccacctgccagggcacctgcaaccctagcaataccatgctcgctggagaggctcagctgcctgcttctggcctgcctgtgtctgctgccgagaagcccgtgcccccgggagggctgccgcactgccaaagagtctccctcctcctggggaaggggctgccaacgaaccagactcagtgaccacgtcatgacagaacagcacatcctggccagcacccctggctggagtgggttaaagggacgagtctgccttcctggctgtgacacgggaccccttttctacagacctcatcactggatttgccaactagaattcgatttcctgtcataggaagctccttggaagaagggatggggggatgagatcatgtttacagacctgttttgtcatcctgctgccaagaagttttttaatcacttgaataaattgatataataaaaggagccaccaggtggtgtgtggattctgaa

SEQ ID NO: 8811 - protein, 406 aa, Homo sapiens [sequence omitted]

SEQ ID NO: 8812 - DNA, 2208 bp, Homo sapiens
cacatgacccgaggccccggtccaatatggcgacctccacgggtcgctggcttctcctccggcttgcactattcggcttcctctgggaagcgtccggcggcctcgactcgggggcctcccgcgacgacgacttgctactgccctatccacgcgcgcgcgcgcgcctcccccgggactgcacacgggtgcgcgccggcaaccgcgagcacgagagttggcctccgcctcccgcgactcccggcgccggcggtctggccgtgcgcaccttcgtgtcgcacttcagggaccgcgcggtggccggccacctgacgcgggccgttgagcccctgcgcaccttctcggtgctggagcccggtggacccggcggctgcgcggcgagacgacgcgccaccgtggaggagacggcgcgggcggccgactgccgtgtcgcccagaacggcggcttcttccgcatgaactcgggcgagtgcctggggaacgtggtgagcgacgagcggcgggtgagcagctccggggggctgcagaacgcgcagttcgggatccgccgcgacgggaccctggtcaccgggtacctgtctgaggaggaggtgctggacactgagaacccatttgtgcagctgctgagtggggtcgtgtggctgattcgtaatggaagcatctacatcaacgagagccaagccacagagtgtgacgagacacaggagacaggttcctttagcaaatttgtgaatgtgatatcagccaggacggccattggccacgaccggaaagggcagctggtgctctttcatgcagacggccaaacggagcagcgtggcatcaacctgtgggaaatggcggagttcctgctgaaacaggacgtggtcaacgccatcaacctggatgggggtggctctgccacctttgtgctcaacgggaccttggccagttacccgtcagatcactgccaggacaacatgtggcgctgtccccgccaagtgtccaccgtggtgtgtgtgcacgaaccccgctgccagccgcctgactgccacggccacgggacctgcgtggacgggcactgccaatgcaccgggcacttctggcggggtcccggctgtgatgagctggactgtggcccctctaactgcagccagcacggactgtgcacggagaccggctgccgctgtgatgccggatggaccgggtccaactgcagtgaagagtgtccccttggctggcatgggccgggctgccagaggccttgtaagtgtgagcaccattgtccctgtgaccccaagactggcaactgcagcgtctccagagtaaagcagtgtctccagccacctgaagccaccctgagggcgggagaactctcctttttcaccaggaccgcctggctagccctcaccctggcgctggccttcctcctgctgatcagcactgcagcaaacctgtccttgctcctgtccagagcagagaggaaccggcgcctgcatggggactatgcataccacccgctgcaggagatgaacggggagcctctggccgcagagaaggagcagccagggggcgcccacaaccccttcaaggactgaagcctcaagctgcccggggtggcacgtcgcgaaagcttgtttccccacggtctggcttctgcaggggaaatttcaaggccactggcgtggaccatctgggtgtcctcagcccctgtggggcagccaagttcctgatagcacttgtgcctcagcccctcacctggccacctgccagggcacctgcaaccctagcaataccatgctcgctggagaggctcagctgcctgcttctggcctgcctgtgtctgctgccgagaagcccgtgcccccgggagggctgccgcactgccaaagagtctccctcctcctggggaaggggctgccaacgaaccagactcagtgaccacgtcatgacagaacagcacatcctggccagcacccctggctggagtgggttaaagggacgagtctgccttcctggctgtgacacgggaccccttttctacagacctcatcactggatttgccaactagaattcgatttcctgtcataggaagctccttggaagaagggatggggggatgagatcatgtttacagacctgttttgtcatcctgctgccaagaagttttttaatcacttgaataaattgatataataaaaggagccaccaggtggtgtgtggattctgaa

SEQ ID NO: 8813 - protein, 515 aa, Homo sapiens; identical to SEQ ID NO: 1328

SEQ ID NO: 8814 - DNA, 2310 bp, Homo sapiens
cacatgacccgaggccccggtccaatatggcgacctccacgggtcgctggcttctcctccggcttgcactattcggcttcctctgggaagcgtccggcggcctcgactcgggggcctcccgcgacgacgacttgctactgccctatccacgcgcgcgcgcgcgcctcccccgggactgcacacgggtgcgcgccggcaaccgcgagcacgagagttggcctccgcctcccgcgactcccggcgccggcggtctggccgtgcgcaccttcgtgtcgcacttcagggaccgcgcggtggccggccacctgacgcgggccgttgagcccctgcgcaccttctcggtgctggagcccggtggacccggcggctgcgcggcgagacgacgcgccaccgtggaggagacggcgcgggcggccgactgccgtgtcgcccagaacggcggcttcttccgcatgaactcgggcgagtgcctggggaacgtggtgagcgacgagcggcgggtgagcagctccggggggctgcagaacgcgcagttcgggatccgccgcgacgggaccctggtcaccgggtacctgtctgaggaggaggtgctggacactgagaacccatttgtgcagctgctgagtggggtcgtgtggctgattcgtaatggaagcatctacatcaacgagagccaagccacagagtgtgacgagacacaggagacaggttcctttagcaaatttgtgaatgtgatatcagccaggacggccattggccacgaccggaaagggcagctggtgctctttcatgcagacggccaaacggagcagcgtggcatcaacctgtgggaaatggcggagttcctgctgaaacaggacgtggtcaacgccatcaacctggatgggggtggctctgccacctttgtgctcaacgggaccttggccagttacccgtcagatcactggcaggcgtgatggtgcacaccttacggttacagctgctcaggaggctcgggtggaaggatcgcaatacctcatctcaaaaatagatagacgccatcttgtagccaggacaacatgtggcgctgtccccgccaagtgtccaccgtggtgtgtgtgcacgaaccccgctgccagccgcctgactgccacggccacgggacctgcgtggacgggcactgccaatgcaccgggcacttctggcggggtcccggctgtgatgagctggactgtggcccctctaactgcagccagcacggactgtgcacggagaccggctgccgctgtgatgccggatggaccgggtccaactgcagtgaagagtgtccccttggctggcatgggccgggctgccagaggccttgtaagtgtgagcaccattgtccctgtgaccccaagactggcaactgcagcgtctccagagtaaagcagtgtctccagccacctgaagccaccctgagggcgggagaactctcctttttcaccaggaccgcctggctagccctcaccctggcgctggccttcctcctgctgatcagcactgcagcaaacctgtccttgctcctgtccagagcagagaggaaccggcgcctgcatggggactatgcataccacccgctgcaggagatgaacggggagcctctggccgcagagaaggagcagccagggggcgcccacaaccccttcaaggactgaagcctcaagctgcccggggtggcacgtcgcgaaagcttgtttccccacggtctggcttctgcaggggaaatttcaaggccactggcgtggaccatctgggtgtcctcagcccctgtggggcagccaagttcctgatagcacttgtgcctcagcccctcacctggccacctgccagggcacctgcaaccctagcaataccatgctcgctggagaggctcagctgcctgcttctggcctgcctgtgtctgctgccgagaagcccgtgcccccgggagggctgccgcactgccaaagagtctccctcctcctggggaaggggctgccaacgaaccagactcagtgaccacgtcatgacagaacagcacatcctggccagcacccctggctggagtgggttaaagggacgagtctgccttcctggctgtgacacgggaccccttttctacagacctcatcactggatttgccaactagaattcgatttcctgtcataggaagctccttggaagaagggatggggggatgagatcatgtttacagacctgttttgtcatcctgctgccaagaagttttttaatcacttgaataaattgatataataaaaggagccaccaggtggtgtgtggattctgaa

SEQ ID NO: 8815 - protein, 309 aa, Homo sapiens
MATSTGRWLLLRLALFGFLWEASGGLDSGASRDDDLLLPYPRARARLPRDCTRVRAGNREHESWPPPPATPGAGGLAVRTFVSHFRDRAVAGHLTRAVEPLRTFSVLEPGGPGGCAARRRATVEETARAADCRVAQNGGFFRMNSGECLGNVVSDERRVSSSGGLQNAQFGIRRDGTLVTGYLSEEEVLDTENPFVQLLSGVVWLIRNGSIYINESQATECDETQETGSFSKFVNVISARTAIGHDRKGQLVLFHADGQTEQRGINLWEMAEFLLKQDVVNAINLDGGGSATFVLNGTLASYPSDHWQA

SEQ ID NO: 8816 - DNA, 268 bp, Homo sapiens
cacctttagcccggctctgtacacatgggcaggggcaggtatcctgtcctgtcgagaaaggctctgacactggaggccccaacctttctcctccctccccttttctacagacctcatcactggatttgccaactagaattcgatttcctgtcataggaagctccttggaagaagggatggggggatgagatcatgtttacagacctgttttgtcatcctgctgccaagaagttttttaatcacttgaataaattgatataataaaagg

SEQ ID NO: 8817 - protein, 43 aa, Homo sapiens
MGRGRYPVLSRKALTLEAPTFLLPPLFYRPHHWICQLEFDFLS

SEQ ID NO: 8818 - DNA, 1293 bp, Homo sapiens
acatgacccgaggccccggtccaatatggcgacctccacgggtcgctggcttctcctccggcttgcactattcggcttcctctgggaagcgtccggcggcctcgactcggggtgagtgcagctccctgggccagcctggttcggggggtcccccctgtcctccgagctcacgaggacagccccctgagctcacggccgcccgtccccgcagggcctcccgcgacgacgacttgctactgccctatccacgcgcgcgcgcgcgcctcccccgggactgcacacgggtgcgcgccggcaaccgcgagcacgagagttggcctccgcctcccgcgactcccggcgccggcggtctggccgtgcgcaccttcgtgtcgcacttcagggaccgcgcggtggccggccacctgacgcgggccgttgagcccctgcgcaccttctcggtgctggagcccggtggacccggcggctgcgcggcgagacgacgcgccaccgtggaggagacggcgcgggcggccgactgccgtgtcgcccagaacggcggcttcttccgcatgaactcgggcgagtgcctggggaacgtggtgagcgacgagcggcgggtgagcagctccggggggctgcagaacgcgcagttcgggatccgccgcgacgggaccctggtcaccgggtacctgtctgaggaggaggtgctggacactgagaacccatttgtgcagctgctgagtggggtcgtgtggctgattcgtaatggaagcatctacatcaacgagagccaagccacagagtgtgacgagacacaggagacaggttggatggggaggctgttggcaacaaccctctcgagaaccaggaccagtgggctgggcggagctgttcttaagtctttcaacaagtattgagcagctactttgtgcccagcactattctgggtactggggattcatggggaggaagataggcttatattgaatatataggacaaaaaatagttatagaatatgctgaaaagaattgataagtgctcagaaacaaaaataaagttaggggaaaggggagagatggggaccggagctgtgggtacaggaagagaaaagtgaagagaaaaaaatcttcatggacctgcaacatcggcgtggcccaggagcttgtttcaaagccccacaccctcagacctgcagaatcagaggcaaggcccaagagtctatgttttaacgggcctccatggtgactctgaccgacactcaaggttgagaaccactgggatgcagaatactgggatggggacaggatacc

SEQ ID NO: 8819 - protein, 298 aa, Homo sapiens [sequence omitted]

SEQ ID NO: 8820 - DNA, 1157 bp, Homo sapiens
aaaccactgctaaacatgaataacagttctacgagagttctttatgctctccttgcaacttcctgtaggtttgagattacctggagataaaaagttaacatcaccagcaccgcccgccagcccgccagccgaaaagagcgcagggcctcccgcgacgacgacttgctactgccctatccacgcgcgcgcgcgcgcctcccccgggactgcacacgggtgcgcgccggcaaccgcgagcacgagagttggcctccgcctcccgcgactcccggcgccggcggtctggccgtgcgcaccttcgtgtcgcacttcagggaccgcgcggtggccggccacctgacgcgggccgttgagcccctgcgcaccttctcggtgctggagcccggtggacccggcggctgcgcggcgagacgacgcgccaccgtggaggagacggcgcgggcggccgactgccgtgtcgcccagaacggcggcttcttccgcatgaactcgggcgagtgcctggggaacgtggtgagcgacgagcggcgggtacctgtctgaggaggaggtgctggacactgagaacccatttgtgcagctgctgagtggggtcgtgtggctgattcgtaatggaagcatctacatcaacgagagccaagccacagagtgtgacgagacacaggagacaggttggatggggaggctgttggcaacaaccctctcgagaaccaggaccagtgggctgggcggagctgttcttaagtctttcaacaagtattgagcagctactttgtgcccagcactattctgggtactggggattcatggggaggaagataggcttatattgaatatataggacaaaaaatagttatagaatatgctgaaaagaattgataagtgctcagaaacaaaaataaagttaggggaaaggggagagatggggaccggagctgtgggtacaggaagagaaaagtgaagagaaaaaaatcttcatggacctgcaacatcggcgtggcccaggagcttgtttcaaagccccacaccctcagacctgcagaatcagaggcaaggcccaagagtctatgttttaacgggcctccatggtgactctgaccgacactcaaggttgagaaccactgggatgcagaatactgggatggggacaggatacc

SEQ ID NO: 8821 - protein, 98 aa, Homo sapiens
MLSLQLPVGLRLPGDKKLTSPAPPASPPAEKSAGPPATTTCYCPIHARARASPGTAHGCAPATASTRVGLRLPRLPAPAVWPCAPSCRTSGTARWPAT

SEQ ID NO: 8822 - DNA, 1757 bp, Homo sapiens
attaatccctgagacaaaggtactgaaggcaagtggctgaagaacaggcttgattggacagatgacttggagatgttcactggacagggacagccttgtgaagatctttgtgaatacccgacctcgcaagctccagagactacaataattcacttgccctaggttccaaagccagcaagtggaaaacggagactggaattccgcccacaggactccaaagcctgtgcagcaacaccccactcccccggcaggatcaccagcaggacgcgcgggagccaggaagtaagatccgtacctccaaggctcccatgggcccaagcctccgcatcaacagactgggagggattacgtggggtcccagggccggctctgaggcgggaaaactttctggaggcggcggcctcaggccggagcgggcgcacaccgactggaggggtcggattcagggatgtgggtggaccgcatttccccatcttccccgccgcgcacttcctctggtgcaatctccacaccccgcgccggcccgcctgcaacgcgccctggcactcaccggtgggcgaaatttccccgcctccacgtgagagccagctccgccgtgacccggaagtccacttcgagtcgccggcccaccctctcgggttccggcttcttccgggtcgcggccttccggcgaacgcggttaccgtggaaaccgcggccatggcggcaccgcggcaaatccccagccacatagtgcgcctcaagcccagctgctctacagactcgtcgttcacccggacgccggtgcccaccgtgtctctcgcgtcccgcgagctgcctgtctcgtcgtggcaggtcaccgagccgtcaagcaagaatctgtgggagcagatctgcaagggttgcgccagtagaggaaatgctttttcatggcttcagtgcagagcactattttccggtttcccatttcaccatgatctcacgtacaccctgtcctcaagataaatcggaaacaatcaacccaaaaacatgttctcccaaagaatatttggaaactttcatctttcctgttctgcttcccggaatggctagcctgcttcaccaagcgaagaaagaaaaatgttttgagaggaaaagaaccaaattcattgcctgtgattttctgactgagtggttatacaagtaagttgttcgtgtctgactattcagtgatcctaagaattcagtcgtgttaatttgcaagcagaatagcaacaactgacttgaattcttgcttattgttttcttgtcaatcaaacatatggcatcatgaccagccaaaatccaaagagggcaggggagccattcacagaatttttctccattccatttgtggaggagcggctaaagcaacacccacggccgccaatcccactctcgctcctgctgacagaagaggaagcagccctctacattcaatccttctggagagcctgtgtggtaagaatcatatgcgactgtggtatttgatttaatggggaacttttgtgaggtggagggtccagggtaaaccttagatgagttaggaacaggatattatagctaacatccagacctcagaaatacgattctctgtaaaatgggtcttaaaaagtgatttagaatttttactgaaactggctgggcatagtagctcatggctgtaatcccagaactttgcaggggccaaggtgggaggatcacttgagcccaggagttcaagaccagcctgggcaacatgacgaaacctcgtatctgcc

SEQ ID NO: 8823 - protein, 94 aa, Homo sapiens
MAAPRQIPSHIVRLKPSCSTDSSFTRTPVPTVSLASRELPVSSWQVTEPSSKNLWEQICKGCASRGNAFSWLQCRALFSGFPFHHDLTYTLSSR

SEQ ID NO: 8824 - DNA, 2550 bp, Homo sapiens
attaatccctgagacaaaggtactgaaggcaagtggctgaagaacaggcttgattggacagatgacttggagatgttcactggacagggacagccttgtgaagatctttgtgaatacccgacctcgcaagctccagagactacaataattcacttgccctaggttccaaagccagcaagtggaaaacggagactggaattccgcccacaggactccaaagcctgtgcagcaacaccccactcccccggcaggatcaccagcaggacgcgcgggagccaggaagtaagatccgtacctccaaggctcccatgggcccaagcctccgcatcaacagactgggagggattacgtggggtcccagggccggctctgaggcgggaaaactttctggaggcggcggcctcaggccggagcgggcgcacaccgactggaggggtcggattcagggatgtgggtggaccgcatttccccatcttccccgccgcgcacttcctctggtgcaatctccacaccccgcgccggcccgcctgcaacgcgccctggcactcaccggtgggcgaaatttccccgcctccacgtgagagccagctccgccgtgacccggaagtccacttcgagtcgccggcccaccctctcgggttccggcttcttccgggtcgcggccttccggcgaacgcggttaccgtggaaaccgcggccatggcggcaccgcggcaaatccccagccacatagtgcgcctcaagcccagctgctctacagactcgtcgttcacccggacgccggtgcccaccgtgtctctcgcgtcccgcgagctgcctgtctcgtcgtggcaggtcaccgagccgtcaagcaagaatctgtgggagcagatctgcaaggagtatgaagctgagcagcctccctttccagaaggatataaagtcaaacaggagcctgtgattacggttgcgccagtagaggaaatgctttttcatggcttcagtgcagagcactattttccggtttcccatttcaccatgatctcacgtacaccctgtcctcaagataaatcggaaacaatcaacccaaaaacatgttctcccaaagaatatttggaaactttcatctttcctgttctgcttcccggaatggctagcctgcttcaccaagcgaagaaagaaaaatgttttgagaggaaaagaaccaaattcattgcctgtgattttctgactgagtggttatacaaccaaaatccaaagagggcaggggagccattcacagaatttttctccattccatttgtggaggagcggctaaagcaacacccacggccgccaatcccactctcgctcctgctgacagaagaggaagcagccctctacattcaatccttctggagagcctgtgtggttcgctgtgatcctgagattcaagaactgcgtcagtggcagaagaaacttcgcgaggccaagcacattcaccagcaagtcaaaattttctgggccaagcaagaacaaaaagtgaaatgcaaaatggaggacgatgcagtacctgcagccaagatgaaaattccatcatcttaaccatagctaagacgtatctttgcccattcgagcacaagttaccttgtgcaaggaaaatgtccaaatgatgctctctctcttgtgatttctttaacaagacttggaacatgtgcaaatggaatcttttctgtacaagataggattcattgcaaacaagctttaatgcaaatagtttagaaaagaaaggaccagtcttcactttctgcattatccccacattttattcattcatccagattacttcttcagtgcctcaggagtattcttctacaccagctgctgttaaaatgtacaatgaactctagtcccaaggaatacagaagtgctcttattaccagttttcccacttgtggccgcctttgcaaagatccatattctaatttaagtccccaacctctgaatttggttttaagtttacctagtgactgactactctctttataaaaaagaccttatacttaatgatcatttccaaaggagaccactccttaacttttactgcaaacccaacaagatgagacacttaaacccagacagatgtaacaaaggatttttgttgtctaagtcccaaagtattatatagaaagttcctgcttttatgggtaaacttattaccttaatatgttctgtggtttgctgttaaccaagattctcccatttaaaatgccacagaccgaccctcaaggcagatccgaaagcctagtagttagttgcactgggttgttttgacaagctaccacacgtcttaagtaaatagtaaagcctttatttttgtgttaagaacagcattttgaaaataaaacctatctgcccatggtttacagccttttaaatttgtaatatttatatagtcgtttatggtacatattgattgtcttgaaatttctttaacttcttttttataagtatgcaacagtcagccgggggaagataaaggtacattataaaacacacattaatgcatttaataaatatatattatctatc

SEQ ID NO: 8825 - protein, 287 aa, Homo sapiens; identical to SEQ ID NO: 1330

SEQ ID NO: 8826 - DNA, 2419 bp, Homo sapiens
attaatccctgagacaaaggtactgaaggcaagtggctgaagaacaggcttgattggacagatgacttggagatgttcactggacagggacagccttgtgaagatctttgtgaatacccgacctcgcaagctccagagactacaataattcacttgccctaggttccaaagccagcaagtggaaaacggagactggaattccgcccacaggactccaaagcctgtgcagcaacaccccactcccccggcaggatcaccagcaggacgcgcgggagccaggaagtaagatccgtacctccaaggctcccatgggcccaagcctccgcatcaacagactgggagggattacgtggggtcccagggccggctctgaggcgggaaaactttctggaggcggcggcctcaggccggagcgggcgcacaccgactggaggggtcggattcagggatgtgggtggaccgcatttccccatcttccccgccgcgcacttcctctggtgcaatctccacaccccgcgccggcccgcctgcaacgcgccctggcactcaccggtgggcgaaatttccccgcctccacgtgagagccagctccgccgtgacccggaagtccacttcgagtcgccggcccaccctctcgggttccggcttcttccgggtcgcggccttccggcgaacgcggttaccgtggaaaccgcggccatggcggcaccgcggcaaatccccagccacatagtgcgcctcaagcccagctgctctacagactcgtcgttcacccggacgccggtgcccaccgtgtctctcgcgtcccgcgagctgcctgtctcgtcgtggcaggtcaccgagccgtcaagcaagaatctgtgggagcagatctgcaaggagtatgaagctgagcagcctccctttccagaaggatataaagtcaaacaggagcctgtgattacggttgcgccagtagaggaaatgctttttcatggcttcagtgcagagcactattttccggtttcccatttcaccatgatctcacgtacaccctgtcctcaagataaatcggaaacaatcaacccaaaaacatgttctcccaaagaatatttggaaactttcatctttcctgttctgcttcccggaatggctagcctgcttcaccaagcgaagaaagaaaaatgttttgagcccacggccgccaatcccactctcgctcctgctgacagaagaggaagcagccctctacattcaatccttctggagagcctgtgtggttcgctgtgatcctgagattcaagaactgcgtcagtggcagaagaaacttcgcgaggccaagcacattcaccagcaagtcaaaattttctgggccaagcaagaacaaaaagtgaaatgcaaaatggaggacgatgcagtacctgcagccaagatgaaaattccatcatcttaaccatagctaagacgtatctttgcccattcgagcacaagttaccttgtgcaaggaaaatgtccaaatgatgctctctctcttgtgatttctttaacaagacttggaacatgtgcaaatggaatcttttctgtacaagataggattcattgcaaacaagctttaatgcaaatagtttagaaaagaaaggaccagtcttcactttctgcattatccccacattttattcattcatccagattacttcttcagtgcctcaggagtattcttctacaccagctgctgttaaaatgtacaatgaactctagtcccaaggaatacagaagtgctcttattaccagttttcccacttgtggccgcctttgcaaagatccatattctaatttaagtccccaacctctgaatttggttttaagtttacctagtgactgactactctctttataaaaaagaccttatacttaatgatcatttccaaaggagaccactccttaacttttactgcaaacccaacaagatgagacacttaaacccagacagatgtaacaaaggatttttgttgtctaagtcccaaagtattatatagaaagttcctgcttttatgggtaaacttattaccttaatatgttctgtggtttgctgttaaccaagattctcccatttaaaatgccacagaccgaccctcaaggcagatccgaaagcctagtagttagttgcactgggttgttttgacaagctaccacacgtcttaagtaaatagtaaagcctttatttttgtgttaagaacagcattttgaaaataaaacctatctgcccatggtttacagccttttaaatttgtaatatttatatagtcgtttatggtacatattgattgtcttgaaatttctttaacttcttttttataagtatgcaacagtcagccgggggaagataaaggtacattataaaacacacattaatgcatttaataaatatatattatctatc

SEQ ID NO: 8827 - protein, 189 aa, Homo sapiens
MAAPRQIPSHIVRLKPSCSTDSSFTRTPVPTVSLASRELPVSSWQVTEPSSKNLWEQICKEYEAEQPPFPEGYKVKQEPVITVAPVEEMLFHGFSAEHYFPVSHFTMISRTPCPQDKSETINPKTCSPKEYLETFIFPVLLPGMASLLHQAKKEKCFEPTAANPTLAPADRRGSSPLHSILLESLCGSL

SEQ ID NO: 8828 - DNA, 1735 bp, Homo sapiens
cttccgggtcgcggccttccggcgaacgcggttaccgtggaaaccgcggccatggcggcaccgcggcaaatccccagccacatagtgcgcctcaagcccagctgctctacagactcgtcgttcacccggacgccggtgcccaccgtgtctctcgcgtcccgcgagctgcctgtctcgtcgtggcaggtcaccgagccgtcaagcaagaatctgtgggagcagatctgcaaggagtatgaagctgagcagcctccctttccagaaggatataaagtcaaacaggagcctgtgattacggttgcgccagtagaggaaatgctttttcatggcttcagtgcagagcactattttccggtttcccatttcaccatgatctcacgtacaccctgtcctcaagataaatcggaaacaatcaacccaaaaacatgttctcccaaagaatatttggaaactttcatctttcctgttctgcttcccggaatggctagcctgcttcaccaagcgaagaaagaaaaatgttttgagaggaaaagaaccaaattcattgcctgtgattttctgactgagtggttatacaaccaaaatccaaagagggcaggggagccattcacagaatttttctccattccatttgtggaggagcggctaaagcaacacccacggccgccaatcccactctcgctcctgctgacagaagaggaagcagccctctacattcaatccttctggagagcctgtgtggttcgctgtgatcctgagattcaagaactgcgtcagtggcagaagaaacttcgcgaggccaagcacattcaccagcaagtcaaaattttctgggccaagcaagaacaaaaagtgaaatgcaaaatggaggacgatgcagtacctgcagccaagatgaaaattccatcatcttaaccatagctaagacgtatctttgcccattcgagcacaagttaccttgtgcaaggaaaatgtccaaatgatgctctctctcttgtgatttctttaacaagacttggaacatgtgcaaatggaatcttttctgtacaagataggattcattgcaaacaagctttaatgcaaatagtttagaaaagaaaggaccagtcttcactttctgcattatccccacattttattcattcatccagattacttcttcagtgcctcaggagtattcttctacaccagctgctgttaaaatgtacaatgaactctagtcccaaggaatacagaagtgctcttattaccagttttcccacttgtggccgcctttgcaaagatccatattctaatttaagtccccaacctctgaatttggttttaagtttacctagtgactgactactctctttataaaaaagaccttatacttaatgatcatttccaaaggagaccactccttaacttttactgcaaacccaacaagatgagacacttaaacccagacagatgtaacaaaggatttttgttgtctaagtcccaaagtattatatagaaagttcctgcttttatgggtaaacttattaccttaatatgttctgtggtttgctgttaaccaagattctcccatttaaaatgccacagaccgaccctcaaggcagatccgaaagcctagtagttagttgcactgggttgttttgacaagctaccacacgtcttaagtaaatagtaaagcctttatttttgtgttaagaacagcattttgaaaataaaacctatctgcccatggttt

SEQ ID NO: 8829 - protein, 287 aa, Homo sapiens; identical to SEQ ID NO: 1330

SEQ ID NO: 8830 - DNA, 2923 bp, Homo sapiens
cttccgggtcgcggccttccggcgaacgcggttaccgtggaaaccgcggccatggcggcaccgcggcaaatccccagccacatagtgcgcctcaagcccagctgctctacagactcgtcgttcacccggacgccggtgcccaccgtgtctctcgcgtcccgcgagctgcctgtctcgtcgtggcaggtcaccgagccgtcaagcaagaatctgtgggagcagatctgcaaggagtatgaagctgagcagcctccctttccagaaggatataaagtcaaacaggagcctgtgattacggttgcgccagtagaggaaatgctttttcatggcttcagtgcagagcactattttccggtttcccatttcaccatgatctcacgtacaccctgtcctcaagataaatcggaaacaatcaacccaaaaacatgttctcccaaagaatatttggaaactttcatctttcctgttctgcttcccggaatggctagcctgcttcaccaagcgaagaaagaaaaatgttttgagaggaaaagaaccaaattcattgcctgtgattttctgactgagtggttatacaaccaaaatccaaagagggcaggggagccattcacagaatttttctccattccatttgtggaggagcggctaaagcaacacccacggccgccaatcccactctcgctcctgctgacagaagaggaagcagccctctacattcaatccttctggagagcctgtgtggttcgctgtgatcctgagattcaagaactgcgtcagtggcagaagaaacttcgcgaggccaagcacattcaccagcaagtcaaaattttctgggccaagcaagaacaaaaagtgaaatgcaaaatggaggacgatgcagtacctgcagccaagatgaaaattccatcatcttaaccatagctaagacgtatctttgcccattcgagcacaagttaccttgtgcaaggaaaatgtccaaatgatgctctctctcttgtgatttctttaacaagacttggaacatgtgcaaatggaatcttttctgtacaagataggattcattgcaaacaagctttaatgcaaatagtttagaaaagaaaggaccagtcttcactttctgcattatccccacattttattcattcatccagattacttcttcagtgcctcaggagtattcttctacaccagctgctgttaaaatgtacaatgaactctagtcccaaggaatacagaagtgctcttattaccagttttcccacttgtggccgcctttgcaaagatccatattctaatttaagtccccaacctctgaatttggttttaagtttacctagtgactgactactctctttataaaaaagaccttatacttaatgatcatttccaaaggagaccactccttaacttttactgcaaacccaacaagatgagacacttaaacccagacagatgtaacaaaggatttttgttgtctaagtcccaaagtattatatagaaagttcctgcttttatgggtaaacttattaccttaatatgttctgtggtttgctgttaaccaagattctcccatttaaaatgccacagaccgaccctcaaggcagatccgaaagcctagtagttagttgcactgggttgttttgacaagctaccacacgtcttaagtaaatagtaaagcctttatttttgtgttaagaacagcattttgaaaataaaacctatctgcccatggtttacagccttttaaatttgtaatatttatatagtcgtttatggtacatattgattgtcttgaaatttctttaacttcttttttataagtatgcaacagtcagccgggggaagataaaggtacattataaaacacacattaatgcatttaataaatatatattatctatcaaaagtgagccttagctcttcatcagttaataaaaagcacctgctgagaactcctgtaagctggtatcatcattgcatcattggattataaaagccacaatgctccctttcaacttggggtttggcctgaggcgttcaactcagccttggccaaccgagaccaccacccgagttcacccttgttcagtgggtcctgacggcatctgggctaaaaaaaaaaaaaaaaaaaagcactgggcgcccagcttccaacaaccagatcttcaactctggaatccctggagatgcacagaacttcccagtttgtaagctgtcagagctgactcccttctcttcccaccctccacctccagtggggagaaatccaggctagaatgacaattttctattaaaaggggggacaagagtggctgttatagacccaaagcgattttaataaccagacacggaacaatttgtgcttacaatgagagattttgatcacagatgctctcctcccgggtcgttttccccaaacgagtcttgtttacacacgcagatcttaaacagaggtgccatttaattttgtctttaaaccttgctccacggggggcagctggctgctacagtctcttggcaaagatgtctcttgatacttttcaggtgtagtcattagaaaaagaacagctctctcccttctcctctcactcccgcctccgcccccattatgaaggcgttcagcccactctcaaccttaaaagccaaaataaaacaaaaccctaagtgcgataacatatcagatttaaaaggggggaaaaaggtctcattaaatgaggcttcccatggctcaaagatggctctgttcttatgctggggaagcacgactttccatggcagccatttgtgctgtgctcaccttatatgcttggacaataaagaacttagaaaacgaacgtgtgaattgctccatcgtgtgaatggtatcagaaagctccaaaggactccagagagcgggggtgagtaaccatttcctggcacgaga

SEQ ID NO: 8831 - protein, 287 aa, Homo sapiens; identical to SEQ ID NO: 1330

SEQ ID NO: 8832 - DNA, 566 bp, Homo sapiens
ggcgaacgcggttaccgtggaaaccgcggccatggcggcaccgcggcaaatccccagccacatagtgcgcctcaagcccagctgctctacagactcgtcgttcacccggacgccggtgcccaccgtgtctctcgcgtcccgcgagctgcctgtctcgtcgtggcaggtcaccgagccgtcaagcaagaatctgtgggagcagatctgcaaggagtatgaagctgagcagcctccctttccagaaggatataaagtcaaacaggagcctgtgattacggttgcgccagtagaggaaatgctttttcatggcttcagtgcagagcactattttccggtttcccatttcaccatgatctcacgtacaccctgtcctcaagataaatcggaaacaatcaacccaaaaacatgttctcccaaagaatatttggaaactttcatctttcctgttctgcttcccggaatggctagcctgcttcaccaagcgaagaaagaaaaatgttttgagaggaaaagaaccaaattcattgcctgtgattttctgactgagtggttatacaagtaagttg

SEQ ID NO: 8833 - protein, 176 aa, Homo sapiens
MAAPRQIPSHIVRLKPSCSTDSSFTRTPVPTVSLASRELPVSSWQVTEPSSKNLWEQICKEYEAEQPPFPEGYKVKQEPVITVAPVEEMLFHGFSAEHYFPVSHFTMISRTPCPQDKSETINPKTCSPKEYLETFIFPVLLPGMASLLHQAKKEKCFERKRTKFIACDFLTEWLYK

SEQ ID NO: 8834 - DNA, 1584 bp, Homo sapiens
ggcgaacgcggttaccgtggaaaccgcggccatggcggcaccgcggcaaatccccagccacatagtgcgcctcaagcccagctgctctacagactcgtcgttcacccggacgccggtgcccaccgtgtctctcgcgtcccgcgagctgcctgtctcgtcgtggcaggtcaccgagccgtcaagcaagaatctgtgggagcagatctgcaaggagtatgaagctgagcagcctccctttccagaaggatataaagtcaaacaggagcctgtgattacggttgcgccagtagaggaaatgctttttcatggcttcagtgcagagcactattttccggtttcccatttcaccatgatctcacgtacaccctgtcctcaagataaatcggaaacaatcaacccaaaaacatgttctcccaaagaatatttggaaactttcatctttcctgttctgcttcccggaatggctagcctgcttcaccaagcgaagaaagaaaaatgttttgagcccacggccgccaatcccactctcgctcctgctgacagaagaggaagcagccctctacattcaatccttctggagagcctgtgtggttcgctgtgatcctgagattcaagaactgcgtcagtggcagaagaaacttcgcgaggccaagcacattcaccagcaagtcaaaattttctgggccaagcaagaacaaaaagtgaaatgcaaaatggaggacgatgcagtacctgcagccaagatgaaaattccatcatcttaaccatagctaagacgtatctttgcccattcgagcacaagttaccttgtgcaaggaaaatgtccaaatgatgctctctctcttgtgatttctttaacaagacttggaacatgtgcaaatggaatcttttctgtacaagataggattcattgcaaacaagctttaatgcaaatagtttagaaaagaaaggaccagtcttcactttctgcattatccccacattttattcattcatccagattacttcttcagtgcctcaggagtattcttctacaccagctgctgttaaaatgtacaatgaactctagtcccaaggaatacagaagtgctcttattaccagttttcccacttgtggccgcctttgcaaagatccatattctaatttaagtccccaacctctgaatttggttttaagtttacctagtgactgactactctctttataaaaaagaccttatacttaatgatcatttccaaaggagaccactccttaacttttactgcaaacccaacaagatgagacacttaaacccagacagatgtaacaaaggatttttgttgtctaagtcccaaagtattatatagaaagttcctgcttttatgggtaaacttattaccttaatatgttctgtggtttgctgttaaccaagattctcccatttaaaatgccacagaccgaccctcaaggcagatccgaaagcctagtagttagttgcactgggttgttttgacaagctaccacacgtcttaagtaaatagtaaagcctttatttttgtgttaagaacagcattttgaaaataaaacctatctgcccatggttt

SEQ ID NO: 8835 - protein, 189 aa, Homo sapiens; identical to SEQ ID NO: 8827

SEQ ID NO: 8836 - DNA, 1751 bp, Homo sapiens
ggcgaacgcggttaccgtggaaaccgcggccatggcggcaccgcggcaaatccccagccacatagtgcgcctcaagcccagctgctctacagactcgtcgttcacccggacgccggtgcccaccgtgtctctcgcgtcccgcgagctgcctgtctcgtcgtggcaggtcaccgagccgtcaagcaagaatctgtgggagcagatctgcaaggagtatgaagctgagcagcctccctttccagaaggatataaagtcaaacaggagcctgtgattacggttgcgccagtagaggaaatgctttttcatggcttcagtgcagagcactattttccggtttcccatttcaccatgatctcacgtacaccctgtcctcaagataaatcggaaacaatcaacccaaaaacatgttctcccaaagaatatttggaaactttcatctttcctgttctgcttcccggaatggctagcctgcttcaccaagcgaagaaagaaaaatgttttgagcccacggccgccaatcccactctcgctcctgctgacagaagaggaagcagccctctacattcaatccttctggagagcctgtgtggttcgctgtgatcctgagattcaagaactgcgtcagtggcagaagaaacttcgcgaggccaagcacattcaccagcaagtcaaaattttctgggccaagcaagaacaaaaagtgaaatgcaaaatggaggacgatgcagtacctgcagccaagatgaaaattccatcatcttaaccatagctaagacgtatctttgcccattcgagcacaagttaccttgtgcaaggaaaatgtccaaatgatgctctctctcttgtgatttctttaacaagacttggaacatgtgcaaatggaatcttttctgtacaagataggattcattgcaaacaagctttaatgcaaatagtttagaaaagaaaggaccagtcttcactttctgcattatccccacattttattcattcatccagattacttcttcagtgcctcaggagtattcttctacaccagctgctgttaaaatgtacaatgaactctagtcccaaggaatacagaagtgctcttattaccagttttcccacttgtggccgcctttgcaaagatccatattctaatttaagtccccaacctctgaatttggttttaagtttacctagtgactgactactctctttataaaaaagaccttatacttaatgatcatttccaaaggagaccactccttaacttttactgcaaacccaacaagatgagacacttaaacccagacagatgtaacaaaggatttttgttgtctaagtcccaaagtattatatagaaagttcctgcttttatgggtaaacttattaccttaatatgttctgtggtttgctgttaaccaagattctcccatttaaaatgccacagaccgaccctcaaggcagatccgaaagcctagtagttagttgcactgggttgttttgacaagctaccacacgtcttaagtaaatagtaaagcctttatttttgtgttaagaacagcattttgaaaataaaacctatctgcccatggtttacagccttttaaatttgtaatatttatatagtcgtttatggtacatattgattgtcttgaaatttctttaacttcttttttataagtatgcaacagtcagccgggggaagataaaggtacattataaaacacacattaatgcatttaataaatatatattatctatc

SEQ ID NO: 8837 - protein, 189 aa, Homo sapiens; identical to SEQ ID NO: 8827

SEQ ID NO: 8838 - DNA, 2772 bp, Homo sapiens
ggcgaacgcggttaccgtggaaaccgcggccatggcggcaccgcggcaaatccccagccacatagtgcgcctcaagcccagctgctctacagactcgtcgttcacccggacgccggtgcccaccgtgtctctcgcgtcccgcgagctgcctgtctcgtcgtggcaggtcaccgagccgtcaagcaagaatctgtgggagcagatctgcaaggagtatgaagctgagcagcctccctttccagaaggatataaagtcaaacaggagcctgtgattacggttgcgccagtagaggaaatgctttttcatggcttcagtgcagagcactattttccggtttcccatttcaccatgatctcacgtacaccctgtcctcaagataaatcggaaacaatcaacccaaaaacatgttctcccaaagaatatttggaaactttcatctttcctgttctgcttcccggaatggctagcctgcttcaccaagcgaagaaagaaaaatgttttgagcccacggccgccaatcccactctcgctcctgctgacagaagaggaagcagccctctacattcaatccttctggagagcctgtgtggttcgctgtgatcctgagattcaagaactgcgtcagtggcagaagaaacttcgcgaggccaagcacattcaccagcaagtcaaaattttctgggccaagcaagaacaaaaagtgaaatgcaaaatggaggacgatgcagtacctgcagccaagatgaaaattccatcatcttaaccatagctaagacgtatctttgcccattcgagcacaagttaccttgtgcaaggaaaatgtccaaatgatgctctctctcttgtgatttctttaacaagacttggaacatgtgcaaatggaatcttttctgtacaagataggattcattgcaaacaagctttaatgcaaatagtttagaaaagaaaggaccagtcttcactttctgcattatccccacattttattcattcatccagattacttcttcagtgcctcaggagtattcttctacaccagctgctgttaaaatgtacaatgaactctagtcccaaggaatacagaagtgctcttattaccagttttcccacttgtggccgcctttgcaaagatccatattctaatttaagtccccaacctctgaatttggttttaagtttacctagtgactgactactctctttataaaaaagaccttatacttaatgatcatttccaaaggagaccactccttaacttttactgcaaacccaacaagatgagacacttaaacccagacagatgtaacaaaggatttttgttgtctaagtcccaaagtattatatagaaagttcctgcttttatgggtaaacttattaccttaatatgttctgtggtttgctgttaaccaagattctcccatttaaaatgccacagaccgaccctcaaggcagatccgaaagcctagtagttagttgcactgggttgttttgacaagctaccacacgtcttaagtaaatagtaaagcctttatttttgtgttaagaacagcattttgaaaataaaacctatctgcccatggtttacagccttttaaatttgtaatatttatatagtcgtttatggtacatattgattgtcttgaaatttctttaacttcttttttataagtatgcaacagtcagccgggggaagataaaggtacattataaaacacacattaatgcatttaataaatatatattatctatcaaaagtgagccttagctcttcatcagttaataaaaagcacctgctgagaactcctgtaagctggtatcatcattgcatcattggattataaaagccacaatgctccctttcaacttggggtttggcctgaggcgttcaactcagccttggccaaccgagaccaccacccgagttcacccttgttcagtgggtcctgacggcatctgggctaaaaaaaaaaaaaaaaaaaagcactgggcgcccagcttccaacaaccagatcttcaactctggaatccctggagatgcacagaacttcccagtttgtaagctgtcagagctgactcccttctcttcccaccctccacctccagtggggagaaatccaggctagaatgacaattttctattaaaaggggggacaagagtggctgttatagacccaaagcgattttaataaccagacacggaacaatttgtgcttacaatgagagattttgatcacagatgctctcctcccgggtcgttttccccaaacgagtcttgtttacacacgcagatcttaaacagaggtgccatttaattttgtctttaaaccttgctccacggggggcagctggctgctacagtctcttggcaaagatgtctcttgatacttttcaggtgtagtcattagaaaaagaacagctctctcccttctcctctcactcccgcctccgcccccattatgaaggcgttcagcccactctcaaccttaaaagccaaaataaaacaaaaccctaagtgcgataacatatcagatttaaaaggggggaaaaaggtctcattaaatgaggcttcccatggctcaaagatggctctgttcttatgctggggaagcacgactttccatggcagccatttgtgctgtgctcaccttatatgcttggacaataaagaacttagaaaacgaacgtgtgaattgctccatcgtgtgaatggtatcagaaagctccaaaggactccagagagcgggggtgagtaaccatttcctggcacgaga

SEQ ID NO: 8839 - protein, 189 aa, Homo sapiens; identical to SEQ ID NO: 8827

SEQ ID NO: 8840 - DNA, 2772 bp, Homo sapiens; identical to SEQ ID NO: 8838

SEQ ID NO: 8841 - protein, 189 aa, Homo sapiens; identical to SEQ ID NO: 8827

SEQ ID NO: 8842 - DNA, 1744 bp, Homo sapiens
gcggttaccgtggaaaccgcggccatggcggcaccgcggcaaatccccagccacatagtgcgcctcaagcccagctgctctacagactcgtcgttcacccggacgccggtgcccaccgtgtctctcgcgtcccgcgagctgcctgtctcgtcgtggcaggtcaccgagccgtcaagcaagaatctgtgggagcagatctgcaaggagtatgaagctgagcagcctccctttccagaaggatataaagtcaaacaggagcctgtgattacggttgcgccagtagaggaaatgctttttcatggcttcagtgcagagcactattttccggtttcccatttcaccatgatctcacgtacaccctgtcctcaagataaatcggaaacaatcaacccaaaaacataggaaaagaaccaaattcattgcctgtgattttctgactgagtggttatacaagtaagttgttcgtgtctgactattcagtgatcctaagaattcagtcgtgttaatttgcaagcagaatagcaacaactgacttgaattcttgcttattgttttcttgtcaatcaaacatatggcatcatgaccagccaaaatccaaagagggcaggggagccattcacagaatttttctccattccatttgtggaggagcggctaaagcaacacccacggccgccaatcccactctcgctcctgctgacagaagaggaagcagccctctacattcaatccttctggagagcctgtgtggttcgctgtgatcctgagattcaagaactgcgtcagtggcagaagaaacttcgcgaggccaagcacattcaccagcaagtcaaaattttctgggccaagcaagaacaaaaagtgaaatgcaaaatggaggacgatgcagtacctgcagccaagatgaaaattccatcatcttaaccatagctaagacgtatctttgcccattcgagcacaagttaccttgtgcaaggaaaatgtccaaatgatgctctctctcttgtgatttctttaacaagacttggaacatgtgcaaatggaatcttttctgtacaagataggattcattgcaaacaagctttaatgcaaatagtttagaaaagaaaggaccagtcttcactttctgcattatccccacattttattcattcatccagattacttcttcagtgcctcaggagtattcttctacaccagctgctgttaaaatgtacaatgaactctagtcccaaggaatacagaagtgctcttattaccagttttcccacttgtggccgcctttgcaaagatccatattctaatttaagtccccaacctctgaatttggttttaagtttacctagtgactgactactctctttataaaaaagaccttatacttaatgatcatttccaaaggagaccactccttaacttttactgcaaacccaacaagatgagacacttaaacccagacagatgtaacaaaggatttttgttgtctaagtcccaaagtattatatagaaagttcctgcttttatgggtaaacttattaccttaatatgttctgtggtttgctgttaaccaagattctcccatttaaaatgccacagaccgaccctcaaggcagatccgaaagcctagtagttagttgcactgggttgttttgacaagctaccacacgtcttaagtaaatagtaaagcctttatttttgtgttaagaacagcattttgaaaataaaacctatctgcccatggttt

SEQ ID NO: 8843 - protein, 125 aa, Homo sapiens
MAAPRQIPSHIVRLKPSCSTDSSFTRTPVPTVSLASRELPVSSWQVTEPSSKNLWEQICKEYEAEQPPFPEGYKVKQEPVITVAPVEEMLFHGFSAEHYFPVSHFTMISRTPCPQDKSETINPKT

SEQ ID NO: 8844 - DNA, 1911 bp, Homo sapiens
gcggttaccgtggaaaccgcggccatggcggcaccgcggcaaatccccagccacatagtgcgcctcaagcccagctgctctacagactcgtcgttcacccggacgccggtgcccaccgtgtctctcgcgtcccgcgagctgcctgtctcgtcgtggcaggtcaccgagccgtcaagcaagaatctgtgggagcagatctgcaaggagtatgaagctgagcagcctccctttccagaaggatataaagtcaaacaggagcctgtgattacggttgcgccagtagaggaaatgctttttcatggcttcagtgcagagcactattttccggtttcccatttcaccatgatctcacgtacaccctgtcctcaagataaatcggaaacaatcaacccaaaaacataggaaaagaaccaaattcattgcctgtgattttctgactgagtggttatacaagtaagttgttcgtgtctgactattcagtgatcctaagaattcagtcgtgttaatttgcaagcagaatagcaacaactgacttgaattcttgcttattgttttcttgtcaatcaaacatatggcatcatgaccagccaaaatccaaagagggcaggggagccattcacagaatttttctccattccatttgtggaggagcggctaaagcaacacccacggccgccaatcccactctcgctcctgctgacagaagaggaagcagccctctacattcaatccttctggagagcctgtgtggttcgctgtgatcctgagattcaagaactgcgtcagtggcagaagaaacttcgcgaggccaagcacattcaccagcaagtcaaaattttctgggccaagcaagaacaaaaagtgaaatgcaaaatggaggacgatgcagtacctgcagccaagatgaaaattccatcatcttaaccatagctaagacgtatctttgcccattcgagcacaagttaccttgtgcaaggaaaatgtccaaatgatgctctctctcttgtgatttctttaacaagacttggaacatgtgcaaatggaatcttttctgtacaagataggattcattgcaaacaagctttaatgcaaatagtttagaaaagaaaggaccagtcttcactttctgcattatccccacattttattcattcatccagattacttcttcagtgcctcaggagtattcttctacaccagctgctgttaaaatgtacaatgaactctagtcccaaggaatacagaagtgctcttattaccagttttcccacttgtggccgcctttgcaaagatccatattctaatttaagtccccaacctctgaatttggttttaagtttacctagtgactgactactctctttataaaaaagaccttatacttaatgatcatttccaaaggagaccactccttaacttttactgcaaacccaacaagatgagacacttaaacccagacagatgtaacaaaggatttttgttgtctaagtcccaaagtattatatagaaagttcctgcttttatgggtaaacttattaccttaatatgttctgtggtttgctgttaaccaagattctcccatttaaaatgccacagaccgaccctcaaggcagatccgaaagcctagtagttagttgcactgggttgttttgacaagctaccacacgtcttaagtaaatagtaaagcctttatttttgtgttaagaacagcattttgaaaataaaacctatctgcccatggtttacagccttttaaatttgtaatatttatatagtcgtttatggtacatattgattgtcttgaaatttctttaacttcttttttataagtatgcaacagtcagccgggggaagataaaggtacattataaaacacacattaatgcatttaataaatatatattatctatc

SEQ ID NO: 8845 - protein, 125 aa, Homo sapiens; identical to SEQ ID NO: 8843

SEQ ID NO: 8846 - DNA, 2932 bp, Homo sapiens
gcggttaccgtggaaaccgcggccatggcggcaccgcggcaaatccccagccacatagtgcgcctcaagcccagctgctctacagactcgtcgttcacccggacgccggtgcccaccgtgtctctcgcgtcccgcgagctgcctgtctcgtcgtggcaggtcaccgagccgtcaagcaagaatctgtgggagcagatctgcaaggagtatgaagctgagcagcctccctttccagaaggatataaagtcaaacaggagcctgtgattacggttgcgccagtagaggaaatgctttttcatggcttcagtgcagagcactattttccggtttcccatttcaccatgatctcacgtacaccctgtcctcaagataaatcggaaacaatcaacccaaaaacataggaaaagaaccaaattcattgcctgtgattttctgactgagtggttatacaagtaagttgttcgtgtctgactattcagtgatcctaagaattcagtcgtgttaatttgcaagcagaatagcaacaactgacttgaattcttgcttattgttttcttgtcaatcaaacatatggcatcatgaccagccaaaatccaaagagggcaggggagccattcacagaatttttctccattccatttgtggaggagcggctaaagcaacacccacggccgccaatcccactctcgctcctgctgacagaagaggaagcagccctctacattcaatccttctggagagcctgtgtggttcgctgtgatcctgagattcaagaactgcgtcagtggcagaagaaacttcgcgaggccaagcacattcaccagcaagtcaaaattttctgggccaagcaagaacaaaaagtgaaatgcaaaatggaggacgatgcagtacctgcagccaagatgaaaattccatcatcttaaccatagctaagacgtatctttgcccattcgagcacaagttaccttgtgcaaggaaaatgtccaaatgatgctctctctcttgtgatttctttaacaagacttggaacatgtgcaaatggaatcttttctgtacaagataggattcattgcaaacaagctttaatgcaaatagtttagaaaagaaaggaccagtcttcactttctgcattatccccacattttattcattcatccagattacttcttcagtgcctcaggagtattcttctacaccagctgctgttaaaatgtacaatgaactctagtcccaaggaatacagaagtgctcttattaccagttttcccacttgtggccgcctttgcaaagatccatattctaatttaagtccccaacctctgaatttggttttaagtttacctagtgactgactactctctttataaaaaagaccttatacttaatgatcatttccaaaggagaccactccttaacttttactgcaaacccaacaagatgagacacttaaacccagacagatgtaacaaaggatttttgttgtctaagtcccaaagtattatatagaaagttcctgcttttatgggtaaacttattaccttaatatgttctgtggtttgctgttaaccaagattctcccatttaaaatgccacagaccgaccctcaaggcagatccgaaagcctagtagttagttgcactgggttgttttgacaagctaccacacgtcttaagtaaatagtaaagcctttatttttgtgttaagaacagcattttgaaaataaaacctatctgcccatggtttacagccttttaaatttgtaatatttatatagtcgtttatggtacatattgattgtcttgaaatttctttaacttcttttttataagtatgcaacagtcagccgggggaagataaaggtacattataaaacacacattaatgcatttaataaatatatattatctatcaaaagtgagccttagctcttcatcagttaataaaaagcacctgctgagaactcctgtaagctggtatcatcattgcatcattggattataaaagccacaatgctccctttcaacttggggtttggcctgaggcgttcaactcagccttggccaaccgagaccaccacccgagttcacccttgttcagtgggtcctgacggcatctgggctaaaaaaaaaaaaaaaaaaaagcactgggcgcccagcttccaacaaccagatcttcaactctggaatccctggagatgcacagaacttcccagtttgtaagctgtcagagctgactcccttctcttcccaccctccacctccagtggggagaaatccaggctagaatgacaattttctattaaaaggggggacaagagtggctgttatagacccaaagcgattttaataaccagacacggaacaatttgtgcttacaatgagagattttgatcacagatgctctcctcccgggtcgttttccccaaacgagtcttgtttacacacgcagatcttaaacagaggtgccatttaattttgtctttaaaccttgctccacggggggcagctggctgctacagtctcttggcaaagatgtctcttgatacttttcaggtgtagtcattagaaaaagaacagctctctcccttctcctctcactcccgcctccgcccccattatgaaggcgttcagcccactctcaaccttaaaagccaaaataaaacaaaaccctaagtgcgataacatatcagatttaaaaggggggaaaaaggtctcattaaatgaggcttcccatggctcaaagatggctctgttcttatgctggggaagcacgactttccatggcagccatttgtgctgtgctcaccttatatgcttggacaataaagaacttagaaaacgaacgtgtgaattgctccatcgtgtgaatggtatcagaaagctccaaaggactccagagagcgggggtgagtaaccatttcctggcacgaga

SEQ ID NO: 8847 - protein, 125 aa, Homo sapiens; identical to SEQ ID NO: 8843

SEQ ID NO: 8848 - DNA, 1383 bp, Homo sapiens
tgccttaaccgtctgggaatgcagcccaataggtctcagcctcattttacccagcccctattcaagatggagttgctctggttcacgtgcctctgacatttccaataaggatggacctatctggagggtacaggagcctggtttatgtgaaccatgaaaagcagcttcctgagaggaaaagaaccaaattcattgcctgtgattttctgactgagtggttatacaaccaaaatccaaagagggcaggggagccattcacagaatttttctccattccatttgtggaggagcggctaaagcaacacccacggccgccaatcccactctcgctcctgctgacagaagaggaagcagccctctacattcaatccttctggagagcctgtgtggttcgctgtgatcctgagattcaagaactgcgtcagtggcagaagaaacttcgcgaggccaagcacattcaccagcaagtcaaaattttctgggccaagcaagaacaaaaagtgaaatgcaaaatggaggacgatgcagtacctgcagccaagatgaaaattccatcatcttaaccatagctaagacgtatctttgcccattcgagcacaagttaccttgtgcaaggaaaatgtccaaatgatgctctctctcttgtgatttctttaacaagacttggaacatgtgcaaatggaatcttttctgtacaagataggattcattgcaaacaagctttaatgcaaatagtttagaaaagaaaggaccagtcttcactttctgcattatccccacattttattcattcatccagattacttcttcagtgcctcaggagtattcttctacaccagctgctgttaaaatgtacaatgaactctagtcccaaggaatacagaagtgctcttattaccagttttcccacttgtggccgcctttgcaaagatccatattctaatttaagtccccaacctctgaatttggttttaagtttacctagtgactgactactctctttataaaaaagaccttatacttaatgatcatttccaaaggagaccactccttaacttttactgcaaacccaacaagatgagacacttaaacccagacagatgtaacaaaggatttttgttgtctaagtcccaaagtattatatagaaagttcctgcttttatgggtaaacttattaccttaatatgttctgtggtttgctgttaaccaagattctcccatttaaaatgccacagaccgaccctcaaggcagatccgaaagcctagtagttagttgcactgggttgttttgacaagctaccacacgtcttaagtaaatagtaaagcctttatttttgtgttaagaacagcattttgaaaataaaacctatctgcccatggttt

SEQ ID NO: 8849 - protein, 150 aa, Homo sapiens
MDLSGGYRSLVYVNHEKQLPERKRTKFIACDFLTEWLYNQNPKRAGEPFTEFFSIPFVEERLKQHPRPPIPLSLLLTEEEAALYIQSFWRACVVRCDPEIQELRQWQKKLREAKHIHQQVKIFWAKQEQKVKCKMEDDAVPAAKMKIPSS

SEQ ID NO: 8850 - DNA, 1550 bp, Homo sapiens
tgccttaaccgtctgggaatgcagcccaataggtctcagcctcattttacccagcccctattcaagatggagttgctctggttcacgtgcctctgacatttccaataaggatggacctatctggagggtacaggagcctggtttatgtgaaccatgaaaagcagcttcctgagaggaaaagaaccaaattcattgcctgtgattttctgactgagtggttatacaaccaaaatccaaagagggcaggggagccattcacagaatttttctccattccatttgtggaggagcggctaaagcaacacccacggccgccaatcccactctcgctcctgctgacagaagaggaagcagccctctacattcaatccttctggagagcctgtgtggttcgctgtgatcctgagattcaagaactgcgtcagtggcagaagaaacttcgcgaggccaagcacattcaccagcaagtcaaaattttctgggccaagcaagaacaaaaagtgaaatgcaaaatggaggacgatgcagtacctgcagccaagatgaaaattccatcatcttaaccatagctaagacgtatctttgcccattcgagcacaagttaccttgtgcaaggaaaatgtccaaatgatgctctctctcttgtgatttctttaacaagacttggaacatgtgcaaatggaatcttttctgtacaagataggattcattgcaaacaagctttaatgcaaatagtttagaaaagaaaggaccagtcttcactttctgcattatccccacattttattcattcatccagattacttcttcagtgcctcaggagtattcttctacaccagctgctgttaaaatgtacaatgaactctagtcccaaggaatacagaagtgctcttattaccagttttcccacttgtggccgcctttgcaaagatccatattctaatttaagtccccaacctctgaatttggttttaagtttacctagtgactgactactctctttataaaaaagaccttatacttaatgatcatttccaaaggagaccactccttaacttttactgcaaacccaacaagatgagacacttaaacccagacagatgtaacaaaggatttttgttgtctaagtcccaaagtattatatagaaagttcctgcttttatgggtaaacttattaccttaatatgttctgtggtttgctgttaaccaagattctcccatttaaaatgccacagaccgaccctcaaggcagatccgaaagcctagtagttagttgcactgggttgttttgacaagctaccacacgtcttaagtaaatagtaaagcctttatttttgtgttaagaacagcattttgaaaataaaacctatctgcccatggtttacagccttttaaatttgtaatatttatatagtcgtttatggtacatattgattgtcttgaaatttctttaacttcttttttataagtatgcaacagtcagccgggggaagataaaggtacattataaaacacacattaatgcatttaataaatatatattatctatc

SEQ ID NO: 8851 - protein, 150 aa, Homo sapiens; identical to SEQ ID NO: 8849

SEQ ID NO: 8852 - DNA, 2571 bp, Homo sapiens
tgccttaaccgtctgggaatgcagcccaataggtctcagcctcattttacccagcccctattcaagatggagttgctctggttcacgtgcctctgacatttccaataaggatggacctatctggagggtacaggagcctggtttatgtgaaccatgaaaagcagcttcctgagaggaaaagaaccaaattcattgcctgtgattttctgactgagtggttatacaaccaaaatccaaagagggcaggggagccattcacagaatttttctccattccatttgtggaggagcggctaaagcaacacccacggccgccaatcccactctcgctcctgctgacagaagaggaagcagccctctacattcaatccttctggagagcctgtgtggttcgctgtgatcctgagattcaagaactgcgtcagtggcagaagaaacttcgcgaggccaagcacattcaccagcaagtcaaaattttctgggccaagcaagaacaaaaagtgaaatgcaaaatggaggacgatgcagtacctgcagccaagatgaaaattccatcatcttaaccatagctaagacgtatctttgcccattcgagcacaagttaccttgtgcaaggaaaatgtccaaatgatgctctctctcttgtgatttctttaacaagacttggaacatgtgcaaatggaatcttttctgtacaagataggattcattgcaaacaagctttaatgcaaatagtttagaaaagaaaggaccagtcttcactttctgcattatccccacattttattcattcatccagattacttcttcagtgcctcaggagtattcttctacaccagctgctgttaaaatgtacaatgaactctagtcccaaggaatacagaagtgctcttattaccagttttcccacttgtggccgcctttgcaaagatccatattctaatttaagtccccaacctctgaatttggttttaagtttacctagtgactgactactctctttataaaaaagaccttatacttaatgatcatttccaaaggagaccactccttaacttttactgcaaacccaacaagatgagacacttaaacccagacagatgtaacaaaggatttttgttgtctaagtcccaaagtattatatagaaagttcctgcttttatgggtaaacttattaccttaatatgttctgtggtttgctgttaaccaagattctcccatttaaaatgccacagaccgaccctcaaggcagatccgaaagcctagtagttagttgcactgggttgttttgacaagctaccacacgtcttaagtaaatagtaaagcctttatttttgtgttaagaacagcattttgaaaataaaacctatctgcccatggtttacagccttttaaatttgtaatatttatatagtcgtttatggtacatattgattgtcttgaaatttctttaacttcttttttataagtatgcaacagtcagccgggggaagataaaggtacattataaaacacacattaatgcatttaataaatatatattatctatcaaaagtgagccttagctcttcatcagttaataaaaagcacctgctgagaactcctgtaagctggtatcatcattgcatcattggattataaaagccacaatgctccctttcaacttggggtttggcctgaggcgttcaactcagccttggccaaccgagaccaccacccgagttcacccttgttcagtgggtcctgacggcatctgggctaaaaaaaaaaaaaaaaaaaagcactgggcgcccagcttccaacaaccagatcttcaactctggaatccctggagatgcacagaacttcccagtttgtaagctgtcagagctgactcccttctcttcccaccctccacctccagtggggagaaatccaggctagaatgacaattttctattaaaaggggggacaagagtggctgttatagacccaaagcgattttaataaccagacacggaacaatttgtgcttacaatgagagattttgatcacagatgctctcctcccgggtcgttttccccaaacgagtcttgtttacacacgcagatcttaaacagaggtgccatttaattttgtctttaaaccttgctccacggggggcagctggctgctacagtctcttggcaaagatgtctcttgatacttttcaggtgtagtcattagaaaaagaacagctctctcccttctcctctcactcccgcctccgcccccattatgaaggcgttcagcccactctcaaccttaaaagccaaaataaaacaaaaccctaagtgcgataacatatcagatttaaaaggggggaaaaaggtctcattaaatgaggcttcccatggctcaaagatggctctgttcttatgctggggaagcacgactttccatggcagccatttgtgctgtgctcaccttatatgcttggacaataaagaacttagaaaacgaacgtgtgaattgctccatcgtgtgaatggtatcagaaagctccaaaggactccagagagcgggggtgagtaaccatttcctggcacgaga

SEQ ID NO: 8853 - protein, 150 aa, Homo sapiens; identical to SEQ ID NO: 8849

SEQ ID NO: 8854 - DNA, 468 bp, Homo sapiens
attcaagatggagttgctctggttcacgtgcctctgacatttccaataaggatggacctatctggagggtacaggagcctggtttatgtgaaccatgaaaagcagcttcctgagaggaaaagaaccaaattcattgcctgtgattttctgactgagtggttatacaaccaaaatccaaagagggcaggggagccattcacagaatttttctccattccatttgtggaggagcggctaaagcaacagtgagtatgacacaaggctttgaataatttattcctaatttaagattgtgttaataatacttttcttccatctaagagaacaaactgatgtgatccatccaggactctgggccagtcatatttgtgactcctgtctctagttattcttagcctaggctaaccttatcctaatcaggccagtaatttcattcaagaagcactccagaaataaaatagaaaactt

SEQ ID NO: 8855 - protein, 65 aa, Homo sapiens
MDLSGGYRSLVYVNHEKQLPERKRTKFIACDFLTEWLYNQNPKRAGEPFTEFFSIPFVEERLKQQ

SEQ ID NO: 8856 - DNA, 531 bp, Homo sapiens
tgaaatgaccgctactgctccttcacagtatatttacatgagcttcctgtggacatcagcaccatttaaaattaaggctggaacacagatgtggggctggaagtggagcagccccttttagccatgaggcccaaagccacatgctaaggatggtgaagcaggggatagaaagagcctgtgtctttgctgacttccttaagccacggcaccagcctgggcctgccctactctggacatctaaatgtcaggagctaagaatcaagtcagtctagaggtgttcgttgccatgtggagagatccttcccaagaagaaagatgctacaaagtgtcctggaaatcctctttgcccatccagatccaccctccctagcctgctctgtacctcaggaagctgcttttcatggttcacataaaccaggctcctgtaccctccagataggtccatcctatgggtggtaccagcaggagaccagagagatgaaggagggaaaaaaagaacattaggggttgaattgtatcaccccaaaattc

SEQ ID NO: 8857 - protein, 43 aa, Homo sapiens
MLRMVKQGIERACVFADFLKPRHQPGPALLWTSKCQELRIKSV

SEQ ID NO: 8858 - DNA, 554 bp, Homo sapiens
gtgtttctgttcctgtggagtgcagctgaaatgaccgctactgctccttcacagtatatttacatgagcttcctgtggacatcagcaccatttaaaattaaggctggaacacagatgtggggctggaagtggagcagccccttttagccatgaggcccaaagccacatgctaaggatggtgaagcaggggatagaaagagcctgtgtctttgctgacttccttaagccacggcaccagcctgggcctgccctactctggacatctaaatgtgtaaggagaaataaacttcattcgttttattaccactgttcttgagttttcaatacaggcagctgaatgcgcccctaagggatagatacctagtaaaccacaagggaaaagacatcccagagtaatggggagaagataagctgagcctgccaatggggtggagcaccagatatcctgtcttctatttccatttcaagtttgttcttgtaacccaaagaataccagtaaacttcttttagagaattgttatggaaatcgggtgataaaatctctgtcttctttt

SEQ ID NO: 8859 - protein, 38 aa, Homo sapiens
MTATAPSQYIYMSFLWTSAPFKIKAGTQMWGWKWSSPF

SEQ ID NO: 8860 - DNA, 1659 bp, Homo sapiens
tagtacatttccttgtgttaccacgcatggggaagaaaacgcatggccccagaatgccacccccacctgacctccccggaagcaccccgcctctgcccagagcatgtgcttgcttctagagaatcccgttccagtcattgcgtggacagaaaacgtaagagtcctggggaggggtgggagggaatgaagctaggacctggggtgggggtgggggcggttgcatgcggacccggtattctgaaaagaaagaaatcttcaaacacctcggtcctgtccggtgaaaaaacgacagcattacacattctcgtgccaggaaatggttactcacccccgctctctggagtcctttggagctttctgataccattcacacgatggagcaattcacacgttcgttttctaagttctttattgtccaagcatataaggtgagcacagcacaaatggctgccatggaaagtcgtgcttccccagcataagaacagagccatctttgagccatgggaagcctcatttaatgagacctttttccccccttttaaatctgatatgttatcgcacttagggttttgttttattttggcttttaaggttgagagtgggctgaacgccttcataatgggggcggaggcgggagtgagaggagaagggagagagctgttctttttctaatgactacacctgaaaagtatcaagagacatctttgccaagagatgttgcatacttataaaaaagaagttaaagaaatttcaagacaatcaatatgtaccataaacgactatataaatattacaaatttaaaaggctgtaaaccatgggcagataggttttattttcaaaatgctgttcttaacacaaaaataaaggctttactatttacttaagacgtgtggtagcttgtcaaaacaacccagtgcaactaactactaggctttcggatctgccttgagggtcggtctgtggcattttaaatgggagaatcttggttaacagcaaaccacagaacatattaaggtaataagtttacccataaaagcaggaactttctatataatactttgggacttagacaacaaaaatcctttgttacatctgtctgggtttaagtgtctcatcttgttgggtttgcagtaaaagttaaggagtggtctcctttggaaatgatcattaagtataaggtcttttttataaagagagtagtcagtcactaggtaaacttaaaaccaaattcagaggttggggacttaaattagaatatggatctttgcaaaggcggccacaagtgggaaaactggtaataagagcacttctgtattccttgggactagagttcattgtacattttaacagcagctggtgtagaagaatactcctgaggcactgaagaagtaatctggatgaatgaataaaatgtggggataatgcagaaagtgaagactggtcctttcttttctaaactatttgcattaaagcttgtttgcaatgaatcctatcttgtacagaaaagattccatttgcacatgttccaagtcttgttaaagaaatcacaagagagagagcatcatttggacattttccttgcacaaggtaacttgtgctcgaatgggcaaagatacgtcttagctatggttaagatgatggaattttcatcttggctg

SEQ ID NO: 8861 - protein, 56 aa, Homo sapiens
MLHTYKKEVKEISRQSICTINDYINITNLKGCKPWADRFYFQNAVLNTKIKALLFT

SEQ ID NO: 8862 - DNA, 3824 bp, Homo sapiens
ggtaacagttgccgaaccaggccgcctcacagccaggaaatttggaaatcctagccaaggggatttcgtgtaaatgtgaacactgacgaactgaaaagctaacaccgactgcccgcccctcccctgccacacacacagacacgtaataccagaccaacctcaatccccgcaaactaaagcaaagctaattgcaaatagtattaggctcactggaaaatgtggctgggaagactgtttcatcctctgggggtagaacagaaccaaattcacagctggtgggccagactggtgttggttggaggtggggggctcccactcttatcacctctccccagcaagtgctggaccccaggtagcctcttggagatgaccgttgcgttgaggacaaatggggactttgccaccggcttgcctggtggtttgcacatttcaggggggtcaggagagttaaggaggttgtgggtgggattccaaggtgaggcccaactgaatcgtggggtgagctttatagccagtagaggtggagggaccctggcatgtgccaaagaagaggccctctgggtgatgaagtgaccatcacatttggaaagtgatcaaccactgttccttctatggggctcttgctctagtgtctatggtgagaacacaggccccgccccttcccttgtagagccatagaaatattctggcttggggcagcagtcccttcttcccttgatcatctcgccctgttcctacacttacgggtgtatctccaaatcctctcccaattttattcccttattcatttcaagagctccaatggggtctccagctgaaagcccctccgggaggcaggttggaaggcaggcaccacggcaggttttccgcgatgatgtcactttccgttgctatggtgaaaattcctggatggaatggatcacatgagggtttcttgttgcttttggagggtgtgggggatattttgttttggtttttctgcaggttccatgaaaacagcccttttccaagcccattgtttctgtcatggtttccatctgtcctgagcaagtcattcctttgttatttagcatttcgaacatctcggccattcaaagcccccatgttctctgcactgtttggccagcataacctctagcatcgattcaaagcagagttttaacctgacggcatggaatgtataaatgagggtgggtccttctgcagatactctaatcactacattgctttttctataaaactacccataagcctttaacctttaaagaaaaatgaaaaaggttagtgtttgggggccgggggaggactgaccgcttcataagccagtacgtctgagctgagtatgtttcaataaaccttttgatatttctcaaggccctagtctctgctgtctcccctccccaccccatccttgcaaagcactggggaaagtaaggccaatctggccctccctgtgtgacccgccttcgagttttccttaacagttagtacatttccttgtgttaccacgcatggggaagaaaacgcatggccccagaatgccacccccacctgacctccccggaagcaccccgcctctgcccagagcatgtgcttgcttctagagaatcccgttccagtcattgcgtggacagaaaacgtaagagtcctggggaggggtgggagggaatgaagctaggacctggggtgggggtgggggcggttgcatgcggacccggtattctgaaaagaaagaaatcttcaaacacctcggtcctgtccggtgaaaaaacgacagcattacacattctcgtgccaggaaatggttactcacccccgctctctggagtcctttggagctttctgataccattcacacgatggagcaattcacacgttcgttttctaagttctttattgtccaagcatataaggtgagcacagcacaaatggctgccatggaaagtcgtgcttccccagcataagaacagagccatctttgagccatgggaagcctcatttaatgagacctttttccccccttttaaatctgatatgttatcgcacttagggttttgttttattttggcttttaaggttgagagtgggctgaacgccttcataatgggggcggaggcgggagtgagaggagaagggagagagctgttctttttctaatgactacacctgaaaagtatcaagagacatctttgccaagagactgtagcagccagctgccccccgtggagcaaggtttaaagacaaaattaaatggcacctctgtttaagatctgcgtgtgtaaacaagactcgtttggggaaaacgacccgggaggagagcatctgtgatcaaaatctctcattgtaagcacaaattgttccgtgtctggttattaaaatcgctttgggtctataacagccactcttgtccccccttttaatagaaaattgtcattctagcctggatttctccccactggaggtggagggtgggaagagaagggagtcagctctgacagcttacaaactgggaagttctgtgcatctccagggattccagagttgaagatctggttgttggaagctgggcgcccagtgcttttttttttttttttttttagcccagatgccgtcaggacccactgaacaagggtgaactcgggtggtggtctcggttggccaaggctgagttgaacgcctcaggccaaaccccaagttgaaagggagcattgtggcttttataatccaatgatgcaatgatgataccagcttacaggagttctcagcaggtgctttttattaactgatgaagagctaaggctcacttttgatagataatatatatttattaaatgcattaatgtgtgttttataatgtacctttatcttcccccggctgactgttgcatacttataaaaaagaagttaaagaaatttcaagacaatcaatatgtaccataaacgactatataaatattacaaatttaaaaggctgtaaaccatgggcagataggttttattttcaaaatgctgttcttaacacaaaaataaaggctttactatttacttaagacgtgtggtagcttgtcaaaacaacccagtgcaactaactactaggctttcggatctgccttgagggtcggtctgtggcattttaaatgggagaatcttggttaacagcaaaccacagaacatattaaggtaataagtttacccataaaagcaggaactttctatataatactttgggacttagacaacaaaaatcctttgttacatctgtctgggtttaagtgtctcatcttgttgggtttgcagtaaaagttaaggagtggtctcctttggaaatgatcattaagtataaggtcttttttataaagagagtagtcagtcactaggtaaacttaaaaccaaattcagaggttggggacttaaattagaatatggatctttgcaaaggcggccacaagtgggaaaactggtaataagagcacttctgtattccttgggactagagttcattgtacattttaacagcagctggtgtagaagaatactcctgaggcactgaagaagtaatctggatgaatgaataaaatgtggggataatgcagaaagtgaagactggtcctttcttttctaaactatttgcattaaagcttgtttgcaatgaatcctatcttgtacagaaaagattccatttgcacatgttccaagtcttgttaaagaaatcacaagagagagagcatcatttggacattttccttgcacaaggtaacttgtgctcgaatgggcaaagatacgtcttagctatggttaagatgatggaattttcatcttggctg

SEQ ID NO: 8863 - protein, 88 aa, Homo sapiens [sequence omitted]

SEQ ID NO: 8864 - DNA, 3951 bp, Homo sapiens
atcccaactgctccgccaagtcacacaggaagacacctttggtgaaagactttaagttccagagaatcagaatttctcttaccgatttgcctccctggctgtgtctttcttgagggagaaatcggtaacagttgccgaaccaggccgcctcacagccaggaaatttggaaatcctagccaaggggatttcgtgtaaatgtgaacactgacgaactgaaaagctaacaccgactgcccgcccctcccctgccacacacacagacacgtaataccagaccaacctcaatccccgcaaactaaagcaaagctaattgcaaatagtattaggctcactggaaaatgtggctgggaagactgtttcatcctctgggggtagaacagaaccaagtgctggaccccaggtagcctcttggagatgaccgttgcgttgaggacaaatggggactttgccaccggcttgcctggtggtttgcacatttcaggggggtcaggagagttaaggaggttgtgggtgggattccaaggtgaggcccaactgaatcgtggggtgagctttatagccagtagaggtggagggaccctggcatgtgccaaagaagaggccctctgggtgatgaagtgaccatcacatttggaaagtgatcaaccactgttccttctatggggctcttgctctagtgtctatggtgagaacacaggccccgccccttcccttgtagagccatagaaatattctggcttggggcagcagtcccttcttcccttgatcatctcgccctgttcctacacttacgggtgtatctccaaatcctctcccaattttattcccttattcatttcaagagctccaatggggtctccagctgaaagcccctccgggaggcaggttggaaggcaggcaccacggcaggttttccgcgatgatgtcacctagcagggcttcaggggttcccactaggatgcagagatgacctctcgctgcctcacaagcagtgacacctcgggtcctttccgttgctatggtgaaaattcctggatggaatggatcacatgagggtttcttgttgcttttggagggtgtgggggatattttgttttggtttttctgcaggttccatgaaaacagcccttttccaagcccattgtttctgtcatggtttccatctgtcctgagcaagtcattcctttgttatttagcatttcgaacatctcggccattcaaagcccccatgttctctgcactgtttggccagcataacctctagcatcgattcaaagcagagttttaacctgacggcatggaatgtataaatgagggtgggtccttctgcagatactctaatcactacattgctttttctataaaactacccataagcctttaacctttaaagaaaaatgaaaaaggttagtgtttgggggccgggggaggactgaccgcttcataagccagtacgtctgagctgagtatgtttcaataaaccttttgatatttctcaaggccctagtctctgctgtctcccctccccaccccatccttgcaaagcactggggaaagtaaggccaatctggccctccctgtgtgacccgccttcgagttttccttaacagttagtacatttccttgtgttaccacgcatggggaagaaaacgcatggccccagaatgccacccccacctgacctccccggaagcaccccgcctctgcccagagcatgtgcttgcttctagagaatcccgttccagtcattgcgtggacagaaaacgtaagagtcctggggaggggtgggagggaatgaagctaggacctggggtgggggtgggggcggttgcatgcggacccggtattctgaaaagaaagaaatcttcaaacacctcggtcctgtccggtgaaaaaacgacagcattacacattctcgtgccaggaaatggttactcacccccgctctctggagtcctttggagctttctgataccattcacacgatggagcaattcacacgttcgttttctaagttctttattgtccaagcatataaggtgagcacagcacaaatggctgccatggaaagtcgtgcttccccagcataagaacagagccatctttgagccatgggaagcctcatttaatgagacctttttccccccttttaaatctgatatgttatcgcacttagggttttgttttattttggcttttaaggttgagagtgggctgaacgccttcataatgggggcggaggcgggagtgagaggagaagggagagagctgttctttttctaatgactacacctgaaaagtatcaagagacatctttgccaagagactgtagcagccagctgccccccgtggagcaaggtttaaagacaaaattaaatggcacctctgtttaagatctgcgtgtgtaaacaagactcgtttggggaaaacgacccgggaggagagcatctgtgatcaaaatctctcattgtaagcacaaattgttccgtgtctggttattaaaatcgctttgggtctataacagccactcttgtccccccttttaatagaaaattgtcattctagcctggatttctccccactggaggtggagggtgggaagagaagggagtcagctctgacagcttacaaactgggaagttctgtgcatctccagggattccagagttgaagatctggttgttggaagctgggcgcccagtgcttttttttttttttttttttagcccagatgccgtcaggacccactgaacaagggtgaactcgggtggtggtctcggttggccaaggctgagttgaacgcctcaggccaaaccccaagttgaaagggagcattgtggcttttataatccaatgatgcaatgatgataccagcttacaggagttctcagcaggtgctttttattaactgatgaagagctaaggctcacttttgatagataatatatatttattaaatgcattaatgtgtgttttataatgtacctttatcttcccccggctgactgttgcatacttataaaaaagaagttaaagaaatttcaagacaatcaatatgtaccataaacgactatataaatattacaaatttaaaaggctgtaaaccatgggcagataggttttattttcaaaatgctgttcttaacacaaaaataaaggctttactatttacttaagacgtgtggtagcttgtcaaaacaacccagtgcaactaactactaggctttcggatctgccttgagggtcggtctgtggcattttaaatgggagaatcttggttaacagcaaaccacagaacatattaaggtaataagtttacccataaaagcaggaactttctatataatactttgggacttagacaacaaaaatcctttgttacatctgtctgggtttaagtgtctcatcttgttgggtttgcagtaaaagttaaggagtggtctcctttggaaatgatcattaagtataaggtcttttttataaagagagtagtcagtcactaggtaaacttaaaaccaaattcagaggttggggacttaaattagaatatggatctttgcaaaggcggccacaagtgggaaaactggtaataagagcacttctgtattccttgggactagagttcattgtacattttaacagcagctggtgtagaagaatactcctgaggcactgaagaagtaatctggatgaatgaataaaatgtggggataatgcagaaagtgaagactggtcctttcttttctaaactatttgcattaaagcttgtttgcaatgaatcctatcttgtacagaaaagattccatttgcacatgttccaagtcttgttaaagaaatcacaagagagagagcatcatttggacattttccttgcacaaggtaacttgtgctcgaatgggcaaagatacgtcttagctatggttaagatgatggaattttcatcttggctg

SEQ ID NO: 8865 - protein, 129 aa, Homo sapiens [sequence omitted]

SEQ ID NO: 8866 - DNA, 4505 bp, Homo sapiens
gaactttacatgaatggctttctgtagtgagaaggcgcctgtcacccgcggcctgcagaggctgcgtggcttggagggggaaccagaggcccaaccatgggcctccttcccctggtctctacagcagcttttcccaaacccactgagatgggtcaggctcctagagagcctgagaacaaagcccctttgtgacttttgttttgaatcaggcttgtgacaaaggggaggagccactgggttgggtggatgggggtgcccggagcgcgctgttgttgcaggggaagaaaacaaaattgtgtcttttttttggcaatgttgtcttgccaatccctccctcccccagctctccgaacagcaggatttcccaacggcagcttgggaaaaagacccagtggcagcttggggaaaagacccagcgctccgtttagaagcaacgtgtatcagccaactgagatggccgtcgtgctcaacggtgggaccatcccaactgctccgccaagtcacacaggaagacacctttggtgaaagactttaagttccagagaatcagaatttctcttaccgatttgcctccctggctgtgtctttcttgagggagaaatcggtaacagttgccgaaccaggccgcctcacagccaggaaatttggaaatcctagccaaggggatttcgtgtaaatgtgaacactgacgaactgaaaagctaacaccgactgcccgcccctcccctgccacacacacagacacgtaataccagaccaacctcaatccccgcaaactaaagcaaagctaattgcaaatagtattaggctcactggaaaatgtggctgggaagactgtttcatcctctgggggtagaacagaaccaaattcacagctggtgggccagactggtgttggttggaggtggggggctcccactcttatcacctctccccagcaagtgctggaccccaggtagcctcttggagatgaccgttgcgttgaggacaaatggggactttgccaccggcttgcctggtggtttgcacatttcaggggggtcaggagagttaaggaggttgtgggtgggattccaaggtgaggcccaactgaatcgtggggtgagctttatagccagtagaggtggagggaccctggcatgtgccaaagaagaggccctctgggtgatgaagtgaccatcacatttggaaagtgatcaaccactgttccttctatggggctcttgctctagtgtctatggtgagaacacaggccccgccccttcccttgtagagccatagaaatattctggcttggggcagcagtcccttcttcccttgatcatctcgccctgttcctacacttacgggtgtatctccaaatcctctcccaattttattcccttattcatttcaagagctccaatggggtctccagctgaaagcccctccgggaggcaggttggaaggcaggcaccacggcaggttttccgcgatgatgtcacctagcagggcttcaggggttcccactaggatgcagagatgacctctcgctgcctcacaagcagtgacacctcgggtcctttccgttgctatggtgaaaattcctggatggaatggatcacatgagggtttcttgttgcttttggagggtgtgggggatattttgttttggtttttctgcaggttccatgaaaacagcccttttccaagcccattgtttctgtcatggtttccatctgtcctgagcaagtcattcctttgttatttagcatttcgaacatctcggccattcaaagcccccatgttctctgcactgtttggccagcataacctctagcatcgattcaaagcagagttttaacctgacggcatggaatgtataaatgagggtgggtccttctgcagatactctaatcactacattgctttttctataaaactacccataagcctttaacctttaaagaaaaatgaaaaaggttagtgtttgggggccgggggaggactgaccgcttcataagccagtacgtctgagctgagtatgtttcaataaaccttttgatatttctcaaggccctagtctctgctgtctcccctccccaccccatccttgcaaagcactggggaaagtaaggccaatctggccctccctgtgtgacccgccttcgagttttccttaacagttagtacatttccttgtgttaccacgcatggggaagaaaacgcatggccccagaatgccacccccacctgacctccccggaagcaccccgcctctgcccagagcatgtgcttgcttctagagaatcccgttccagtcattgcgtggacagaaaacgtaagagtcctggggaggggtgggagggaatgaagctaggacctggggtgggggtgggggcggttgcatgcggacccggtattctgaaaagaaagaaatcttcaaacacctcggtcctgtccggtgaaaaaacgacagcattacacattctcgtgccaggaaatggttactcacccccgctctctggagtcctttggagctttctgataccattcacacgatggagcaattcacacgttcgttttctaagttctttattgtccaagcatataaggtgagcacagcacaaatggctgccatggaaagtcgtgcttccccagcataagaacagagccatctttgagccatgggaagcctcatttaatgagacctttttccccccttttaaatctgatatgttatcgcacttagggttttgttttattttggcttttaaggttgagagtgggctgaacgccttcataatgggggcggaggcgggagtgagaggagaagggagagagctgttctttttctaatgactacacctgaaaagtatcaagagacatctttgccaagagactgtagcagccagctgccccccgtggagcaaggtttaaagacaaaattaaatggcacctctgtttaagatctgcgtgtgtaaacaagactcgtttggggaaaacgacccgggaggagagcatctgtgatcaaaatctctcattgtaagcacaaattgttccgtgtctggttattaaaatcgctttgggtctataacagccactcttgtccccccttttaatagaaaattgtcattctagcctggatttctccccactggaggtggagggtgggaagagaagggagtcagctctgacagcttacaaactgggaagttctgtgcatctccagggattccagagttgaagatctggttgttggaagctgggcgcccagtgcttttttttttttttttttttagcccagatgccgtcaggacccactgaacaagggtgaactcgggtggtggtctcggttggccaaggctgagttgaacgcctcaggccaaaccccaagttgaaagggagcattgtggcttttataatccaatgatgcaatgatgataccagcttacaggagttctcagcaggtgctttttattaactgatgaagagctaaggctcacttttgatagataatatatatttattaaatgcattaatgtgtgttttataatgtacctttatcttcccccggctgactgttgcatacttataaaaaagaagttaaagaaatttcaagacaatcaatatgtaccataaacgactatataaatattacaaatttaaaaggctgtaaaccatgggcagataggttttattttcaaaatgctgttcttaacacaaaaataaaggctttactatttacttaagacgtgtggtagcttgtcaaaacaacccagtgcaactaactactaggctttcggatctgccttgagggtcggtctgtggcattttaaatgggagaatcttggttaacagcaaaccacagaacatattaaggtaataagtttacccataaaagcaggaactttctatataatactttgggacttagacaacaaaaatcctttgttacatctgtctgggtttaagtgtctcatcttgttgggtttgcagtaaaagttaaggagtggtctcctttggaaatgatcattaagtataaggtcttttttataaagagagtagtcagtcactaggtaaacttaaaaccaaattcagaggttggggacttaaattagaatatggatctttgcaaaggcggccacaagtgggaaaactggtaataagagcacttctgtattccttgggactagagttcattgtacattttaacagcagctggtgtagaagaatactcctgaggcactgaagaagtaatctggatgaatgaataaaatgtggggataatgcagaaagtgaagactggtcctttcttttctaaactatttgcattaaagcttgtttgcaatgaatcctatcttgtacagaaaagattccatttgcacatgttccaagtcttgttaaagaaatcacaagagagagagcatcatttggacattttccttgcacaaggtaacttgtgctcgaatgggcaaagatacgtcttagctatggttaagatgatggaattttcatcttggctg

SEQ ID NO: 8867 - protein, 92 aa, Homo sapiens
MGVPGARCCCRGRKQNCVFFLAMLSCQSLPPPALRTAGFPNGSLGKRPSGSLGKRPSAPFRSNVYQPTEMAVVLNGGTIPTAPPSHTGRHLW

SEQ ID NO: 8868 - DNA, 4945 bp, Homo sapiens
tcatcaaggagaaggagaagaagagccctgtgggcctccactttctgttcctcctggggaccctgggcctctttgggctgacgtttgccttcatcatccaggaggacgagaccatctgctctgtccgccgcttcctctggggcgtcctctttgcgctctgcttctcctgcctgctgagccaggcatggcgcgtgcggaggctggtgcggcatggcacgggccccgcgggctggcagctggtgggcctggcgctgtgcctgatgctggtgcaagtcatcatcgctgtggagtggctggtgctcaccgtgctgcgtgacacaaggccagcctgcgcctacgagcccatggactttgtgatggccctcatctacgacatggtactgcttgtggtcaccctggggctggccctcttcactctgtgcggcaagttcaagaggtggaagctgaacggggccttcctcctcatcacagccttcctctctgtgctcatctgggtggcctggatgaccatgtacctcttcggcaatgtcaagctgcagcagggggatgcctggaacgaccccaccttggccatcacgctggcggccagcggctgggtcttcgtcatcttccacgccatccctgagatccactgcacccttctgccagccctgcaggagaacacgcccaactacttcgacacgtcgcagcccaggatgcgggagacggccttcgaggaggacgtgcagctgccgcgggcctatatggagaacaaggccttctccatggatgaacacaatgcagctctccgaacagcaggatttcccaacggcagcttgggaaaaagacccagtggcagcttggggaaaagacccagcgctccgtttagaagcaacgtgtatcagccaactgagatggccgtcgtgctcaacggtgggaccatcccaactgctccgccaagtcacacaggaagacacctttggtgaaagactttaagttccagagaatcagaatttctcttaccgatttgcctccctggctgtgtctttcttgagggagaaatcggtaacagttgccgaaccaggccgcctcacagccaggaaatttggaaatcctagccaaggggatttcgtgtaaatgtgaacactgacgaactgaaaagctaacaccgactgcccgcccctcccctgccacacacacagacacgtaataccagaccaacctcaatccccgcaaactaaagcaaagctaattgcaaatagtattaggctcactggaaaatgtggctgggaagactgtttcatcctctgggggtagaacagaaccaaattcacagctggtgggccagactggtgttggttggaggtggggggctcccactcttatcacctctccccagcaagtgctggaccccaggtagcctcttggagatgaccgttgcgttgaggacaaatggggactttgccaccggcttgcctggtggtttgcacatttcaggggggtcaggagagttaaggaggttgtgggtgggattccaaggtgaggcccaactgaatcgtggggtgagctttatagccagtagaggtggagggaccctggcatgtgccaaagaagaggccctctgggtgatgaagtgaccatcacatttggaaagtgatcaaccactgttccttctatggggctcttgctctagtgtctatggtgagaacacaggccccgccccttcccttgtagagccatagaaatattctggcttggggcagcagtcccttcttcccttgatcatctcgccctgttcctacacttacgggtgtatctccaaatcctctcccaattttattcccttattcatttcaagagctccaatggggtctccagctgaaagcccctccgggaggcaggttggaaggcaggcaccacggcaggttttccgcgatgatgtcacctagcagggcttcaggggttcccactaggatgcagagatgacctctcgctgcctcacaagcagtgacacctcgggtcctttccgttgctatggtgaaaattcctggatggaatggatcacatgagggtttcttgttgcttttggagggtgtgggggatattttgttttggtttttctgcaggttccatgaaaacagcccttttccaagcccattgtttctgtcatggtttccatctgtcctgagcaagtcattcctttgttatttagcatttcgaacatctcggccattcaaagcccccatgttctctgcactgtttggccagcataacctctagcatcgattcaaagcagagttttaacctgacggcatggaatgtataaatgagggtgggtccttctgcagatactctaatcactacattgctttttctataaaactacccataagcctttaacctttaaagaaaaatgaaaaaggttagtgtttgggggccgggggaggactgaccgcttcataagccagtacgtctgagctgagtatgtttcaataaaccttttgatatttctcaaggccctagtctctgctgtctcccctccccaccccatccttgcaaagcactggggaaagtaaggccaatctggccctccctgtgtgacccgccttcgagttttccttaacagttagtacatttccttgtgttaccacgcatggggaagaaaacgcatggccccagaatgccacccccacctgacctccccggaagcaccccgcctctgcccagagcatgtgcttgcttctagagaatcccgttccagtcattgcgtggacagaaaacgtaagagtcctggggaggggtgggagggaatgaagctaggacctggggtgggggtgggggcggttgcatgcggacccggtattctgaaaagaaagaaatcttcaaacacctcggtcctgtccggtgaaaaaacgacagcattacacattctcgtgccaggaaatggttactcacccccgctctctggagtcctttggagctttctgataccattcacacgatggagcaattcacacgttcgttttctaagttctttattgtccaagcatataaggtgagcacagcacaaatggctgccatggaaagtcgtgcttccccagcataagaacagagccatctttgagccatgggaagcctcatttaatgagacctttttccccccttttaaatctgatatgttatcgcacttagggttttgttttattttggcttttaaggttgagagtgggctgaacgccttcataatgggggcggaggcgggagtgagaggagaagggagagagctgttctttttctaatgactacacctgaaaagtatcaagagacatctttgccaagagactgtagcagccagctgccccccgtggagcaaggtttaaagacaaaattaaatggcacctctgtttaagatctgcgtgtgtaaacaagactcgtttggggaaaacgacccgggaggagagcatctgtgatcaaaatctctcattgtaagcacaaattgttccgtgtctggttattaaaatcgctttgggtctataacagccactcttgtccccccttttaatagaaaattgtcattctagcctggatttctccccactggaggtggagggtgggaagagaagggagtcagctctgacagcttacaaactgggaagttctgtgcatctccagggattccagagttgaagatctggttgttggaagctgggcgcccagtgcttttttttttttttttttttagcccagatgccgtcaggacccactgaacaagggtgaactcgggtggtggtctcggttggccaaggctgagttgaacgcctcaggccaaaccccaagttgaaagggagcattgtggcttttataatccaatgatgcaatgatgataccagcttacaggagttctcagcaggtgctttttattaactgatgaagagctaaggctcacttttgatagataatatatatttattaaatgcattaatgtgtgttttataatgtacctttatcttcccccggctgactgttgcatacttataaaaaagaagttaaagaaatttcaagacaatcaatatgtaccataaacgactatataaatattacaaatttaaaaggctgtaaaccatgggcagataggttttattttcaaaatgctgttcttaacacaaaaataaaggctttactatttacttaagacgtgtggtagcttgtcaaaacaacccagtgcaactaactactaggctttcggatctgccttgagggtcggtctgtggcattttaaatgggagaatcttggttaacagcaaaccacagaacatattaaggtaataagtttacccataaaagcaggaactttctatataatactttgggacttagacaacaaaaatcctttgttacatctgtctgggtttaagtgtctcatcttgttgggtttgcagtaaaagttaaggagtggtctcctttggaaatgatcattaagtataaggtcttttttataaagagagtagtcagtcactaggtaaacttaaaaccaaattcagaggttggggacttaaattagaatatggatctttgcaaaggcggccacaagtgggaaaactggtaataagagcacttctgtattccttgggactagagttcattgtacattttaacagcagctggtgtagaagaatactcctgaggcactgaagaagtaatctggatgaatgaataaaatgtggggataatgcagaaagtgaagactggtcctttcttttctaaactatttgcattaaagcttgtttgcaatgaatcctatcttgtacagaaaagattccatttgcacatgttccaagtcttgttaaagaaatcacaagagagagagcatcatttggacattttccttgcacaaggtaacttgtgctcgaatgggcaaagatacgtcttagctatggttaagatgatggaattttcatcttggctg

SEQ ID NO: 8869 - protein, 234 aa, Homo sapiens
MLVQVIIAVEWLVLTVLRDTRPACAYEPMDFVMALIYDMVLLVVTLGLALFTLCGKFKRWKLNGAFLLITAFLSVLIWVAWMTMYLFGNVKLQQGDAWNDPTLAITLAASGWVFVIFHAIPEIHCTLLPALQENTPNYFDTSQPRMRETAFEEDVQLPRAYMENKAFSMDEHNAALRTAGFPNGSLGKRPSGSLGKRPSAPFRSNVYQPTEMAVVLNGGTIPTAPPSHTGRHLW

SEQ ID NO: 8870 - DNA, 5384 bp, Homo sapiens
gggccgcggccgctgcagcagcgcgggccgggccagggggcgcctcgcgcggcagcgactctggcaggcgctgcagtgaagctggacccgcaggcgggcgtgcgtggagcgggggccgcggccgcgccgcagagatgtgactcgggccgaaggccagctggagcgtcggcgctgcggggccgcgggggtcgaatgttcgtggcatcagagagaaagatgagagctcaccaggtgctcaccttcctcctgctcttcgtgatcacctcggtggcctctgaaaacgccagcacatcccgaggctgtgggctggacctcctccctcagtacgtgtccctgtgcgacctggacgccatctggggcattgtggtggaggcggtggccggggcgggcgccctgatcacactgctcctgatgctcatcctcctggtgcggctgcccttcatcaaggagaaggagaagaagagccctgtgggcctccactttctgttcctcctggggaccctgggcctctttgggctgacgtttgccttcatcatccaggaggacgagaccatctgctctgtccgccgcttcctctggggcgtcctctttgcgctctgcttctcctgcctgctgagccaggcatggcgcgtgcggaggctggtgcggcatggcacgggccccgcgggctggcagctggtgggcctggcgctgtgcctgatgctggtgcaagtcatcatcgctgtggagtggctggtgctcaccgtgctgcgtgacacaaggccagcctgcgcctacgagcccatggactttgtgatggccctcatctacgacatggtactgcttgtggtcaccctggggctggccctcttcactctgtgcggcaagttcaagaggtggaagctgaacggggccttcctcctcatcacagccttcctctctgtgctcatctgggtggcctggatgaccatgtacctcttcggcaatgtcaagctgcagcagggggatgcctggaacgaccccaccttggccatcacgctggcggccagcggctgggtcttcgtcatcttccacgccatccctgagatccactgcacccttctgccagccctgcaggagaacacgcccaactacttcgacacgtcgcagcccaggatgcgggagacggccttcgaggaggacgtgcagctgccgcgggcctatatggagaacaaggccttctccatggatgaacacaatgcagctctccgaacagcaggatttcccaacggcagcttgggaaaaagacccagtggcagcttggggaaaagacccagcgctccgtttagaagcaacgtgtatcagccaactgagatggccgtcgtgctcaacggtgggaccatcccaactgctccgccaagtcacacaggaagacacctttggtgaaagactttaagttccagagaatcagaatttctcttaccgatttgcctccctggctgtgtctttcttgagggagaaatcggtaacagttgccgaaccaggccgcctcacagccaggaaatttggaaatcctagccaaggggatttcgtgtaaatgtgaacactgacgaactgaaaagctaacaccgactgcccgcccctcccctgccacacacacagacacgtaataccagaccaacctcaatccccgcaaactaaagcaaagctaattgcaaatagtattaggctcactggaaaatgtggctgggaagactgtttcatcctctgggggtagaacagaaccaaattcacagctggtgggccagactggtgttggttggaggtggggggctcccactcttatcacctctccccagcaagtgctggaccccaggtagcctcttggagatgaccgttgcgttgaggacaaatggggactttgccaccggcttgcctggtggtttgcacatttcaggggggtcaggagagttaaggaggttgtgggtgggattccaaggtgaggcccaactgaatcgtggggtgagctttatagccagtagaggtggagggaccctggcatgtgccaaagaagaggccctctgggtgatgaagtgaccatcacatttggaaagtgatcaaccactgttccttctatggggctcttgctctagtgtctatggtgagaacacaggccccgccccttcccttgtagagccatagaaatattctggcttggggcagcagtcccttcttcccttgatcatctcgccctgttcctacacttacgggtgtatctccaaatcctctcccaattttattcccttattcatttcaagagctccaatggggtctccagctgaaagcccctccgggaggcaggttggaaggcaggcaccacggcaggttttccgcgatgatgtcacctagcagggcttcaggggttcccactaggatgcagagatgacctctcgctgcctcacaagcagtgacacctcgggtcctttccgttgctatggtgaaaattcctggatggaatggatcacatgagggtttcttgttgcttttggagggtgtgggggatattttgttttggtttttctgcaggttccatgaaaacagcccttttccaagcccattgtttctgtcatggtttccatctgtcctgagcaagtcattcctttgttatttagcatttcgaacatctcggccattcaaagcccccatgttctctgcactgtttggccagcataacctctagcatcgattcaaagcagagttttaacctgacggcatggaatgtataaatgagggtgggtccttctgcagatactctaatcactacattgctttttctataaaactacccataagcctttaacctttaaagaaaaatgaaaaaggttagtgtttgggggccgggggaggactgaccgcttcataagccagtacgtctgagctgagtatgtttcaataaaccttttgatatttctcaaggccctagtctctgctgtctcccctccccaccccatccttgcaaagcactggggaaagtaaggccaatctggccctccctgtgtgacccgccttcgagttttccttaacagttagtacatttccttgtgttaccacgcatggggaagaaaacgcatggccccagaatgccacccccacctgacctccccggaagcaccccgcctctgcccagagcatgtgcttgcttctagagaatcccgttccagtcattgcgtggacagaaaacgtaagagtcctggggaggggtgggagggaatgaagctaggacctggggtgggggtgggggcggttgcatgcggacccggtattctgaaaagaaagaaatcttcaaacacctcggtcctgtccggtgaaaaaacgacagcattacacattctcgtgccaggaaatggttactcacccccgctctctggagtcctttggagctttctgataccattcacacgatggagcaattcacacgttcgttttctaagttctttattgtccaagcatataaggtgagcacagcacaaatggctgccatggaaagtcgtgcttccccagcataagaacagagccatctttgagccatgggaagcctcatttaatgagacctttttccccccttttaaatctgatatgttatcgcacttagggttttgttttattttggcttttaaggttgagagtgggctgaacgccttcataatgggggcggaggcgggagtgagaggagaagggagagagctgttctttttctaatgactacacctgaaaagtatcaagagacatctttgccaagagactgtagcagccagctgccccccgtggagcaaggtttaaagacaaaattaaatggcacctctgtttaagatctgcgtgtgtaaacaagactcgtttggggaaaacgacccgggaggagagcatctgtgatcaaaatctctcattgtaagcacaaattgttccgtgtctggttattaaaatcgctttgggtctataacagccactcttgtccccccttttaatagaaaattgtcattctagcctggatttctccccactggaggtggagggtgggaagagaagggagtcagctctgacagcttacaaactgggaagttctgtgcatctccagggattccagagttgaagatctggttgttggaagctgggcgcccagtgcttttttttttttttttttttagcccagatgccgtcaggacccactgaacaagggtgaactcgggtggtggtctcggttggccaaggctgagttgaacgcctcaggccaaaccccaagttgaaagggagcattgtggcttttataatccaatgatgcaatgatgataccagcttacaggagttctcagcaggtgctttttattaactgatgaagagctaaggctcacttttgatagataatatatatttattaaatgcattaatgtgtgttttataatgtacctttatcttcccccggctgactgttgcatacttataaaaaagaagttaaagaaatttcaagacaatcaatatgtaccataaacgactatataaatattacaaatttaaaaggctgtaaaccatgggcagataggttttattttcaaaatgctgttcttaacacaaaaataaaggctttactatttacttaagacgtgtggtagcttgtcaaaacaacccagtgcaactaactactaggctttcggatctgccttgagggtcggtctgtggcattttaaatgggagaatcttggttaacagcaaaccacagaacatattaaggtaataagtttacccataaaagcaggaactttctatataatactttgggacttagacaacaaaaatcctttgttacatctgtctgggtttaagtgtctcatcttgttgggtttgcagtaaaagttaaggagtggtctcctttggaaatgatcattaagtataaggtcttttttataaagagagtagtcagtcactaggtaaacttaaaaccaaattcagaggttggggacttaaattagaatatggatctttgcaaaggcggccacaagtgggaaaactggtaataagagcacttctgtattccttgggactagagttcattgtacattttaacagcagctggtgtagaagaatactcctgaggcactgaagaagtaatctggatgaatgaataaaatgtggggataatgcagaaagtgaagactggtcctttcttttctaaactatttgcattaaagcttgtttgcaatgaatcctatcttgtacagaaaagattccatttgcacatgttccaagtcttgttaaagaaatcacaagagagagagcatcatttggacattttccttgcacaaggtaacttgtgctcgaatgggcaaagatacgtcttagctatggttaagatgatggaattttcatcttggctg

SEQ ID NO: 8871 - protein, 403 aa, Homo sapiens; identical to SEQ ID NO: 1332

SEQ ID NO: 8872 - DNA, 494 bp, Homo sapiens
ggaaaacgacccgggaggagagcatctgtgatcaaaatctctcattcccagatgccgtcaggacccactgaacaagggtgaactcgggtggtggtctcggttggccaaggctgagttgaacgcctcaggccaaaccccaagttgaaagggagcattgtggcttttataatccaatgatgcaatgatgataccagcttacaggagttctcagcaggtgctttttattaactgatgaagagctaaggctcacttttgatagataatatatatttattaaatgcattaatgtgtgttttataatgtacctttatcttcccccggctgactgttgcatacttataaaaaagaagttaaagaaatttcaagacaatcaatatgtaccataaacgactatataaatattacaaatttaaaaggctgtaaaccatgggcagataggttttattttcaaaatgctgttcttaacacaaaaataaaggctttactatttactt

SEQ ID NO: 8873 - protein, 37 aa, Homo sapiens
SKSLIPRCRQDPLNKGELGWWSRLAKAELNASGQTPS

SEQ ID NO: 8874 - DNA, 3048 bp, Homo sapiens
ggtaacagttgccgaaccaggccgcctcacagccaggaaatttggaaatcctagccaaggggatttcgtgtaaatgtgaacactgacgaactgaaaagctaacaccgactgcccgcccctcccctgccacacacacagacacgtaataccagaccaacctcaatccccgcaaactaaagcaaagctaattgcaaatagtattaggctcactggaaaatgtggctgggaagactgtttcatcctctgggggtagaacagaaccaaattcacagctggtgggccagactggtgttggttggaggtggggggctcccactcttatcacctctccccagcaagtgctggaccccaggtagcctcttggagatgaccgttgcgttgaggacaaatggggactttgccaccggcttgcctggtggtttgcacatttcaggggggtcaggagagttaaggaggttgtgggtgggattccaaggtgaggcccaactgaatcgtggggtgagctttatagccagtagaggtggagggaccctggcatgtgccaaagaagaggccctctgggtgatgaagtgaccatcacatttggaaagtgatcaaccactgttccttctatggggctcttgctctagtgtctatggtgagaacacaggccccgccccttcccttgtagagccatagaaatattctggcttggggcagcagtcccttcttcccttgatcatctcgccctgttcctacacttacgggtgtatctccaaatcctctcccaattttattcccttattcatttcaagagctccaatggggtctccagctgaaagcccctccgggaggcaggttggaaggcaggcaccacggcaggttttccgcgatgatgtcactttccgttgctatggtgaaaattcctggatggaatggatcacatgagggtttcttgttgcttttggagggtgtgggggatattttgttttggtttttctgcaggttccatgaaaacagcccttttccaagcccattgtttctgtcatggtttccatctgtcctgagcaagtcattcctttgttatttagcatttcgaacatctcggccattcaaagcccccatgttctctgcactgtttggccagcataacctctagcatcgattcaaagcagagttttaacctgacggcatggaatgtataaatgagggtgggtccttctgcagatactctaatcactacattgctttttctataaaactacccataagcctttaacctttaaagaaaaatgaaaaaggttagtgtttgggggccgggggaggactgaccgcttcataagccagtacgtctgagctgagtatgtttcaataaaccttttgatatttctcaaggccctagtctctgctgtctcccctccccaccccatccttgcaaagcactggggaaagtaaggccaatctggccctccctgtgtgacccgccttcgagttttccttaacagttagtacatttccttgtgttaccacgcatggggaagaaaacgcatggccccagaatgccacccccacctgacctccccggaagcaccccgcctctgcccagagcatgtgcttgcttctagagaatcccgttccagtcattgcgtggacagaaaacgtaagagtcctggggaggggtgggagggaatgaagctaggacctggggtgggggtgggggcggttgcatgcggacccggtattctgaaaagaaagaaatcttcaaacacctcggtcctgtccggtgaaaaaacgacagcattacacattctcgtgccaggaaatggttactcacccccgctctctggagtcctttggagctttctgataccattcacacgatggagcaattcacacgttcgttttctaagttctttattgtccaagcatataaggtgagcacagcacaaatggctgccatggaaagtcgtgcttccccagcataagaacagagccatctttgagccatgggaagcctcatttaatgagacctttttccccccttttaaatctgatatgttatcgcacttagggttttgttttattttggcttttaaggttgagagtgggctgaacgccttcataatgggggcggaggcgggagtgagaggagaagggagagagctgttctttttctaatgactacacctgaaaagtatcaagagacatctttgccaagagactgtagcagccagctgccccccgtggagcaaggtttaaagacaaaattaaatggcacctctgtttaagatctgcgtgtgtaaacaagactcgtttggggaaaacgacccgggaggagagcatctgtgatcaaaatctctcattgtaagcacaaattgttccgtgtctggttattaaaatcgctttgggtctataacagccactcttgtccccccttttaatagaaaattgtcattctagcctggatttctccccactggaggtggagggtgggaagagaagggagtcagctctgacagcttacaaactgggaagttctgtgcatctccagggattccagagttgaagatctggttgttggaagctgggcgcccagtgcttttttttttttttttttttagcccagatgccgtcaggacccactgaacaagggtgaactcgggtggtggtctcggttggccaaggctgagttgaacgcctcaggccaaaccccaagttgaaagggagcattgtggcttttataatccaatgatgcaatgatgataccagcttacaggagttctcagcaggtgctttttattaactgatgaagagctaaggctcacttttgatagataatatatatttattaaatgcattaatgtgtgttttataatgtacctttatcttcccccggctgactgttgcatacttataaaaaagaagttaaagaaatttcaagacaatcaatatgtaccataaacgactatataaatattacaaatttaaaaggctgtaaaccatgggcagataggttttattttcaaaatgctgttcttaacacaaaaataaaggctttactatttactt

SEQ ID NO: 8875 - protein, 88 aa, Homo sapiens [sequence omitted]

SEQ ID NO: 8876 - DNA, 3175 bp, Homo sapiens
atcccaactgctccgccaagtcacacaggaagacacctttggtgaaagactttaagttccagagaatcagaatttctcttaccgatttgcctccctggctgtgtctttcttgagggagaaatcggtaacagttgccgaaccaggccgcctcacagccaggaaatttggaaatcctagccaaggggatttcgtgtaaatgtgaacactgacgaactgaaaagctaacaccgactgcccgcccctcccctgccacacacacagacacgtaataccagaccaacctcaatccccgcaaactaaagcaaagctaattgcaaatagtattaggctcactggaaaatgtggctgggaagactgtttcatcctctgggggtagaacagaaccaagtgctggaccccaggtagcctcttggagatgaccgttgcgttgaggacaaatggggactttgccaccggcttgcctggtggtttgcacatttcaggggggtcaggagagttaaggaggttgtgggtgggattccaaggtgaggcccaactgaatcgtggggtgagctttatagccagtagaggtggagggaccctggcatgtgccaaagaagaggccctctgggtgatgaagtgaccatcacatttggaaagtgatcaaccactgttccttctatggggctcttgctctagtgtctatggtgagaacacaggccccgccccttcccttgtagagccatagaaatattctggcttggggcagcagtcccttcttcccttgatcatctcgccctgttcctacacttacgggtgtatctccaaatcctctcccaattttattcccttattcatttcaagagctccaatggggtctccagctgaaagcccctccgggaggcaggttggaaggcaggcaccacggcaggttttccgcgatgatgtcacctagcagggcttcaggggttcccactaggatgcagagatgacctctcgctgcctcacaagcagtgacacctcgggtcctttccgttgctatggtgaaaattcctggatggaatggatcacatgagggtttcttgttgcttttggagggtgtgggggatattttgttttggtttttctgcaggttccatgaaaacagcccttttccaagcccattgtttctgtcatggtttccatctgtcctgagcaagtcattcctttgttatttagcatttcgaacatctcggccattcaaagcccccatgttctctgcactgtttggccagcataacctctagcatcgattcaaagcagagttttaacctgacggcatggaatgtataaatgagggtgggtccttctgcagatactctaatcactacattgctttttctataaaactacccataagcctttaacctttaaagaaaaatgaaaaaggttagtgtttgggggccgggggaggactgaccgcttcataagccagtacgtctgagctgagtatgtttcaataaaccttttgatatttctcaaggccctagtctctgctgtctcccctccccaccccatccttgcaaagcactggggaaagtaaggccaatctggccctccctgtgtgacccgccttcgagttttccttaacagttagtacatttccttgtgttaccacgcatggggaagaaaacgcatggccccagaatgccacccccacctgacctccccggaagcaccccgcctctgcccagagcatgtgcttgcttctagagaatcccgttccagtcattgcgtggacagaaaacgtaagagtcctggggaggggtgggagggaatgaagctaggacctggggtgggggtgggggcggttgcatgcggacccggtattctgaaaagaaagaaatcttcaaacacctcggtcctgtccggtgaaaaaacgacagcattacacattctcgtgccaggaaatggttactcacccccgctctctggagtcctttggagctttctgataccattcacacgatggagcaattcacacgttcgttttctaagttctttattgtccaagcatataaggtgagcacagcacaaatggctgccatggaaagtcgtgcttccccagcataagaacagagccatctttgagccatgggaagcctcatttaatgagacctttttccccccttttaaatctgatatgttatcgcacttagggttttgttttattttggcttttaaggttgagagtgggctgaacgccttcataatgggggcggaggcgggagtgagaggagaagggagagagctgttctttttctaatgactacacctgaaaagtatcaagagacatctttgccaagagactgtagcagccagctgccccccgtggagcaaggtttaaagacaaaattaaatggcacctctgtttaagatctgcgtgtgtaaacaagactcgtttggggaaaacgacccgggaggagagcatctgtgatcaaaatctctcattgtaagcacaaattgttccgtgtctggttattaaaatcgctttgggtctataacagccactcttgtccccccttttaatagaaaattgtcattctagcctggatttctccccactggaggtggagggtgggaagagaagggagtcagctctgacagcttacaaactgggaagttctgtgcatctccagggattccagagttgaagatctggttgttggaagctgggcgcccagtgcttttttttttttttttttttagcccagatgccgtcaggacccactgaacaagggtgaactcgggtggtggtctcggttggccaaggctgagttgaacgcctcaggccaaaccccaagttgaaagggagcattgtggcttttataatccaatgatgcaatgatgataccagcttacaggagttctcagcaggtgctttttattaactgatgaagagctaaggctcacttttgatagataatatatatttattaaatgcattaatgtgtgttttataatgtacctttatcttcccccggctgactgttgcatacttataaaaaagaagttaaagaaatttcaagacaatcaatatgtaccataaacgactatataaatattacaaatttaaaaggctgtaaaccatgggcagataggttttattttcaaaatgctgttcttaacacaaaaataaaggctttactatttactt

SEQ ID NO: 8877 - protein, 129 aa, Homo sapiens [sequence omitted]

SEQ ID NO: 8878 - DNA, 3729 bp, Homo sapiens
gaactttacatgaatggctttctgtagtgagaaggcgcctgtcacccgcggcctgcagaggctgcgtggcttggagggggaaccagaggcccaaccatgggcctccttcccctggtctctacagcagcttttcccaaacccactgagatgggtcaggctcctagagagcctgagaacaaagcccctttgtgacttttgttttgaatcaggcttgtgacaaaggggaggagccactgggttgggtggatgggggtgcccggagcgcgctgttgttgcaggggaagaaaacaaaattgtgtcttttttttggcaatgttgtcttgccaatccctccctcccccagctctccgaacagcaggatttcccaacggcagcttgggaaaaagacccagtggcagcttggggaaaagacccagcgctccgtttagaagcaacgtgtatcagccaactgagatggccgtcgtgctcaacggtgggaccatcccaactgctccgccaagtcacacaggaagacacctttggtgaaagactttaagttccagagaatcagaatttctcttaccgatttgcctccctggctgtgtctttcttgagggagaaatcggtaacagttgccgaaccaggccgcctcacagccaggaaatttggaaatcctagccaaggggatttcgtgtaaatgtgaacactgacgaactgaaaagctaacaccgactgcccgcccctcccctgccacacacacagacacgtaataccagaccaacctcaatccccgcaaactaaagcaaagctaattgcaaatagtattaggctcactggaaaatgtggctgggaagactgtttcatcctctgggggtagaacagaaccaaattcacagctggtgggccagactggtgttggttggaggtggggggctcccactcttatcacctctccccagcaagtgctggaccccaggtagcctcttggagatgaccgttgcgttgaggacaaatggggactttgccaccggcttgcctggtggtttgcacatttcaggggggtcaggagagttaaggaggttgtgggtgggattccaaggtgaggcccaactgaatcgtggggtgagctttatagccagtagaggtggagggaccctggcatgtgccaaagaagaggccctctgggtgatgaagtgaccatcacatttggaaagtgatcaaccactgttccttctatggggctcttgctctagtgtctatggtgagaacacaggccccgccccttcccttgtagagccatagaaatattctggcttggggcagcagtcccttcttcccttgatcatctcgccctgttcctacacttacgggtgtatctccaaatcctctcccaattttattcccttattcatttcaagagctccaatggggtctccagctgaaagcccctccgggaggcaggttggaaggcaggcaccacggcaggttttccgcgatgatgtcacctagcagggcttcaggggttcccactaggatgcagagatgacctctcgctgcctcacaagcagtgacacctcgggtcctttccgttgctatggtgaaaattcctggatggaatggatcacatgagggtttcttgttgcttttggagggtgtgggggatattttgttttggtttttctgcaggttccatgaaaacagcccttttccaagcccattgtttctgtcatggtttccatctgtcctgagcaagtcattcctttgttatttagcatttcgaacatctcggccattcaaagcccccatgttctctgcactgtttggccagcataacctctagcatcgattcaaagcagagttttaacctgacggcatggaatgtataaatgagggtgggtccttctgcagatactctaatcactacattgctttttctataaaactacccataagcctttaacctttaaagaaaaatgaaaaaggttagtgtttgggggccgggggaggactgaccgcttcataagccagtacgtctgagctgagtatgtttcaataaaccttttgatatttctcaaggccctagtctctgctgtctcccctccccaccccatccttgcaaagcactggggaaagtaaggccaatctggccctccctgtgtgacccgccttcgagttttccttaacagttagtacatttccttgtgttaccacgcatggggaagaaaacgcatggccccagaatgccacccccacctgacctccccggaagcaccccgcctctgcccagagcatgtgcttgcttctagagaatcccgttccagtcattgcgtggacagaaaacgtaagagtcctggggaggggtgggagggaatgaagctaggacctggggtgggggtgggggcggttgcatgcggacccggtattctgaaaagaaagaaatcttcaaacacctcggtcctgtccggtgaaaaaacgacagcattacacattctcgtgccaggaaatggttactcacccccgctctctggagtcctttggagctttctgataccattcacacgatggagcaattcacacgttcgttttctaagttctttattgtccaagcatataaggtgagcacagcacaaatggctgccatggaaagtcgtgcttccccagcataagaacagagccatctttgagccatgggaagcctcatttaatgagacctttttccccccttttaaatctgatatgttatcgcacttagggttttgttttattttggcttttaaggttgagagtgggctgaacgccttcataatgggggcggaggcgggagtgagaggagaagggagagagctgttctttttctaatgactacacctgaaaagtatcaagagacatctttgccaagagactgtagcagccagctgccccccgtggagcaaggtttaaagacaaaattaaatggcacctctgtttaagatctgcgtgtgtaaacaagactcgtttggggaaaacgacccgggaggagagcatctgtgatcaaaatctctcattgtaagcacaaattgttccgtgtctggttattaaaatcgctttgggtctataacagccactcttgtccccccttttaatagaaaattgtcattctagcctggatttctccccactggaggtggagggtgggaagagaagggagtcagctctgacagcttacaaactgggaagttctgtgcatctccagggattccagagttgaagatctggttgttggaagctgggcgcccagtgcttttttttttttttttttttagcccagatgccgtcaggacccactgaacaagggtgaactcgggtggtggtctcggttggccaaggctgagttgaacgcctcaggccaaaccccaagttgaaagggagcattgtggcttttataatccaatgatgcaatgatgataccagcttacaggagttctcagcaggtgctttttattaactgatgaagagctaaggctcacttttgatagataatatatatttattaaatgcattaatgtgtgttttataatgtacctttatcttcccccggctgactgttgcatacttataaaaaagaagttaaagaaatttcaagacaatcaatatgtaccataaacgactatataaatattacaaatttaaaaggctgtaaaccatgggcagataggttttattttcaaaatgctgttcttaacacaaaaataaaggctttactatttactt

SEQ ID NO: 8879 - protein, 92 aa, Homo sapiens; identical to SEQ ID NO: 8867

SEQ ID NO: 8880 - DNA, 4169 bp, Homo sapiens
tcatcaaggagaaggagaagaagagccctgtgggcctccactttctgttcctcctggggaccctgggcctctttgggctgacgtttgccttcatcatccaggaggacgagaccatctgctctgtccgccgcttcctctggggcgtcctctttgcgctctgcttctcctgcctgctgagccaggcatggcgcgtgcggaggctggtgcggcatggcacgggccccgcgggctggcagctggtgggcctggcgctgtgcctgatgctggtgcaagtcatcatcgctgtggagtggctggtgctcaccgtgctgcgtgacacaaggccagcctgcgcctacgagcccatggactttgtgatggccctcatctacgacatggtactgcttgtggtcaccctggggctggccctcttcactctgtgcggcaagttcaagaggtggaagctgaacggggccttcctcctcatcacagccttcctctctgtgctcatctgggtggcctggatgaccatgtacctcttcggcaatgtcaagctgcagcagggggatgcctggaacgaccccaccttggccatcacgctggcggccagcggctgggtcttcgtcatcttccacgccatccctgagatccactgcacccttctgccagccctgcaggagaacacgcccaactacttcgacacgtcgcagcccaggatgcgggagacggccttcgaggaggacgtgcagctgccgcgggcctatatggagaacaaggccttctccatggatgaacacaatgcagctctccgaacagcaggatttcccaacggcagcttgggaaaaagacccagtggcagcttggggaaaagacccagcgctccgtttagaagcaacgtgtatcagccaactgagatggccgtcgtgctcaacggtgggaccatcccaactgctccgccaagtcacacaggaagacacctttggtgaaagactttaagttccagagaatcagaatttctcttaccgatttgcctccctggctgtgtctttcttgagggagaaatcggtaacagttgccgaaccaggccgcctcacagccaggaaatttggaaatcctagccaaggggatttcgtgtaaatgtgaacactgacgaactgaaaagctaacaccgactgcccgcccctcccctgccacacacacagacacgtaataccagaccaacctcaatccccgcaaactaaagcaaagctaattgcaaatagtattaggctcactggaaaatgtggctgggaagactgtttcatcctctgggggtagaacagaaccaaattcacagctggtgggccagactggtgttggttggaggtggggggctcccactcttatcacctctccccagcaagtgctggaccccaggtagcctcttggagatgaccgttgcgttgaggacaaatggggactttgccaccggcttgcctggtggtttgcacatttcaggggggtcaggagagttaaggaggttgtgggtgggattccaaggtgaggcccaactgaatcgtggggtgagctttatagccagtagaggtggagggaccctggcatgtgccaaagaagaggccctctgggtgatgaagtgaccatcacatttggaaagtgatcaaccactgttccttctatggggctcttgctctagtgtctatggtgagaacacaggccccgccccttcccttgtagagccatagaaatattctggcttggggcagcagtcccttcttcccttgatcatctcgccctgttcctacacttacgggtgtatctccaaatcctctcccaattttattcccttattcatttcaagagctccaatggggtctccagctgaaagcccctccgggaggcaggttggaaggcaggcaccacggcaggttttccgcgatgatgtcacctagcagggcttcaggggttcccactaggatgcagagatgacctctcgctgcctcacaagcagtgacacctcgggtcctttccgttgctatggtgaaaattcctggatggaatggatcacatgagggtttcttgttgcttttggagggtgtgggggatattttgttttggtttttctgcaggttccatgaaaacagcccttttccaagcccattgtttctgtcatggtttccatctgtcctgagcaagtcattcctttgttatttagcatttcgaacatctcggccattcaaagcccccatgttctctgcactgtttggccagcataacctctagcatcgattcaaagcagagttttaacctgacggcatggaatgtataaatgagggtgggtccttctgcagatactctaatcactacattgctttttctataaaactacccataagcctttaacctttaaagaaaaatgaaaaaggttagtgtttgggggccgggggaggactgaccgcttcataagccagtacgtctgagctgagtatgtttcaataaaccttttgatatttctcaaggccctagtctctgctgtctcccctccccaccccatccttgcaaagcactggggaaagtaaggccaatctggccctccctgtgtgacccgccttcgagttttccttaacagttagtacatttccttgtgttaccacgcatggggaagaaaacgcatggccccagaatgccacccccacctgacctccccggaagcaccccgcctctgcccagagcatgtgcttgcttctagagaatcccgttccagtcattgcgtggacagaaaacgtaagagtcctggggaggggtgggagggaatgaagctaggacctggggtgggggtgggggcggttgcatgcggacccggtattctgaaaagaaagaaatcttcaaacacctcggtcctgtccggtgaaaaaacgacagcattacacattctcgtgccaggaaatggttactcacccccgctctctggagtcctttggagctttctgataccattcacacgatggagcaattcacacgttcgttttctaagttctttattgtccaagcatataaggtgagcacagcacaaatggctgccatggaaagtcgtgcttccccagcataagaacagagccatctttgagccatgggaagcctcatttaatgagacctttttccccccttttaaatctgatatgttatcgcacttagggttttgttttattttggcttttaaggttgagagtgggctgaacgccttcataatgggggcggaggcgggagtgagaggagaagggagagagctgttctttttctaatgactacacctgaaaagtatcaagagacatctttgccaagagactgtagcagccagctgccccccgtggagcaaggtttaaagacaaaattaaatggcacctctgtttaagatctgcgtgtgtaaacaagactcgtttggggaaaacgacccgggaggagagcatctgtgatcaaaatctctcattgtaagcacaaattgttccgtgtctggttattaaaatcgctttgggtctataacagccactcttgtccccccttttaatagaaaattgtcattctagcctggatttctccccactggaggtggagggtgggaagagaagggagtcagctctgacagcttacaaactgggaagttctgtgcatctccagggattccagagttgaagatctggttgttggaagctgggcgcccagtgcttttttttttttttttttttagcccagatgccgtcaggacccactgaacaagggtgaactcgggtggtggtctcggttggccaaggctgagttgaacgcctcaggccaaaccccaagttgaaagggagcattgtggcttttataatccaatgatgcaatgatgataccagcttacaggagttctcagcaggtgctttttattaactgatgaagagctaaggctcacttttgatagataatatatatttattaaatgcattaatgtgtgttttataatgtacctttatcttcccccggctgactgttgcatacttataaaaaagaagttaaagaaatttcaagacaatcaatatgtaccataaacgactatataaatattacaaatttaaaaggctgtaaaccatgggcagataggttttattttcaaaatgctgttcttaacacaaaaataaaggctttactatttactt

SEQ ID NO: 8881 - protein, 234 aa, Homo sapiens; identical to SEQ ID NO: 8869

SEQ ID NO: 8882 - DNA, 4608 bp, Homo sapiens
gggccgcggccgctgcagcagcgcgggccgggccagggggcgcctcgcgcggcagcgactctggcaggcgctgcagtgaagctggacccgcaggcgggcgtgcgtggagcgggggccgcggccgcgccgcagagatgtgactcgggccgaaggccagctggagcgtcggcgctgcggggccgcgggggtcgaatgttcgtggcatcagagagaaagatgagagctcaccaggtgctcaccttcctcctgctcttcgtgatcacctcggtggcctctgaaaacgccagcacatcccgaggctgtgggctggacctcctccctcagtacgtgtccctgtgcgacctggacgccatctggggcattgtggtggaggcggtggccggggcgggcgccctgatcacactgctcctgatgctcatcctcctggtgcggctgcccttcatcaaggagaaggagaagaagagccctgtgggcctccactttctgttcctcctggggaccctgggcctctttgggctgacgtttgccttcatcatccaggaggacgagaccatctgctctgtccgccgcttcctctggggcgtcctctttgcgctctgcttctcctgcctgctgagccaggcatggcgcgtgcggaggctggtgcggcatggcacgggccccgcgggctggcagctggtgggcctggcgctgtgcctgatgctggtgcaagtcatcatcgctgtggagtggctggtgctcaccgtgctgcgtgacacaaggccagcctgcgcctacgagcccatggactttgtgatggccctcatctacgacatggtactgcttgtggtcaccctggggctggccctcttcactctgtgcggcaagttcaagaggtggaagctgaacggggccttcctcctcatcacagccttcctctctgtgctcatctgggtggcctggatgaccatgtacctcttcggcaatgtcaagctgcagcagggggatgcctggaacgaccccaccttggccatcacgctggcggccagcggctgggtcttcgtcatcttccacgccatccctgagatccactgcacccttctgccagccctgcaggagaacacgcccaactacttcgacacgtcgcagcccaggatgcgggagacggccttcgaggaggacgtgcagctgccgcgggcctatatggagaacaaggccttctccatggatgaacacaatgcagctctccgaacagcaggatttcccaacggcagcttgggaaaaagacccagtggcagcttggggaaaagacccagcgctccgtttagaagcaacgtgtatcagccaactgagatggccgtcgtgctcaacggtgggaccatcccaactgctccgccaagtcacacaggaagacacctttggtgaaagactttaagttccagagaatcagaatttctcttaccgatttgcctccctggctgtgtctttcttgagggagaaatcggtaacagttgccgaaccaggccgcctcacagccaggaaatttggaaatcctagccaaggggatttcgtgtaaatgtgaacactgacgaactgaaaagctaacaccgactgcccgcccctcccctgccacacacacagacacgtaataccagaccaacctcaatccccgcaaactaaagcaaagctaattgcaaatagtattaggctcactggaaaatgtggctgggaagactgtttcatcctctgggggtagaacagaaccaaattcacagctggtgggccagactggtgttggttggaggtggggggctcccactcttatcacctctccccagcaagtgctggaccccaggtagcctcttggagatgaccgttgcgttgaggacaaatggggactttgccaccggcttgcctggtggtttgcacatttcaggggggtcaggagagttaaggaggttgtgggtgggattccaaggtgaggcccaactgaatcgtggggtgagctttatagccagtagaggtggagggaccctggcatgtgccaaagaagaggccctctgggtgatgaagtgaccatcacatttggaaagtgatcaaccactgttccttctatggggctcttgctctagtgtctatggtgagaacacaggccccgccccttcccttgtagagccatagaaatattctggcttggggcagcagtcccttcttcccttgatcatctcgccctgttcctacacttacgggtgtatctccaaatcctctcccaattttattcccttattcatttcaagagctccaatggggtctccagctgaaagcccctccgggaggcaggttggaaggcaggcaccacggcaggttttccgcgatgatgtcacctagcagggcttcaggggttcccactaggatgcagagatgacctctcgctgcctcacaagcagtgacacctcgggtcctttccgttgctatggtgaaaattcctggatggaatggatcacatgagggtttcttgttgcttttggagggtgtgggggatattttgttttggtttttctgcaggttccatgaaaacagcccttttccaagcccattgtttctgtcatggtttccatctgtcctgagcaagtcattcctttgttatttagcatttcgaacatctcggccattcaaagcccccatgttctctgcactgtttggccagcataacctctagcatcgattcaaagcagagttttaacctgacggcatggaatgtataaatgagggtgggtccttctgcagatactctaatcactacattgctttttctataaaactacccataagcctttaacctttaaagaaaaatgaaaaaggttagtgtttgggggccgggggaggactgaccgcttcataagccagtacgtctgagctgagtatgtttcaataaaccttttgatatttctcaaggccctagtctctgctgtctcccctccccaccccatccttgcaaagcactggggaaagtaaggccaatctggccctccctgtgtgacccgccttcgagttttccttaacagttagtacatttccttgtgttaccacgcatggggaagaaaacgcatggccccagaatgccacccccacctgacctccccggaagcaccccgcctctgcccagagcatgtgcttgcttctagagaatcccgttccagtcattgcgtggacagaaaacgtaagagtcctggggaggggtgggagggaatgaagctaggacctggggtgggggtgggggcggttgcatgcggacccggtattctgaaaagaaagaaatcttcaaacacctcggtcctgtccggtgaaaaaacgacagcattacacattctcgtgccaggaaatggttactcacccccgctctctggagtcctttggagctttctgataccattcacacgatggagcaattcacacgttcgttttctaagttctttattgtccaagcatataaggtgagcacagcacaaatggctgccatggaaagtcgtgcttccccagcataagaacagagccatctttgagccatgggaagcctcatttaatgagacctttttccccccttttaaatctgatatgttatcgcacttagggttttgttttattttggcttttaaggttgagagtgggctgaacgccttcataatgggggcggaggcgggagtgagaggagaagggagagagctgttctttttctaatgactacacctgaaaagtatcaagagacatctttgccaagagactgtagcagccagctgccccccgtggagcaaggtttaaagacaaaattaaatggcacctctgtttaagatctgcgtgtgtaaacaagactcgtttggggaaaacgacccgggaggagagcatctgtgatcaaaatctctcattgtaagcacaaattgttccgtgtctggttattaaaatcgctttgggtctataacagccactcttgtccccccttttaatagaaaattgtcattctagcctggatttctccccactggaggtggagggtgggaagagaagggagtcagctctgacagcttacaaactgggaagttctgtgcatctccagggattccagagttgaagatctggttgttggaagctgggcgcccagtgcttttttttttttttttttttagcccagatgccgtcaggacccactgaacaagggtgaactcgggtggtggtctcggttggccaaggctgagttgaacgcctcaggccaaaccccaagttgaaagggagcattgtggcttttataatccaatgatgcaatgatgataccagcttacaggagttctcagcaggtgctttttattaactgatgaagagctaaggctcacttttgatagataatatatatttattaaatgcattaatgtgtgttttataatgtacctttatcttcccccggctgactgttgcatacttataaaaaagaagttaaagaaatttcaagacaatcaatatgtaccataaacgactatataaatattacaaatttaaaaggctgtaaaccatgggcagataggttttattttcaaaatgctgttcttaacacaaaaataaaggctttactatttactt

SEQ ID NO: 8883 - protein, 403 aa, Homo sapiens; identical to SEQ ID NO: 1332

SEQ ID NO: 8884 - DNA, 1502 bp, Homo sapiens
atcccaactgctccgccaagtcacacaggaagacacctttggtgaaagactttaagttccagagaatcagaatttctcttaccgatttgcctccctggctgtgtctttcttgagggagaaatcggtaacagttgccgaaccaggccgcctcacagccaggaaatttggaaatcctagccaaggggatttcgtgtaaatgtgaacactgacgaactgaaaagctaacaccgactgcccgcccctcccctgccacacacacagacacgtaataccagaccaacctcaatccccgcaaactaaagcaaagctaattgcaaatagtattaggctcactggaaaatgtggctgggaagactgtttcatcctctgggggtagaacagaaccaagtgctggaccccaggtagcctcttggagatgaccgttgcgttgaggacaaatggggactttgccaccggcttgcctggtggtttgcacatttcaggggggtcaggagagttaaggaggttgtgggtgggattccaaggtgaggcccaactgaatcgtggggtgagctttatagccagtagaggtggagggaccctggcatgtgccaaagaagaggccctctgggtgatgaagtgaccatcacatttggaaagtgatcaaccactgttccttctatggggctcttgctctagtgtctatggtgagaacacaggccccgccccttcccttgtagagccatagaaatattctggcttggggcagcagtcccttcttcccttgatcatctcgccctgttcctacacttacgggtgtatctccaaatcctctcccaattttattcccttattcatttcaagagctccaatggggtctccagctgaaagcccctccgggaggcaggttggaaggcaggcaccacggcaggttttccgcgatgatgtcacctagcagggcttcaggggttcccactaggatgcagagatgacctctcgctgcctcacaagcagtgacacctcgggtcctttccgttgctatggtgaaaattcctggatggaatggatcacatgagggtttcttgttgcttttggagggtgtgggggatattttgttttggtttttctgcaggttccatgaaaacagcccttttccaagcccattgtttctgtcatggtttccatctgtcctgagcaagtcattcctttgttatttagcatttcgaacatctcggccattcaaagcccccatgttctctgcactgtttggccagcataacctctagcatcgattcaaagcagagttttaacctgacggcatggaatgtataaatgagggtgggtccttctgcagatactctaatcactacattgctttttctataaaactacccataagcctttaacctttaaagaaaaatgaaaaaggttagtgtttgggggccgggggaggactgaccgcttcataagccagtacgtctgagctgagtatgtttcaataaaccttttgatatttctcaagg

SEQ ID NO: 8885 - protein, 81 aa, Homo sapiens
MVKIPGWNGSHEGFLLLLEGVGDILFWFFCRFHENSPFPSPLFLSWFPSVLSKSFLCYLAFRTSRPFKAPMFSALFGQHNL

SEQ ID NO: 8886 - DNA, 2080 bp, Homo sapiens
agcagttttgagtagtgtgatgctgaactttacatgaatggctttctgtagtgagaaggcgcctgtcacccgcggcctgcagaggctgcgtggcttggagggggaaccagaggcccaaccatgggcctccttcccctggtctctacagcagcttttcccaaacccactgagatgggtcaggctcctagagagcctgagaacaaagcccctttgtgacttttgttttgaatcaggcttgtgacaaaggggaggagccactgggttgggtggatgggggtgcccggagcgcgctgttgttgcaggggaagaaaacaaaattgtgtcttttttttggcaatgttgtcttgccaatccctccctcccccagctctccgaacagcaggatttcccaacggcagcttgggaaaaagacccagtggcagcttggggaaaagacccagcgctccgtttagaagcaacgtgtatcagccaactgagatggccgtcgtgctcaacggtgggaccatcccaactgctccgccaagtcacacaggaagacacctttggtgaaagactttaagttccagagaatcagaatttctcttaccgatttgcctccctggctgtgtctttcttgagggagaaatcggtaacagttgccgaaccaggccgcctcacagccaggaaatttggaaatcctagccaaggggatttcgtgtaaatgtgaacactgacgaactgaaaagctaacaccgactgcccgcccctcccctgccacacacacagacacgtaataccagaccaacctcaatccccgcaaactaaagcaaagctaattgcaaatagtattaggctcactggaaaatgtggctgggaagactgtttcatcctctgggggtagaacagaaccaaattcacagctggtgggccagactggtgttggttggaggtggggggctcccactcttatcacctctccccagcaagtgctggaccccaggtagcctcttggagatgaccgttgcgttgaggacaaatggggactttgccaccggcttgcctggtggtttgcacatttcaggggggtcaggagagttaaggaggttgtgggtgggattccaaggtgaggcccaactgaatcgtggggtgagctttatagccagtagaggtggagggaccctggcatgtgccaaagaagaggccctctgggtgatgaagtgaccatcacatttggaaagtgatcaaccactgttccttctatggggctcttgctctagtgtctatggtgagaacacaggccccgccccttcccttgtagagccatagaaatattctggcttggggcagcagtcccttcttcccttgatcatctcgccctgttcctacacttacgggtgtatctccaaatcctctcccaattttattcccttattcatttcaagagctccaatggggtctccagctgaaagcccctccgggaggcaggttggaaggcaggcaccacggcaggttttccgcgatgatgtcacctagcagggcttcaggggttcccactaggatgcagagatgacctctcgctgcctcacaagcagtgacacctcgggtcctttccgttgctatggtgaaaattcctggatggaatggatcacatgagggtttcttgttgcttttggagggtgtgggggatattttgttttggtttttctgcaggttccatgaaaacagcccttttccaagcccattgtttctgtcatggtttccatctgtcctgagcaagtcattcctttgttatttagcatttcgaacatctcggccattcaaagcccccatgttctctgcactgtttggccagcataacctctagcatcgattcaaagcagagttttaacctgacggcatggaatgtataaatgagggtgggtccttctgcagatactctaatcactacattgctttttctataaaactacccataagcctttaacctttaaagaaaaatgaaaaaggttagtgtttgggggccgggggaggactgaccgcttcataagccagtacgtctgagctgagtatgtttcaataaaccttttgatatttctcaagg

SEQ ID NO: 8887 - protein, 92 aa, Homo sapiens; identical to SEQ ID NO: 8867

SEQ ID NO: 8888 - DNA, 2496 bp, Homo sapiens
tcatcaaggagaaggagaagaagagccctgtgggcctccactttctgttcctcctggggaccctgggcctctttgggctgacgtttgccttcatcatccaggaggacgagaccatctgctctgtccgccgcttcctctggggcgtcctctttgcgctctgcttctcctgcctgctgagccaggcatggcgcgtgcggaggctggtgcggcatggcacgggccccgcgggctggcagctggtgggcctggcgctgtgcctgatgctggtgcaagtcatcatcgctgtggagtggctggtgctcaccgtgctgcgtgacacaaggccagcctgcgcctacgagcccatggactttgtgatggccctcatctacgacatggtactgcttgtggtcaccctggggctggccctcttcactctgtgcggcaagttcaagaggtggaagctgaacggggccttcctcctcatcacagccttcctctctgtgctcatctgggtggcctggatgaccatgtacctcttcggcaatgtcaagctgcagcagggggatgcctggaacgaccccaccttggccatcacgctggcggccagcggctgggtcttcgtcatcttccacgccatccctgagatccactgcacccttctgccagccctgcaggagaacacgcccaactacttcgacacgtcgcagcccaggatgcgggagacggccttcgaggaggacgtgcagctgccgcgggcctatatggagaacaaggccttctccatggatgaacacaatgcagctctccgaacagcaggatttcccaacggcagcttgggaaaaagacccagtggcagcttggggaaaagacccagcgctccgtttagaagcaacgtgtatcagccaactgagatggccgtcgtgctcaacggtgggaccatcccaactgctccgccaagtcacacaggaagacacctttggtgaaagactttaagttccagagaatcagaatttctcttaccgatttgcctccctggctgtgtctttcttgagggagaaatcggtaacagttgccgaaccaggccgcctcacagccaggaaatttggaaatcctagccaaggggatttcgtgtaaatgtgaacactgacgaactgaaaagctaacaccgactgcccgcccctcccctgccacacacacagacacgtaataccagaccaacctcaatccccgcaaactaaagcaaagctaattgcaaatagtattaggctcactggaaaatgtggctgggaagactgtttcatcctctgggggtagaacagaaccaaattcacagctggtgggccagactggtgttggttggaggtggggggctcccactcttatcacctctccccagcaagtgctggaccccaggtagcctcttggagatgaccgttgcgttgaggacaaatggggactttgccaccggcttgcctggtggtttgcacatttcaggggggtcaggagagttaaggaggttgtgggtgggattccaaggtgaggcccaactgaatcgtggggtgagctttatagccagtagaggtggagggaccctggcatgtgccaaagaagaggccctctgggtgatgaagtgaccatcacatttggaaagtgatcaaccactgttccttctatggggctcttgctctagtgtctatggtgagaacacaggccccgccccttcccttgtagagccatagaaatattctggcttggggcagcagtcccttcttcccttgatcatctcgccctgttcctacacttacgggtgtatctccaaatcctctcccaattttattcccttattcatttcaagagctccaatggggtctccagctgaaagcccctccgggaggcaggttggaaggcaggcaccacggcaggttttccgcgatgatgtcacctagcagggcttcaggggttcccactaggatgcagagatgacctctcgctgcctcacaagcagtgacacctcgggtcctttccgttgctatggtgaaaattcctggatggaatggatcacatgagggtttcttgttgcttttggagggtgtgggggatattttgttttggtttttctgcaggttccatgaaaacagcccttttccaagcccattgtttctgtcatggtttccatctgtcctgagcaagtcattcctttgttatttagcatttcgaacatctcggccattcaaagcccccatgttctctgcactgtttggccagcataacctctagcatcgattcaaagcagagttttaacctgacggcatggaatgtataaatgagggtgggtccttctgcagatactctaatcactacattgctttttctataaaactacccataagcctttaacctttaaagaaaaatgaaaaaggttagtgtttgggggccgggggaggactgaccgcttcataagccagtacgtctgagctgagtatgtttcaataaaccttttgatatttctcaagg

SEQ ID NO: 8889 - protein, 234 aa, Homo sapiens; identical to SEQ ID NO: 8869

SEQ ID NO: 8890 - DNA, 2935 bp, Homo sapiens
gggccgcggccgctgcagcagcgcgggccgggccagggggcgcctcgcgcggcagcgactctggcaggcgctgcagtgaagctggacccgcaggcgggcgtgcgtggagcgggggccgcggccgcgccgcagagatgtgactcgggccgaaggccagctggagcgtcggcgctgcggggccgcgggggtcgaatgttcgtggcatcagagagaaagatgagagctcaccaggtgctcaccttcctcctgctcttcgtgatcacctcggtggcctctgaaaacgccagcacatcccgaggctgtgggctggacctcctccctcagtacgtgtccctgtgcgacctggacgccatctggggcattgtggtggaggcggtggccggggcgggcgccctgatcacactgctcctgatgctcatcctcctggtgcggctgcccttcatcaaggagaaggagaagaagagccctgtgggcctccactttctgttcctcctggggaccctgggcctctttgggctgacgtttgccttcatcatccaggaggacgagaccatctgctctgtccgccgcttcctctggggcgtcctctttgcgctctgcttctcctgcctgctgagccaggcatggcgcgtgcggaggctggtgcggcatggcacgggccccgcgggctggcagctggtgggcctggcgctgtgcctgatgctggtgcaagtcatcatcgctgtggagtggctggtgctcaccgtgctgcgtgacacaaggccagcctgcgcctacgagcccatggactttgtgatggccctcatctacgacatggtactgcttgtggtcaccctggggctggccctcttcactctgtgcggcaagttcaagaggtggaagctgaacggggccttcctcctcatcacagccttcctctctgtgctcatctgggtggcctggatgaccatgtacctcttcggcaatgtcaagctgcagcagggggatgcctggaacgaccccaccttggccatcacgctggcggccagcggctgggtcttcgtcatcttccacgccatccctgagatccactgcacccttctgccagccctgcaggagaacacgcccaactacttcgacacgtcgcagcccaggatgcgggagacggccttcgaggaggacgtgcagctgccgcgggcctatatggagaacaaggccttctccatggatgaacacaatgcagctctccgaacagcaggatttcccaacggcagcttgggaaaaagacccagtggcagcttggggaaaagacccagcgctccgtttagaagcaacgtgtatcagccaactgagatggccgtcgtgctcaacggtgggaccatcccaactgctccgccaagtcacacaggaagacacctttggtgaaagactttaagttccagagaatcagaatttctcttaccgatttgcctccctggctgtgtctttcttgagggagaaatcggtaacagttgccgaaccaggccgcctcacagccaggaaatttggaaatcctagccaaggggatttcgtgtaaatgtgaacactgacgaactgaaaagctaacaccgactgcccgcccctcccctgccacacacacagacacgtaataccagaccaacctcaatccccgcaaactaaagcaaagctaattgcaaatagtattaggctcactggaaaatgtggctgggaagactgtttcatcctctgggggtagaacagaaccaaattcacagctggtgggccagactggtgttggttggaggtggggggctcccactcttatcacctctccccagcaagtgctggaccccaggtagcctcttggagatgaccgttgcgttgaggacaaatggggactttgccaccggcttgcctggtggtttgcacatttcaggggggtcaggagagttaaggaggttgtgggtgggattccaaggtgaggcccaactgaatcgtggggtgagctttatagccagtagaggtggagggaccctggcatgtgccaaagaagaggccctctgggtgatgaagtgaccatcacatttggaaagtgatcaaccactgttccttctatggggctcttgctctagtgtctatggtgagaacacaggccccgccccttcccttgtagagccatagaaatattctggcttggggcagcagtcccttcttcccttgatcatctcgccctgttcctacacttacgggtgtatctccaaatcctctcccaattttattcccttattcatttcaagagctccaatggggtctccagctgaaagcccctccgggaggcaggttggaaggcaggcaccacggcaggttttccgcgatgatgtcacctagcagggcttcaggggttcccactaggatgcagagatgacctctcgctgcctcacaagcagtgacacctcgggtcctttccgttgctatggtgaaaattcctggatggaatggatcacatgagggtttcttgttgcttttggagggtgtgggggatattttgttttggtttttctgcaggttccatgaaaacagcccttttccaagcccattgtttctgtcatggtttccatctgtcctgagcaagtcattcctttgttatttagcatttcgaacatctcggccattcaaagcccccatgttctctgcactgtttggccagcataacctctagcatcgattcaaagcagagttttaacctgacggcatggaatgtataaatgagggtgggtccttctgcagatactctaatcactacattgctttttctataaaactacccataagcctttaacctttaaagaaaaatgaaaaaggttagtgtttgggggccgggggaggactgaccgcttcataagccagtacgtctgagctgagtatgtttcaataaaccttttgatatttctcaagg

SEQ ID NO: 8891 - protein, 403 aa, Homo sapiens; identical to SEQ ID NO: 1332

SEQ ID NO: 8892 - DNA, 1374 bp, Homo sapiens
ggtaacagttgccgaaccaggccgcctcacagccaggaaatttggaaatcctagccaaggggatttcgtgtaaatgtgaacactgacgaactgaaaagctaacaccgactgcccgcccctcccctgccacacacacagacacgtaataccagaccaacctcaatccccgcaaactaaagcaaagctaattgcaaatagtattaggctcactggaaaatgtggctgggaagactgtttcatcctctgggggtagaacagaaccaaattcacagctggtgggccagactggtgttggttggaggtggggggctcccactcttatcacctctccccagcaagtgctggaccccaggtagcctcttggagatgaccgttgcgttgaggacaaatggggactttgccaccggcttgcctggtggtttgcacatttcaggggggtcaggagagttaaggaggttgtgggtgggattccaaggtgaggcccaactgaatcgtggggtgagctttatagccagtagaggtggagggaccctggcatgtgccaaagaagaggccctctgggtgatgaagtgaccatcacatttggaaagtgatcaaccactgttccttctatggggctcttgctctagtgtctatggtgagaacacaggccccgccccttcccttgtagagccatagaaatattctggcttggggcagcagtcccttcttcccttgatcatctcgccctgttcctacacttacgggtgtatctccaaatcctctcccaattttattcccttattcatttcaagagctccaatggggtctccagctgaaagcccctccgggaggcaggttggaaggcaggcaccacggcaggttttccgcgatgatgtcactttccgttgctatggtgaaaattcctggatggaatggatcacatgagggtttcttgttgcttttggagggtgtgggggatattttgttttggtttttctgcaggttccatgaaaacagcccttttccaagcccattgtttctgtcatggtttccatctgtcctgagcaagtcattcctttgttatttagcatttcgaacatctcggccattcaaagcccccatgttctctgcactgtttggccagcataacctctagcatcgattcaaagcagagttttaacctgacggcatggaatgtataaatgagggtgggtccttctgcagatactctaatcactacattgctttttctataaaactacccataagcctttaacctttaaagaaaaatgaaaaaggttagtgtttgggggccgggggaggactgaccgcttcataagccagtacgtctgagctgagtatgtttcaataaaccttttgatatttctcaag

SEQ ID NO: 8893 - protein, 88 aa, Homo sapiens [sequence omitted]

SEQ ID NO: 8894 - DNA, 1121 bp, Homo sapiens
agtggtctagtcagcattgggaaatgaagatgatgagatcctgtaactcggaaaagatatcagaggtgcctaccgccatctttagagaagaatgttcgtggcatcagagagaaagatgagagctcaccaggtgctcaccttcctcctgctcttcgtgatcacctcggtggcctctgaaaacgccagcacatcccgaggctgtgggctggacctcctccctcagtacgtgtccctgtgcgacctggacgccatctggggcattgtggtggaggcggtggccggggcgggcgccctgatcacactgctcctgatgctcatcctcctggtgcggctgcccttcatcaaggagaaggagaagaagagccctgtgggcctccactttctgttcctcctggggaccctgggcctctttgggctgacgtttgccttcatcatccaggaggacgagaccatctgctctgtccgccgcttcctctggggcgtcctctttgcgctctgcttctcctgcctgctgagccaggcatggcgcgtgcggaggctggtgcggcatggcacgggccccgcgggctggcagctggtgggcctggcgctgtgcctgatgctggtgcaagtcatcatcgctgtggagtggctggtgctcaccgtgctgcgtgacacaaggccagcctgcgcctacgagcccatggactttgtgatggccctcatctacgacatggtactgcttgtggtcaccctggggctggccctcttcactctgtgcggcaagttcaagaggtggaagctgaacggggccttcctcctcatcacagccttcctctctgtgctcatctgggtggcctggatgaccatgtacctcttcggcaatgtcaagctgcagcagggggatgcctggaacgaccccaccttggccatcacgctggcggccagcggctgggtcttcgtcatcttccacgccatccctgagatccactgcacccttctgccagccctgcaggagaacacgcccaactacttcgacacgtcgcagcccaggatgcgggagacggccttcgaggaggacgtgcagctgccgcgggcctatatggagaacaaggccttctccatggatgaacacaatgcag

SEQ ID NO: 8895 - protein, 31 aa, Homo sapiens
MKMMRSCNSEKISEVPTAIFREECSWHQRER

SEQ ID NO: 8896 - DNA, 1142 bp, Homo sapiens
actaacctatgaggattttttaatttgagagccctcaaatgggccagtggtctagtcagcattgggaaatgaagatgatgagatcctgtaactcggaaaagatatcagaggaatgttcgtggcatcagagagaaagatgagagctcaccaggtgctcaccttcctcctgctcttcgtgatcacctcggtggcctctgaaaacgccagcacatcccgaggctgtgggctggacctcctccctcagtacgtgtccctgtgcgacctggacgccatctggggcattgtggtggaggcggtggccggggcgggcgccctgatcacactgctcctgatgctcatcctcctggtgcggctgcccttcatcaaggagaaggagaagaagagccctgtgggcctccactttctgttcctcctggggaccctgggcctctttgggctgacgtttgccttcatcatccaggaggacgagaccatctgctctgtccgccgcttcctctggggcgtcctctttgcgctctgcttctcctgcctgctgagccaggcatggcgcgtgcggaggctggtgcggcatggcacgggccccgcgggctggcagctggtgggcctggcgctgtgcctgatgctggtgcaagtcatcatcgctgtggagtggctggtgctcaccgtgctgcgtgacacaaggccagcctgcgcctacgagcccatggactttgtgatggccctcatctacgacatggtactgcttgtggtcaccctggggctggccctcttcactctgtgcggcaagttcaagaggtggaagctgaacggggccttcctcctcatcacagccttcctctctgtgctcatctgggtggcctggatgaccatgtacctcttcggcaatgtcaagctgcagcagggggatgcctggaacgaccccaccttggccatcacgctggcggccagcggctgggtcttcgtcatcttccacgccatccctgagatccactgcacccttctgccagccctgcaggagaacacgcccaactacttcgacacgtcgcagcccaggatgcgggagacggccttcgaggaggacgtgcagctgccgcgggcctatatggagaacaaggccttctccatggatgaacacaatgcag

SEQ ID NO: 8897 - protein, 33 aa, Homo sapiens
MGQWSSQHWEMKMMRSCNSEKISEECSWHQRER

SEQ ID NO: 8898 - DNA, 880 bp, Homo sapiens
gctgcagtgaagctggacccgcaggcgggcgtgcgtggagcgggggccgcggccgcgccgcagagatgtgactcgggccgaaggccagctggagcgtcggcgctgcggggccgcgggggtcgaatgttcgtggcatcagagagaaagatgagagctcaccaggtgctcaccttcctcctgctcttcgtgatcacctcggtggcctctgaaaacgccagcacatcccgaggctgtgggctggacctcctccctcagtacgtgtccctgtgcgacctggacgccatctggggcattgtggtggaggcggtggccggggcgggcgccctgatcacactgctcctgatgctcatcctcctgatgctggtgcaagtcatcatcgctgtggagtggctggtgctcaccgtgctgcgtgacacaaggccagcctgcgcctacgagcccatggactttgtgatggccctcatctacgacatggtactgcttgtggtcaccctggggctggccctcttcactctgtgcggcaagttcaagaggtggaagctgaacggggccttcctcctcatcacagccttcctctctgtgctcatctgggtggcctggatgaccatgtacctcttcggcaatgtcaagctgcagcagggggatgcctggaacgaccccaccttggccatcacgctggcggccagcggctgggtcttcgtcatcttccacgccatccctgagatccactgcacccttctgccagccctgcaggagaacacgcccaactacttcgacacgtcgcagcccaggatgcgggagacggccttcgaggaggacgtgcagctgccgcgggcctatatggagaacaaggccttctccatggatgaacacaatgcag

SEQ ID NO: 8899 - protein, 251 aa, Homo sapiens
MFVASERKMRAHQVLTFLLLFVITSVASENASTSRGCGLDLLPQYVSLCDLDAIWGIVVEAVAGAGALITLLLMLILLMLVQVIIAVEWLVLTVLRDTRPACAYEPMDFVMALIYDMVLLVVTLGLALFTLCGKFKRWKLNGAFLLITAFLSVLIWVAWMTMYLFGNVKLQQGDAWNDPTLAITLAASGWVFVIFHAIPEIHCTLLPALQENTPNYFDTSQPRMRETAFEEDVQLPRAYMENKAFSMDEHN

SEQ ID NO: 8900 - DNA, 1151 bp, Homo sapiens
ggtcttatgtggctgggatggttgcggcgacgggggtagagattggggggcgcaccgcggagggagaaaggaaatctcaccctgagaatctggagtgcagggaagggatgctgctcaaagaatgttcgtggcatcagagagaaagatgagagctcaccaggtgctcaccttcctcctgctcttcgtgatcacctcggtggcctctgaaaacgccagcacatcccgaggctgtgggctggacctcctccctcagtacgtgtccctgtgcgacctggacgccatctggggcattgtggtggaggcggtggccggggcgggcgccctgatcacactgctcctgatgctcatcctcctggtgcggctgcccttcatcaaggagaaggagaagaagagccctgtgggcctccactttctgttcctcctggggaccctgggcctctttgggctgacgtttgccttcatcatccaggaggacgagaccatctgctctgtccgccgcttcctctggggcgtcctctttgcgctctgcttctcctgcctgctgagccaggcatggcgcgtgcggaggctggtgcggcatggcacgggccccgcgggctggcagctggtgggcctggcgctgtgcctgatgctggtgcaagtcatcatcgctgtggagtggctggtgctcaccgtgctgcgtgacacaaggccagcctgcgcctacgagcccatggactttgtgatggccctcatctacgacatggtactgcttgtggtcaccctggggctggccctcttcactctgtgcggcaagttcaagaggtggaagctgaacggggccttcctcctcatcacagccttcctctctgtgctcatctgggtggcctggatgaccatgtacctcttcggcaatgtcaagctgcagcagggggatgcctggaacgaccccaccttggccatcacgctggcggccagcggctgggtcttcgtcatcttccacgccatccctgagatccactgcacccttctgccagccctgcaggagaacacgcccaactacttcgacacgtcgcagcccaggatgcgggagacggccttcgaggaggacgtgcagctgccgcgggcctatatggagaacaaggccttctccatggatgaacacaatgcag

SEQ ID NO: 8901 - protein, 43 aa, Homo sapiens
MVAATGVEIGGRTAEGERKSHPENLECREGMLLKECSWHQRER

SEQ ID NO: 8902 - DNA, 1328 bp, Homo sapiens
cacggtccccaaagatcaggggctgccactattcccagaaggaggtgttctgcatctccccttcctgcagcccccgggagaggggagcaggggtccgtcctatcccttttggtcttatgtggctgggatggttgcggcgacgggggtagagattggggggcgcaccgcggagggagaaaggaaatctcaccctgagaatctggagtgcagggaagggatgctgctcaaagtatttactaaacatcgtgccaggtgctgtgtgtcgagcttgagtctacagccatggttctcatccagaatgttcgtggcatcagagagaaagatgagagctcaccaggtgctcaccttcctcctgctcttcgtgatcacctcggtggcctctgaaaacgccagcacatcccgaggctgtgggctggacctcctccctcagtacgtgtccctgtgcgacctggacgccatctggggcattgtggtggaggcggtggccggggcgggcgccctgatcacactgctcctgatgctcatcctcctggtgcggctgcccttcatcaaggagaaggagaagaagagccctgtgggcctccactttctgttcctcctggggaccctgggcctctttgggctgacgtttgccttcatcatccaggaggacgagaccatctgctctgtccgccgcttcctctggggcgtcctctttgcgctctgcttctcctgcctgctgagccaggcatggcgcgtgcggaggctggtgcggcatggcacgggccccgcgggctggcagctggtgggcctggcgctgtgcctgatgctggtgcaagtcatcatcgctgtggagtggctggtgctcaccgtgctgcgtgacacaaggccagcctgcgcctacgagcccatggactttgtgatggccctcatctacgacatggtactgcttgtggtcaccctggggctggccctcttcactctgtgcggcaagttcaagaggtggaagctgaacggggccttcctcctcatcacagccttcctctctgtgctcatctgggtggcctggatgaccatgtacctcttcggcaatgtcaagctgcagcagggggatgcctggaacgaccccaccttggccatcacgctggcggccagcggctgggtcttcgtcatcttccacgccatccctgagatccactgcacccttctgccagccctgcaggagaacacgcccaactacttcgacacgtcgcagcccaggatgcgggagacggccttcgaggaggacgtgcagctgccgcgggcctatatggagaacaaggccttctccatggatgaacacaatgcag

SEQ ID NO: 8903 - protein, 399 aa, Homo sapiens
MVAATGVEIGGRTAEGERKSHPENLECREGMLLKVFTKHRARCCVSSLSLQPWFSSRMFVASERKMRAHQVLTFLLLFVITSVASENASTSRGCGLDLLPQYVSLCDLDAIWGIVVEAVAGAGALITLLLMLILLVRLPFIKEKEKKSPVGLHFLFLLGTLGLFGLTFAFIIQEDETICSVRRFLWGVLFALCFSCLLSQAWRVRRLVRHGTGPAGWQLVGLALCLMLVQVIIAVEWLVLTVLRDTRPACAYEPMDFVMALIYDMVLLVVTLGLALFTLCGKFKRWKLNGAFLLITAFLSVLIWVAWMTMYLFGNVKLQQGDAWNDPTLAITLAASGWVFVIFHAIPEIHCTLLPALQENTPNYFDTSQPRMRETAFEEDVQLPRAYMENKAFSMDEHN

SEQ ID NO: 8904 - DNA, 1377 bp, Homo sapiens
gtggagcgggtccgaggtgggaggcgcacagacgggctccgggagcccctcccgaggccccgcgcagcgcgccccgcaccctgcgccccgcgccctgcgggagggctgagccaagactccaggcgggcaggtgcggagcgagcagaggggatcacggccaagggtaggagccagtcctgcggggagagaggcgctgctgctccagctgccgctgcctccgccgccgccaccaccgagccggcgaccagagtcgggctggcaggccgggcgcgaagcggcaaggggagcgaggggcgcgctcatggagcacacgcacgcccacctcgcagccaacagctcgctgtcttggtggtcccccggctcggcctgcggcttgggtttcgtgcccgtggtctactacagcctcttgctgtgcctcggtttaccagcaaatatcttgacagtgatcatcctctcccagctggtggcaagaagacagaagtcctcctacaactatctcttggcactcgctgctgccgacatcttggtcctctttttcatagtgtttgtggacttcctgttggaagatttcatcttgaacatgcagatgcctcaggtccccgacaagatcatagaagtgctggaattctcatccatccacacctccatatggattactgtaccgttaaccattgacaggtatatcgctgtctgccacccgctcaagtaccacacggtctcatacccagcccgcacccggaaagtcattgtaagtgtttacatcacctgcttcctgaccagcatcccctattactggtggcccaacatctggactgaagactacatcagcacctctgtgcatcacgtcctcatctggatccactgcttcaccgtctacctggtgccctgctccatcttcttcatcttgaactcaatcattgtgtacaagctcaggaggaagagcaattttcgtctccgtggctactccacggggaagaccaccgccatcttgttcaccattacctccatctttgccacactttgggccccccgcatcatcatgattctttaccacctctatggggcgcccatccagaaccgctggctggtacacatcatgtccgacattgccaacatgctagcccttctgaacacagccatcaacttcttcctctactgcttcatcagcaagcggttccgcaccatggcagccgccacgctcaaggctttcttcaagtgccagaagcaacctgtacagttctacaccaatcataacttttccataacaagtagcccctggatctcgccggcaaactcacactgcatcaagatgctggtgtaccagtatgacaaaaatggaaaacctataaaagtatccccgtgattccataggtgtgg

SEQ ID NO: 8905 - protein, 353 aa, Homo sapiens; identical to SEQ ID NO: 1334

SEQ ID NO: 8906 - DNA, 2688 bp, Homo sapiens
attgggaggcgagggaggtggccaggggagccgggaccgtgcgtgtggccaggccggtagcgcccagtaagctccacccgcgggcgctccccgtgcttccccgcccctgaacctgctccctcccagtcggtctcgccgcgctcgccgggtgtcccagtgtcaccaacactcggccgccgccgccagcttggcgcgcaccgccgcctccgccaccgccgacagcgcgcatcctccgtgtccccgctccgccgcccgagcaggtgccactatgcacgtgaagaagtacctgctgaagggcctgcatcggctgcagaagggccccggctacacgtacaaggagctgctggtgtggtactgcgacaacaccaacacccacggccccaagcgcatcatctgtgaggggcccaagaagaaagccatgtggttcctgctcaccctgctcttcgccgccctcgtctgctggcagtggggcatcttcatcaggacctacttgagctgggaggtcagcgtctccctctccgtaggcttcaagaccatggacttccctgccgtcaccatctgcaatgctagccccttcaagtattccaaaatcaagcatttgctgaaggacctggatgagctgatggaagctgtcctggagagaatcctggctcctgagctaagccatgccaatgccaccaggaacctgaacttctccatctggaaccacacacccctggtccttattgatgaacggaacccccaccaccccatggtccttgatctctttggagacaaccacaatggcttaacaagcagctcagcatcagaaaagatctgtaatgcccacgggtgcaaaatggccatgagactatgtagcctcaacaggacccagtgtaccttccggaacttcaccagtgctacccaggcattgacagagtggtacatcctgcaggccaccaacatctttgcacaggtgccacagcaggagctagtagagatgagctaccccggcgagcagatgatcctggcctgcctattcggagctgagccctgcaactaccggaacttcacgtccatcttctaccctcactatggcaactgttacatcttcaactggggcatgacagagaaggcacttccttcggccaaccctggaactgaattcggcctgaagttgatcctggacataggccaggaagactacgtccccttccttgcgtccacggccggggtcaggctgatgcttcacgagcagaggtcataccccttcatcagagatgagggcatctacgccatgtcggggacagagacgtccatcggggtactcgtggacaagcttcagcgcatgggggagccctacagcccgtgcaccgtgaatggttctgaggtccccgtccaaaacttctacagtgactacaacacgacctactccatccaggcctgtcttcgctcctgcttccaagaccacatgatccgtaactgcaactgtggccactacctgtacccactgccccgtggggagaaatactgcaacaaccgggacttcccagactgggcccattgctactcagatctacagatgagcgtggcgcagagagagacctgcattggcatgtgcaaggagtcctgcaatgacacccagtacaagatgaccatctccatggctgactggccttctgaggcctccgaggactggattttccacgtcttgtctcaggagcgggaccaaagcaccaatatcaccctgagcaggaagggaattgtcaagctcaacatctacttccaagaatttaactatcgcaccattgaagaatcagcagccaataacatcgtctggctgctctcgaatctgggtggccagtttggcttctggatggggggctctgtgctgtgcctcatcgagtttggggagatcatcatcgactttgtgtggatcaccatcatcaagctggtggccttggccaagagcctacggcagcggcgagcccaagccagctacgctggcccaccgcccaccgtggccgagctggtggaggcccacaccaactttggcttccagcctgacacggccccccgcagccccaacactgggccctaccccagtgagcaggccctgcccatcccaggcaccccgccccccaactatgactccctgcgtctgcagccgctggacgtcatcgagtctgacagtgagggtgatgccatctaaccctgcccctgcccaccccgggcggctgaaactcactgagcagccaagactgttgcccgaggcctcactgtatggtgccctctccaaagggtcgggagggtagctctccaggccagagcttgtgtccttcaacagagaggccagcggcaactggtccgttactggccaagggctctgtagaatcacggtgctggtacaggatgcaggaataaattgtatcttcacctggttcctaccctcgtccctacctgtcctgatcctggtcctgaagacccctcggaacaccctctcctggtggcaggccacttccctcccagtgccagtctccatccaccccagagaggaacaggcgggtgggccatgtggttttctccttcctggccttggctggcctctggggcaggggtggtggagagatggaagggcatcaggtgtagggaccctgccaagtggcacctgatttactctagaaaataaaagtagaaaatactgagtcc

SEQ ID NO: 8907 - protein, 640 aa, Homo sapiens; identical to SEQ ID NO: 1336

SEQ ID NO: 8908 - DNA, 748 bp, Homo sapiens
tagtagagatgagctaccccggcgagcagatgatcctggcctgcctattcggagctgagccctgcaactaccggaacttcacgtccatcttctaccctcactatggcaactgttacatcttcaactggggcatgacagagaaggcacttccttcggccaaccctggaactgaattcggcctgaagttgatcctggacataggccaggaagactacgtccccttccttgcgtccacggccggggtcaggctgatgcttcacgagcagaggtcataccccttcatcagagatgagggcatctacgccatgtcggggacagagacgtccatcggggtactcgtggacaagcttcagcgcatgggggagccctacagcccgtgcaccgtgaatggttctgaggtccccgtccaaaacttctacagtgactacaacacgacctactccatccaggtgggaaggtggtgcacgcctcatgccccggggcccctgtccgggtttatggggccaaggcctcagtactccgggagagctggccccagcaagtctggctctgctgggcctttgtaggttgccacggggcaccccgggcctgtgggaccagtcactttcctgggctctctcaccagggcctagggttggccacttctcatccccacattggcaggtgtacccctggggaagcccaggggattatggggatcttactctggggtttcccaagatgaaaacaaaaaatagcagctaacacc

SEQ ID NO: 8909 - protein, 185 aa, Homo sapiens
MSYPGEQMILACLFGAEPCNYRNFTSIFYPHYGNCYIFNWGMTEKALPSANPGTEFGLKLILDIGQEDYVPFLASTAGVRLMLHEQRSYPFIRDEGIYAMSGTETSIGVLVDKLQRMGEPYSPCTVNGSEVPVQNFYSDYNTTYSIQVGRWCTPHAPGPLSGFMGPRPQYSGRAGPSKSGSAGPL

SEQ ID NO: 8910 - DNA, 281 bp, Homo sapiens
gtctgacagtgagggtgatgccatctaaccctgcccctgtcctgatcctggtcctgaagacccctcggaacaccctctcctggtggcaggccacttccctcccagtgccagtctccatccaccccagagaggaacaggcgggtgggccatgtggttttctccttcctggccttggctggcctctggggcaggggtggtggagagatggaagggcatcaggtgtagggaccctgccaagtggcacctgatttactctagaaaataaaagtagaaaatactga

SEQ ID NO: 8911 - protein, 76 aa, Homo sapiens [sequence omitted]

SEQ ID NO: 8912 - DNA, 2928 bp, Homo sapiens
attcccagccgcaaactgagtgcgctgagcggggaagcgcaaaggggcaagttacccgtcctggcgtttctggggttcgcctcggaggctagcctcggtgctctcgcaggctcgctcgcttctgcatccccgttgccgcccggagccaactcttaagttctggacgccaggcctgaggcagttccgccatggacttctccaagttcctggcagacgacttcgacgtgaaggagtggatcaatgcggccttcagggccggctccaaggaggcggcgtccgggaaggcggatggccacgcagccaccctggtgatgaagctgcagctgttcatccaagaggtgaaccacgccgtggaggaaacaagtcaccaagctctccagaacatgcccaaagtgctccgtgatgttgaagccctaaaacaggaggcatctttcctgaaagaacagatgattcttgtcaaggaggacattaaaaaatttgaacaggacacatctcaatccatgcaggtgttggtagaaattgaccaagtgaagtccagaatgcaacttgctgccgaatctcttcaggaagcagataagtggagcacgttgagcgccgatattgaggagacatttaagactcaggacatagctgtgatttctgccaagctaacaggtatgcagaacagcttaatgatgcttgttgatacaccagactactcagaaaagtgtgtgcacttggaggcactgaagaacaggctggaggccctagccagtccacagattgtagcggcattcacctctcaggctgtagatcagtccaaagtgtttgtgaaggtgtttactgaaattgaccggatgccccagctcctggcctactactacaagtgtcacaaggtgcagcttttagcagcctggcaagagctgtgtcaaagtgacctatccctggaccggcagcttaccggactctatgatgccttgcttggtgcttggcacacacaaatccagtgggctacacaggttttccagaagccccacgaggtggtaatggtgctgctgattcagaccctgggggccctcatgccctcgctgccctcctgcctcagcaacggcgtggagagggcagggcccgagcaggagctcaccaggctgctggagttctacgacgccaccgcccacttcgccaagggcttggagatggcactgctcccccacctacatgaacacaatctggtaaaagtcacggagctggtggatgctgtgtatgatccatacaaaccctaccagctgaagtatggcgacatggaagagagcaacctcctcatccagatgagtgctgtgcctctggagcatggggaagtgattgactgtgtgcaggagctgagccactccgtgaacaagctgtttggtctggcgtctgcagccgttgacagatgcgtcagattcaccaatggcctggggacctgcggcctgttgtcagccctgaaatccctctttgccaagtatgtgtctgatttcaccagcactctccagtccatacgaaagaagtgcaaactggaccacattcctcccaactccctcttccaggaagattggacggcttttcagaactccattaggataatagccacctgtggagagcttttgcggcattgtggggacttcgagcagcagctagccaacaggattttgtccacagctgggaagtatctatctgattcctgcagcccccggagcctggctggttttcaggagagcatcttgacagacaagaagaactctgccaagaacccatggcaagaatataattacctccagaaagataaccctgctgaatatgccagtttaatggaaatactttatacccttaaggaaaaagggtcaagcaaccacaacctgctggctgcacctcgagcagcgctgactcggcttaaccagcaggcccaccagctggctttcgattccgtgttcctgcgcatcaaacaacagctgttgcttatttcgaagatggacagctggaatacggctggcatcggagaaaccctcacagatgaactgcccgcctttagtctcacccctctcgagtacatcagcaacatcgggcagtacatcatgtccctccccctgaatcttgagccatttgtgactcaggaggactctgccttagagttggcattgcacgctggaaagctgccatttcctcctgagcagggggatgaattgcccgagctggacaacatggctgacaactggctgggctcgatcgccagagccacaatgcagacctactgtgatgcgatcctacagatccctgagctgagcccacactctgccaagcagctggccactgacatcgactatctgatcaacgtgatggatgccctgggcctgcagccgtcccgcaccctccagcacatcgtgacgctactgaagaccaggcctgaggactatagacaggtcagcaaaggcctgccccgtcgcctggccaccaccgtggccaccatgcggagtgtgaattactgaccccaccacacaccggaccaccaagagagccagggctgctgtttcgcgactcaccagcacagatttgctcagaaactctgcccaagattgggcagaagttactttaaaaagacttggttcagctggtcacggtggctcacgcctgtaatcccagcactttgggaggccaagccagatggatcatgaagccaggagttcgagaccagcctgaccaacatggtgaaaccccatctctactaaaaatacaaaaattaacagcagagcgagactctgtctcaaaaaaaaaaaaaaaaaagacttggttcatttgtataatcaaaaagagttgtaaattaaagatgtattatttatcagagaagactttttagataatttttttaaaggatcagatcttgaaaatggaataaataactactgtgaaatgcaa

SEQ ID NO: 8913 - protein, 770 aa, Homo sapiens; identical to SEQ ID NO: 1338

SEQ ID NO: 8914 - DNA, 2399 bp, Homo sapiens
gtaaaggctttacttagcctggtgtttaaagctgtgccttctccctccagcctctgtctgcctctgtgtaccgcatacatcctatggccagccgcttctctaatcgccctgagctcttcttgctccttgcctctgacaccgagagctctagaagtgggaggcagcactcatgtgtctgcaggggggagaggggaggggccagaacaggataggaggtgtgggggtgtacagggtgggagtatgtcagggggtcttgcttccccaagtagctcccttctagagagcaaggagcaaatcttacatttctttgtctcttctctgcaaagcttagcacaagacactcgacatcctgggtacttggtaaatgtggatggttggcgtgttccttctcgctggattgggagttagctggaaaaaatgtaggctcttttgagacaaaagagcattcgcaggcaagaacaaagagtctagaaaactgtaggacaagggttgggggcacctggggtggggaagaaaagagctcatttacatcaaagaaaataagaccgaatcaagtgggcgctagagagcacggggagggctgccgaggctgagcctgggctgggagcccagggttggacatggtcattcctttcccggaatgctacttaaaggatcaggcaaccggatccaacatcaggtggctgcagacagcagttcctacatgaccgccggagtcactcccggagttcagccagaaagggccttgttttccagggctggctttagagtggctcaggttggaagtaagaagcgagatttttgtgtgaaggtgtgccactctgaagtctgtgagcacatgtgcacaggtcctttacccaactctatataaactgctgggaaggcttccacaacaacacggaagatgtttccactccaaatggcaagaaacacgtgttagtgctgaggttctcctcgcacagggggactacagagaggccagaggggcagctgttggggtttggaagtgccgtcccatccccatccctctgagttctgatgagttgagaaacagatccagaaggtggtgagaaataaagcagcagctttagttgaggtaaagcagtattgccgatgaggcttggctcttcctgcagccagaggggcttcctaggtctccctcccagataagagactgacacgtggcctctgtgggggacctcagggtgccctgttctccttagggtgctaaggacccacgaagtagtgaggctgtctgcacccagcacctctctacacagtggccccgctacgcagagaaacttggaccaaaaatatccaactttctcctgttacaatctcagcgagataaatgaaagggatcagttcccaccccacagttcagccaatgtggcagttcctgtttcatggacctgcaggaatgcggagagagaaatcgttgccttctgtatggcgggcttccaggtgaagctttaaagaagagaagcccctgcctgctgagtggtggaggctccaacggtcagctccaaccaaagacagtgcctccagggaaggccatgttcttcttgtgtatttctgggtggcgtcttcacagctgcctggctgctaggtactgattgtgtcctctcgttccacccttagagctggaatacggctggcatcggagaaaccctcacagatgaactgcccgcctttagtctcacccctctcgagtacatcagcaacatcgggcagtacatcatgtccctccccctgaatcttgagccatttgtgactcaggaggactctgccttagagttggcattgcacgctggaaagctgccatttcctcctgagcagggggatgaattgcccgagctggacaacatggctgacaactggctgggctcgatcgccagagccacaatgcagacctactgtgatgcgatcctacagatccctgagctgagcccacactctgccaagcagctggccactgacatcgactatctgatcaacgtgatggatgccctgggcctgcagccgtcccgcaccctccagcacatcgtgacgctactgaagaccaggcctgaggactatagacaggtcagcaaaggcctgccccgtcgcctggccaccaccgtggccaccatgcggagtgtgaattactgaccccaccacacaccggaccaccaagagagccagggctgctgtttcgcgactcaccagcacagatttgctcagaaactctgcccaagattgggcagaagttactttaaaaagacttggttccttggttcatttgtataatcaaaaagagttgtaaattaaagatgtattatttatcagagaagactttttagataatttttttaaaggatcagatcttgaaaatggaataaataactactgtgaaatgc

SEQ ID NO: 8915 - protein, 136 aa, Homo sapiens
MSLPLNLEPFVTQEDSALELALHAGKLPFPPEQGDELPELDNMADNWLGSIARATMQTYCDAILQIPELSPHSAKQLATDIDYLINVMDALGLQPSRTLQHIVTLLKTRPEDYRQVSKGLPRRLATTVATMRSVNY

SEQ ID NO: 8916 - DNA, 474 bp, Homo sapiens
ttgggcaaaacagacagcatgggggagcaaaccaggtgcagccaggtgtgacctcagagaagcccttctacctccctgagtctctgcttccatctgtccacagttaccacccatccggcagcatggataggggatgaagcgggaaacgaacatgagagcacctgatgtgtcgcaggtgatcaatatatcaatgctgcctttccctcctgcctgggcagtgcaacccaacccaagggaagccttgcaaagccttctccagctcctcccagttcatgcttggaaagactagaagacagcaccacccgatatgcccctggctagttttttttttttttttttttttcttttctgagacagagtttcactcttgttgcccaggctggagtgcaatgctgcgatctcggctcactgcaacctccgcctcctgggttcaagtgatccacccacctcagcctcccaaagtgctgggattac

SEQ ID NO: 8917 - protein, 66 aa, Homo sapiens
MLGKTRRQHHPICPWLVFFFFFFFFSETEFHSCCPGWSAMLRSRLTATSASWVQVIHPPQPPKVLG

SEQ ID NO: 8918 - DNA, 442 bp, Homo sapiens
ttcccgtctatgttaaaagctttataaatttttaaagaacacagaccccgtgacgcatgttgctgtcaaatcaggaaattgcttcaggaaggccttgttctgctgttcggcggctgtgtgtcactgacttggtttatttaatagttcttctctttaattacatctgtgtataattgccttgtacgttccagggagtgtgtttattgttcggattcctgatgactcatcggtgtttttggcatgctcacaggtcaggccttagttatgggaaaggcccagtggatggggaagcttccaagggaccgtgatgcacctgtagtactagctactcaggaggctggggtggggagatctcttgagcctgggaggccaaggcaatggtgacctgtggttggaccactgcaccttagtctggggaactgagtgagatcctgtctcgaag

SEQ ID NO: 8919 - protein, 47 aa, Homo sapiens
MLTGQALVMGKAQWMGKLPRDRDAPVVLATQEAGVGRSLEPGRPRQW

SEQ ID NO: 8920 - DNA, 742 bp, Homo sapiens
ttcggtgacctctgcccagccgagagcaggggagggtcccgcggccagggccccgagcggctcaccctccacggcgtggttcacctcttggatgaacagctgcagcttcatcaccagggtggctgcgtggccatccgccttcccggacgccgcctccttggagccggccctgaaggccgcattgatccactccttcacgtcgaagtcgtctgccaggaacttggagaagtccatggcggaactgcctcaggcctggcgtccagaacttaagagttggctccgggcggcaacggggatgcagaagcgagcgagcctgcgagagcaccgaggctagcctccgaggcgaaccccagaaacgccaggacgggtaacttgcccctttgcgcttccccgctcagcgcactcagtttgcggctgggaatgaccctcgccgcccgccgttcttcttccggaagtcgttggccgttaccatagtgactgcaggcgtccggagcgctgagcagaggtgcagtggctcatgcctgcaatcccagcactttgggaggccgaggcaggaggatcacaagtcccagctgctagggaggctgaggcaggattgcttgagcctgggaagcggaggttggaggaagccgtgattgtaccactgcattccagccagggcaacagagcaagactccatctcaaaaataattgtccatttcatccaagttgtataatttgttggcataaaattgttcaaagg

SEQ ID NO: 8921 - protein, 74 aa, Homo sapiens [sequence omitted]

SEQ ID NO: 8922 - DNA, 819 bp, Homo sapiens
gtgacctctgcccagccgagagcaggggagggtcccgcggccagggccccgagcggctcaccctccacggcgtggttcacctcttggatgaacagctgcagcttcatcaccagggtggctgcgtggccatccgccttcccggacgccgcctccttggagccggccctgaaggccgcattgatccactccttcacgtcgaagtcgtctgccaggaacttggagaagtccatggcggaactgcctcaggcctggcgtccagaacttaagagttggctccgggcggcaacggggatgcagaagcgagcgagcctgcgagagcaccgaggctagcctccgaggcgaaccccagaaacgccaggacgggtaacttgcccctttgcgcttccccgctcagcgcactcagtttgcggctgggaatgaccctcgccgcccgccgttcttcttccggaagtcgttggccgttaccatagtgactgcaggcgtccggagcgctgagcagaggtgcagtggctcatgcctgcaatcccagcactttgggaggccgaggcaggaggatcacaaggtcaggagttccatacaagactagcctgcccaacatggtgaaaccccgtctctactgaaaatacaaaaacagcctggcgtggttgtgtgcacctgtaatcccagctactcaggaggctgaggcaggagaactgcttgaacccgggaggcaaaggttgcagtgaacagagatcgggccactgttatccagcctgggtgacagagtgagactccatctcaaaaaataaataaataaaataagtatttccttttaatgct

SEQ ID NO: 8923 - protein, 80 aa, Homo sapiens
MNSCSFITRVAAWPSAFPDAASLEPALKAALIHSFTSKSSARNLEKSMAELPQAWRPELKSWLRAATGMQKRASLREHRG

SEQ ID NO: 8924 - DNA, 438 bp, Homo sapiens
tcaggcctggcgtccagaacttaagagttggctccgggcggcaacggggatgcagaagcgagcgagcctgcgagagcaccgaggctagcctccgaggcgaaccccagaaacgccaggacgggtaacttgcccctttgcgcttccccgctcagcgcactcagtttgcggctgggaatgaccctcgccgcccgccgttcttcttccggaagtcgttggccgttaccatagtgactgcaggcgtccggagcgctgagcagagtcccagctgctagggaggctgaggcaggattgcttgagcctgggaagcggaggttggaggaagccgtgattgtaccactgcattccagccagggcaacagagcaagactccatctcaaaaataattgtccatttcatccaagttgtataatttgttggcataaaattgttcaaaggatc

SEQ ID NO: 8925 - protein, 68 aa, Homo sapiens
LQASGALSRVPAAREAEAGLLEPGKRRLEEAVIVPLHSSQGNRARLHLKNNCPFHPSCIICWHKIVQR

SEQ ID NO: 8926 - DNA, 1087 bp, Homo sapiens
tggccacttagagcccagctcctacctcttcattcacttaacaagtagttattggctgtgcacagtggctcacgcctataatcccagcattttgggaggctgagtgggatgaccgcttgagcccaggatttcaagtccagcctgggctacatagtgagaccgtgtctctgtttttttaaaagctagttgttgaccagctaccctgagccaggcaccaccctgaaggagcttcttttcctctggggagaagcaaattcatgatgtgtgtgctggagatctggcactcatggccagtgctttccagtatcttgaactcttcgggggtcctgttgacccatttcgtgacctacctccgtgactgctctttttcctctgtctcttaagtgtgatggttttccagagtccaatcctcaggactttcccgtccacacacaggcctggtagtcaggtggctctaaaccattaggtgggttgtagacctctctcaagctgccacctccttgctgtcgccagatcgtatttcagtctgtcaggggttatctgtatctggaggttccactgttgcttcagtctcagttacttagaatggaacccagagtcctgcccctttccacctacatgctcttacttgaaagcacctgagacttattgggtccctgattcctgcttcgtctgtatccgcagagtagttgcatgtcatttggcctgttttctaaataatcccacatcatgtcctccctgcacttacattgccactgctctgatttgggcttttttttttttgggacaatgcctctgtcccaattctgagtaacagctctggttcttgccactaccagagttctctagcaaatctgagcatctgacagggtgaaaaattctgaatggcttcctgatgcctgactttatgggatcaaattcaagttgcacgctggcactcagtgcccttctggtatcatctgccaagaccagggcctgtgcactccagcctgggcaacacagcaagactccgtctcaaaaaaaaaaaaaaaatctgaccataccctttgttaagatcaggatcagctgcaataaacaaacccaaagt

SEQ ID NO: 8927 - protein, 63 aa, Homo sapiens
MPDFMGSNSSCTLALSALLVSSAKTRACALQPGQHSKTPSQKKKKNLTIPFVKIRISCNKQTQ

SEQ ID NO: 8928 - DNA, 1490 bp, Homo sapiens
gaacctgagcctggctgagatggctaggcggagggctttgaagtccaagcagctgaactggctgggtgggtttctacctttgaaactgcaagacttgtttggagctcttaattacaatatctgatatttttacagtctgatcttttgacttctacatatagtggaaatctgccaatactaattggtggagatgggaactgtaaaagatcaagtatgctaattttaagcaaatgtaaaaactcataaaacaggtaaacagtggggtgatttcatttgccataattcacataagacgaattttaatctaaaagtactttcttgcttgtattctgtgtggcttttttttgttttttgaggccatatctcactctgtcactcaggctggagtgcggtggtataatctcagctcactgcaatctctgcctaccaggttcaagcgattctcgtgcctcagcctctcgagtagctgggactacaggcgtgagccagcacgcccagctaatttttgtatttttagtagagacaggatttcaccatgttggccaggctggtctcgaactcctgacctcaggtgatccgcctgccttggcctcccagagtgctgggattacaggcgtgagccaccgcacccggcctctgtgtagcttttataggctctgttactgttgcgtagtcttgaagaggtacccatcataatgacagcatctccctctgaagggttttggtcaaaatgggtgaatgagacttatacataaagacaggctttctcccctatagttaggaggtgaactcacacatgtgtacctgaacattcttgcttttgaggagacagactcccagtggtactactatgcttaggtgttggacaggataggggtaggaggagaggaggcaggctgctgtcctgaaagtggctgtggtttatggcatcactcccttctaatcagcaagtccagtggccacttagagcccagctcctacctcttcattcacttaacaagtagttattggctgtgcacagtggctcacgcctataatcccagcattttgggaggctgagtgggatgaccgcttgagcccaggatttcaagtccagcctgggctacatagtgagaccgtgtctctgtttttttaaaagctagttgttgaccagctaccctgagccaggcaccaccctgaaggagcttcttttcctctggggagaagcaaattcatgatgtgtgtgctggagatctggcactcatggccagtgctttccagtatcttgaactcttcgggggtcctgttgacccatttcgtgacctacctccgtgactgctctttttcctctgtctcttaagtgtgatggttttccagagtccaatcctcaggactttcccgtccacacacagcctgggcaacacagcaagactccgtctcaaaaaaaaaaaaaaaatctgaccataccctttgttaagatcaggatcagctgcaataaacaaacccaaagt

SEQ ID NO: 8929 - protein, 31 aa, Homo sapiens [sequence omitted]

SEQ ID NO: 8930 - DNA, 3340 bp, Homo sapiens
tctagtcaggactaatcacggtgtttcagtgcggagtgccaagagtcctatcctgacgtcaggctctgggtgtcaacctctgacttattctgcagatgctctgtcatttacttggagctctttgtgacacaccatgtcagtcatgatgaatcggccaacagccagcccttgccagctgacgtcacagtctaagatgggaaactgtggtacagatagacatgaagagagcttagcagtgattgaggtggtgactaaatatacagtcattgaataaataccatgtagcaagtgtactttgtggagtgttgagtaagtggaaaatggaaagccagttgcatttagagatgataggcctaaagggaactgtcttctgtcgagaagtaaaggaaacttcatgaaggatgtagaagcttagctgcctcagagaagagagaacctgaagatctgaggcaagctggacaggagaggtggatatttgttgatggaagaattcaagtttataatcaattcccacttagcacctactgtgtgctaggaacttgaatgtgtatgtttgacaagtcctgcttggcctgatgggtgggagaaggaacctgagcctggctgagatggctaggcggagggctttgaagtccaagcagctgaactggctgggtgggtttctacctttgaaactgcaagacttgtttggagctcttaattacaatatctgatatttttacagtctgatcttttgacttctacatatagtggaaatctgccaatactaattggtggagatgggaactgtaaaagatcaagtatgctaattttaagcaaatgtaaaaactcataaaacaggtaaacagtggggtgatttcatttgccataattcacataagacgaattttaatctaaaagtactttcttgcttgtattctgtgtggcttttttttgttttttgaggccatatctcactctgtcactcaggctggagtgcggtggtataatctcagctcactgcaatctctgcctaccaggttcaagcgattctcgtgcctcagcctctcgagtagctgggactacaggcgtgagccagcacgcccagctaatttttgtatttttagtagagacaggatttcaccatgttggccaggctggtctcgaactcctgacctcaggtgatccgcctgccttggcctcccagagtgctgggattacaggcgtgagccaccgcacccggcctctgtgtagcttttataggctctgttactgttgcgtagtcttgaagaggtacccatcataatgacagcatctccctctgaagggttttggtcaaaatgggtgaatgagacttatacataaagacaggctttctcccctatagttaggaggtgaactcacacatgtgtacctgaacattcttgcttttgaggagacagactcccagtggtactactatgcttaggtgttggacaggataggggtaggaggagaggaggcaggctgctgtcctgaaagtggctgtggtttatggcatcactcccttctaatcagcaagtccagtggccacttagagcccagctcctacctcttcattcacttaacaagtagttattggctgtgcacagtggctcacgcctataatcccagcattttgggaggctgagtgggatgaccgcttgagcccaggatttcaagtccagcctgggctacatagtgagaccgtgtctctgtttttttaaaagctagttgttgaccagctaccctgagccaggcaccaccctgaaggagcttcttttcctctggggagaagcaaattcatgatgtgtgtgctggagatctggcactcatggccagtgctttccagtatcttgaactcttcgggggtcctgttgacccatttcgtgacctacctccgtgactgctctttttcctctgtctcttaagtgtgatggttttccagagtccaatcctcaggactttcccgtccacacacaggcctggtagtcaggtggctctaaaccattaggtgggttgtagacctctctcaagctgccacctccttgctgtcgccagatcgtatttcagtctgtcaggggttatctgtatctggaggttccactgttgcttcagtctcagttacttagaatggaacccagagtcctgcccctttccacctacatgctcttacttgaaagcacctgagacttattgggtccctgattcctgcttcgtctgtatccgcagagtagttgcatgtcatttggcctgttttctaaataatcccacatcatgtcctccctgcacttacattgccactgctctgatttgggcttttttttttttgggacaatgcctctgtcccaattctgagtaacagctctggttcttgccactaccagagttctctagcaaatctgagcatctgacagggtgaaaaattctgaatggcttcctgatgcctgactttatgggatcaaattcaagttgcacgctggcactcagtgcccttctggtatcatctgccaagaccagggcctgcttcaccacagccacaataaagtcctttcaagccctgataatgccatgttttgtcctaaccttttgctgcagttaattactcttcctattatcttccatgaacttaagactgggcaaaaatgtttccttatctgtgagccactctgaacacaaacaggtcatgaagatagtgttgaaaacaataaatgacaaccaaaagaaaagtgaatattacctagtacaaatagtgtaaattgagacagaaaatgttaaagctagaaagcaagggcaatattctagaatacaaatagtgcttgcctactacaatattaatcccaaatcctttaaatatacccattatagaagatgcttacccagcgtcaagagtataaaagtgggtttgtttgttttcttgagacagggctttgctctgttgcccaggctggagtgcagtggcgtgattgtagctcaatgcagccttgaattcctgtgttcaggcgatcctccggcttcagcctctggagtagctgggactacaggtgcatgctgccacgcccagctaatgttgcagtttttcgtaaagactggatctctgtgttacccaggctggtctcctgggctcaagcagtcctcctgccttgacctcccaaagtgctgggattacaggcatgagccaccatgtcctgaccccagtttgttttaaagccaagcgatgcaccaagatgtttgtgtgcacatctgacagtggtaatctttgggtcagggaattatagataaattttctttaaattttttctgagctttctaaaatcagctgaaaataaaaccttattttttt

SEQ ID NO: 8931 - protein, 52 aa, Homo sapiens
MPDFMGSNSSCTLALSALLVSSAKTRACFTTATIKSFQALIMPCFVLTFCCS

SEQ ID NO: 8932 - DNA, 4000 bp, Homo sapiens
gaacctatccgcttacggtacaagctgacattcaaccaaggtggacagcctttcagcgaagtaggagaagtgaaagacttcccagacctggctgtcttgggcgcagcctaacttttcacaagatggacccttcatttcaagcttaggctggcgttacttttgctgtctagtcaggactaatcacggtgtttcagtgcggagtgccaagagtcctatcctgacgtcaggctctgggtgtcaacctctgacttattctgcagatgctctgtgtgtgtgtgtgtgtgtgtgtgtgtgtgtgtgtgtgtgtgtgtgttcggggagagggtggtagcacagggcttgggatatcggcagtgtgggaaatgcgaagcatttctcatcatcatcatctctgctacagtcatgtttctgcatgtcagcgagcgacactgtccctgcctcaggttggaggttttatcagccaaagtgtttttttcatgtatcgttcgttccattcatccactctgtgccttgtcagcctttgaaaggcttggttgctcccaggctgctgttctcagggaccttaaaagggacctggttagtcttggggcagagagtatctacttgggcactctcttccaagaaagaccttgtctccattttcattagacaatgcttcttgtgtgtgttctggaagatcttctaaatggaatgcttgttgcactgttcccagtctgggcccttctcaggatcctcatctccatcctcatcctcttccttcacagcatttacttggagctctttgtgacacaccatgtcagtcatgatgaatcggccaacagccagcccttgccagctgacgtcacagtctaagatgggaaactgtggtacagatagacatgaagagagcttagcagtgattgaggtggtgactaaatatacagtcattgaataaataccatgtagcaagtgtactttgtggagtgttgagtaagtggaaaatggaaagccagttgcatttagagatgataggcctaaagggaactgtcttctgtcgagaagtaaaggaaacttcatgaaggatgtagaagcttagctgcctcagagaagagagaacctgaagatctgaggcaagctggacaggagaggtggatatttgttgatggaagaattcaagtttataatcaattcccacttagcacctactgtgtgctaggaacttgaatgtgtatgtttgacaagtcctgcttggcctgatgggtgggagaaggaacctgagcctggctgagatggctaggcggagggctttgaagtccaagcagctgaactggctgggtgggtttctacctttgaaactgcaagacttgtttggagctcttaattacaatatctgatatttttacagtctgatcttttgacttctacatatagtggaaatctgccaatactaattggtggagatgggaactgtaaaagatcaagtatgctaattttaagcaaatgtaaaaactcataaaacaggtaaacagtggggtgatttcatttgccataattcacataagacgaattttaatctaaaagtactttcttgcttgtattctgtgtggcttttttttgttttttgaggccatatctcactctgtcactcaggctggagtgcggtggtataatctcagctcactgcaatctctgcctaccaggttcaagcgattctcgtgcctcagcctctcgagtagctgggactacaggcgtgagccagcacgcccagctaatttttgtatttttagtagagacaggatttcaccatgttggccaggctggtctcgaactcctgacctcaggtgatccgcctgccttggcctcccagagtgctgggattacaggcgtgagccaccgcacccggcctctgtgtagcttttataggctctgttactgttgcgtagtcttgaagaggtacccatcataatgacagcatctccctctgaagggttttggtcaaaatgggtgaatgagacttatacataaagacaggctttctcccctatagttaggaggtgaactcacacatgtgtacctgaacattcttgcttttgaggagacagactcccagtggtactactatgcttaggtgttggacaggataggggtaggaggagaggaggcaggctgctgtcctgaaagtggctgtggtttatggcatcactcccttctaatcagcaagtccagtggccacttagagcccagctcctacctcttcattcacttaacaagtagttattggctgtgcacagtggctcacgcctataatcccagcattttgggaggctgagtgggatgaccgcttgagcccaggatttcaagtccagcctgggctacatagtgagaccgtgtctctgtttttttaaaagctagttgttgaccagctaccctgagccaggcaccaccctgaaggagcttcttttcctctggggagaagcaaattcatgatgtgtgtgctggagatctggcactcatggccagtgctttccagtatcttgaactcttcgggggtcctgttgacccatttcgtgacctacctccgtgactgctctttttcctctgtctcttaagtgtgatggttttccagagtccaatcctcaggactttcccgtccacacacaggcctggtagtcaggtggctctaaaccattaggtgggttgtagacctctctcaagctgccacctccttgctgtcgccagatcgtatttcagtctgtcaggggttatctgtatctggaggttccactgttgcttcagtctcagttacttagaatggaacccagagtcctgcccctttccacctacatgctcttacttgaaagcacctgagacttattgggtccctgattcctgcttcgtctgtatccgcagagtagttgcatgtcatttggcctgttttctaaataatcccacatcatgtcctccctgcacttacattgccactgctctgatttgggcttttttttttttgggacaatgcctctgtcccaattctgagtaacagctctggttcttgccactaccagagttctctagcaaatctgagcatctgacagggtgaaaaattctgaatggcttcctgatgcctgactttatgggatcaaattcaagttgcacgctggcactcagtgcccttctggtatcatctgccaagaccagggcctgcttcaccacagccacaataaagtcctttcaagccctgataatgccatgttttgtcctaaccttttgctgcagttaattactcttcctattatcttccatgaacttaagactgggcaaaaatgtttccttatctgtgagccactctgaacacaaacaggtcatgaagatagtgttgaaaacaataaatgacaaccaaaagaaaagtgaatattacctagtacaaatagtgtaaattgagacagaaaatgttaaagctagaaagcaagggcaatattctagaatacaaatagtgcttgcctactacaatattaatcccaaatcctttaaatatacccattatagaagatgcttacccagcgtcaagagtataaaagtgggtttgtttgttttcttgagacagggctttgctctgttgcccaggctggagtgcagtggcgtgattgtagctcaatgcagccttgaattcctgtgttcaggcgatcctccggcttcagcctctggagtagctgggactacaggtgcatgctgccacgcccagctaatgttgcagtttttcgtaaagactggatctctgtgttacccaggctggtctcctgggctcaagcagtcctcctgccttgacctcccaaagtgctgggattacaggcatgagccaccatgtcctgaccccagtttgttttaaagccaagcgatgcaccaagatgtttgtgtgcacatctgacagtggtaatctttgggtcagggaattatagataaattttctttaaattttttctgagctttctaaaatcagctgaaaataaaaccttattttttt

SEQ ID NO: 8933 - protein, 66 aa, Homo sapiens
MLLVCVLEDLLNGMLVALFPVWALLRILISILILFLHSIYLELFVTHHVSHDESANSQPLPADVTV

SEQ ID NO: 8934 - DNA, 5438 bp, Homo sapiens
gcagcctgccgcctctcattgtgtatgaccggaatggattcagaattctgctccacttctcccagacgggagcccctgggcacccagaggtacaggtgctgctcttgaccatgatgagcacggctccccagcctgtctgggatatcatgtttcaagtggctgtgccaaaggtgagtcatctgttggggatttctcagtaatggctgtcgtttttgagtgccaggttcttttctgggacttacctgtcgagtgtcaaggaaagaatcttcactcaaactaactgaagataaagtgggaatgtaatggcttacctgactggggattcctgaatatctgacttcagatatgagtgaatccaaataggttcttaaacaatgccttaagaatctgtatctcttgactctgcttttctttggcaccattctgacagtttctccacaaacaggaaagtggctacccacagctccagggttgcatggtccttaaccctctttatctcagaaactctcaccgggcatgaagcacatatattgattacccaggaaagggctctgattgggcttgttggtgttacttccataccttggaccaggaacttgtatcctgggatatgagacacttggccaatgtgagataacatccatcccttttcaagggaagtggggccctactgattaacaggcaccccacagtcacaggggaaggggcctgtcctgaaaggaaaagattcgagacagacaaaaatatgacctgcagtctctacttcttacggtagtcctatgggcaatgttctgctactacctctgttttataagttaacccaaggctcagaaattaaatattttactcaaggtcacagagctagtgagaagcagttagaattcaacccaagatgtgccctggctgttgatgctgcgtctcagatgccggttattgaccacacaactcccgatccattctgtgtgtggaaggaaaggcctcttagatccttttatcaattagtgggagtctgtctgcttgggctcccataggtgcctcggggtaccacgtttaagagggccatttcctcttggaggggtgttggggaggtccagctccccctcacctgatctccatcctagaagctgtggttaggaatgagttacatgttggttttcttcccctgatagtcaatgagagtgaagctgcagccggcatccagctccaagcttcctgcattcagtcctttgatgcctccagctgtgatatctcagatgctgctgcttgacaatccacacaaagaacctatccgcttacggtacaagctgacattcaaccaaggtggacagcctttcagcgaagtaggagaagtgaaagacttcccagacctggctgtcttgggcgcagcctaacttttcacaagatggacccttcatttcaagcttaggctggcgttacttttgctgtctagtcaggactaatcacggtgtttcagtgcggagtgccaagagtcctatcctgacgtcaggctctgggtgtcaacctctgacttattctgcagatgctctgtgtgtgtgtgtgtgtgtgtgtgtgtgtgtgtgtgtgtgtgtgtgttcggggagagggtggtagcacagggcttgggatatcggcagtgtgggaaatgcgaagcatttctcatcatcatcatctctgctacagtcatgtttctgcatgtcagcgagcgacactgtccctgcctcaggttggaggttttatcagccaaagtgtttttttcatgtatcgttcgttccattcatccactctgtgccttgtcagcctttgaaaggcttggttgctcccaggctgctgttctcagggaccttaaaagggacctggttagtcttggggcagagagtatctacttgggcactctcttccaagaaagaccttgtctccattttcattagacaatgcttcttgtgtgtgttctggaagatcttctaaatggaatgcttgttgcactgttcccaggcgagtggctgccatgagacctgaggaccacacttgggggaccaatcatgtccttcaccactgtgccttagaatcgcccctggacagagttcctgggcagaggggaaagcagctcccaggccttactcaggcctcaggtccatgggttgggcagccagtctgggcccttctcaggatcctcatctccatcctcatcctcttccttcacagcatttacttggagctctttgtgacacaccatgtcagtcatgatgaatcggccaacagccagcccttgccagctgacgtcacagtctaagatgggaaactgtggtacagatagacatgaagagagcttagcagtgattgaggtggtgactaaatatacagtcattgaataaataccatgtagcaagtgtactttgtggagtgttgagtaagtggaaaatggaaagccagttgcatttagagatgataggcctaaagggaactgtcttctgtcgagaagtaaaggaaacttcatgaaggatgtagaagcttagctgcctcagagaagagagaacctgaagatctgaggcaagctggacaggagaggtggatatttgttgatggaagaattcaagtttataatcaattcccacttagcacctactgtgtgctaggaacttgaatgtgtatgtttgacaagtcctgcttggcctgatgggtgggagaaggaacctgagcctggctgagatggctaggcggagggctttgaagtccaagcagctgaactggctgggtgggtttctacctttgaaactgcaagacttgtttggagctcttaattacaatatctgatatttttacagtctgatcttttgacttctacatatagtggaaatctgccaatactaattggtggagatgggaactgtaaaagatcaagtatgctaattttaagcaaatgtaaaaactcataaaacaggtaaacagtggggtgatttcatttgccataattcacataagacgaattttaatctaaaagtactttcttgcttgtattctgtgtggcttttttttgttttttgaggccatatctcactctgtcactcaggctggagtgcggtggtataatctcagctcactgcaatctctgcctaccaggttcaagcgattctcgtgcctcagcctctcgagtagctgggactacaggcgtgagccagcacgcccagctaatttttgtatttttagtagagacaggatttcaccatgttggccaggctggtctcgaactcctgacctcaggtgatccgcctgccttggcctcccagagtgctgggattacaggcgtgagccaccgcacccggcctctgtgtagcttttataggctctgttactgttgcgtagtcttgaagaggtacccatcataatgacagcatctccctctgaagggttttggtcaaaatgggtgaatgagacttatacataaagacaggctttctcccctatagttaggaggtgaactcacacatgtgtacctgaacattcttgcttttgaggagacagactcccagtggtactactatgcttaggtgttggacaggataggggtaggaggagaggaggcaggctgctgtcctgaaagtggctgtggtttatggcatcactcccttctaatcagcaagtccagtggccacttagagcccagctcctacctcttcattcacttaacaagtagttattggctgtgcacagtggctcacgcctataatcccagcattttgggaggctgagtgggatgaccgcttgagcccaggatttcaagtccagcctgggctacatagtgagaccgtgtctctgtttttttaaaagctagttgttgaccagctaccctgagccaggcaccaccctgaaggagcttcttttcctctggggagaagcaaattcatgatgtgtgtgctggagatctggcactcatggccagtgctttccagtatcttgaactcttcgggggtcctgttgacccatttcgtgacctacctccgtgactgctctttttcctctgtctcttaagtgtgatggttttccagagtccaatcctcaggactttcccgtccacacacaggcctggtagtcaggtggctctaaaccattaggtgggttgtagacctctctcaagctgccacctccttgctgtcgccagatcgtatttcagtctgtcaggggttatctgtatctggaggttccactgttgcttcagtctcagttacttagaatggaacccagagtcctgcccctttccacctacatgctcttacttgaaagcacctgagacttattgggtccctgattcctgcttcgtctgtatccgcagagtagttgcatgtcatttggcctgttttctaaataatcccacatcatgtcctccctgcacttacattgccactgctctgatttgggcttttttttttttgggacaatgcctctgtcccaattctgagtaacagctctggttcttgccactaccagagttctctagcaaatctgagcatctgacagggtgaaaaattctgaatggcttcctgatgcctgactttatgggatcaaattcaagttgcacgctggcactcagtgcccttctggtatcatctgccaagaccagggcctgcttcaccacagccacaataaagtcctttcaagccctgataatgccatgttttgtcctaaccttttgctgcagttaattactcttcctattatcttccatgaacttaagactgggcaaaaatgtttccttatctgtgagccactctgaacacaaacaggtcatgaagatagtgttgaaaacaataaatgacaaccaaaagaaaagtgaatattacctagtacaaatagtgtaaattgagacagaaaatgttaaagctagaaagcaagggcaatattctagaatacaaatagtgcttgcctactacaatattaatcccaaatcctttaaatatacccattatagaagatgcttacccagcgtcaagagtataaaagtgggtttgtttgttttcttgagacagggctttgctctgttgcccaggctggagtgcagtggcgtgattgtagctcaatgcagccttgaattcctgtgttcaggcgatcctccggcttcagcctctggagtagctgggactacaggtgcatgctgccacgcccagctaatgttgcagtttttcgtaaagactggatctctgtgttacccaggctggtctcctgggctcaagcagtcctcctgccttgacctcccaaagtgctgggattacaggcatgagccaccatgtcctgaccccagtttgttttaaagccaagcgatgcaccaagatgtttgtgtgcacatctgacagtggtaatctttgggtcagggaattatagataaattttctttaaattttttctgagctttctaaaatcagctgaaaataaaaccttattttttt

SEQ ID NO: 8935 - protein, 72 aa, Homo sapiens
MRVKLQPASSSKLPAFSPLMPPAVISQMLLLDNPHKEPIRLRYKLTFNQGGQPFSEVGEVKDFPDLAVLGAA

SEQ ID NO: 8936 - DNA, 5906 bp, Homo sapiens
gtgtccaccgctcctgccgcgcagtcagcagaggagagcgccaggacgctacagcggctgaagaggcagtggcgcccgcggccgcagcgtcggggctggagcgatggcggcgaccgcggtggcggcggctgtggcgggaaccgagtcggcccagggtcccccgggcccggcagcgtcgctggagctgtggctcaacaaagccacagacccaagcatgtcggaacaggattggtcagctatccagaatttctgtgagcaggtgaacactgaccccaatggccccacacatgcgccctggctactggcccacaagatccagtctccgcaagagaaggaagctctttatgccttaacggtgctggagatgtgcatgaaccactgtggggagaagttccacagcgaggtggccaaatttcgtttcctgaacgaactgatcaaagtgttgtccccaaagtacctggggtcctgggccacaggaaaagttaaaggaagagtcattgaaatactcttcagttggacagtctggtttccggaagacatcaagattcgagacgcttatcagatgctgaagaaacaaggaattataaaacaagaccctaaactaccagtggataaaatcttacccccaccatctccctggcccaagagctccatctttgatgctgatgaagaaaagtccaagctctttctcagtgccagtgagcccggccctatccattttccatccaccatgaactccccaaaccgttattccttggacatcagtatctagagggacaagaagaagaaggtggccaagacccagggataactgtggtgcctcttctgacaaggcttctaaagagcaaccaccccgaggaccttcaggctgcaaaccggttaatcaagaatttggtcaaggaggaacaagaaaaatcggagaaggtgtccaagagggtcagtgcggtggaggaagtgcgaagccatgtgaaggtgctgcaggagatgctgagcatgtaccgcaggccagggcaggccccgcccgaccaggaggccctgcaggtcgtgtatgagaggtgtgaaaagctgcggcccacgctgttccggttggcgagtgacaccactgatgacgatgatgcactcgcggaaattctccaggcaaatgacctcctcacccaaggagttctgctgtacaaacaggtgatggagggccgggtcacctttggaaacagagtgaccagctcattgggagacatccctgtctccagagtctttcagaatccagcaggctgcatgaagacctgccccctgattgacttggaggtggacaatggacctgcgcagatggggactgtggtgccatctttgcttcatcaggacctggcagccttgggaatcagtgatgctcctgttacaggcatggtttctggtcagaattgctgtgaggaaaagaggaatccctcctccagcacgctgccaggcggtggtgttcagaacccttctgcagacaggaatttgctggacctcctctcagcacagccagctccgtgccctctgaattatgtttcgcagaaaagtgtccccaaggaagtgccaccaggtactaagtcctctccaggttggtctgggatatcatgtttcaagtggctgtgccaaagtcaatgagagtgaagctgcagccggcatccagctccaagcttcctgcattcagtcctttgatgcctccagctgtgatatctcagatgctgctgcttgacaatccacacaaagaacctatccgcttacggtacaagctgacattcaaccaaggtggacagcctttcagcgaagtaggagaagtgaaagacttcccagacctggctgtcttgggcgcagcctaacttttcacaagatggacccttcatttcaagcttaggctggcgttacttttgctgtctagtcaggactaatcacggtgtttcagtgcggagtgccaagagtcctatcctgacgtcaggctctgggtgtcaacctctgacttattctgcagatgctctgtgtgtgtgtgtgtgtgtgtgtgtgtgtgtgtgtgtgtgtgtgtgttcggggagagggtggtagcacagggcttgggatatcggcagtgtgggaaatgcgaagcatttctcatcatcatcatctctgctacagtcatgtttctgcatgtcagcgagcgacactgtccctgcctcaggttggaggttttatcagccaaagtgtttttttcatgtatcgttcgttccattcatccactctgtgccttgtcagcctttgaaaggcttggttgctcccaggctgctgttctcagggaccttaaaagggacctggttagtcttggggcagagagtatctacttgggcactctcttccaagaaagaccttgtctccattttcattagacaatgcttcttgtgtgtgttctggaagatcttctaaatggaatgcttgttgcactgttcccaggcgagtggctgccatgagacctgaggaccacacttgggggaccaatcatgtccttcaccactgtgccttagaatcgcccctggacagagttcctgggcagaggggaaagcagctcccaggccttactcaggcctcaggtccatgggttgggcagccagtctgggcccttctcaggatcctcatctccatcctcatcctcttccttcacagcatttacttggagctctttgtgacacaccatgtcagtcatgatgaatcggccaacagccagcccttgccagctgacgtcacagtctaagatgggaaactgtggtacagatagacatgaagagagcttagcagtgattgaggtggtgactaaatatacagtcattgaataaataccatgtagcaagtgtactttgtggagtgttgagtaagtggaaaatggaaagccagttgcatttagagatgataggcctaaagggaactgtcttctgtcgagaagtaaaggaaacttcatgaaggatgtagaagcttagctgcctcagagaagagagaacctgaagatctgaggcaagctggacaggagaggtggatatttgttgatggaagaattcaagtttataatcaattcccacttagcacctactgtgtgctaggaacttgaatgtgtatgtttgacaagtcctgcttggcctgatgggtgggagaaggaacctgagcctggctgagatggctaggcggagggctttgaagtccaagcagctgaactggctgggtgggtttctacctttgaaactgcaagacttgtttggagctcttaattacaatatctgatatttttacagtctgatcttttgacttctacatatagtggaaatctgccaatactaattggtggagatgggaactgtaaaagatcaagtatgctaattttaagcaaatgtaaaaactcataaaacaggtaaacagtggggtgatttcatttgccataattcacataagacgaattttaatctaaaagtactttcttgcttgtattctgtgtggcttttttttgttttttgaggccatatctcactctgtcactcaggctggagtgcggtggtataatctcagctcactgcaatctctgcctaccaggttcaagcgattctcgtgcctcagcctctcgagtagctgggactacaggcgtgagccagcacgcccagctaatttttgtatttttagtagagacaggatttcaccatgttggccaggctggtctcgaactcctgacctcaggtgatccgcctgccttggcctcccagagtgctgggattacaggcgtgagccaccgcacccggcctctgtgtagcttttataggctctgttactgttgcgtagtcttgaagaggtacccatcataatgacagcatctccctctgaagggttttggtcaaaatgggtgaatgagacttatacataaagacaggctttctcccctatagttaggaggtgaactcacacatgtgtacctgaacattcttgcttttgaggagacagactcccagtggtactactatgcttaggtgttggacaggataggggtaggaggagaggaggcaggctgctgtcctgaaagtggctgtggtttatggcatcactcccttctaatcagcaagtccagtggccacttagagcccagctcctacctcttcattcacttaacaagtagttattggctgtgcacagtggctcacgcctataatcccagcattttgggaggctgagtgggatgaccgcttgagcccaggatttcaagtccagcctgggctacatagtgagaccgtgtctctgtttttttaaaagctagttgttgaccagctaccctgagccaggcaccaccctgaaggagcttcttttcctctggggagaagcaaattcatgatgtgtgtgctggagatctggcactcatggccagtgctttccagtatcttgaactcttcgggggtcctgttgacccatttcgtgacctacctccgtgactgctctttttcctctgtctcttaagtgtgatggttttccagagtccaatcctcaggactttcccgtccacacacaggcctggtagtcaggtggctctaaaccattaggtgggttgtagacctctctcaagctgccacctccttgctgtcgccagatcgtatttcagtctgtcaggggttatctgtatctggaggttccactgttgcttcagtctcagttacttagaatggaacccagagtcctgcccctttccacctacatgctcttacttgaaagcacctgagacttattgggtccctgattcctgcttcgtctgtatccgcagagtagttgcatgtcatttggcctgttttctaaataatcccacatcatgtcctccctgcacttacattgccactgctctgatttgggcttttttttttttgggacaatgcctctgtcccaattctgagtaacagctctggttcttgccactaccagagttctctagcaaatctgagcatctgacagggtgaaaaattctgaatggcttcctgatgcctgactttatgggatcaaattcaagttgcacgctggcactcagtgcccttctggtatcatctgccaagaccagggcctgcttcaccacagccacaataaagtcctttcaagccctgataatgccatgttttgtcctaaccttttgctgcagttaattactcttcctattatcttccatgaacttaagactgggcaaaaatgtttccttatctgtgagccactctgaacacaaacaggtcatgaagatagtgttgaaaacaataaatgacaaccaaaagaaaagtgaatattacctagtacaaatagtgtaaattgagacagaaaatgttaaagctagaaagcaagggcaatattctagaatacaaatagtgcttgcctactacaatattaatcccaaatcctttaaatatacccattatagaagatgcttacccagcgtcaagagtataaaagtgggtttgtttgttttcttgagacagggctttgctctgttgcccaggctggagtgcagtggcgtgattgtagctcaatgcagccttgaattcctgtgttcaggcgatcctccggcttcagcctctggagtagctgggactacaggtgcatgctgccacgcccagctaatgttgcagtttttcgtaaagactggatctctgtgttacccaggctggtctcctgggctcaagcagtcctcctgccttgacctcccaaagtgctgggattacaggcatgagccaccatgtcctgaccccagtttgttttaaagccaagcgatgcaccaagatgtttgtgtgcacatctgacagtggtaatctttgggtcagggaattatagataaattttctttaaattttttctgagctttctaaaatcagctgaaaataaaaccttattttttt

SEQ ID NO: 8937 - protein, 222 aa, Homo sapiens
MAATAVAAAVAGTESAQGPPGPAASLELWLNKATDPSMSEQDWSAIQNFCEQVNTDPNGPTHAPWLLAHKIQSPQEKEALYALTVLEMCMNHCGEKFHSEVAKFRFLNELIKVLSPKYLGSWATGKVKGRVIEILFSWTVWFPEDIKIRDAYQMLKKQGIIKQDPKLPVDKILPPPSPWPKSSIFDADEEKSKLFLSASEPGPIHFPSTMNSPNRYSLDISI

SEQ ID NO: 8938 - DNA, 5992 bp, Homo sapiens
gtgtccaccgctcctgccgcgcagtcagcagaggagagcgccaggacgctacagcggctgaagaggcagtggcgcccgcggccgcagcgtcggggctggagcgatggcggcgaccgcggtggcggcggctgtggcgggaaccgagtcggcccagggtcccccgggcccggcagcgtcgctggagctgtggctcaacaaagccacagacccaagcatgtcggaacaggattggtcagctatccagaatttctgtgagcaggtgaacactgaccccaatggccccacacatgcgccctggctactggcccacaagatccagtctccgcaagagaaggaagctctttatgccttaacggtgctggagatgtgcatgaaccactgtggggagaagttccacagcgaggtggccaaatttcgtttcctgaacgaactgatcaaagtgttgtccccaaagtacctggggtcctgggccacaggaaaagttaaaggaagagtcattgaaatactcttcagttggacagtctggtttccggaagacatcaagattcgagacgcttatcagatgctgaagaaacaaggaattataaaacaagaccctaaactaccagtggataaaatcttacccccaccatctccctggcccaagagctccatctttgatgctgatgaagaaaagtccaagcttctgacaaggcttctaaagagcaaccaccccgaggaccttcaggctgcaaaccggttaatcaagaatttggtcaaggaggaacaagaaaaatcggagaaggtgtccaagagggtcagtgcggtggaggaagtgcgaagccatgtgaaggtgctgcaggagatgctgagcatgtaccgcaggccagggcaggccccgcccgaccaggaggccctgcaggtcgtgtatgagaggtgtgaaaagctgcggcccacgctgttccggttggcgagtgacaccactgatgacgatgatgcactcgcggaaattctccaggcaaatgacctcctcacccaaggagttctgctgtacaaacaggtgatggagggccgggtcacctttggaaacagagtgaccagctcattgggagacatccctgtctccagagtctttcagaatccagcaggctgcatgaagacctgccccctgattgacttggaggtggacaatggacctgcgcagatggggactgtggtgccatctttgcttcatcaggacctggcagccttgggaatcagtgatgctcctgttacaggcatggtttctggtcagaattgctgtgaggaaaagaggaatccctcctccagcacgctgccaggcggtggtgttcagaacccttctgcagacaggaatttgctggacctcctctcagcacagccagctccgtgccctctgaattatgtttcgcagaaaagtgtccccaaggaagtgccaccaggtactaagtcctctccaggttggtcctgggaggctggcccgttggctccttccccatcttcacagaatacacctctggctcaagtgtttgtccctttggagtctgttaagcccagcagcctgccgcctctcattgtgtatgaccggaatggattcagaattctgctccacttctcccagacgggagcccctgggcacccagaggtacaggtgctgctcttgaccatgatgagcacggctccccagcctgtctgggatatcatgtttcaagtggctgtgccaaagtcaatgagagtgaagctgcagccggcatccagctccaagcttcctgcattcagtcctttgatgcctccagctgtgatatctcagatgctgctgcttgacaatccacacaaagaacctatccgcttacggtacaagctgacattcaaccaaggtggacagcctttcagcgaagtaggagaagtgaaagacttcccagacctggctgtcttgggcgcagcctaacttttcacaagatggacccttcatttcaagcttaggctggcgttacttttgctgtctagtcaggactaatcacggtgtttcagtgcggagtgccaagagtcctatcctgacgtcaggctctgggtgtcaacctctgacttattctgcagatgctctgtgtgtgtgtgtgtgtgtgtgtgtgtgtgtgtgtgtgtgtgtgtgttcggggagagggtggtagcacagggcttgggatatcggcagtgtgggaaatgcgaagcatttctcatcatcatcatctctgctacagtcatgtttctgcatgtcagcgagcgacactgtccctgcctcaggttggaggttttatcagccaaagtgtttttttcatgtatcgttcgttccattcatccactctgtgccttgtcagcctttgaaaggcttggttgctcccaggctgctgttctcagggaccttaaaagggacctggttagtcttggggcagagagtatctacttgggcactctcttccaagaaagaccttgtctccattttcattagacaatgcttcttgtgtgtgttctggaagatcttctaaatggaatgcttgttgcactgttcccaggcgagtggctgccatgagacctgaggaccacacttgggggaccaatcatgtccttcaccactgtgccttagaatcgcccctggacagagttcctgggcagaggggaaagcagctcccaggccttactcaggcctcaggtccatgggttgggcagccagtctgggcccttctcaggatcctcatctccatcctcatcctcttccttcacagcatttacttggagctctttgtgacacaccatgtcagtcatgatgaatcggccaacagccagcccttgccagctgacgtcacagtctaagatgggaaactgtggtacagatagacatgaagagagcttagcagtgattgaggtggtgactaaatatacagtcattgaataaataccatgtagcaagtgtactttgtggagtgttgagtaagtggaaaatggaaagccagttgcatttagagatgataggcctaaagggaactgtcttctgtcgagaagtaaaggaaacttcatgaaggatgtagaagcttagctgcctcagagaagagagaacctgaagatctgaggcaagctggacaggagaggtggatatttgttgatggaagaattcaagtttataatcaattcccacttagcacctactgtgtgctaggaacttgaatgtgtatgtttgacaagtcctgcttggcctgatgggtgggagaaggaacctgagcctggctgagatggctaggcggagggctttgaagtccaagcagctgaactggctgggtgggtttctacctttgaaactgcaagacttgtttggagctcttaattacaatatctgatatttttacagtctgatcttttgacttctacatatagtggaaatctgccaatactaattggtggagatgggaactgtaaaagatcaagtatgctaattttaagcaaatgtaaaaactcataaaacaggtaaacagtggggtgatttcatttgccataattcacataagacgaattttaatctaaaagtactttcttgcttgtattctgtgtggcttttttttgttttttgaggccatatctcactctgtcactcaggctggagtgcggtggtataatctcagctcactgcaatctctgcctaccaggttcaagcgattctcgtgcctcagcctctcgagtagctgggactacaggcgtgagccagcacgcccagctaatttttgtatttttagtagagacaggatttcaccatgttggccaggctggtctcgaactcctgacctcaggtgatccgcctgccttggcctcccagagtgctgggattacaggcgtgagccaccgcacccggcctctgtgtagcttttataggctctgttactgttgcgtagtcttgaagaggtacccatcataatgacagcatctccctctgaagggttttggtcaaaatgggtgaatgagacttatacataaagacaggctttctcccctatagttaggaggtgaactcacacatgtgtacctgaacattcttgcttttgaggagacagactcccagtggtactactatgcttaggtgttggacaggataggggtaggaggagaggaggcaggctgctgtcctgaaagtggctgtggtttatggcatcactcccttctaatcagcaagtccagtggccacttagagcccagctcctacctcttcattcacttaacaagtagttattggctgtgcacagtggctcacgcctataatcccagcattttgggaggctgagtgggatgaccgcttgagcccaggatttcaagtccagcctgggctacatagtgagaccgtgtctctgtttttttaaaagctagttgttgaccagctaccctgagccaggcaccaccctgaaggagcttcttttcctctggggagaagcaaattcatgatgtgtgtgctggagatctggcactcatggccagtgctttccagtatcttgaactcttcgggggtcctgttgacccatttcgtgacctacctccgtgactgctctttttcctctgtctcttaagtgtgatggttttccagagtccaatcctcaggactttcccgtccacacacaggcctggtagtcaggtggctctaaaccattaggtgggttgtagacctctctcaagctgccacctccttgctgtcgccagatcgtatttcagtctgtcaggggttatctgtatctggaggttccactgttgcttcagtctcagttacttagaatggaacccagagtcctgcccctttccacctacatgctcttacttgaaagcacctgagacttattgggtccctgattcctgcttcgtctgtatccgcagagtagttgcatgtcatttggcctgttttctaaataatcccacatcatgtcctccctgcacttacattgccactgctctgatttgggcttttttttttttgggacaatgcctctgtcccaattctgagtaacagctctggttcttgccactaccagagttctctagcaaatctgagcatctgacagggtgaaaaattctgaatggcttcctgatgcctgactttatgggatcaaattcaagttgcacgctggcactcagtgcccttctggtatcatctgccaagaccagggcctgcttcaccacagccacaataaagtcctttcaagccctgataatgccatgttttgtcctaaccttttgctgcagttaattactcttcctattatcttccatgaacttaagactgggcaaaaatgtttccttatctgtgagccactctgaacacaaacaggtcatgaagatagtgttgaaaacaataaatgacaaccaaaagaaaagtgaatattacctagtacaaatagtgtaaattgagacagaaaatgttaaagctagaaagcaagggcaatattctagaatacaaatagtgcttgcctactacaatattaatcccaaatcctttaaatatacccattatagaagatgcttacccagcgtcaagagtataaaagtgggtttgtttgttttcttgagacagggctttgctctgttgcccaggctggagtgcagtggcgtgattgtagctcaatgcagccttgaattcctgtgttcaggcgatcctccggcttcagcctctggagtagctgggactacaggtgcatgctgccacgcccagctaatgttgcagtttttcgtaaagactggatctctgtgttacccaggctggtctcctgggctcaagcagtcctcctgccttgacctcccaaagtgctgggattacaggcatgagccaccatgtcctgaccccagtttgttttaaagccaagcgatgcaccaagatgtttgtgtgcacatctgacagtggtaatctttgggtcagggaattatagataaattttctttaaattttttctgagctttctaaaatcagctgaaaataaaaccttattttttt

SEQ ID NO: 8939 - protein, 613 aa, Homo sapiens; identical to SEQ ID NO: 1340

SEQ ID NO: 8940 - DNA, 2562 bp, Homo sapiens
tctagtcaggactaatcacggtgtttcagtgcggagtgccaagagtcctatcctgacgtcaggctctgggtgtcaacctctgacttattctgcagatgctctgtcatttacttggagctctttgtgacacaccatgtcagtcatgatgaatcggccaacagccagcccttgccagctgacgtcacagtctaagatgggaaactgtggtacagatagacatgaagagagcttagcagtgattgaggtggtgactaaatatacagtcattgaataaataccatgtagcaagtgtactttgtggagtgttgagtaagtggaaaatggaaagccagttgcatttagagatgataggcctaaagggaactgtcttctgtcgagaagtaaaggaaacttcatgaaggatgtagaagcttagctgcctcagagaagagagaacctgaagatctgaggcaagctggacaggagaggtggatatttgttgatggaagaattcaagtttataatcaattcccacttagcacctactgtgtgctaggaacttgaatgtgtatgtttgacaagtcctgcttggcctgatgggtgggagaaggaacctgagcctggctgagatggctaggcggagggctttgaagtccaagcagctgaactggctgggtgggtttctacctttgaaactgcaagacttgtttggagctcttaattacaatatctgatatttttacagtctgatcttttgacttctacatatagtggaaatctgccaatactaattggtggagatgggaactgtaaaagatcaagtatgctaattttaagcaaatgtaaaaactcataaaacaggtaaacagtggggtgatttcatttgccataattcacataagacgaattttaatctaaaagtactttcttgcttgtattctgtgtggcttttttttgttttttgaggccatatctcactctgtcactcaggctggagtgcggtggtataatctcagctcactgcaatctctgcctaccaggttcaagcgattctcgtgcctcagcctctcgagtagctgggactacaggcgtgagccagcacgcccagctaatttttgtatttttagtagagacaggatttcaccatgttggccaggctggtctcgaactcctgacctcaggtgatccgcctgccttggcctcccagagtgctgggattacaggcgtgagccaccgcacccggcctctgtgtagcttttataggctctgttactgttgcgtagtcttgaagaggtacccatcataatgacagcatctccctctgaagggttttggtcaaaatgggtgaatgagacttatacataaagacaggctttctcccctatagttaggaggtgaactcacacatgtgtacctgaacattcttgcttttgaggagacagactcccagtggtactactatgcttaggtgttggacaggataggggtaggaggagaggaggcaggctgctgtcctgaaagtggctgtggtttatggcatcactcccttctaatcagcaagtccagtggccacttagagcccagctcctacctcttcattcacttaacaagtagttattggctgtgcacagtggctcacgcctataatcccagcattttgggaggctgagtgggatgaccgcttgagcccaggatttcaagtccagcctgggctacatagtgagaccgtgtctctgtttttttaaaagctagttgttgaccagctaccctgagccaggcaccaccctgaaggagcttcttttcctctggggagaagcaaattcatgatgtgtgtgctggagatctggcactcatggccagtgctttccagtatcttgaactcttcgggggtcctgttgacccatttcgtgacctacctccgtgactgctctttttcctctgtctcttaagtgtgatggttttccagagtccaatcctcaggactttcccgtccacacacaggcctggtagtcaggtggctctaaaccattaggtgggttgtagacctctctcaagctgccacctccttgctgtcgccagatcgtatttcagtctgtcaggggttatctgtatctggaggttccactgttgcttcagtctcagttacttagaatggaacccagagtcctgcccctttccacctacatgctcttacttgaaagcacctgagacttattgggtccctgattcctgcttcgtctgtatccgcagagtagttgcatgtcatttggcctgttttctaaataatcccacatcatgtcctccctgcacttacattgccactgctctgatttgggcttttttttttttgggacaatgcctctgtcccaattctgagtaacagctctggttcttgccactaccagagttctctagcaaatctgagcatctgacagggtgaaaaattctgaatggcttcctgatgcctgactttatgggatcaaattcaagttgcacgctggcactcagtgcccttctggtatcatctgccaagaccagggcctgcttcaccacagccacaataaagtcctttcaagccctgat

SEQ ID NO: 8941 - protein, 46 aa, Homo sapiens
MSVMMNRPTASPCQLTSQSKMGNCGTDRHEESLAVIEVVTKYTVIE

SEQ ID NO: 8942 - DNA, 3222 bp, Homo sapiens
gaacctatccgcttacggtacaagctgacattcaaccaaggtggacagcctttcagcgaagtaggagaagtgaaagacttcccagacctggctgtcttgggcgcagcctaacttttcacaagatggacccttcatttcaagcttaggctggcgttacttttgctgtctagtcaggactaatcacggtgtttcagtgcggagtgccaagagtcctatcctgacgtcaggctctgggtgtcaacctctgacttattctgcagatgctctgtgtgtgtgtgtgtgtgtgtgtgtgtgtgtgtgtgtgtgtgtgtgttcggggagagggtggtagcacagggcttgggatatcggcagtgtgggaaatgcgaagcatttctcatcatcatcatctctgctacagtcatgtttctgcatgtcagcgagcgacactgtccctgcctcaggttggaggttttatcagccaaagtgtttttttcatgtatcgttcgttccattcatccactctgtgccttgtcagcctttgaaaggcttggttgctcccaggctgctgttctcagggaccttaaaagggacctggttagtcttggggcagagagtatctacttgggcactctcttccaagaaagaccttgtctccattttcattagacaatgcttcttgtgtgtgttctggaagatcttctaaatggaatgcttgttgcactgttcccagtctgggcccttctcaggatcctcatctccatcctcatcctcttccttcacagcatttacttggagctctttgtgacacaccatgtcagtcatgatgaatcggccaacagccagcccttgccagctgacgtcacagtctaagatgggaaactgtggtacagatagacatgaagagagcttagcagtgattgaggtggtgactaaatatacagtcattgaataaataccatgtagcaagtgtactttgtggagtgttgagtaagtggaaaatggaaagccagttgcatttagagatgataggcctaaagggaactgtcttctgtcgagaagtaaaggaaacttcatgaaggatgtagaagcttagctgcctcagagaagagagaacctgaagatctgaggcaagctggacaggagaggtggatatttgttgatggaagaattcaagtttataatcaattcccacttagcacctactgtgtgctaggaacttgaatgtgtatgtttgacaagtcctgcttggcctgatgggtgggagaaggaacctgagcctggctgagatggctaggcggagggctttgaagtccaagcagctgaactggctgggtgggtttctacctttgaaactgcaagacttgtttggagctcttaattacaatatctgatatttttacagtctgatcttttgacttctacatatagtggaaatctgccaatactaattggtggagatgggaactgtaaaagatcaagtatgctaattttaagcaaatgtaaaaactcataaaacaggtaaacagtggggtgatttcatttgccataattcacataagacgaattttaatctaaaagtactttcttgcttgtattctgtgtggcttttttttgttttttgaggccatatctcactctgtcactcaggctggagtgcggtggtataatctcagctcactgcaatctctgcctaccaggttcaagcgattctcgtgcctcagcctctcgagtagctgggactacaggcgtgagccagcacgcccagctaatttttgtatttttagtagagacaggatttcaccatgttggccaggctggtctcgaactcctgacctcaggtgatccgcctgccttggcctcccagagtgctgggattacaggcgtgagccaccgcacccggcctctgtgtagcttttataggctctgttactgttgcgtagtcttgaagaggtacccatcataatgacagcatctccctctgaagggttttggtcaaaatgggtgaatgagacttatacataaagacaggctttctcccctatagttaggaggtgaactcacacatgtgtacctgaacattcttgcttttgaggagacagactcccagtggtactactatgcttaggtgttggacaggataggggtaggaggagaggaggcaggctgctgtcctgaaagtggctgtggtttatggcatcactcccttctaatcagcaagtccagtggccacttagagcccagctcctacctcttcattcacttaacaagtagttattggctgtgcacagtggctcacgcctataatcccagcattttgggaggctgagtgggatgaccgcttgagcccaggatttcaagtccagcctgggctacatagtgagaccgtgtctctgtttttttaaaagctagttgttgaccagctaccctgagccaggcaccaccctgaaggagcttcttttcctctggggagaagcaaattcatgatgtgtgtgctggagatctggcactcatggccagtgctttccagtatcttgaactcttcgggggtcctgttgacccatttcgtgacctacctccgtgactgctctttttcctctgtctcttaagtgtgatggttttccagagtccaatcctcaggactttcccgtccacacacaggcctggtagtcaggtggctctaaaccattaggtgggttgtagacctctctcaagctgccacctccttgctgtcgccagatcgtatttcagtctgtcaggggttatctgtatctggaggttccactgttgcttcagtctcagttacttagaatggaacccagagtcctgcccctttccacctacatgctcttacttgaaagcacctgagacttattgggtccctgattcctgcttcgtctgtatccgcagagtagttgcatgtcatttggcctgttttctaaataatcccacatcatgtcctccctgcacttacattgccactgctctgatttgggcttttttttttttgggacaatgcctctgtcccaattctgagtaacagctctggttcttgccactaccagagttctctagcaaatctgagcatctgacagggtgaaaaattctgaatggcttcctgatgcctgactttatgggatcaaattcaagttgcacgctggcactcagtgcccttctggtatcatctgccaagaccagggcctgcttcaccacagccacaataaagtcctttcaagccctgat

SEQ ID NO: 8943 - protein, 66 aa, Homo sapiens; identical to SEQ ID NO: 8933

SEQ ID NO: 8944 - DNA, 4660 bp, Homo sapiens
gcagcctgccgcctctcattgtgtatgaccggaatggattcagaattctgctccacttctcccagacgggagcccctgggcacccagaggtacaggtgctgctcttgaccatgatgagcacggctccccagcctgtctgggatatcatgtttcaagtggctgtgccaaaggtgagtcatctgttggggatttctcagtaatggctgtcgtttttgagtgccaggttcttttctgggacttacctgtcgagtgtcaaggaaagaatcttcactcaaactaactgaagataaagtgggaatgtaatggcttacctgactggggattcctgaatatctgacttcagatatgagtgaatccaaataggttcttaaacaatgccttaagaatctgtatctcttgactctgcttttctttggcaccattctgacagtttctccacaaacaggaaagtggctacccacagctccagggttgcatggtccttaaccctctttatctcagaaactctcaccgggcatgaagcacatatattgattacccaggaaagggctctgattgggcttgttggtgttacttccataccttggaccaggaacttgtatcctgggatatgagacacttggccaatgtgagataacatccatcccttttcaagggaagtggggccctactgattaacaggcaccccacagtcacaggggaaggggcctgtcctgaaaggaaaagattcgagacagacaaaaatatgacctgcagtctctacttcttacggtagtcctatgggcaatgttctgctactacctctgttttataagttaacccaaggctcagaaattaaatattttactcaaggtcacagagctagtgagaagcagttagaattcaacccaagatgtgccctggctgttgatgctgcgtctcagatgccggttattgaccacacaactcccgatccattctgtgtgtggaaggaaaggcctcttagatccttttatcaattagtgggagtctgtctgcttgggctcccataggtgcctcggggtaccacgtttaagagggccatttcctcttggaggggtgttggggaggtccagctccccctcacctgatctccatcctagaagctgtggttaggaatgagttacatgttggttttcttcccctgatagtcaatgagagtgaagctgcagccggcatccagctccaagcttcctgcattcagtcctttgatgcctccagctgtgatatctcagatgctgctgcttgacaatccacacaaagaacctatccgcttacggtacaagctgacattcaaccaaggtggacagcctttcagcgaagtaggagaagtgaaagacttcccagacctggctgtcttgggcgcagcctaacttttcacaagatggacccttcatttcaagcttaggctggcgttacttttgctgtctagtcaggactaatcacggtgtttcagtgcggagtgccaagagtcctatcctgacgtcaggctctgggtgtcaacctctgacttattctgcagatgctctgtgtgtgtgtgtgtgtgtgtgtgtgtgtgtgtgtgtgtgtgtgtgttcggggagagggtggtagcacagggcttgggatatcggcagtgtgggaaatgcgaagcatttctcatcatcatcatctctgctacagtcatgtttctgcatgtcagcgagcgacactgtccctgcctcaggttggaggttttatcagccaaagtgtttttttcatgtatcgttcgttccattcatccactctgtgccttgtcagcctttgaaaggcttggttgctcccaggctgctgttctcagggaccttaaaagggacctggttagtcttggggcagagagtatctacttgggcactctcttccaagaaagaccttgtctccattttcattagacaatgcttcttgtgtgtgttctggaagatcttctaaatggaatgcttgttgcactgttcccaggcgagtggctgccatgagacctgaggaccacacttgggggaccaatcatgtccttcaccactgtgccttagaatcgcccctggacagagttcctgggcagaggggaaagcagctcccaggccttactcaggcctcaggtccatgggttgggcagccagtctgggcccttctcaggatcctcatctccatcctcatcctcttccttcacagcatttacttggagctctttgtgacacaccatgtcagtcatgatgaatcggccaacagccagcccttgccagctgacgtcacagtctaagatgggaaactgtggtacagatagacatgaagagagcttagcagtgattgaggtggtgactaaatatacagtcattgaataaataccatgtagcaagtgtactttgtggagtgttgagtaagtggaaaatggaaagccagttgcatttagagatgataggcctaaagggaactgtcttctgtcgagaagtaaaggaaacttcatgaaggatgtagaagcttagctgcctcagagaagagagaacctgaagatctgaggcaagctggacaggagaggtggatatttgttgatggaagaattcaagtttataatcaattcccacttagcacctactgtgtgctaggaacttgaatgtgtatgtttgacaagtcctgcttggcctgatgggtgggagaaggaacctgagcctggctgagatggctaggcggagggctttgaagtccaagcagctgaactggctgggtgggtttctacctttgaaactgcaagacttgtttggagctcttaattacaatatctgatatttttacagtctgatcttttgacttctacatatagtggaaatctgccaatactaattggtggagatgggaactgtaaaagatcaagtatgctaattttaagcaaatgtaaaaactcataaaacaggtaaacagtggggtgatttcatttgccataattcacataagacgaattttaatctaaaagtactttcttgcttgtattctgtgtggcttttttttgttttttgaggccatatctcactctgtcactcaggctggagtgcggtggtataatctcagctcactgcaatctctgcctaccaggttcaagcgattctcgtgcctcagcctctcgagtagctgggactacaggcgtgagccagcacgcccagctaatttttgtatttttagtagagacaggatttcaccatgttggccaggctggtctcgaactcctgacctcaggtgatccgcctgccttggcctcccagagtgctgggattacaggcgtgagccaccgcacccggcctctgtgtagcttttataggctctgttactgttgcgtagtcttgaagaggtacccatcataatgacagcatctccctctgaagggttttggtcaaaatgggtgaatgagacttatacataaagacaggctttctcccctatagttaggaggtgaactcacacatgtgtacctgaacattcttgcttttgaggagacagactcccagtggtactactatgcttaggtgttggacaggataggggtaggaggagaggaggcaggctgctgtcctgaaagtggctgtggtttatggcatcactcccttctaatcagcaagtccagtggccacttagagcccagctcctacctcttcattcacttaacaagtagttattggctgtgcacagtggctcacgcctataatcccagcattttgggaggctgagtgggatgaccgcttgagcccaggatttcaagtccagcctgggctacatagtgagaccgtgtctctgtttttttaaaagctagttgttgaccagctaccctgagccaggcaccaccctgaaggagcttcttttcctctggggagaagcaaattcatgatgtgtgtgctggagatctggcactcatggccagtgctttccagtatcttgaactcttcgggggtcctgttgacccatttcgtgacctacctccgtgactgctctttttcctctgtctcttaagtgtgatggttttccagagtccaatcctcaggactttcccgtccacacacaggcctggtagtcaggtggctctaaaccattaggtgggttgtagacctctctcaagctgccacctccttgctgtcgccagatcgtatttcagtctgtcaggggttatctgtatctggaggttccactgttgcttcagtctcagttacttagaatggaacccagagtcctgcccctttccacctacatgctcttacttgaaagcacctgagacttattgggtccctgattcctgcttcgtctgtatccgcagagtagttgcatgtcatttggcctgttttctaaataatcccacatcatgtcctccctgcacttacattgccactgctctgatttgggcttttttttttttgggacaatgcctctgtcccaattctgagtaacagctctggttcttgccactaccagagttctctagcaaatctgagcatctgacagggtgaaaaattctgaatggcttcctgatgcctgactttatgggatcaaattcaagttgcacgctggcactcagtgcccttctggtatcatctgccaagaccagggcctgcttcaccacagccacaataaagtcctttcaagccctgat

SEQ ID NO: 8945 - protein, 72 aa, Homo sapiens; identical to SEQ ID NO: 8935

SEQ ID NO: 8946 - DNA, 1805 bp, Homo sapiens
gtgtccaccgctcctgccgcgcagtcagcagaggagagcgccaggacgctacagcggctgaagaggcagtggcgcccgcggccgcagcgtcggggctggagcgatggcggcgaccgcggtggcggcggctgtggcgggaaccgagtcggcccagggtcccccgggcccggcagcgtcgctggagctgtggctcaacaaagccacagacccaagcatgtcggaacaggattggtcagctatccagaatttctgtgagcaggtgaacactgaccccaatggccccacacatgcgccctggctactggcccacaagatccagtctccgcaagagaaggaagctctttatgccttaacggtgctggagatgtgcatgaaccactgtggggagaagttccacagcgaggtggccaaatttcgtttcctgaacgaactgatcaaagtgttgtccccaaagtacctggggtcctgggccacaggaaaagttaaaggaagagtcattgaaatactcttcagttggacagtctggtttccggaagacatcaagattcgagacgcttatcagatgctgaagaaacaaggaattataaaacaagaccctaaactaccagtggataaaatcttacccccaccatctccctggcccaagagctccatctttgatgctgatgaagaaaagtccaagcttctgacaaggcttctaaagagcaaccaccccgaggaccttcaggctgctgtcctgaaagtggctgtggtttatggcatcactcccttctaatcagcaagtccagtggccacttagagcccagctcctacctcttcattcacttaacaagtagttattggctgtgcacagtggctcacgcctataatcccagcattttgggaggctgagtgggatgaccgcttgagcccaggatttcaagtccagcctgggctacatagtgagaccgtgtctctgtttttttaaaagctagttgttgaccagctaccctgagccaggcaccaccctgaaggagcttcttttcctctggggagaagcaaattcatgatgtgtgtgctggagatctggcactcatggccagtgctttccagtatcttgaactcttcgggggtcctgttgacccatttcgtgacctacctccgtgactgctctttttcctctgtctcttaagtgtgatggttttccagagtccaatcctcaggactttcccgtccacacacaggcctggtagtcaggtggctctaaaccattaggtgggttgtagacctctctcaagctgccacctccttgctgtcgccagatcgtatttcagtctgtcaggggttatctgtatctggaggttccactgttgcttcagtctcagttacttagaatggaacccagagtcctgcccctttccacctacatgctcttacttgaaagcacctgagacttattgggtccctgattcctgcttcgtctgtatccgcagagtagttgcatgtcatttggcctgttttctaaataatcccacatcatgtcctccctgcacttacattgccactgctctgatttgggcttttttttttttgggacaatgcctctgtcccaattctgagtaacagctctggttcttgccactaccagagttctctagcaaatctgagcatctgacagggtgaaaaattctgaatggcttcctgatgcctgactttatgggatcaaattcaagttgcacgctggcactcagtgcccttctggtatcatctgccaagaccagggcctgcttcaccacagccacaataaagtcctttcaagccctgat

SEQ ID NO: 8947 - protein, 223 aa, Homo sapiens
MAATAVAAAVAGTESAQGPPGPAASLELWLNKATDPSMSEQDWSAIQNFCEQVNTDPNGPTHAPWLLAHKIQSPQEKEALYALTVLEMCMNHCGEKFHSEVAKFRFLNELIKVLSPKYLGSWATGKVKGRVIEILFSWTVWFPEDIKIRDAYQMLKKQGIIKQDPKLPVDKILPPPSPWPKSSIFDADEEKSKLLTRLLKSNHPEDLQAAVLKVAVVYGITPF

SEQ ID NO: 8948 - DNA, 5128 bp, Homo sapiens
gtgtccaccgctcctgccgcgcagtcagcagaggagagcgccaggacgctacagcggctgaagaggcagtggcgcccgcggccgcagcgtcggggctggagcgatggcggcgaccgcggtggcggcggctgtggcgggaaccgagtcggcccagggtcccccgggcccggcagcgtcgctggagctgtggctcaacaaagccacagacccaagcatgtcggaacaggattggtcagctatccagaatttctgtgagcaggtgaacactgaccccaatggccccacacatgcgccctggctactggcccacaagatccagtctccgcaagagaaggaagctctttatgccttaacggtgctggagatgtgcatgaaccactgtggggagaagttccacagcgaggtggccaaatttcgtttcctgaacgaactgatcaaagtgttgtccccaaagtacctggggtcctgggccacaggaaaagttaaaggaagagtcattgaaatactcttcagttggacagtctggtttccggaagacatcaagattcgagacgcttatcagatgctgaagaaacaaggaattataaaacaagaccctaaactaccagtggataaaatcttacccccaccatctccctggcccaagagctccatctttgatgctgatgaagaaaagtccaagctctttctcagtgccagtgagcccggccctatccattttccatccaccatgaactccccaaaccgttattccttggacatcagtatctagagggacaagaagaagaaggtggccaagacccagggataactgtggtgcctcttctgacaaggcttctaaagagcaaccaccccgaggaccttcaggctgcaaaccggttaatcaagaatttggtcaaggaggaacaagaaaaatcggagaaggtgtccaagagggtcagtgcggtggaggaagtgcgaagccatgtgaaggtgctgcaggagatgctgagcatgtaccgcaggccagggcaggccccgcccgaccaggaggccctgcaggtcgtgtatgagaggtgtgaaaagctgcggcccacgctgttccggttggcgagtgacaccactgatgacgatgatgcactcgcggaaattctccaggcaaatgacctcctcacccaaggagttctgctgtacaaacaggtgatggagggccgggtcacctttggaaacagagtgaccagctcattgggagacatccctgtctccagagtctttcagaatccagcaggctgcatgaagacctgccccctgattgacttggaggtggacaatggacctgcgcagatggggactgtggtgccatctttgcttcatcaggacctggcagccttgggaatcagtgatgctcctgttacaggcatggtttctggtcagaattgctgtgaggaaaagaggaatccctcctccagcacgctgccaggcggtggtgttcagaacccttctgcagacaggaatttgctggacctcctctcagcacagccagctccgtgccctctgaattatgtttcgcagaaaagtgtccccaaggaagtgccaccaggtactaagtcctctccaggttggtctgggatatcatgtttcaagtggctgtgccaaagtcaatgagagtgaagctgcagccggcatccagctccaagcttcctgcattcagtcctttgatgcctccagctgtgatatctcagatgctgctgcttgacaatccacacaaagaacctatccgcttacggtacaagctgacattcaaccaaggtggacagcctttcagcgaagtaggagaagtgaaagacttcccagacctggctgtcttgggcgcagcctaacttttcacaagatggacccttcatttcaagcttaggctggcgttacttttgctgtctagtcaggactaatcacggtgtttcagtgcggagtgccaagagtcctatcctgacgtcaggctctgggtgtcaacctctgacttattctgcagatgctctgtgtgtgtgtgtgtgtgtgtgtgtgtgtgtgtgtgtgtgtgtgtgttcggggagagggtggtagcacagggcttgggatatcggcagtgtgggaaatgcgaagcatttctcatcatcatcatctctgctacagtcatgtttctgcatgtcagcgagcgacactgtccctgcctcaggttggaggttttatcagccaaagtgtttttttcatgtatcgttcgttccattcatccactctgtgccttgtcagcctttgaaaggcttggttgctcccaggctgctgttctcagggaccttaaaagggacctggttagtcttggggcagagagtatctacttgggcactctcttccaagaaagaccttgtctccattttcattagacaatgcttcttgtgtgtgttctggaagatcttctaaatggaatgcttgttgcactgttcccaggcgagtggctgccatgagacctgaggaccacacttgggggaccaatcatgtccttcaccactgtgccttagaatcgcccctggacagagttcctgggcagaggggaaagcagctcccaggccttactcaggcctcaggtccatgggttgggcagccagtctgggcccttctcaggatcctcatctccatcctcatcctcttccttcacagcatttacttggagctctttgtgacacaccatgtcagtcatgatgaatcggccaacagccagcccttgccagctgacgtcacagtctaagatgggaaactgtggtacagatagacatgaagagagcttagcagtgattgaggtggtgactaaatatacagtcattgaataaataccatgtagcaagtgtactttgtggagtgttgagtaagtggaaaatggaaagccagttgcatttagagatgataggcctaaagggaactgtcttctgtcgagaagtaaaggaaacttcatgaaggatgtagaagcttagctgcctcagagaagagagaacctgaagatctgaggcaagctggacaggagaggtggatatttgttgatggaagaattcaagtttataatcaattcccacttagcacctactgtgtgctaggaacttgaatgtgtatgtttgacaagtcctgcttggcctgatgggtgggagaaggaacctgagcctggctgagatggctaggcggagggctttgaagtccaagcagctgaactggctgggtgggtttctacctttgaaactgcaagacttgtttggagctcttaattacaatatctgatatttttacagtctgatcttttgacttctacatatagtggaaatctgccaatactaattggtggagatgggaactgtaaaagatcaagtatgctaattttaagcaaatgtaaaaactcataaaacaggtaaacagtggggtgatttcatttgccataattcacataagacgaattttaatctaaaagtactttcttgcttgtattctgtgtggcttttttttgttttttgaggccatatctcactctgtcactcaggctggagtgcggtggtataatctcagctcactgcaatctctgcctaccaggttcaagcgattctcgtgcctcagcctctcgagtagctgggactacaggcgtgagccagcacgcccagctaatttttgtatttttagtagagacaggatttcaccatgttggccaggctggtctcgaactcctgacctcaggtgatccgcctgccttggcctcccagagtgctgggattacaggcgtgagccaccgcacccggcctctgtgtagcttttataggctctgttactgttgcgtagtcttgaagaggtacccatcataatgacagcatctccctctgaagggttttggtcaaaatgggtgaatgagacttatacataaagacaggctttctcccctatagttaggaggtgaactcacacatgtgtacctgaacattcttgcttttgaggagacagactcccagtggtactactatgcttaggtgttggacaggataggggtaggaggagaggaggcaggctgctgtcctgaaagtggctgtggtttatggcatcactcccttctaatcagcaagtccagtggccacttagagcccagctcctacctcttcattcacttaacaagtagttattggctgtgcacagtggctcacgcctataatcccagcattttgggaggctgagtgggatgaccgcttgagcccaggatttcaagtccagcctgggctacatagtgagaccgtgtctctgtttttttaaaagctagttgttgaccagctaccctgagccaggcaccaccctgaaggagcttcttttcctctggggagaagcaaattcatgatgtgtgtgctggagatctggcactcatggccagtgctttccagtatcttgaactcttcgggggtcctgttgacccatttcgtgacctacctccgtgactgctctttttcctctgtctcttaagtgtgatggttttccagagtccaatcctcaggactttcccgtccacacacaggcctggtagtcaggtggctctaaaccattaggtgggttgtagacctctctcaagctgccacctccttgctgtcgccagatcgtatttcagtctgtcaggggttatctgtatctggaggttccactgttgcttcagtctcagttacttagaatggaacccagagtcctgcccctttccacctacatgctcttacttgaaagcacctgagacttattgggtccctgattcctgcttcgtctgtatccgcagagtagttgcatgtcatttggcctgttttctaaataatcccacatcatgtcctccctgcacttacattgccactgctctgatttgggcttttttttttttgggacaatgcctctgtcccaattctgagtaacagctctggttcttgccactaccagagttctctagcaaatctgagcatctgacagggtgaaaaattctgaatggcttcctgatgcctgactttatgggatcaaattcaagttgcacgctggcactcagtgcccttctggtatcatctgccaagaccagggcctgcttcaccacagccacaataaagtcctttcaagccctgat

SEQ ID NO: 8949 - protein, 222 aa, Homo sapiens; identical to SEQ ID NO: 8937

SEQ ID NO: 8950 - DNA, 5214 bp, Homo sapiens
gtgtccaccgctcctgccgcgcagtcagcagaggagagcgccaggacgctacagcggctgaagaggcagtggcgcccgcggccgcagcgtcggggctggagcgatggcggcgaccgcggtggcggcggctgtggcgggaaccgagtcggcccagggtcccccgggcccggcagcgtcgctggagctgtggctcaacaaagccacagacccaagcatgtcggaacaggattggtcagctatccagaatttctgtgagcaggtgaacactgaccccaatggccccacacatgcgccctggctactggcccacaagatccagtctccgcaagagaaggaagctctttatgccttaacggtgctggagatgtgcatgaaccactgtggggagaagttccacagcgaggtggccaaatttcgtttcctgaacgaactgatcaaagtgttgtccccaaagtacctggggtcctgggccacaggaaaagttaaaggaagagtcattgaaatactcttcagttggacagtctggtttccggaagacatcaagattcgagacgcttatcagatgctgaagaaacaaggaattataaaacaagaccctaaactaccagtggataaaatcttacccccaccatctccctggcccaagagctccatctttgatgctgatgaagaaaagtccaagcttctgacaaggcttctaaagagcaaccaccccgaggaccttcaggctgcaaaccggttaatcaagaatttggtcaaggaggaacaagaaaaatcggagaaggtgtccaagagggtcagtgcggtggaggaagtgcgaagccatgtgaaggtgctgcaggagatgctgagcatgtaccgcaggccagggcaggccccgcccgaccaggaggccctgcaggtcgtgtatgagaggtgtgaaaagctgcggcccacgctgttccggttggcgagtgacaccactgatgacgatgatgcactcgcggaaattctccaggcaaatgacctcctcacccaaggagttctgctgtacaaacaggtgatggagggccgggtcacctttggaaacagagtgaccagctcattgggagacatccctgtctccagagtctttcagaatccagcaggctgcatgaagacctgccccctgattgacttggaggtggacaatggacctgcgcagatggggactgtggtgccatctttgcttcatcaggacctggcagccttgggaatcagtgatgctcctgttacaggcatggtttctggtcagaattgctgtgaggaaaagaggaatccctcctccagcacgctgccaggcggtggtgttcagaacccttctgcagacaggaatttgctggacctcctctcagcacagccagctccgtgccctctgaattatgtttcgcagaaaagtgtccccaaggaagtgccaccaggtactaagtcctctccaggttggtcctgggaggctggcccgttggctccttccccatcttcacagaatacacctctggctcaagtgtttgtccctttggagtctgttaagcccagcagcctgccgcctctcattgtgtatgaccggaatggattcagaattctgctccacttctcccagacgggagcccctgggcacccagaggtacaggtgctgctcttgaccatgatgagcacggctccccagcctgtctgggatatcatgtttcaagtggctgtgccaaagtcaatgagagtgaagctgcagccggcatccagctccaagcttcctgcattcagtcctttgatgcctccagctgtgatatctcagatgctgctgcttgacaatccacacaaagaacctatccgcttacggtacaagctgacattcaaccaaggtggacagcctttcagcgaagtaggagaagtgaaagacttcccagacctggctgtcttgggcgcagcctaacttttcacaagatggacccttcatttcaagcttaggctggcgttacttttgctgtctagtcaggactaatcacggtgtttcagtgcggagtgccaagagtcctatcctgacgtcaggctctgggtgtcaacctctgacttattctgcagatgctctgtgtgtgtgtgtgtgtgtgtgtgtgtgtgtgtgtgtgtgtgtgtgttcggggagagggtggtagcacagggcttgggatatcggcagtgtgggaaatgcgaagcatttctcatcatcatcatctctgctacagtcatgtttctgcatgtcagcgagcgacactgtccctgcctcaggttggaggttttatcagccaaagtgtttttttcatgtatcgttcgttccattcatccactctgtgccttgtcagcctttgaaaggcttggttgctcccaggctgctgttctcagggaccttaaaagggacctggttagtcttggggcagagagtatctacttgggcactctcttccaagaaagaccttgtctccattttcattagacaatgcttcttgtgtgtgttctggaagatcttctaaatggaatgcttgttgcactgttcccaggcgagtggctgccatgagacctgaggaccacacttgggggaccaatcatgtccttcaccactgtgccttagaatcgcccctggacagagttcctgggcagaggggaaagcagctcccaggccttactcaggcctcaggtccatgggttgggcagccagtctgggcccttctcaggatcctcatctccatcctcatcctcttccttcacagcatttacttggagctctttgtgacacaccatgtcagtcatgatgaatcggccaacagccagcccttgccagctgacgtcacagtctaagatgggaaactgtggtacagatagacatgaagagagcttagcagtgattgaggtggtgactaaatatacagtcattgaataaataccatgtagcaagtgtactttgtggagtgttgagtaagtggaaaatggaaagccagttgcatttagagatgataggcctaaagggaactgtcttctgtcgagaagtaaaggaaacttcatgaaggatgtagaagcttagctgcctcagagaagagagaacctgaagatctgaggcaagctggacaggagaggtggatatttgttgatggaagaattcaagtttataatcaattcccacttagcacctactgtgtgctaggaacttgaatgtgtatgtttgacaagtcctgcttggcctgatgggtgggagaaggaacctgagcctggctgagatggctaggcggagggctttgaagtccaagcagctgaactggctgggtgggtttctacctttgaaactgcaagacttgtttggagctcttaattacaatatctgatatttttacagtctgatcttttgacttctacatatagtggaaatctgccaatactaattggtggagatgggaactgtaaaagatcaagtatgctaattttaagcaaatgtaaaaactcataaaacaggtaaacagtggggtgatttcatttgccataattcacataagacgaattttaatctaaaagtactttcttgcttgtattctgtgtggcttttttttgttttttgaggccatatctcactctgtcactcaggctggagtgcggtggtataatctcagctcactgcaatctctgcctaccaggttcaagcgattctcgtgcctcagcctctcgagtagctgggactacaggcgtgagccagcacgcccagctaatttttgtatttttagtagagacaggatttcaccatgttggccaggctggtctcgaactcctgacctcaggtgatccgcctgccttggcctcccagagtgctgggattacaggcgtgagccaccgcacccggcctctgtgtagcttttataggctctgttactgttgcgtagtcttgaagaggtacccatcataatgacagcatctccctctgaagggttttggtcaaaatgggtgaatgagacttatacataaagacaggctttctcccctatagttaggaggtgaactcacacatgtgtacctgaacattcttgcttttgaggagacagactcccagtggtactactatgcttaggtgttggacaggataggggtaggaggagaggaggcaggctgctgtcctgaaagtggctgtggtttatggcatcactcccttctaatcagcaagtccagtggccacttagagcccagctcctacctcttcattcacttaacaagtagttattggctgtgcacagtggctcacgcctataatcccagcattttgggaggctgagtgggatgaccgcttgagcccaggatttcaagtccagcctgggctacatagtgagaccgtgtctctgtttttttaaaagctagttgttgaccagctaccctgagccaggcaccaccctgaaggagcttcttttcctctggggagaagcaaattcatgatgtgtgtgctggagatctggcactcatggccagtgctttccagtatcttgaactcttcgggggtcctgttgacccatttcgtgacctacctccgtgactgctctttttcctctgtctcttaagtgtgatggttttccagagtccaatcctcaggactttcccgtccacacacaggcctggtagtcaggtggctctaaaccattaggtgggttgtagacctctctcaagctgccacctccttgctgtcgccagatcgtatttcagtctgtcaggggttatctgtatctggaggttccactgttgcttcagtctcagttacttagaatggaacccagagtcctgcccctttccacctacatgctcttacttgaaagcacctgagacttattgggtccctgattcctgcttcgtctgtatccgcagagtagttgcatgtcatttggcctgttttctaaataatcccacatcatgtcctccctgcacttacattgccactgctctgatttgggcttttttttttttgggacaatgcctctgtcccaattctgagtaacagctctggttcttgccactaccagagttctctagcaaatctgagcatctgacagggtgaaaaattctgaatggcttcctgatgcctgactttatgggatcaaattcaagttgcacgctggcactcagtgcccttctggtatcatctgccaagaccagggcctgcttcaccacagccacaataaagtcctttcaagccctgat

SEQ ID NO: 8951 - protein, 613 aa, Homo sapiens; identical to SEQ ID NO: 1340

SEQ ID NO: 8952 - DNA, 682 bp, Homo sapiens
gaacctatccgcttacggtacaagctgacattcaaccaaggtggacagcctttcagcgaagtaggagaagtgaaagacttcccagacctggctgtcttgggcgcagcctaacttttcacaagatggacccttcatttcaagcttaggctggcgttacttttgctgtctagtcaggactaatcacggtgtttcagtgcggagtgccaagagtcctatcctgacgtcaggctctgggtgtcaacctctgacttattctgcagatgctctgtgtgtgtgtgtgtgtgtgtgtgtgtgtgtgtgtgtgtgtgtgtgttcggggagagggtggtagcacagggcttgggatatcggcagtgtgggaaatgcgaagcatttctcatcatcatcatctctgctacagtcatgtttctgcatgtcagcgagcgacactgtccctgcctcaggttggaggttttatcagccaaagtgtttttttcatgtatcgttcgttccattcatccactctgtgccttgtcagcctttgaaaggcttggttgctcccaggctgctgttctcagggaccttaaaagggacctggttagtcttggggcagagagtatctacttgggcactctcttccaagaaagaccttgtctccattttcataagacgaattttaatctaaaagtactttcttgcttgt

SEQ ID NO: 8953 - protein, 92 aa, Homo sapiens
MFLHVSERHCPCLRLEVLSAKVFFSCIVRSIHPLCALSAFERLGCSQAAVLRDLKRDLVSLGAESIYLGTLFQERPCLHFHKTNFNLKVLSC

SEQ ID NO: 8954 - DNA, 849 bp, Homo sapiens
tctagtcaggactaatcacggtgtttcagtgcggagtgccaagagtcctatcctgacgtcaggctctgggtgtcaacctctgacttattctgcagatgctctgtcatttacttggagctctttgtgacacaccatgtcagtcatgatgaatcggccaacagccagcccttgccagctgacgtcacagtctaagatgggaaactgtggtacagatagacatgaagagagcttagcagtgattgaggtggtgactaaatatacagtcattgaataaataccatgtagcaagtgtactttgtggagtgttgagtaagtggaaaatggaaagccagttgcatttagagatgataggcctaaagggaactgtcttctgtcgagaagtaaaggaaacttcatgaaggatgtagaagcttagctgcctcagagaagagagaacctgaagatctgaggcaagctggacaggagaggtggatatttgttgatggaagaattcaagtttataatcaattcccacttagcacctactgtgtgctaggaacttgaatgtgtatgtttgacaagtcctgcttggcctgatgggtgggagaaggaacctgagcctggctgagatggctaggcggagggctttgaagtccaagcagctgaactggctgggtgggtttctacctttgaaactgcaagacttgtttggagctcttaattacaatatctgatatttttacagtctgatcttttgacttctacatatagtggaaatctgccaatactaattggtggagatgggaactgtaaaagatcaagtatgctaattttaagcaaatgtaaaaactcataaaacaggtaaacagt

SEQ ID NO: 8955 - protein, 46 aa, Homo sapiens; identical to SEQ ID NO: 8941

SEQ ID NO: 8956 - DNA, 1509 bp, Homo sapiens
gaacctatccgcttacggtacaagctgacattcaaccaaggtggacagcctttcagcgaagtaggagaagtgaaagacttcccagacctggctgtcttgggcgcagcctaacttttcacaagatggacccttcatttcaagcttaggctggcgttacttttgctgtctagtcaggactaatcacggtgtttcagtgcggagtgccaagagtcctatcctgacgtcaggctctgggtgtcaacctctgacttattctgcagatgctctgtgtgtgtgtgtgtgtgtgtgtgtgtgtgtgtgtgtgtgtgtgtgttcggggagagggtggtagcacagggcttgggatatcggcagtgtgggaaatgcgaagcatttctcatcatcatcatctctgctacagtcatgtttctgcatgtcagcgagcgacactgtccctgcctcaggttggaggttttatcagccaaagtgtttttttcatgtatcgttcgttccattcatccactctgtgccttgtcagcctttgaaaggcttggttgctcccaggctgctgttctcagggaccttaaaagggacctggttagtcttggggcagagagtatctacttgggcactctcttccaagaaagaccttgtctccattttcattagacaatgcttcttgtgtgtgttctggaagatcttctaaatggaatgcttgttgcactgttcccagtctgggcccttctcaggatcctcatctccatcctcatcctcttccttcacagcatttacttggagctctttgtgacacaccatgtcagtcatgatgaatcggccaacagccagcccttgccagctgacgtcacagtctaagatgggaaactgtggtacagatagacatgaagagagcttagcagtgattgaggtggtgactaaatatacagtcattgaataaataccatgtagcaagtgtactttgtggagtgttgagtaagtggaaaatggaaagccagttgcatttagagatgataggcctaaagggaactgtcttctgtcgagaagtaaaggaaacttcatgaaggatgtagaagcttagctgcctcagagaagagagaacctgaagatctgaggcaagctggacaggagaggtggatatttgttgatggaagaattcaagtttataatcaattcccacttagcacctactgtgtgctaggaacttgaatgtgtatgtttgacaagtcctgcttggcctgatgggtgggagaaggaacctgagcctggctgagatggctaggcggagggctttgaagtccaagcagctgaactggctgggtgggtttctacctttgaaactgcaagacttgtttggagctcttaattacaatatctgatatttttacagtctgatcttttgacttctacatatagtggaaatctgccaatactaattggtggagatgggaactgtaaaagatcaagtatgctaattttaagcaaatgtaaaaactcataaaacaggtaaacagt

SEQ ID NO: 8957 - protein, 66 aa, Homo sapiens; identical to SEQ ID NO: 8933

SEQ ID NO: 8958 - DNA, 2947 bp, Homo sapiens
gcagcctgccgcctctcattgtgtatgaccggaatggattcagaattctgctccacttctcccagacgggagcccctgggcacccagaggtacaggtgctgctcttgaccatgatgagcacggctccccagcctgtctgggatatcatgtttcaagtggctgtgccaaaggtgagtcatctgttggggatttctcagtaatggctgtcgtttttgagtgccaggttcttttctgggacttacctgtcgagtgtcaaggaaagaatcttcactcaaactaactgaagataaagtgggaatgtaatggcttacctgactggggattcctgaatatctgacttcagatatgagtgaatccaaataggttcttaaacaatgccttaagaatctgtatctcttgactctgcttttctttggcaccattctgacagtttctccacaaacaggaaagtggctacccacagctccagggttgcatggtccttaaccctctttatctcagaaactctcaccgggcatgaagcacatatattgattacccaggaaagggctctgattgggcttgttggtgttacttccataccttggaccaggaacttgtatcctgggatatgagacacttggccaatgtgagataacatccatcccttttcaagggaagtggggccctactgattaacaggcaccccacagtcacaggggaaggggcctgtcctgaaaggaaaagattcgagacagacaaaaatatgacctgcagtctctacttcttacggtagtcctatgggcaatgttctgctactacctctgttttataagttaacccaaggctcagaaattaaatattttactcaaggtcacagagctagtgagaagcagttagaattcaacccaagatgtgccctggctgttgatgctgcgtctcagatgccggttattgaccacacaactcccgatccattctgtgtgtggaaggaaaggcctcttagatccttttatcaattagtgggagtctgtctgcttgggctcccataggtgcctcggggtaccacgtttaagagggccatttcctcttggaggggtgttggggaggtccagctccccctcacctgatctccatcctagaagctgtggttaggaatgagttacatgttggttttcttcccctgatagtcaatgagagtgaagctgcagccggcatccagctccaagcttcctgcattcagtcctttgatgcctccagctgtgatatctcagatgctgctgcttgacaatccacacaaagaacctatccgcttacggtacaagctgacattcaaccaaggtggacagcctttcagcgaagtaggagaagtgaaagacttcccagacctggctgtcttgggcgcagcctaacttttcacaagatggacccttcatttcaagcttaggctggcgttacttttgctgtctagtcaggactaatcacggtgtttcagtgcggagtgccaagagtcctatcctgacgtcaggctctgggtgtcaacctctgacttattctgcagatgctctgtgtgtgtgtgtgtgtgtgtgtgtgtgtgtgtgtgtgtgtgtgtgttcggggagagggtggtagcacagggcttgggatatcggcagtgtgggaaatgcgaagcatttctcatcatcatcatctctgctacagtcatgtttctgcatgtcagcgagcgacactgtccctgcctcaggttggaggttttatcagccaaagtgtttttttcatgtatcgttcgttccattcatccactctgtgccttgtcagcctttgaaaggcttggttgctcccaggctgctgttctcagggaccttaaaagggacctggttagtcttggggcagagagtatctacttgggcactctcttccaagaaagaccttgtctccattttcattagacaatgcttcttgtgtgtgttctggaagatcttctaaatggaatgcttgttgcactgttcccaggcgagtggctgccatgagacctgaggaccacacttgggggaccaatcatgtccttcaccactgtgccttagaatcgcccctggacagagttcctgggcagaggggaaagcagctcccaggccttactcaggcctcaggtccatgggttgggcagccagtctgggcccttctcaggatcctcatctccatcctcatcctcttccttcacagcatttacttggagctctttgtgacacaccatgtcagtcatgatgaatcggccaacagccagcccttgccagctgacgtcacagtctaagatgggaaactgtggtacagatagacatgaagagagcttagcagtgattgaggtggtgactaaatatacagtcattgaataaataccatgtagcaagtgtactttgtggagtgttgagtaagtggaaaatggaaagccagttgcatttagagatgataggcctaaagggaactgtcttctgtcgagaagtaaaggaaacttcatgaaggatgtagaagcttagctgcctcagagaagagagaacctgaagatctgaggcaagctggacaggagaggtggatatttgttgatggaagaattcaagtttataatcaattcccacttagcacctactgtgtgctaggaacttgaatgtgtatgtttgacaagtcctgcttggcctgatgggtgggagaaggaacctgagcctggctgagatggctaggcggagggctttgaagtccaagcagctgaactggctgggtgggtttctacctttgaaactgcaagacttgtttggagctcttaattacaatatctgatatttttacagtctgatcttttgacttctacatatagtggaaatctgccaatactaattggtggagatgggaactgtaaaagatcaagtatgctaattttaagcaaatgtaaaaactcataaaacaggtaaacagt

SEQ ID NO: 8959 - protein, 72 aa, Homo sapiens; identical to SEQ ID NO: 8935

SEQ ID NO: 8960 - DNA, 3501 bp, Homo sapiens
gtgtccaccgctcctgccgcgcagtcagcagaggagagcgccaggacgctacagcggctgaagaggcagtggcgcccgcggccgcagcgtcggggctggagcgatggcggcgaccgcggtggcggcggctgtggcgggaaccgagtcggcccagggtcccccgggcccggcagcgtcgctggagctgtggctcaacaaagccacagacccaagcatgtcggaacaggattggtcagctatccagaatttctgtgagcaggtgaacactgaccccaatggccccacacatgcgccctggctactggcccacaagatccagtctccgcaagagaaggaagctctttatgccttaacggtgctggagatgtgcatgaaccactgtggggagaagttccacagcgaggtggccaaatttcgtttcctgaacgaactgatcaaagtgttgtccccaaagtacctggggtcctgggccacaggaaaagttaaaggaagagtcattgaaatactcttcagttggacagtctggtttccggaagacatcaagattcgagacgcttatcagatgctgaagaaacaaggaattataaaacaagaccctaaactaccagtggataaaatcttacccccaccatctccctggcccaagagctccatctttgatgctgatgaagaaaagtccaagcttctgacaaggcttctaaagagcaaccaccccgaggaccttcaggctgcaaaccggttaatcaagaatttggtcaaggaggaacaagaaaaatcggagaaggtgtccaagagggtcagtgcggtggaggaagtgcgaagccatgtgaaggtgctgcaggagatgctgagcatgtaccgcaggccagggcaggccccgcccgaccaggaggccctgcaggtcgtgtatgagaggtgtgaaaagctgcggcccacgctgttccggttggcgagtgacaccactgatgacgatgatgcactcgcggaaattctccaggcaaatgacctcctcacccaaggagttctgctgtacaaacaggtgatggagggccgggtcacctttggaaacagagtgaccagctcattgggagacatccctgtctccagagtctttcagaatccagcaggctgcatgaagacctgccccctgattgacttggaggtggacaatggacctgcgcagatggggactgtggtgccatctttgcttcatcaggacctggcagccttgggaatcagtgatgctcctgttacaggcatggtttctggtcagaattgctgtgaggaaaagaggaatccctcctccagcacgctgccaggcggtggtgttcagaacccttctgcagacaggaatttgctggacctcctctcagcacagccagctccgtgccctctgaattatgtttcgcagaaaagtgtccccaaggaagtgccaccaggtactaagtcctctccaggttggtcctgggaggctggcccgttggctccttccccatcttcacagaatacacctctggctcaagtgtttgtccctttggagtctgttaagcccagcagcctgccgcctctcattgtgtatgaccggaatggattcagaattctgctccacttctcccagacgggagcccctgggcacccagaggtacaggtgctgctcttgaccatgatgagcacggctccccagcctgtctgggatatcatgtttcaagtggctgtgccaaagtcaatgagagtgaagctgcagccggcatccagctccaagcttcctgcattcagtcctttgatgcctccagctgtgatatctcagatgctgctgcttgacaatccacacaaagaacctatccgcttacggtacaagctgacattcaaccaaggtggacagcctttcagcgaagtaggagaagtgaaagacttcccagacctggctgtcttgggcgcagcctaacttttcacaagatggacccttcatttcaagcttaggctggcgttacttttgctgtctagtcaggactaatcacggtgtttcagtgcggagtgccaagagtcctatcctgacgtcaggctctgggtgtcaacctctgacttattctgcagatgctctgtgtgtgtgtgtgtgtgtgtgtgtgtgtgtgtgtgtgtgtgtgtgttcggggagagggtggtagcacagggcttgggatatcggcagtgtgggaaatgcgaagcatttctcatcatcatcatctctgctacagtcatgtttctgcatgtcagcgagcgacactgtccctgcctcaggttggaggttttatcagccaaagtgtttttttcatgtatcgttcgttccattcatccactctgtgccttgtcagcctttgaaaggcttggttgctcccaggctgctgttctcagggaccttaaaagggacctggttagtcttggggcagagagtatctacttgggcactctcttccaagaaagaccttgtctccattttcattagacaatgcttcttgtgtgtgttctggaagatcttctaaatggaatgcttgttgcactgttcccaggcgagtggctgccatgagacctgaggaccacacttgggggaccaatcatgtccttcaccactgtgccttagaatcgcccctggacagagttcctgggcagaggggaaagcagctcccaggccttactcaggcctcaggtccatgggttgggcagccagtctgggcccttctcaggatcctcatctccatcctcatcctcttccttcacagcatttacttggagctctttgtgacacaccatgtcagtcatgatgaatcggccaacagccagcccttgccagctgacgtcacagtctaagatgggaaactgtggtacagatagacatgaagagagcttagcagtgattgaggtggtgactaaatatacagtcattgaataaataccatgtagcaagtgtactttgtggagtgttgagtaagtggaaaatggaaagccagttgcatttagagatgataggcctaaagggaactgtcttctgtcgagaagtaaaggaaacttcatgaaggatgtagaagcttagctgcctcagagaagagagaacctgaagatctgaggcaagctggacaggagaggtggatatttgttgatggaagaattcaagtttataatcaattcccacttagcacctactgtgtgctaggaacttgaatgtgtatgtttgacaagtcctgcttggcctgatgggtgggagaaggaacctgagcctggctgagatggctaggcggagggctttgaagtccaagcagctgaactggctgggtgggtttctacctttgaaactgcaagacttgtttggagctcttaattacaatatctgatatttttacagtctgatcttttgacttctacatatagtggaaatctgccaatactaattggtggagatgggaactgtaaaagatcaagtatgctaattttaagcaaatgtaaaaactcataaaacaggtaaacagt

SEQ ID NO: 8961 - protein, 613 aa, Homo sapiens; identical to SEQ ID NO: 1340

SEQ ID NO: 8962 - DNA, 728 bp, Homo sapiens
tctagtcaggactaatcacggtgtttcagtgcggagtgccaagagtcctatcctgacgtcaggctctgggtgtcaacctctgacttattctgcagatgctctgtcatttacttggagctctttgtgacacaccatgtcagtcatgatgaatcggccaacagccagcccttgccagctgacgtcacagtctaagatgggaaactgtggtacagatagacatgaagagagcttagcagtgattgaggtggtgactaaatatacagtcattgaataaataccatgtagcaagtgtactttgtggagtgttgagtaagtggaaaatggaaagccagttgcatttagagatgataggcctaaagggaactgtcttctgtcgagaagtaaaggaaacttcatgaaggatgtagaagcttagctgcctcagagaagagagaacctgaagatctgaggcaagctggacaggagaggtggatatttgttgatggaagaattcaagtttataatcaattcccacttagcacctactgtgtgctaggaacttgaatgtgtatgtttgacaagtcctgcttggcctgatgggtgggagaaggaacctgagcctggctgagatggctaggcggagggctttgaagtccaagcagctgaactggctgggtgggtttctacctttgaaactgcaagacttgtttggagctcttaattacaatatctgatatttttacagtctg

SEQ ID NO: 8963 - protein, 46 aa, Homo sapiens; identical to SEQ ID NO: 8941

SEQ ID NO: 8964 - DNA, 1388 bp, Homo sapiens
gaacctatccgcttacggtacaagctgacattcaaccaaggtggacagcctttcagcgaagtaggagaagtgaaagacttcccagacctggctgtcttgggcgcagcctaacttttcacaagatggacccttcatttcaagcttaggctggcgttacttttgctgtctagtcaggactaatcacggtgtttcagtgcggagtgccaagagtcctatcctgacgtcaggctctgggtgtcaacctctgacttattctgcagatgctctgtgtgtgtgtgtgtgtgtgtgtgtgtgtgtgtgtgtgtgtgtgtgttcggggagagggtggtagcacagggcttgggatatcggcagtgtgggaaatgcgaagcatttctcatcatcatcatctctgctacagtcatgtttctgcatgtcagcgagcgacactgtccctgcctcaggttggaggttttatcagccaaagtgtttttttcatgtatcgttcgttccattcatccactctgtgccttgtcagcctttgaaaggcttggttgctcccaggctgctgttctcagggaccttaaaagggacctggttagtcttggggcagagagtatctacttgggcactctcttccaagaaagaccttgtctccattttcattagacaatgcttcttgtgtgtgttctggaagatcttctaaatggaatgcttgttgcactgttcccagtctgggcccttctcaggatcctcatctccatcctcatcctcttccttcacagcatttacttggagctctttgtgacacaccatgtcagtcatgatgaatcggccaacagccagcccttgccagctgacgtcacagtctaagatgggaaactgtggtacagatagacatgaagagagcttagcagtgattgaggtggtgactaaatatacagtcattgaataaataccatgtagcaagtgtactttgtggagtgttgagtaagtggaaaatggaaagccagttgcatttagagatgataggcctaaagggaactgtcttctgtcgagaagtaaaggaaacttcatgaaggatgtagaagcttagctgcctcagagaagagagaacctgaagatctgaggcaagctggacaggagaggtggatatttgttgatggaagaattcaagtttataatcaattcccacttagcacctactgtgtgctaggaacttgaatgtgtatgtttgacaagtcctgcttggcctgatgggtgggagaaggaacctgagcctggctgagatggctaggcggagggctttgaagtccaagcagctgaactggctgggtgggtttctacctttgaaactgcaagacttgtttggagctcttaattacaatatctgatatttttacagtctg

SEQ ID NO: 8965 - protein, 66 aa, Homo sapiens; identical to SEQ ID NO: 8933

SEQ ID NO: 8966 - DNA, 2826 bp, Homo sapiens
gcagcctgccgcctctcattgtgtatgaccggaatggattcagaattctgctccacttctcccagacgggagcccctgggcacccagaggtacaggtgctgctcttgaccatgatgagcacggctccccagcctgtctgggatatcatgtttcaagtggctgtgccaaaggtgagtcatctgttggggatttctcagtaatggctgtcgtttttgagtgccaggttcttttctgggacttacctgtcgagtgtcaaggaaagaatcttcactcaaactaactgaagataaagtgggaatgtaatggcttacctgactggggattcctgaatatctgacttcagatatgagtgaatccaaataggttcttaaacaatgccttaagaatctgtatctcttgactctgcttttctttggcaccattctgacagtttctccacaaacaggaaagtggctacccacagctccagggttgcatggtccttaaccctctttatctcagaaactctcaccgggcatgaagcacatatattgattacccaggaaagggctctgattgggcttgttggtgttacttccataccttggaccaggaacttgtatcctgggatatgagacacttggccaatgtgagataacatccatcccttttcaagggaagtggggccctactgattaacaggcaccccacagtcacaggggaaggggcctgtcctgaaaggaaaagattcgagacagacaaaaatatgacctgcagtctctacttcttacggtagtcctatgggcaatgttctgctactacctctgttttataagttaacccaaggctcagaaattaaatattttactcaaggtcacagagctagtgagaagcagttagaattcaacccaagatgtgccctggctgttgatgctgcgtctcagatgccggttattgaccacacaactcccgatccattctgtgtgtggaaggaaaggcctcttagatccttttatcaattagtgggagtctgtctgcttgggctcccataggtgcctcggggtaccacgtttaagagggccatttcctcttggaggggtgttggggaggtccagctccccctcacctgatctccatcctagaagctgtggttaggaatgagttacatgttggttttcttcccctgatagtcaatgagagtgaagctgcagccggcatccagctccaagcttcctgcattcagtcctttgatgcctccagctgtgatatctcagatgctgctgcttgacaatccacacaaagaacctatccgcttacggtacaagctgacattcaaccaaggtggacagcctttcagcgaagtaggagaagtgaaagacttcccagacctggctgtcttgggcgcagcctaacttttcacaagatggacccttcatttcaagcttaggctggcgttacttttgctgtctagtcaggactaatcacggtgtttcagtgcggagtgccaagagtcctatcctgacgtcaggctctgggtgtcaacctctgacttattctgcagatgctctgtgtgtgtgtgtgtgtgtgtgtgtgtgtgtgtgtgtgtgtgtgtgttcggggagagggtggtagcacagggcttgggatatcggcagtgtgggaaatgcgaagcatttctcatcatcatcatctctgctacagtcatgtttctgcatgtcagcgagcgacactgtccctgcctcaggttggaggttttatcagccaaagtgtttttttcatgtatcgttcgttccattcatccactctgtgccttgtcagcctttgaaaggcttggttgctcccaggctgctgttctcagggaccttaaaagggacctggttagtcttggggcagagagtatctacttgggcactctcttccaagaaagaccttgtctccattttcattagacaatgcttcttgtgtgtgttctggaagatcttctaaatggaatgcttgttgcactgttcccaggcgagtggctgccatgagacctgaggaccacacttgggggaccaatcatgtccttcaccactgtgccttagaatcgcccctggacagagttcctgggcagaggggaaagcagctcccaggccttactcaggcctcaggtccatgggttgggcagccagtctgggcccttctcaggatcctcatctccatcctcatcctcttccttcacagcatttacttggagctctttgtgacacaccatgtcagtcatgatgaatcggccaacagccagcccttgccagctgacgtcacagtctaagatgggaaactgtggtacagatagacatgaagagagcttagcagtgattgaggtggtgactaaatatacagtcattgaataaataccatgtagcaagtgtactttgtggagtgttgagtaagtggaaaatggaaagccagttgcatttagagatgataggcctaaagggaactgtcttctgtcgagaagtaaaggaaacttcatgaaggatgtagaagcttagctgcctcagagaagagagaacctgaagatctgaggcaagctggacaggagaggtggatatttgttgatggaagaattcaagtttataatcaattcccacttagcacctactgtgtgctaggaacttgaatgtgtatgtttgacaagtcctgcttggcctgatgggtgggagaaggaacctgagcctggctgagatggctaggcggagggctttgaagtccaagcagctgaactggctgggtgggtttctacctttgaaactgcaagacttgtttggagctcttaattacaatatctgatatttttacagtctg

SEQ ID NO: 8967 - protein, 72 aa, Homo sapiens; identical to SEQ ID NO: 8935

SEQ ID NO: 8968 - DNA, 3380 bp, Homo sapiens
gtgtccaccgctcctgccgcgcagtcagcagaggagagcgccaggacgctacagcggctgaagaggcagtggcgcccgcggccgcagcgtcggggctggagcgatggcggcgaccgcggtggcggcggctgtggcgggaaccgagtcggcccagggtcccccgggcccggcagcgtcgctggagctgtggctcaacaaagccacagacccaagcatgtcggaacaggattggtcagctatccagaatttctgtgagcaggtgaacactgaccccaatggccccacacatgcgccctggctactggcccacaagatccagtctccgcaagagaaggaagctctttatgccttaacggtgctggagatgtgcatgaaccactgtggggagaagttccacagcgaggtggccaaatttcgtttcctgaacgaactgatcaaagtgttgtccccaaagtacctggggtcctgggccacaggaaaagttaaaggaagagtcattgaaatactcttcagttggacagtctggtttccggaagacatcaagattcgagacgcttatcagatgctgaagaaacaaggaattataaaacaagaccctaaactaccagtggataaaatcttacccccaccatctccctggcccaagagctccatctttgatgctgatgaagaaaagtccaagcttctgacaaggcttctaaagagcaaccaccccgaggaccttcaggctgcaaaccggttaatcaagaatttggtcaaggaggaacaagaaaaatcggagaaggtgtccaagagggtcagtgcggtggaggaagtgcgaagccatgtgaaggtgctgcaggagatgctgagcatgtaccgcaggccagggcaggccccgcccgaccaggaggccctgcaggtcgtgtatgagaggtgtgaaaagctgcggcccacgctgttccggttggcgagtgacaccactgatgacgatgatgcactcgcggaaattctccaggcaaatgacctcctcacccaaggagttctgctgtacaaacaggtgatggagggccgggtcacctttggaaacagagtgaccagctcattgggagacatccctgtctccagagtctttcagaatccagcaggctgcatgaagacctgccccctgattgacttggaggtggacaatggacctgcgcagatggggactgtggtgccatctttgcttcatcaggacctggcagccttgggaatcagtgatgctcctgttacaggcatggtttctggtcagaattgctgtgaggaaaagaggaatccctcctccagcacgctgccaggcggtggtgttcagaacccttctgcagacaggaatttgctggacctcctctcagcacagccagctccgtgccctctgaattatgtttcgcagaaaagtgtccccaaggaagtgccaccaggtactaagtcctctccaggttggtcctgggaggctggcccgttggctccttccccatcttcacagaatacacctctggctcaagtgtttgtccctttggagtctgttaagcccagcagcctgccgcctctcattgtgtatgaccggaatggattcagaattctgctccacttctcccagacgggagcccctgggcacccagaggtacaggtgctgctcttgaccatgatgagcacggctccccagcctgtctgggatatcatgtttcaagtggctgtgccaaagtcaatgagagtgaagctgcagccggcatccagctccaagcttcctgcattcagtcctttgatgcctccagctgtgatatctcagatgctgctgcttgacaatccacacaaagaacctatccgcttacggtacaagctgacattcaaccaaggtggacagcctttcagcgaagtaggagaagtgaaagacttcccagacctggctgtcttgggcgcagcctaacttttcacaagatggacccttcatttcaagcttaggctggcgttacttttgctgtctagtcaggactaatcacggtgtttcagtgcggagtgccaagagtcctatcctgacgtcaggctctgggtgtcaacctctgacttattctgcagatgctctgtgtgtgtgtgtgtgtgtgtgtgtgtgtgtgtgtgtgtgtgtgtgttcggggagagggtggtagcacagggcttgggatatcggcagtgtgggaaatgcgaagcatttctcatcatcatcatctctgctacagtcatgtttctgcatgtcagcgagcgacactgtccctgcctcaggttggaggttttatcagccaaagtgtttttttcatgtatcgttcgttccattcatccactctgtgccttgtcagcctttgaaaggcttggttgctcccaggctgctgttctcagggaccttaaaagggacctggttagtcttggggcagagagtatctacttgggcactctcttccaagaaagaccttgtctccattttcattagacaatgcttcttgtgtgtgttctggaagatcttctaaatggaatgcttgttgcactgttcccaggcgagtggctgccatgagacctgaggaccacacttgggggaccaatcatgtccttcaccactgtgccttagaatcgcccctggacagagttcctgggcagaggggaaagcagctcccaggccttactcaggcctcaggtccatgggttgggcagccagtctgggcccttctcaggatcctcatctccatcctcatcctcttccttcacagcatttacttggagctctttgtgacacaccatgtcagtcatgatgaatcggccaacagccagcccttgccagctgacgtcacagtctaagatgggaaactgtggtacagatagacatgaagagagcttagcagtgattgaggtggtgactaaatatacagtcattgaataaataccatgtagcaagtgtactttgtggagtgttgagtaagtggaaaatggaaagccagttgcatttagagatgataggcctaaagggaactgtcttctgtcgagaagtaaaggaaacttcatgaaggatgtagaagcttagctgcctcagagaagagagaacctgaagatctgaggcaagctggacaggagaggtggatatttgttgatggaagaattcaagtttataatcaattcccacttagcacctactgtgtgctaggaacttgaatgtgtatgtttgacaagtcctgcttggcctgatgggtgggagaaggaacctgagcctggctgagatggctaggcggagggctttgaagtccaagcagctgaactggctgggtgggtttctacctttgaaactgcaagacttgtttggagctcttaattacaatatctgatatttttacagtctg

SEQ ID NO: 8969 - protein, 613 aa, Homo sapiens; identical to SEQ ID NO: 1340

SEQ ID NO: 8970 - DNA, 2390 bp, Homo sapiens
gcagcctgccgcctctcattgtgtatgaccggaatggattcagaattctgctccacttctcccagacgggagcccctgggcacccagaggtacaggtgctgctcttgaccatgatgagcacggctccccagcctgtctgggatatcatgtttcaagtggctgtgccaaaggtgagtcatctgttggggatttctcagtaatggctgtcgtttttgagtgccaggttcttttctgggacttacctgtcgagtgtcaaggaaagaatcttcactcaaactaactgaagataaagtgggaatgtaatggcttacctgactggggattcctgaatatctgacttcagatatgagtgaatccaaataggttcttaaacaatgccttaagaatctgtatctcttgactctgcttttctttggcaccattctgacagtttctccacaaacaggaaagtggctacccacagctccagggttgcatggtccttaaccctctttatctcagaaactctcaccgggcatgaagcacatatattgattacccaggaaagggctctgattgggcttgttggtgttacttccataccttggaccaggaacttgtatcctgggatatgagacacttggccaatgtgagataacatccatcccttttcaagggaagtggggccctactgattaacaggcaccccacagtcacaggggaaggggcctgtcctgaaaggaaaagattcgagacagacaaaaatatgacctgcagtctctacttcttacggtagtcctatgggcaatgttctgctactacctctgttttataagttaacccaaggctcagaaattaaatattttactcaaggtcacagagctagtgagaagcagttagaattcaacccaagatgtgccctggctgttgatgctgcgtctcagatgccggttattgaccacacaactcccgatccattctgtgtgtggaaggaaaggcctcttagatccttttatcaattagtgggagtctgtctgcttgggctcccataggtgcctcggggtaccacgtttaagagggccatttcctcttggaggggtgttggggaggtccagctccccctcacctgatctccatcctagaagctgtggttaggaatgagttacatgttggttttcttcccctgatagtcaatgagagtgaagctgcagccggcatccagctccaagcttcctgcattcagtcctttgatgcctccagctgtgatatctcagatgctgctgcttgacaatccacacaaagaacctatccgcttacggtacaagctgacattcaaccaaggtggacagcctttcagcgaagtaggagaagtgaaagacttcccagacctggctgtcttgggcgcagcctaacttttcacaagatggacccttcatttcaagcttaggctggcgttacttttgctgtctagtcaggactaatcacggtgtttcagtgcggagtgccaagagtcctatcctgacgtcaggctctgggtgtcaacctctgacttattctgcagatgctctgtgtgtgtgtgtgtgtgtgtgtgtgtgtgtgtgtgtgtgtgtgtgttcggggagagggtggtagcacagggcttgggatatcggcagtgtgggaaatgcgaagcatttctcatcatcatcatctctgctacagtcatgtttctgcatgtcagcgagcgacactgtccctgcctcaggttggaggttttatcagccaaagtgtttttttcatgtatcgttcgttccattcatccactctgtgccttgtcagcctttgaaaggcttggttgctcccaggctgctgttctcagggaccttaaaagggacctggttagtcttggggcagagagtatctacttgggcactctcttccaagaaagaccttgtctccattttcattagacaatgcttcttgtgtgtgttctggaagatcttctaaatggaatgcttgttgcactgttcccaggcgagtggctgccatgagacctgaggaccacacttgggggaccaatcatgtccttcaccactgtgccttagaatcgcccctggacagagttcctgggcagaggggaaagcagctcccaggccttactcaggcctcaggtccatgggttgggcagccagtctgggcccttctcaggatcctcatctccatcctcatcctcttccttcacagcatttacttggagctctttgtgacacaccatgtcagtcatgatgaatcggccaacagccagcccttgccagctgacgtcacagtctaagatgggaaactgtggtacagatagacatgaagagagcttagcagtgattgaggtggtgactaaatatacagtcattgaataaataccatgtagcaagtgt

SEQ ID NO: 8971 - protein, 72 aa, Homo sapiens; identical to SEQ ID NO: 8935

SEQ ID NO: 8972 - DNA, 2944 bp, Homo sapiens
gtgtccaccgctcctgccgcgcagtcagcagaggagagcgccaggacgctacagcggctgaagaggcagtggcgcccgcggccgcagcgtcggggctggagcgatggcggcgaccgcggtggcggcggctgtggcgggaaccgagtcggcccagggtcccccgggcccggcagcgtcgctggagctgtggctcaacaaagccacagacccaagcatgtcggaacaggattggtcagctatccagaatttctgtgagcaggtgaacactgaccccaatggccccacacatgcgccctggctactggcccacaagatccagtctccgcaagagaaggaagctctttatgccttaacggtgctggagatgtgcatgaaccactgtggggagaagttccacagcgaggtggccaaatttcgtttcctgaacgaactgatcaaagtgttgtccccaaagtacctggggtcctgggccacaggaaaagttaaaggaagagtcattgaaatactcttcagttggacagtctggtttccggaagacatcaagattcgagacgcttatcagatgctgaagaaacaaggaattataaaacaagaccctaaactaccagtggataaaatcttacccccaccatctccctggcccaagagctccatctttgatgctgatgaagaaaagtccaagcttctgacaaggcttctaaagagcaaccaccccgaggaccttcaggctgcaaaccggttaatcaagaatttggtcaaggaggaacaagaaaaatcggagaaggtgtccaagagggtcagtgcggtggaggaagtgcgaagccatgtgaaggtgctgcaggagatgctgagcatgtaccgcaggccagggcaggccccgcccgaccaggaggccctgcaggtcgtgtatgagaggtgtgaaaagctgcggcccacgctgttccggttggcgagtgacaccactgatgacgatgatgcactcgcggaaattctccaggcaaatgacctcctcacccaaggagttctgctgtacaaacaggtgatggagggccgggtcacctttggaaacagagtgaccagctcattgggagacatccctgtctccagagtctttcagaatccagcaggctgcatgaagacctgccccctgattgacttggaggtggacaatggacctgcgcagatggggactgtggtgccatctttgcttcatcaggacctggcagccttgggaatcagtgatgctcctgttacaggcatggtttctggtcagaattgctgtgaggaaaagaggaatccctcctccagcacgctgccaggcggtggtgttcagaacccttctgcagacaggaatttgctggacctcctctcagcacagccagctccgtgccctctgaattatgtttcgcagaaaagtgtccccaaggaagtgccaccaggtactaagtcctctccaggttggtcctgggaggctggcccgttggctccttccccatcttcacagaatacacctctggctcaagtgtttgtccctttggagtctgttaagcccagcagcctgccgcctctcattgtgtatgaccggaatggattcagaattctgctccacttctcccagacgggagcccctgggcacccagaggtacaggtgctgctcttgaccatgatgagcacggctccccagcctgtctgggatatcatgtttcaagtggctgtgccaaagtcaatgagagtgaagctgcagccggcatccagctccaagcttcctgcattcagtcctttgatgcctccagctgtgatatctcagatgctgctgcttgacaatccacacaaagaacctatccgcttacggtacaagctgacattcaaccaaggtggacagcctttcagcgaagtaggagaagtgaaagacttcccagacctggctgtcttgggcgcagcctaacttttcacaagatggacccttcatttcaagcttaggctggcgttacttttgctgtctagtcaggactaatcacggtgtttcagtgcggagtgccaagagtcctatcctgacgtcaggctctgggtgtcaacctctgacttattctgcagatgctctgtgtgtgtgtgtgtgtgtgtgtgtgtgtgtgtgtgtgtgtgtgtgttcggggagagggtggtagcacagggcttgggatatcggcagtgtgggaaatgcgaagcatttctcatcatcatcatctctgctacagtcatgtttctgcatgtcagcgagcgacactgtccctgcctcaggttggaggttttatcagccaaagtgtttttttcatgtatcgttcgttccattcatccactctgtgccttgtcagcctttgaaaggcttggttgctcccaggctgctgttctcagggaccttaaaagggacctggttagtcttggggcagagagtatctacttgggcactctcttccaagaaagaccttgtctccattttcattagacaatgcttcttgtgtgtgttctggaagatcttctaaatggaatgcttgttgcactgttcccaggcgagtggctgccatgagacctgaggaccacacttgggggaccaatcatgtccttcaccactgtgccttagaatcgcccctggacagagttcctgggcagaggggaaagcagctcccaggccttactcaggcctcaggtccatgggttgggcagccagtctgggcccttctcaggatcctcatctccatcctcatcctcttccttcacagcatttacttggagctctttgtgacacaccatgtcagtcatgatgaatcggccaacagccagcccttgccagctgacgtcacagtctaagatgggaaactgtggtacagatagacatgaagagagcttagcagtgattgaggtggtgactaaatatacagtcattgaataaataccatgtagcaagtgt

SEQ ID NO: 8973 - protein, 613 aa, Homo sapiens; identical to SEQ ID NO: 1340

SEQ ID NO: 8974 - DNA, 2477 bp, Homo sapiens
gtgtccaccgctcctgccgcgcagtcagcagaggagagcgccaggacgctacagcggctgaagaggcagtggcgcccgcggccgcagcgtcggggctggagcgatggcggcgaccgcggtggcggcggctgtggcgggaaccgagtcggcccagggtcccccgggcccggcagcgtcgctggagctgtggctcaacaaagccacagacccaagcatgtcggaacaggattggtcagctatccagaatttctgtgagcaggtgaacactgaccccaatggccccacacatgcgccctggctactggcccacaagatccagtctccgcaagagaaggaagctctttatgccttaacggtgctggagatgtgcatgaaccactgtggggagaagttccacagcgaggtggccaaatttcgtttcctgaacgaactgatcaaagtgttgtccccaaagtacctggggtcctgggccacaggaaaagttaaaggaagagtcattgaaatactcttcagttggacagtctggtttccggaagacatcaagattcgagacgcttatcagatgctgaagaaacaaggaattataaaacaagaccctaaactaccagtggataaaatcttacccccaccatctccctggcccaagagctccatctttgatgctgatgaagaaaagtccaagcttctgacaaggcttctaaagagcaaccaccccgaggaccttcaggctgcaaaccggttaatcaagaatttggtcaaggaggaacaagaaaaatcggagaaggtgtccaagagggtcagtgcggtggaggaagtgcgaagccatgtgaaggtgctgcaggagatgctgagcatgtaccgcaggccagggcaggccccgcccgaccaggaggccctgcaggtcgtgtatgagaggtgtgaaaagctgcggcccacgctgttccggttggcgagtgacaccactgatgacgatgatgcactcgcggaaattctccaggcaaatgacctcctcacccaaggagttctgctgtacaaacaggtgatggagggccgggtcacctttggaaacagagtgaccagctcattgggagacatccctgtctccagagtctttcagaatccagcaggctgcatgaagacctgccccctgattgacttggaggtggacaatggacctgcgcagatggggactgtggtgccatctttgcttcatcaggacctggcagccttgggaatcagtgatgctcctgttacaggcatggtttctggtcagaattgctgtgaggaaaagaggaatccctcctccagcacgctgccaggcggtggtgttcagaacccttctgcagacaggaatttgctggacctcctctcagcacagccagctccgtgccctctgaattatgtttcgcagaaaagtgtccccaaggaagtgccaccaggtactaagtcctctccaggttggtcctgggaggctggcccgttggctccttccccatcttcacagaatacacctctggctcaagtgtttgtccctttggagtctgttaagcccagcagcctgccgcctctcattgtgtatgaccggaatggattcagaattctgctccacttctcccagacgggagcccctgggcacccagaggtacaggtgctgctcttgaccatgatgagcacggctccccagcctgtctgggatatcatgtttcaagtggctgtgccaaagtcaatgagagtgaagctgcagccggcatccagctccaagcttcctgcattcagtcctttgatgcctccagctgtgatatctcagatgctgctgcttgacaatccacacaaagaacctatccgcttacggtacaagctgacattcaaccaaggtggacagcctttcagcgaagtaggagaagtgaaagacttcccagacctggctgtcttgggcgcagcctaacttttcacaagatggacccttcatttcaagcttaggctggcgttacttttgctgtctagtcaggactaatcacggtgtttcagtgcggagtgccaagagtcctatcctgacgtcaggctctgggtgtcaacctctgacttattctgcagatgctctgtgtgtgtgtgtgtgtgtgtgtgtgtgtgtgtgtgtgtgtgtgtgttcggggagagggtggtagcacagggcttgggatatcggcagtgtgggaaatgcgaagcatttctcatcatcatcatctctgctacagtcatgtttctgcatgtcagcgagcgacactgtccctgcctcaggttggaggttttatcagccaaagtgtttttttcatgtatcgttcgttccattcatccactctgtgccttgtcagcctttgaaaggcttggttgctcccaggctgctgttctcagggaccttaaaagggacctggttagtcttggggcagagagtatctacttgggcactctcttccaagaaagaccttgtctccattttc

SEQ ID NO: 8975 - protein, 613 aa, Homo sapiens; identical to SEQ ID NO: 1340

SEQ ID NO: 8976 - DNA, 2061 bp, Homo sapiens
gtgtccaccgctcctgccgcgcagtcagcagaggagagcgccaggacgctacagcggctgaagaggcagtggcgcccgcggccgcagcgtcggggctggagcgatggcggcgaccgcggtggcggcggctgtggcgggaaccgagtcggcccagggtcccccgggcccggcagcgtcgctggagctgtggctcaacaaagccacagacccaagcatgtcggaacaggattggtcagctatccagaatttctgtgagcaggtgaacactgaccccaatggccccacacatgcgccctggctactggcccacaagatccagtctccgcaagagaaggaagctctttatgccttaacggtgctggagatgtgcatgaaccactgtggggagaagttccacagcgaggtggccaaatttcgtttcctgaacgaactgatcaaagtgttgtccccaaagtacctggggtcctgggccacaggaaaagttaaaggaagagtcattgaaatactcttcagttggacagtctggtttccggaagacatcaagattcgagacgcttatcagatgctgaagaaacaaggaattataaaacaagaccctaaactaccagtggataaaatcttacccccaccatctccctggcccaagagctccatctttgatgctgatgaagaaaagtccaagcttctgacaaggcttctaaagagcaaccaccccgaggaccttcaggctgcaaaccggttaatcaagaatttggtcaaggaggaacaagaaaaatcggagaaggtgtccaagagggtcagtgcggtggaggaagtgcgaagccatgtgaaggtgctgcaggagatgctgagcatgtaccgcaggccagggcaggccccgcccgaccaggaggccctgcaggtcgtgtatgagaggtgtgaaaagctgcggcccacgctgttccggttggcgagtgacaccactgatgacgatgatgcactcgcggaaattctccaggcaaatgacctcctcacccaaggagttctgctgtacaaacaggtgatggagggccgggtcacctttggaaacagagtgaccagctcattgggagacatccctgtctccagagtctttcagaatccagcaggctgcatgaagacctgccccctgattgacttggaggtggacaatggacctgcgcagatggggactgtggtgccatctttgcttcatcaggacctggcagccttgggaatcagtgatgctcctgttacaggcatggtttctggtcagaattgctgtgaggaaaagaggaatccctcctccagcacgctgccaggcggtggtgttcagaacccttctgcagacaggaatttgctggacctcctctcagcacagccagctccgtgccctctgaattatgtttcgcagaaaagtgtccccaaggaagtgccaccaggtactaagtcctctccaggttggtcctgggaggctggcccgttggctccttccccatcttcacagaatacacctctggctcaagtgtttgtccctttggagtctgttaagcccagcagcctgccgcctctcattgtgtatgaccggaatggattcagaattctgctccacttctcccagacgggagcccctgggcacccagaggtacaggtgctgctcttgaccatgatgagcacggctccccagcctgtctgggatatcatgtttcaagtggctgtgccaaagtcaatgagagtgaagctgcagccggcatccagctccaagcttcctgcattcagtcctttgatgcctccagctgtgatatctcagatgctgctgcttgacaatccacacaaagaacctatccgcttacggtacaagctgacattcaaccaaggtggacagcctttcagcgaagtaggagaagtgaaagacttcccagacctggctgtcttgggcgcagcctaacttttcacaagatggacccttcatttcaagcttaggctggcgttacttttgctgtctagtcaggactaatcacggtgtttcagtgcggagtgccaagagtcctatcctgacgtcag

SEQ ID NO: 8977 - protein, 613 aa, Homo sapiens; identical to SEQ ID NO: 1340

SEQ ID NO: 8978 - DNA, 1972 bp, Homo sapiens
gtgtccaccgctcctgccgcgcagtcagcagaggagagcgccaggacgctacagcggctgaagaggcagtggcgcccgcggccgcagcgtcggggctggagcgatggcggcgaccgcggtggcggcggctgtggcgggaaccgagtcggcccagggtcccccgggcccggcagcgtcgctggagctgtggctcaacaaagccacagacccaagcatgtcggaacaggattggtcagctatccagaatttctgtgagcaggtgaacactgaccccaatggccccacacatgcgccctggctactggcccacaagatccagtctccgcaagagaaggaagctctttatgccttaacggtgctggagatgtgcatgaaccactgtggggagaagttccacagcgaggtggccaaatttcgtttcctgaacgaactgatcaaagtgttgtccccaaagtacctggggtcctgggccacaggaaaagttaaaggaagagtcattgaaatactcttcagttggacagtctggtttccggaagacatcaagattcgagacgcttatcagatgctgaagaaacaaggaattataaaacaagaccctaaactaccagtggataaaatcttacccccaccatctccctggcccaagagctccatctttgatgctgatgaagaaaagtccaagcttctgacaaggcttctaaagagcaaccaccccgaggaccttcaggctgcaaaccggttaatcaagaatttggtcaaggaggaacaagaaaaatcggagaaggtgtccaagagggtcagtgcggtggaggaagtgcgaagccatgtgaaggtgctgcaggagatgctgagcatgtaccgcaggccagggcaggccccgcccgaccaggaggccctgcaggtcgtgtatgagaggtgtgaaaagctgcggcccacgctgttccggttggcgagtgacaccactgatgacgatgatgcactcgcggaaattctccaggcaaatgacctcctcacccaaggagttctgctgtacaaacaggtgatggagggccgggtcacctttggaaacagagtgaccagctcattgggagacatccctgtctccagagtctttcagaatccagcaggctgcatgaagacctgccccctgattgacttggaggtggacaatggacctgcgcagatggggactgtggtgccatctttgcttcatcaggacctggcagccttgggaatcagtgatgctcctgttacaggcatggtttctggtcagaattgctgtgaggaaaagaggaatccctcctccagcacgctgccaggcggtggtgttcagaacccttctgcagacaggaatttgctggacctcctctcagcacagccagctccgtgccctctgaattatgtttcgcagaaaagtgtccccaaggaagtgccaccaggtactaagtcctctccaggttggtcctgggaggctggcccgttggctccttccccatcttcacagaatacacctctggctcaagtgtttgtccctttggagtctgttaagcccagcagcctgccgcctctcattgtgtatgaccggaatggattcagaattctgctccacttctcccagacgggagcccctgggcacccagaggtacaggtgctgctcttgaccatgatgagcacggctccccagcctgtctgggatatcatgtttcaagtggctgtgccaaagtcaatgagagtgaagctgcagccggcatccagctccaagcttcctgcattcagtcctttgatgcctccagctgtgatatctcagatgctgctgcttgacaatccacacaaagaacctatccgcttacggtacaagctgacattcaaccaaggtggacagcctttcagcgaagtaggagaagtgaaagacttcccagacctggctgtcttgggcgcagcctaacttttcacaagatggacccttcatttc

SEQ ID NO: 8979 - protein, 613 aa, Homo sapiens; identical to SEQ ID NO: 1340

SEQ ID NO: 8980 - DNA, 2244 bp, Homo sapiens
ctgagggagtcgagatggttgtgaataggaagagtgagctggttccctctgggagcacgtgcttgctgctgagggagtcaggatgggtgtgagtaggggagtgagctggtccccttgggaagcacgtgtctgctgctgagcaagtcagggagagtgtgagtaggggagtgagctggaccctcggagaacacgtgtctgctgctgagggagcacatacctgctgctgagggaatcagggtggttgtgagtaggagagtgagctggaccctcagggagcacatgcctgctgctgagggaatcgggatgggtgtgagtaggggagtgagctggttccctctgggagcaagtgcctgctgctgagagaatcagcagggttctgagtaggggagtgagctggtctcctcaggaagcacatgcctgctgctgagggaatcagggtggttttgagtaggggagtgagctggtcccctcaggaagcacatacctgctgctgaggcaatcagggtggttgtgagtaggagagtgagctggttcccttggggagcacatacctgctgccaagggaatcaggtgttctgggcagttcagagggtcccccttgcatattagtcacagattggccatggacgagtcacatgaccttcagtaagttgcttatttgtctagactttctggatgtcctagaaaggatgggtgtggcattactcttcatctggaagcaggtggagttactgttaggcatctcactctactcctttcttacaggaatcagtgatgctcctgttacaggcatggtaaggatgcccttcccagggcccggagagagaatgggagggtctcagacctgcccttgtgaggcagcactgcctggcgagcagagaggtgctcctgcactgtcccggtgggatcatggccttggaggtccaaagcctcttcctcacccatactgtctggctgatacctgggggagacaggttgcaccaggctcctgcttcctggaggtctgcccaggagctgcatgtgatcttgccctttctttcccctcttgccccaagagatgtcaccagtctgggccacagcagcttgggtgggctcaggagagctgtgccttggttttactgtggctgatggtcattcataccctggtcttattttagccattcctgatttgacaggtttctggtcagaattgctgtgaggaaaagaggaatccctcctccagcacgctgccaggcggtggtgttcagaacccttctgcagacaggaatttgctggacctcctctcagcacagccagctccgtgccctctgtgagtcttctgggcaaggggagtgggagagtgtggctcctgagtgcggttccttctcatgggacaagggccagagaatggtgctctaagacagcctctcgcccctgtctcaaaaaaagtttaatgtgctgcttcccttttctcattttacttcttttcctaagtcgtaggaaaatacctgctttggccaagacatctgaaaagaggtttatttaaggactaggagtagtagaacatgaggtttttgccgtttgtttttgttttcccttctaataaccatataattgaagttaagcaaaatttgatccatggagaaacatacaacaaagtgcaaagtgccactccctaaaaacaaggttgaacgttccttttttgctttttttgtatacatgtagtggtacattcctgtgtcttgttacacaaacaggattttaatttataaaccgcactccagcatgaccttttcatattatatctgtgatgcatttcatatcagtttctataaatatgcctcagtcttaatagctacattacaatttattgcatggatgtatttgatcatttcccttttttggacatttacataatttctggtttggaggtgcttgggggagtgccttatagtatagatccctgaagggagaggttctctaaggtgtgaatgtaacaacattttcatagatcctgtccctttgcctctggaaaagtgcagcttaccttcacccaaacagcctgaaagtgcccatgttcctgatagaaaccctgtctctaataaaaatacaaaaattagtcggacatggtggcaggtgcctgtaatcccagctactcgggaggctgagtcaggagaatcgcttgagcctgggaggcagaggttgcagtgagccgagactgttcgattgcactccagcctgggcaacagagcgagatactgtatc

SEQ ID NO: 8981 - protein, 173 aa, Homo sapiens [sequence omitted]

SEQ ID NO: 8982 - DNA, 574 bp, Homo sapiens
agtcagcagaggagagcgccaggacgctacagcggctgaagaggcagtggcgcccgcggccgcagcgtcggggctggagcgatggcggcgaccgcggtggcggcggctgtggcgggaaccgagtcggcccagggtcccccgggcccggcagcgtcgctggagctgtggctcaacaaagccacagacccaagcatgtcggaacaggattggtcagctatccagaatttctgtgagcaggtgaacactgaccccaatggccccacacatgcgccctggctactggcccacaagatccagtctccgcaagagaaggaagctctttatgccttaacgtgtcctcataggcttgaggcagggttagccttggttccagcgcagtctccagcaagtgattaccagcctggaggggagcctgggaccactggctttccaccttctcctgggggtcctgtgtctgtgcaggtgctggagatgtgcatgaaccactgtggggagaagttccacagcgaggtggccaaatttcgtttcctgaacgaactgatcaaagtgttgtccccaaaggtgagtacctggg

SEQ ID NO: 8983 - protein, 163 aa, Homo sapiens
MAATAVAAAVAGTESAQGPPGPAASLELWLNKATDPSMSEQDWSAIQNFCEQVNTDPNGPTHAPWLLAHKIQSPQEKEALYALTCPHRLEAGLALVPAQSPASDYQPGGEPGTTGFPPSPGGPVSVQVLEMCMNHCGEKFHSEVAKFRFLNELIKVLSPKVST

SEQ ID NO: 8984 - DNA, 1199 bp, Homo sapiens
agcgatggcggcgaccgcggtggcggcggctgtggcgggaaccgagtcggcccagggtcccccgggcccggcagcgtcgctggagctgtggctcaacaaagccacagacccaagcatgtcggaacaggattggtcagctatccagaatttctgtgagcaggtgaacactgaccccaatggccccacacatgcgccctggctactggcccacaagatccagtctccgcaagagaaggaagctctttatgccttaacggtgagtttggcttgccttgtagcctaacctttcctgtccttgtgctatagagagccgagaggcgctttgcttccacacagatccttttcactggagaagggaggtcccctgagaggtttaccttcacagcaggttggaggagggagatctgggccagggtccccacccttcttcctcctgtttctcgtctgtttcttcagggcagcattgagtctactgtgggagaaggaaaggaaggttttatttcatttgcccttcttagaccagggctggcaagttcatgtgccttttctagagagggcagttctagcacagggcccactagctgttggcaggtatgagtatgggctcagggttgctagtttaggtctttgtatatgtttgagtgtttagatgttggtgactaatttgcagtgttgaaagccacagtatggacgagaggaggggtctgcaggctcagcttgcctcttgagtgccagtgggtgacatccggctggtcttgggcactggataccagatctctgcctctggggaggggttggttctttagccactttctcctctcaaagggtctccttaaaaggtggggtgacctcagggtttgacatacctcactaagctatttcctgggcataaacctcaggcagttatagcaagattgaacaggggacatttttttcttgatctgaaaacgtcctcttcatcaaaacttcagtgtcctcataggcttgaggcagggttagccttggttccagcgcagtctccagcaagtgattaccagcctggaggggagcctgggaccactggctttccaccttctcctgggggtcctgtgtctgtgcaggtgctggagatgtgcatgaaccactgtggggagaagttccacagcgaggtggccaaatttcgtttcctgaacgaactgatcaaagtgttgtccccaaag

SEQ ID NO: 8985 - protein, 92 aa, Homo sapiens [sequence omitted]

SEQ ID NO: 8986 - DNA, 432 bp, Homo sapiens
agtcagcagaggagagcgccaggacgctacagcggctgaagaggcagtggcgcccgcggccgcagcgtcggggctggagcgatggcggcgaccgcggtggcggcggctgtggcgggaaccgagtcggcccagggtcccccgggcccggcagcgtcgctggagctgtggctcaacaaagccacagacccaagcatgtcggaacaggattggtcagctatccagaatttctgtgagcaggtgaacactgaccccaatggccccacacatgcgccctggctactggcccacaagatccagtctccgcaagagaaggaagctctttatgccttaacgcctggaggggagcctgggaccactggctttccaccttctcctgggggtcctgtgtctgtgcaggtgctggagatgtgcatgaaccactgtggggagaag

SEQ ID NO: 8987 - protein, 116 aa, Homo sapiens
MAATAVAAAVAGTESAQGPPGPAASLELWLNKATDPSMSEQDWSAIQNFCEQVNTDPNGPTHAPWLLAHKIQSPQEKEALYALTPGGEPGTTGFPPSPGGPVSVQVLEMCMNHCGE

SEQ ID NO: 8988 - DNA, 1342 bp, Homo sapiens
gcagaggagagcgccaggacgctacagcggctgaagaggcagtggcgcccgcggccgcagcgtcggggctggagcgatggcggcgaccgcggtggcggcggctgtggcgggaaccgagtcggcccagggtcccccgggcccggcagcgtcgctggagctgtggctcaacaaagccacagacccaagcatgtcggaacaggattggtcagctatccagaatttctgtgagcaggtgaacactgaccccaatgggtaaggtaacttctcacacacatagttgactctgggggcaccccacactgagtgtaggcctttgtctctcaagactgttttagggttaagctctctaggcaaggatcggtggctcatgcctataatcccaacagtttgggagaccaaggcaggaggattgcttgagcccaggagtttgagacctgcctgggtgacagagtgagagactctgtctcaaaaaaatagaaatgcagtcaggctggcattcattctctcattttcccctataatcctgagaacattatttttctaaaattagcaaattcatgtgggggaaaaaaaacacaggatagctcacttgcaactggcagttattaattttaaatactgttataaaacactaatgctgaggagaactctgaatgttactgatagactatagacacgttacctaattaaaagagatctgtgtattctccaccatttaaatgtaattttaagaaaaaggaaaaggggaaggttttattgaattctgtttccacagcatctggataggacctgaagaatcagaatcaagtgagtcatccagatgttttgtttttgttttgttttcttttcttttctttttttttttttcctgagacagagtgtctcaagactggagtgcaagggcacgatctcagctcactgcaacctccacctcccgggttcaagtggttctcctgcctcagcctcccaagtagctgggattacaggcgcgtgcctccatgcctggctaattttttgtatttttttagtagagatggggcttcaccatgttggccaggctggtctcgaactcctgacctcaggtgatccacctgccctgacctcccaaagtgctgggattacaggcgtgagccactgtgcctggcccatccagatgtttaatctgtgtggtgtcgcatatttggccagtttgaacccagagtttgatcgcactttctgctctagcatttcctaggtatttatcacagccatacagggcctgtgctgctgtggctactcatgggactgggctgggactggcagcttggagtttgggggctgggggttggctgaggggagggca

SEQ ID NO: 8989 - protein, 59 aa, Homo sapiens
MAATAVAAAVAGTESAQGPPGPAASLELWLNKATDPSMSEQDWSAIQNFCEQVNTDPNG

SEQ ID NO: 8990 - DNA, 383 bp, Homo sapiens
ctactaaaaacacaaaaaattagctaggtgtggtggcatgcacctcaggggttctgagggatgagtaggagtttcccaggtagatgggtgttggaaggctattccaaggagagggatgaaaaataaagcttcacaaagttgttcaggactggaccaagagtaggagtcaggggagaggtagaagtggctgctgagaaaccaggcagatgtgagatccaaataataaaacccagattcaatagaaaaaaattagctggggccggtggcaggcgcctgtagtcccagctacttgggaggctgaggcaggagaatggcgtgaacccgggaggcggagcttgcagtgagccgagatcccgccactgcactccagcctgggcgacaga

SEQ ID NO: 8991 - protein, 50 aa, Homo sapiens [sequence omitted]

SEQ ID NO: 8992 - DNA, 1909 bp, Homo sapiens
tgagcttagaaacagctttcagagaccagaaggaggcctggggcccgtcgggaatgaagaggaatagcaagtgaaaggaggatggtggcagggtacatgaacccctaccaggcttctaggcttcccctgcatggcagccagcctctaagttggcccccaaccatccctgccttcttctattcacacccttgtgtggttccttcccacattgaataggcctgacttgtgtaaccactacactattgaagaaatgagagtttgacttctgagggtaagtcataaaatacatcgtggcttctgtcttgttttctttgatcgcttactttgggggaagccagcttccaggtcatgaaaatactcaagcagccttatggagtgctccacatgacaagggatcgaggcctcccaccaatagccatgggagtgtgcaatcttgaaagctggtccttcaattccagccaagcattcacatgaccgcaatcctagctgatctcgcttgtgacctctatgggagaccctaagccagaaccactcagagaagctgctccggaacgtcagacacacatgaactgtgagatagtaaacgtttattgtttaaagctacttggtttggggataatttgcgtttcagcagtagacaatatatttattttgtccaggggagtggaaaggcgattacagagtttgttgagccccatagagtcctagtctttgcttaaagaaatataccagttctttctaatacagaatccattaagttcgttggttgcaaacaatagaaaccaactctgcctcacttatgtttattggaggccataagagagccacagcatctaccaaaaagccaaaaaaaaaacaggttttggaaaagacaggaactagctacaggagctaatggccaatcttgtctgagttctttgatggcgacacatgaactacagccgttttgttgttgttaatttctccgtgttttcccctcagttttggatgactctgctcaaggttcagattctgaggagcaagtatctgttgggctatctgaggtcctgctaccattccttggccagtaataggtagtttcacagggattatatgcaatggaggaaaagttgttctcaaggaaaactagggagctttctccagaagatgatgtaatggcagaaacaacaggtggttgaccacagaaggggacaataataatacttgtaatttattgtgcgcttatatgagcctcaccctctcccaggtgtcagataatgctcgtaaatgccttagtccatcatctcagtaaattttttttataacactatgagagaagcagtattttttttttctgttacagatatggaaaccgaggttctgaaaagttaactaaaacttccgaggttatagtacgaggcaaaaccaagatttaaactcagatctgtgccgatccagagtccaagcttaactctgatctactgagtgttgtcagagcatctgtttctaagacattaagaatggttaaaaggagcttcttggctcatggtcaagtgagtgtttttaacaaagtgagtggtcaaaatactaagtcgattctggtatatctacaacatggatgaacctctaggacttcatgctaaatgaaatgtcagtcacaaaaggacaaatacgtcctaatgctttgtgaggcaaaggtggtaggcttgtcaaaggccaggagtttggagaccagcctgggcaacatagtgagatcctgtctctacaaaaaatttaaaaattagccaggtgaggtgacatatgcctgtagtcccagctacttgggagactaaggtaggaggatcacttgagctgaggcgttaaggctgcagtgagctatgaatgcactactgcactctaacctgggcaacagagcaagatcctgtgtcta

SEQ ID NO: 8993 - protein, 66 aa, Homo sapiens [sequence omitted]

SEQ ID NO: 8994 - DNA, 4559 bp, Homo sapiens
gggagaagcccacgtgtgctattccatcccacatggcggcgctcctgaggagactgctgcagcgcgagaggccttcggcggcctctggccgccccgtaggacggcgcgaggccaacctgggcactgatgccggggttgcggtgcgagtgcggttcgctcccagccccacaggcttcttgcacctgggtggcctccgcactgccttgtacaactacatctttgctaagaagtaccaggggagcttcatcctgaggctagaggacacagatcagactcgcgttgtgcctggggcagcggagaatattgaggacatgctggagtgggcaggcatcccgcctgatgagagcccccgccggggcggtcctgctgggccctaccagcaatctcagcggttggagctgtatgcccaggccacagaagcgctgctgaagaccggagctgcttacccctgtttctgctcaccccagcggctggagctcctgaagaaggaggccttgcggaaccaccagacgccccggtatgacaatcggtgcaggaacatgagccaggagcaggtggcccagaagctggccaaggaccccaagcctgcgatccgcttccgcctggagcaggtggtgccagccttccaggacctggtctatggctggaataggcatgaagtggccagcgtggagggagacccagtcatcatgaagagcgacggcttccccacataccacctggcctgcgtggtggacgaccaccacatgggcatcagccacgtgctgcgaggctctgagtggctcgtctccactgccaagcacctgctcctctaccaggccctgggctggcagccaccccacttcgcccacctgcccctgctcctcaacagggatggcagcaagctctccaagaggcaaggggacgttttcctggagcactttgctgctgatggcttcctgcccgattccttgttggacatcatcaccaactgtggctcaggttttgcagagaaccaaatgggcaggaccctgccggagctgatcacacagttcaacctgacacaggtcacctgtcactcagccctgctggacctggagaagctcccagaattcaacagactgcacctccagcggctggtgagcaatgagagccagaggcgccagctggtggggaagctgcaggtccttgtggaggaggcctttggttgccagctgcaaaacagggatgtcctcaacccagtctacgtggagaggatcctcctgctgagacagggtcacatttgccgcctgcaggacttggtgtccccagtatactcttacctgtggactcgccctgcagtaggtcgagcacagctggacgccatctcggagaaggtggatgtgattgccaagcgtgtgctggggcttctagaaagatctagtatgagcttaactcaggatatgctgaatggagaactgaagaagctatcagaaggtctggaaggcaccaagtacagtaatgtgatgaaactccttcggatggccctcagtggacagcagcaaggacctcctgtagctgagatgatgttggccttgggaccaaaggaagtacgggaacggatccagaaggtggtttccagctagggagaggatgtttcgggcagtggagatcgccctaagaacctgtgagcttagaaacagctttcagagaccagaaggaggcctggggcccgtcgggaagtttgctgaaggaactaagagtggaaacaatctctgactgcacacaagtgcatttgtgatccaccacaggcacgtttttgtcaattggctggggaagcccaacccatctaacctcctggactctggaaaggcattctccgggtctggtttctcacacattacacagcagaggtttggagttagttcacagaaaagttaacatcccggaacagtgcagaaggcttgggtttcagtttgctagggcccccataacaaaatgccacagaaccaggtggtttaaacaacagagatttattttctcacatttggaggctagaagttcaagatcaaggtgtcagcaggcctggtttttcctagaggcctcttttgttggcttgcagacagctgtcttctcactgtgtccttgtgcggtcttccctccatgcacacacatctctaagtttcattatgtgcccaacgttcctcttctaagaacaccagttggactggattttaactttaaccagcctcatttaagttaatcacctctttaaatgctcaatctccaagtacagtctcattctgaggttccaggggtttctcaacgtaagaatttagggggacagaattcagcccgtagcagctgggcagcaggactcatgggtcccagttctcaggccccaaggactcagagcagcaaaggatacgtgacacaagcagggctgaactggacaccagactttctttggggttgtaaaaggagaagtgtgactccactgccaagggtaagcactcttgtcttatgctaccctttattcttgaaccttggggcagcctgtgtctcccttccctaaacgtcatctgttccgtttttccagtcttccagacctggtccttggactggagaccttcacccttcctattttgtggctttctcttcaaatccacctcgtccttcctccatgacttataagtcatcatctctgctggtttctgaaatgagatatgcttcttggggtcttcagtgaagaggaatagcaagtgaaaggaggatggtggcagggtacatgaacccctaccaggcttctaggcttcccctgcatggcagccagcctctaagttggcccccaaccatccctgccttcttctattcacacccttgtgtggttccttcccacattgaataggcctgacttgtgtaaccactacactattgaagaaatgagagtttgacttctgagggtaagtcataaaatacatcgtggcttctgtcttgttttctttgatcgcttactttgggggaagccagcttccaggtcatgaaaatactcaagcagccttatggagtgctccacatgacaagggatcgaggcctcccaccaatagccatgggagtgtgcaatcttgaaagctggtccttcaattccagccaagcattcacatgaccgcaatcctagctgatctcgcttgtgacctctatgggagaccctaagccagaaccactcagagaagctgctccggaacgtcagacacacatgaactgtgagatagtaaacgtttattgtttaaagctacttggtttggggataatttgcgtttcagcagtagacaatatatttattttgtccaggggagtggaaaggcgattacagagtttgttgagccccatagagtcctagtctttgcttaaagaaatataccagttctttctaatacagaatccattaagttcgttggttgcaaacaatagaaaccaactctgcctcacttatgtttattggaggccataagagagccacagcatctaccaaaaagccaaaaaaaaaacaggttttggaaaagacaggaactagctacaggagctaatggccaatcttgtctgagttctttgatggcgacacatgaactacagccgttttgttgttgttaatttctccgtgttttcccctcagttttggatgactctgctcaaggttcagattctgaggagcaagtatctgttgggctatctgaggtcctgctaccattccttggccagtaataggtagtttcacagggattatatgcaatggaggaaaagttgttctcaaggaaaactagggagctttctccagaagatgatgtaatggcagaaacaacaggtggttgaccacagaaggggacaataataatacttgtaatttattgtgcgcttatatgagcctcaccctctcccaggtgtcagataatgctcgtaaatgccttagtccatcatctcagtaaattttttttataacactatgagagaagcagtattttttttttctgttacagatatggaaaccgaggttctgaaaagttaactaaaacttccgaggttatagtacgaggcaaaaccaagatttaaactcagatctgtgccgatccagagtccaagcttaactctgatctactgagtgttgtcagagcatctgtttctaagacattaagaatggttaaaaggagcttcttggctcatggtcaagtgagtgtttttaacaaagtgagtggtcaaaatactaagtcgattctggtatatctacaacatggatgaacctctaggacttcatgctaaatgaaatgtcagtcacaaaaggacaaatacgtcctaatgctttgtgaggcaaaggtggtaggcttgtcaaaggccaggagtttggagaccagcctgggcaacatagtgagatcctgtctctacaaaaaatttaaaaattagccaggtgaggtgacatatgcctgtagtcccagctacttgggagactaaggtaggaggatcacttgagctgaggcgttaaggctgcagtgagctatgaatgcactactgcactctaacctgggcaacagagcaagatcctgtgtcta

SEQ ID NO: 8995 - protein, 523 aa, Homo sapiens
MAALLRRLLQRERPSAASGRPVGRREANLGTDAGVAVRVRFAPSPTGFLHLGGLRTALYNYIFAKKYQGSFILRLEDTDQTRVVPGAAENIEDMLEWAGIPPDESPRRGGPAGPYQQSQRLELYAQATEALLKTGAAYPCFCSPQRLELLKKEALRNHQTPRYDNRCRNMSQEQVAQKLAKDPKPAIRFRLEQVVPAFQDLVYGWNRHEVASVEGDPVIMKSDGFPTYHLACVVDDHHMGISHVLRGSEWLVSTAKHLLLYQALGWQPPHFAHLPLLLNRDGSKLSKRQGDVFLEHFAADGFLPDSLLDIITNCGSGFAENQMGRTLPELITQFNLTQVTCHSALLDLEKLPEFNRLHLQRLVSNESQRRQLVGKLQVLVEEAFGCQLQNRDVLNPVYVERILLLRQGHICRLQDLVSPVYSYLWTRPAVGRAQLDAISEKVDVIAKRVLGLLERSSMSLTQDMLNGELKKLSEGLEGTKYSNVMKLLRMALSGQQQGPPVAEMMLALGPKEVRERIQKVVSS

SEQ ID NO: 8996 - DNA, 4466 bp, Homo sapiens
gggagaagcccacgtgtgctattccatcccacatggcggcgctcctgaggagactgctgcagcgcgagaggccttcggcggcctctggccgccccgtaggacggcgcgaggccaacctgggcactgatgccggggttgcggtgcgagtgcggttcgctcccagccccacaggcttcttgcacctgggtggcctccgcactgccttgtacaactacatctttgctaagaagtaccaggggagcttcatcctgaggctagaggacacagatcagactcgcgttgtgcctggggcagcggagaatattgaggacatgctggagtgggcaggcatcccgcctgatgagagcccccgccggggcggtcctgctgggccctaccagcaatctcagcggttggagctgtatgcccaggccacagaagcgctgctgaagaccggagctgcttacccctgtttctgctcaccccagcggctggagctcctgaagaaggaggccttgcggaaccaccagacgccccggtatgacaatcggtgcaggaacatgagccaggagcaggtggcccagaagctggccaaggaccccaagcctgcgatccgcttccgcctggagcaggtggtgccagccttccaggacctggtctatggctggaataggcatgaagtggccagcgtggagggagacccagtcatcatgaagagcgacggcttccccacataccacctggcctgcgtggtggacgaccaccacatgggcatcagccacgtgctgcgaggctctgagtggctcgtctccactgccaagcacctgctcctctaccaggccctgggctggcagccaccccacttcgcccacctgcccctgctcctcaacagggatggcagcaagctctccaagaggcaaggggacgttttcctggagcactttgctgctgatggcttcctgcccgattccttgttggacatcatcaccaactgtggctcaggttttgcagagaaccaaatgggcaggaccctgccggagctgatcacacagttcaacctgacacaggtcacctgtcactcagccctgctggacctggagaagctcccagaattcaacagactgcacctccagcggctggtgagcaatgagagccagaggcgccagctggtggggaagctgcaggtccttgtggaggaggcctttggttgccagctgcaaaacagggatgtcctcaacccagtctacgtggagaggatcctcctgctgagacagggtcacatttgccgcctgcaggacttggtgtccccagtatactcttacctgtggactcgccctgcagtaggtcgagcacagctggacgccatctcggagaaggtggatgtgattgccaagcgtgtgctggggcttctagaaagatctagtatgagcttaactcaggatatgctgaatggagaactgaagaagctatcagaaggtctggaaggcaccaagtacagtaatgtgatgaaactccttcggatggccctcagtggacagcagcaaggacctcctgtagctgagatgatgttggccttgggaccaaaggaagtacgggaacggatccagaaggtggtttccagctagggagaggatgtttcgggcagtggagatcgccctaagaacctgtgagcttagaaacagctttcagagaccagaaggaggcctggggcccgtcgggaagtttgctgaaggaactaagagtggaaacaatctctgactgcacacaagtgcatttgtgatccaccacaggcacgtttttgtcaattggctggggaagcccaacccatctaacctcctggactctggaaaggcattctccgggtctggtttctcacacattacacagcagaggtttggagttagttcacagaaaagttaacatcccggaacagtgcagaaggcttgggtttcagtttgctagggcccccataacaaaatgccacagaaccaggtggtttaaacaacagagatttattttctcacatttggaggctagaagttcaagatcaaggtgtcagcaggcctggtttttcctagaggcctcttttgttggcttgcagacagctgtcttctcactgtgtccttgtgcggtcttccctccatgcacacacatctctaagtttcattatgtgcccaacgttcctcttctaagaacaccagttggactggattttaactttaaccagcctcatttaagttaatcacctctttaaatgctcaatctccaagtacagtctcattctgaggttccaggggtttctcaacgtaagaatttagggggacagaattcagcccgtagcagctgggcagcaggactcatgggtcccagttctcaggccccaaggactcagagcagcaaaggatacgtgacacaagcagggctgaactggacaccagactttctttggggttgtaaaaggagaagtgtgactccactgccaaggtcttccagacctggtccttggactggagaccttcacccttcctattttgtggctttctcttcaaatccacctcgtccttcctccatgacttataagtcatcatctctgctggtttctgaaatgagatatgcttcttggggtcttcagtgaagaggaatagcaagtgaaaggaggatggtggcagggtacatgaacccctaccaggcttctaggcttcccctgcatggcagccagcctctaagttggcccccaaccatccctgccttcttctattcacacccttgtgtggttccttcccacattgaataggcctgacttgtgtaaccactacactattgaagaaatgagagtttgacttctgagggtaagtcataaaatacatcgtggcttctgtcttgttttctttgatcgcttactttgggggaagccagcttccaggtcatgaaaatactcaagcagccttatggagtgctccacatgacaagggatcgaggcctcccaccaatagccatgggagtgtgcaatcttgaaagctggtccttcaattccagccaagcattcacatgaccgcaatcctagctgatctcgcttgtgacctctatgggagaccctaagccagaaccactcagagaagctgctccggaacgtcagacacacatgaactgtgagatagtaaacgtttattgtttaaagctacttggtttggggataatttgcgtttcagcagtagacaatatatttattttgtccaggggagtggaaaggcgattacagagtttgttgagccccatagagtcctagtctttgcttaaagaaatataccagttctttctaatacagaatccattaagttcgttggttgcaaacaatagaaaccaactctgcctcacttatgtttattggaggccataagagagccacagcatctaccaaaaagccaaaaaaaaaacaggttttggaaaagacaggaactagctacaggagctaatggccaatcttgtctgagttctttgatggcgacacatgaactacagccgttttgttgttgttaatttctccgtgttttcccctcagttttggatgactctgctcaaggttcagattctgaggagcaagtatctgttgggctatctgaggtcctgctaccattccttggccagtaataggtagtttcacagggattatatgcaatggaggaaaagttgttctcaaggaaaactagggagctttctccagaagatgatgtaatggcagaaacaacaggtggttgaccacagaaggggacaataataatacttgtaatttattgtgcgcttatatgagcctcaccctctcccaggtgtcagataatgctcgtaaatgccttagtccatcatctcagtaaattttttttataacactatgagagaagcagtattttttttttctgttacagatatggaaaccgaggttctgaaaagttaactaaaacttccgaggttatagtacgaggcaaaaccaagatttaaactcagatctgtgccgatccagagtccaagcttaactctgatctactgagtgttgtcagagcatctgtttctaagacattaagaatggttaaaaggagcttcttggctcatggtcaagtgagtgtttttaacaaagtgagtggtcaaaatactaagtcgattctggtatatctacaacatggatgaacctctaggacttcatgctaaatgaaatgtcagtcacaaaaggacaaatacgtcctaatgctttgtgaggcaaaggtggtaggcttgtcaaaggccaggagtttggagaccagcctgggcaacatagtgagatcctgtctctacaaaaaatttaaaaattagccaggtgaggtgacatatgcctgtagtcccagctacttgggagactaaggtaggaggatcacttgagctgaggcgttaaggctgcagtgagctatgaatgcactactgcactctaacctgggcaacagagcaagatcctgtgtcta

SEQ ID NO: 8997 - protein, 523 aa, Homo sapiens; identical to SEQ ID NO: 8995

SEQ ID NO: 8998 - DNA, 1309 bp, Homo sapiens
tgagcttagaaacagctttcagagaccagaaggaggcctggggcccgtcgggaatgaagaggaatagcaagtgaaaggaggatggtggcagggtacatgaacccctaccaggcttctaggcttcccctgcatggcagccagcctctaagttggcccccaaccatccctgccttcttctattcacacccttgtgtggttccttcccacattgaataggcctgacttgtgtaaccactacactattgaagaaatgagagtttgacttctgagggtaagtcataaaatacatcgtggcttctgtcttgttttctttgatcgcttactttgggggaagccagcttccaggtcatgaaaatactcaagcagccttatggagtgctccacatgacaagggatcgaggcctcccaccaatagccatgggagtgtgcaatcttgaaagctggtccttcaattccagccaagcattcacatgaccgcaatcctagctgatctcgcttgtgacctctatgggagaccctaagccagaaccactcagagaagctgctccggaacgtcagacacacatgaactgtgagatagtaaacgtttattgtttaaagctacttggtttggggataatttgcgtttcagcagtagacaatatatttattttgtccaggggagtggaaaggcgattacagagtttgttgagccccatagagtcctagtctttgcttaaagaaatataccagttctttctaatacagaatccattaagttcgttggttgcaaacaatagaaaccaactctgcctcacttatgtttattggaggccataagagagccacagcatctaccaaaaagccaaaaaaaaaacaggttttggaaaagacaggaactagctacaggagctaatggccaatcttgtctgagttctttgatggcgacacatgaactacagccgttttgttgttgttaatttctccgtgttttcccctcagttttggatgactctgctcaaggttcagattctgaggagcaagtatctgttgggctatctgaggtcctgctaccattccttggccagtaataggtagtttcacagggattatatgcaatggaggaaaagttgttctcaaggaaaactagggagctttctccagaagatgatgtaatggcagaaacaacaggtggttgaccacagaaggggacaataataatacttgtaatttattgtgcgcttatatgagcctcaccctctcccaggtgtcagataatgctcgtaaatgccttagtccatcatctcagtaaattttttttataacacta

SEQ ID NO: 8999 - protein, 66 aa, Homo sapiens [sequence omitted]

SEQ ID NO: 9000 - DNA, 3959 bp, Homo sapiens
gggagaagcccacgtgtgctattccatcccacatggcggcgctcctgaggagactgctgcagcgcgagaggccttcggcggcctctggccgccccgtaggacggcgcgaggccaacctgggcactgatgccggggttgcggtgcgagtgcggttcgctcccagccccacaggcttcttgcacctgggtggcctccgcactgccttgtacaactacatctttgctaagaagtaccaggggagcttcatcctgaggctagaggacacagatcagactcgcgttgtgcctggggcagcggagaatattgaggacatgctggagtgggcaggcatcccgcctgatgagagcccccgccggggcggtcctgctgggccctaccagcaatctcagcggttggagctgtatgcccaggccacagaagcgctgctgaagaccggagctgcttacccctgtttctgctcaccccagcggctggagctcctgaagaaggaggccttgcggaaccaccagacgccccggtatgacaatcggtgcaggaacatgagccaggagcaggtggcccagaagctggccaaggaccccaagcctgcgatccgcttccgcctggagcaggtggtgccagccttccaggacctggtctatggctggaataggcatgaagtggccagcgtggagggagacccagtcatcatgaagagcgacggcttccccacataccacctggcctgcgtggtggacgaccaccacatgggcatcagccacgtgctgcgaggctctgagtggctcgtctccactgccaagcacctgctcctctaccaggccctgggctggcagccaccccacttcgcccacctgcccctgctcctcaacagggatggcagcaagctctccaagaggcaaggggacgttttcctggagcactttgctgctgatggcttcctgcccgattccttgttggacatcatcaccaactgtggctcaggttttgcagagaaccaaatgggcaggaccctgccggagctgatcacacagttcaacctgacacaggtcacctgtcactcagccctgctggacctggagaagctcccagaattcaacagactgcacctccagcggctggtgagcaatgagagccagaggcgccagctggtggggaagctgcaggtccttgtggaggaggcctttggttgccagctgcaaaacagggatgtcctcaacccagtctacgtggagaggatcctcctgctgagacagggtcacatttgccgcctgcaggacttggtgtccccagtatactcttacctgtggactcgccctgcagtaggtcgagcacagctggacgccatctcggagaaggtggatgtgattgccaagcgtgtgctggggcttctagaaagatctagtatgagcttaactcaggatatgctgaatggagaactgaagaagctatcagaaggtctggaaggcaccaagtacagtaatgtgatgaaactccttcggatggccctcagtggacagcagcaaggacctcctgtagctgagatgatgttggccttgggaccaaaggaagtacgggaacggatccagaaggtggtttccagctagggagaggatgtttcgggcagtggagatcgccctaagaacctgtgagcttagaaacagctttcagagaccagaaggaggcctggggcccgtcgggaagtttgctgaaggaactaagagtggaaacaatctctgactgcacacaagtgcatttgtgatccaccacaggcacgtttttgtcaattggctggggaagcccaacccatctaacctcctggactctggaaaggcattctccgggtctggtttctcacacattacacagcagaggtttggagttagttcacagaaaagttaacatcccggaacagtgcagaaggcttgggtttcagtttgctagggcccccataacaaaatgccacagaaccaggtggtttaaacaacagagatttattttctcacatttggaggctagaagttcaagatcaaggtgtcagcaggcctggtttttcctagaggcctcttttgttggcttgcagacagctgtcttctcactgtgtccttgtgcggtcttccctccatgcacacacatctctaagtttcattatgtgcccaacgttcctcttctaagaacaccagttggactggattttaactttaaccagcctcatttaagttaatcacctctttaaatgctcaatctccaagtacagtctcattctgaggttccaggggtttctcaacgtaagaatttagggggacagaattcagcccgtagcagctgggcagcaggactcatgggtcccagttctcaggccccaaggactcagagcagcaaaggatacgtgacacaagcagggctgaactggacaccagactttctttggggttgtaaaaggagaagtgtgactccactgccaagggtaagcactcttgtcttatgctaccctttattcttgaaccttggggcagcctgtgtctcccttccctaaacgtcatctgttccgtttttccagtcttccagacctggtccttggactggagaccttcacccttcctattttgtggctttctcttcaaatccacctcgtccttcctccatgacttataagtcatcatctctgctggtttctgaaatgagatatgcttcttggggtcttcagtgaagaggaatagcaagtgaaaggaggatggtggcagggtacatgaacccctaccaggcttctaggcttcccctgcatggcagccagcctctaagttggcccccaaccatccctgccttcttctattcacacccttgtgtggttccttcccacattgaataggcctgacttgtgtaaccactacactattgaagaaatgagagtttgacttctgagggtaagtcataaaatacatcgtggcttctgtcttgttttctttgatcgcttactttgggggaagccagcttccaggtcatgaaaatactcaagcagccttatggagtgctccacatgacaagggatcgaggcctcccaccaatagccatgggagtgtgcaatcttgaaagctggtccttcaattccagccaagcattcacatgaccgcaatcctagctgatctcgcttgtgacctctatgggagaccctaagccagaaccactcagagaagctgctccggaacgtcagacacacatgaactgtgagatagtaaacgtttattgtttaaagctacttggtttggggataatttgcgtttcagcagtagacaatatatttattttgtccaggggagtggaaaggcgattacagagtttgttgagccccatagagtcctagtctttgcttaaagaaatataccagttctttctaatacagaatccattaagttcgttggttgcaaacaatagaaaccaactctgcctcacttatgtttattggaggccataagagagccacagcatctaccaaaaagccaaaaaaaaaacaggttttggaaaagacaggaactagctacaggagctaatggccaatcttgtctgagttctttgatggcgacacatgaactacagccgttttgttgttgttaatttctccgtgttttcccctcagttttggatgactctgctcaaggttcagattctgaggagcaagtatctgttgggctatctgaggtcctgctaccattccttggccagtaataggtagtttcacagggattatatgcaatggaggaaaagttgttctcaaggaaaactagggagctttctccagaagatgatgtaatggcagaaacaacaggtggttgaccacagaaggggacaataataatacttgtaatttattgtgcgcttatatgagcctcaccctctcccaggtgtcagataatgctcgtaaatgccttagtccatcatctcagtaaattttttttataacacta

SEQ ID NO: 9001 - protein, 523 aa, Homo sapiens; identical to SEQ ID NO: 8995

SEQ ID NO: 9002 - DNA, 3866 bp, Homo sapiens
gggagaagcccacgtgtgctattccatcccacatggcggcgctcctgaggagactgctgcagcgcgagaggccttcggcggcctctggccgccccgtaggacggcgcgaggccaacctgggcactgatgccggggttgcggtgcgagtgcggttcgctcccagccccacaggcttcttgcacctgggtggcctccgcactgccttgtacaactacatctttgctaagaagtaccaggggagcttcatcctgaggctagaggacacagatcagactcgcgttgtgcctggggcagcggagaatattgaggacatgctggagtgggcaggcatcccgcctgatgagagcccccgccggggcggtcctgctgggccctaccagcaatctcagcggttggagctgtatgcccaggccacagaagcgctgctgaagaccggagctgcttacccctgtttctgctcaccccagcggctggagctcctgaagaaggaggccttgcggaaccaccagacgccccggtatgacaatcggtgcaggaacatgagccaggagcaggtggcccagaagctggccaaggaccccaagcctgcgatccgcttccgcctggagcaggtggtgccagccttccaggacctggtctatggctggaataggcatgaagtggccagcgtggagggagacccagtcatcatgaagagcgacggcttccccacataccacctggcctgcgtggtggacgaccaccacatgggcatcagccacgtgctgcgaggctctgagtggctcgtctccactgccaagcacctgctcctctaccaggccctgggctggcagccaccccacttcgcccacctgcccctgctcctcaacagggatggcagcaagctctccaagaggcaaggggacgttttcctggagcactttgctgctgatggcttcctgcccgattccttgttggacatcatcaccaactgtggctcaggttttgcagagaaccaaatgggcaggaccctgccggagctgatcacacagttcaacctgacacaggtcacctgtcactcagccctgctggacctggagaagctcccagaattcaacagactgcacctccagcggctggtgagcaatgagagccagaggcgccagctggtggggaagctgcaggtccttgtggaggaggcctttggttgccagctgcaaaacagggatgtcctcaacccagtctacgtggagaggatcctcctgctgagacagggtcacatttgccgcctgcaggacttggtgtccccagtatactcttacctgtggactcgccctgcagtaggtcgagcacagctggacgccatctcggagaaggtggatgtgattgccaagcgtgtgctggggcttctagaaagatctagtatgagcttaactcaggatatgctgaatggagaactgaagaagctatcagaaggtctggaaggcaccaagtacagtaatgtgatgaaactccttcggatggccctcagtggacagcagcaaggacctcctgtagctgagatgatgttggccttgggaccaaaggaagtacgggaacggatccagaaggtggtttccagctagggagaggatgtttcgggcagtggagatcgccctaagaacctgtgagcttagaaacagctttcagagaccagaaggaggcctggggcccgtcgggaagtttgctgaaggaactaagagtggaaacaatctctgactgcacacaagtgcatttgtgatccaccacaggcacgtttttgtcaattggctggggaagcccaacccatctaacctcctggactctggaaaggcattctccgggtctggtttctcacacattacacagcagaggtttggagttagttcacagaaaagttaacatcccggaacagtgcagaaggcttgggtttcagtttgctagggcccccataacaaaatgccacagaaccaggtggtttaaacaacagagatttattttctcacatttggaggctagaagttcaagatcaaggtgtcagcaggcctggtttttcctagaggcctcttttgttggcttgcagacagctgtcttctcactgtgtccttgtgcggtcttccctccatgcacacacatctctaagtttcattatgtgcccaacgttcctcttctaagaacaccagttggactggattttaactttaaccagcctcatttaagttaatcacctctttaaatgctcaatctccaagtacagtctcattctgaggttccaggggtttctcaacgtaagaatttagggggacagaattcagcccgtagcagctgggcagcaggactcatgggtcccagttctcaggccccaaggactcagagcagcaaaggatacgtgacacaagcagggctgaactggacaccagactttctttggggttgtaaaaggagaagtgtgactccactgccaaggtcttccagacctggtccttggactggagaccttcacccttcctattttgtggctttctcttcaaatccacctcgtccttcctccatgacttataagtcatcatctctgctggtttctgaaatgagatatgcttcttggggtcttcagtgaagaggaatagcaagtgaaaggaggatggtggcagggtacatgaacccctaccaggcttctaggcttcccctgcatggcagccagcctctaagttggcccccaaccatccctgccttcttctattcacacccttgtgtggttccttcccacattgaataggcctgacttgtgtaaccactacactattgaagaaatgagagtttgacttctgagggtaagtcataaaatacatcgtggcttctgtcttgttttctttgatcgcttactttgggggaagccagcttccaggtcatgaaaatactcaagcagccttatggagtgctccacatgacaagggatcgaggcctcccaccaatagccatgggagtgtgcaatcttgaaagctggtccttcaattccagccaagcattcacatgaccgcaatcctagctgatctcgcttgtgacctctatgggagaccctaagccagaaccactcagagaagctgctccggaacgtcagacacacatgaactgtgagatagtaaacgtttattgtttaaagctacttggtttggggataatttgcgtttcagcagtagacaatatatttattttgtccaggggagtggaaaggcgattacagagtttgttgagccccatagagtcctagtctttgcttaaagaaatataccagttctttctaatacagaatccattaagttcgttggttgcaaacaatagaaaccaactctgcctcacttatgtttattggaggccataagagagccacagcatctaccaaaaagccaaaaaaaaaacaggttttggaaaagacaggaactagctacaggagctaatggccaatcttgtctgagttctttgatggcgacacatgaactacagccgttttgttgttgttaatttctccgtgttttcccctcagttttggatgactctgctcaaggttcagattctgaggagcaagtatctgttgggctatctgaggtcctgctaccattccttggccagtaataggtagtttcacagggattatatgcaatggaggaaaagttgttctcaaggaaaactagggagctttctccagaagatgatgtaatggcagaaacaacaggtggttgaccacagaaggggacaataataatacttgtaatttattgtgcgcttatatgagcctcaccctctcccaggtgtcagataatgctcgtaaatgccttagtccatcatctcagtaaattttttttataacacta

SEQ ID NO: 9003 - protein, 523 aa, Homo sapiens; identical to SEQ ID NO: 8995

SEQ ID NO: 9004 - DNA, 2957 bp, Homo sapiens
gggagaagcccacgtgtgctattccatcccacatggcggcgctcctgaggagactgctgcagcgcgagaggccttcggcggcctctggccgccccgtaggacggcgcgaggccaacctgggcactgatgccggggttgcggtgcgagtgcggttcgctcccagccccacaggcttcttgcacctgggtggcctccgcactgccttgtacaactacatctttgctaagaagtaccaggggagcttcatcctgaggctagaggacacagatcagactcgcgttgtgcctggggcagcggagaatattgaggacatgctggagtgggcaggcatcccgcctgatgagagcccccgccggggcggtcctgctgggccctaccagcaatctcagcggttggagctgtatgcccaggccacagaagcgctgctgaagaccggagctgcttacccctgtttctgctcaccccagcggctggagctcctgaagaaggaggccttgcggaaccaccagacgccccggtatgacaatcggtgcaggaacatgagccaggagcaggtggcccagaagctggccaaggaccccaagcctgcgatccgcttccgcctggagcaggtggtgccagccttccaggacctggtctatggctggaataggcatgaagtggccagcgtggagggagacccagtcatcatgaagagcgacggcttccccacataccacctggcctgcgtggtggacgaccaccacatgggcatcagccacgtgctgcgaggctctgagtggctcgtctccactgccaagcacctgctcctctaccaggccctgggctggcagccaccccacttcgcccacctgcccctgctcctcaacagggatggcagcaagctctccaagaggcaaggggacgttttcctggagcactttgctgctgatggcttcctgcccgattccttgttggacatcatcaccaactgtggctcaggttttgcagagaaccaaatgggcaggaccctgccggagctgatcacacagttcaacctgacacaggtcacctgtcactcagccctgctggacctggagaagctcccagaattcaacagactgcacctccagcggctggtgagcaatgagagccagaggcgccagctggtggggaagctgcaggtccttgtggaggaggcctttggttgccagctgcaaaacagggatgtcctcaacccagtctacgtggagaggatcctcctgctgagacagggtcacatttgccgcctgcaggacttggtgtccccagtatactcttacctgtggactcgccctgcagtaggtcgagcacagctggacgccatctcggagaaggtggatgtgattgccaagcgtgtgctggggcttctagaaagatctagtatgagcttaactcaggatatgctgaatggagaactgaagaagctatcagaaggtctggaaggcaccaagtacagtaatgtgatgaaactccttcggatggccctcagtggacagcagcaaggacctcctgtagctgagatgatgttggccttgggaccaaaggaagtacgggaacggatccagaaggtggtttccagctagggagaggatgtttcgggcagtggagatcgccctaagaacctgtgagcttagaaacagctttcagagaccagaaggaggcctggggcccgtcgggaagtttgctgaaggaactaagagtggaaacaatctctgactgcacacaagtgcatttgtgatccaccacaggcacgtttttgtcaattggctggggaagcccaacccatctaacctcctggactctggaaaggcattctccgggtctggtttctcacacattacacagcagaggtttggagttagttcacagaaaagttaacatcccggaacagtgcagaaggcttgggtttcagtttgctagggcccccataacaaaatgccacagaaccaggtggtttaaacaacagagatttattttctcacatttggaggctagaagttcaagatcaaggtgtcagcaggcctggtttttcctagaggcctcttttgttggcttgcagacagctgtcttctcactgtgtccttgtgcggtcttccctccatgcacacacatctctaagtttcattatgtgcccaacgttcctcttctaagaacaccagttggactggattttaactttaaccagcctcatttaagttaatcacctctttaaatgctcaatctccaagtacagtctcattctgaggttccaggggtttctcaacgtaagaatttagggggacagaattcagcccgtagcagctgggcagcaggactcatgggtcccagttctcaggccccaaggactcagagcagcaaaggatacgtgacacaagcagggctgaactggacaccagactttctttggggttgtaaaaggagaagtgtgactccactgccaagggtaagcactcttgtcttatgctaccctttattcttgaaccttggggcagcctgtgtctcccttccctaaacgtcatctgttccgtttttccagtcttccagacctggtccttggactggagaccttcacccttcctattttgtggctttctcttcaaatccacctcgtccttcctccatgacttataagtcatcatctctgctggtttctgaaatgagatatgcttcttggggtcttcagtgaagaggaatagcaagtgaaaggaggatggtggcagggtacatgaacccctaccaggcttctaggcttcccctgcatggcagccagcctctaagttggcccccaaccatccctgccttcttctattcacacccttgtgtggttccttcccacattgaataggcctgacttgtgtaaccactacactattgaagaaatgagagtttgacttctgagggtaagtcataaaatacatcgtggcttctgtcttgtt

SEQ ID NO: 9005 - protein, 523 aa, Homo sapiens; identical to SEQ ID NO: 8995

SEQ ID NO: 9006 - DNA, 1742 bp, Homo sapiens
gggagaagcccacgtgtgctattccatcccacatggcggcgctcctgaggagactgctgcagcgcgagaggccttcggcggcctctggccgccccgtaggacggcgcgaggccaacctgggcactgatgccggggttgcggtgcgagtgcggttcgctcccagccccacaggcttcttgcacctgggtggcctccgcactgccttgtacaactacatctttgctaagaagtaccaggggagcttcatcctgaggctagaggacacagatcagactcgcgttgtgcctggggcagcggagaatattgaggacatgctggagtgggcaggcatcccgcctgatgagagcccccgccggggcggtcctgctgggccctaccagcaatctcagcggttggagctgtatgcccaggccacagaagcgctgctgaagaccggagctgcttacccctgtttctgctcaccccagcggctggagctcctgaagaaggaggccttgcggaaccaccagacgccccggtatgacaatcggtgcaggaacatgagccaggagcaggtggcccagaagctggccaaggaccccaagcctgcgatccgcttccgcctggagcaggtggtgccagccttccaggacctggtctatggctggaataggcatgaagtggccagcgtggagggagacccagtcatcatgaagagcgacggcttccccacataccacctggcctgcgtggtggacgaccaccacatgggcatcagccacgtgctgcgaggctctgagtggctcgtctccactgccaagcacctgctcctctaccaggccctgggctggcagccaccccacttcgcccacctgcccctgctcctcaacagggatggcagcaagctctccaagaggcaaggggacgttttcctggagcactttgctgctgatggcttcctgcccgattccttgttggacatcatcaccaactgtggctcaggttttgcagagaaccaaatgggcaggaccctgccggagctgatcacacagttcaacctgacacaggtcacctgtcactcagccctgctggacctggagaagctcccagaattcaacagactgcacctccagcggctggtgagcaatgagagccagaggcgccagctggtggggaagctgcaggtccttgtggaggaggcctttggttgccagctgcaaaacagggatgtcctcaacccagtctacgtggagaggatcctcctgctgagacagggtcacatttgccgcctgcaggacttggtgtccccagtatactcttacctgtggactcgccctgcagtaggtcgagcacagctggacgccatctcggagaaggtggatgtgattgccaagcgtgtgctggggcttctagaaagatctagtatgagcttaactcaggatatgctgaatggagaactgaagaagctatcagaaggtctggaaggcaccaagtacagtaatgtgatgaaactccttcggatggccctcagtggacagcaggtgaggcagggacacgggttggattgttccctggagcccctcattgatcctttgaacttacatttcctggcaggcactgagctcaatattgagtatacaaaggtgaatgaaacatgatcactcccctcatttagtcaatcaacagacactattgagtacctactatgtgcaagcattgtgttaggtacagtgaatacaatatagaattaaacacacatacat

SEQ ID NO: 9007 - protein, 534 aa, Homo sapiens
MAALLRRLLQRERPSAASGRPVGRREANLGTDAGVAVRVRFAPSPTGFLHLGGLRTALYNYIFAKKYQGSFILRLEDTDQTRVVPGAAENIEDMLEWAGIPPDESPRRGGPAGPYQQSQRLELYAQATEALLKTGAAYPCFCSPQRLELLKKEALRNHQTPRYDNRCRNMSQEQVAQKLAKDPKPAIRFRLEQVVPAFQDLVYGWNRHEVASVEGDPVIMKSDGFPTYHLACVVDDHHMGISHVLRGSEWLVSTAKHLLLYQALGWQPPHFAHLPLLLNRDGSKLSKRQGDVFLEHFAADGFLPDSLLDIITNCGSGFAENQMGRTLPELITQFNLTQVTCHSALLDLEKLPEFNRLHLQRLVSNESQRRQLVGKLQVLVEEAFGCQLQNRDVLNPVYVERILLLRQGHICRLQDLVSPVYSYLWTRPAVGRAQLDAISEKVDVIAKRVLGLLERSSMSLTQDMLNGELKKLSEGLEGTKYSNVMKLLRMALSGQQVRQGHGLDCSLEPLIDPLNLHFLAGTELNIEYTKVNET

SEQ ID NO: 9008 - DNA, 742 bp, Homo sapiens
taagcattttgctattttcttgttagcaaggaagaagcgtggaatggctggtagataggcagacattagtgtctgctacaccatgttatctcagttttccacacaactgtaccatcatccctgttatagactgaggaagcagcttgcagcagtaactgacttgcttaaggtcacacagctatgacagaggtaggactcctgtccatcaacctttccatcaacagtactcatgctgctctgctccccatcaggtatgacaatcggtgcaggaacatgagccaggagcaggtggcccagaagctggccaaggaccccaagcctgcgatccgcttccgcctggagcaggtggtgccagccttccaggacctggtctatggctggaataggcatgaagtggccagcgtggagggagacccagtcatcatgaagagcgacggcttccccacataccacctggcctgcgtggtggacgaccaccacatgggcatcagccacgtgctgcgaggctctgagtggctcgtctccactgccaagcacctgctcctctaccaggccctgggctggcagccaccccacttcgcccacctgcccctgctcctcaacagggatggcagcaagctctccaagaggcaaggggacgttttcctggagcactttgctgctgatggcttcctgcccgattccttgttggacatcatcaccaactgtggctcaggttttgcagagaaccaaatgggcagga

SEQ ID NO: 9009 - protein, 186 aa, Homo sapiens
MTEVGLLSINLSINSTHAALLPIRYDNRCRNMSQEQVAQKLAKDPKPAIRFRLEQVVPAFQDLVYGWNRHEVASVEGDPVIMKSDGFPTYHLACVVDDHHMGISHVLRGSEWLVSTAKHLLLYQALGWQPPHFAHLPLLLNRDGSKLSKRQGDVFLEHFAADGFLPDSLLDIITNCGSGFAENQMG

SEQ ID NO: 9010 - DNA, 461 bp, Homo sapiens
gtgctattccatcccacatggcggcgctcctgaggagactgctgcagcgcgagaggccttcggcggcctctggccgccccgtaggacggcgcgaggccaacctgggcactgatgccggggttgcggtgcgagtgcggttcgctcccagccccacagagtctcactctactgctgcccaggctggagtgcagaggcgtgatcatggctcgctgcagcctcagcgtccccaggctcaggcttcttgcacctgggtggcctccgcactgccttgtacaactacatctttgctaagaagtaccaggggagcttcatcctgaggctagaggacacagatcagactcgcgttgtgcctggggcagcggagaatattgaggacatgctggagtgggcaggcatcccgcctgatgagagcccccgccggggcggtcctgctgggccctaccagcaatctcagcggttgg

SEQ ID NO: 9011 - protein, 99 aa, Homo sapiens
MAALLRRLLQRERPSAASGRPVGRREANLGTDAGVAVRVRFAPSPTESHSTAAQAGVQRRDHGSLQPQRPQAQASCTWVASALPCTTTSLLRSTRGASS

SEQ ID NO: 9012 - DNA, 559 bp, Homo sapiens
atcccacatggcggcgctcctgaggagactgctgcagcgcgagaggccttcggcggcctctggccgccccgtaggacggcgcgaggccaacctgggcactgatgccggggttgcggtgcgagtgcggttcgctcccagccccacaggtaaccctggcggacgtgacgctacaggccgaggccccctgtcccgtctccgccccacgaatgttcccgaatgaatcctttccggtggtgtcagagtgggcgggcggaggagggttaaggcagcgcgagcccattttacagaggcggaaactgaggtgcaggagcggaaataattcaaattgccaggagtttcttgtgttttttgtgccatcccatctctttcgatctttttttcatgcattccatacatgtgcattgatgacaacctgtgtaacaggtgttgtagacgctgggatacagtgatcattgagaaaggcttcttgcacctgggtggcctccgcactgccttgtacaactacatctttgctaagaagtaccaggggagcttcatcctgaggctagaggacacagat

SEQ ID NO: 9013 - protein, 54 aa, Homo sapiens
MCIDDNLCNRCCRRWDTVIIEKGFLHLGGLRTALYNYIFAKKYQGSFILRLEDT

SEQ ID NO: 9014 - DNA, 1392 bp, Homo sapiens
agatcgaaagagatgggatggcacaaaaaacacaagaaactcctggcaatttgaattatttccgctcctgcacctcagtttccgcctctgtaaaatgggctcgcgctgccttaaccctcctccgcccgcccactctgacaccaccggaaaggattcattcgggaacattcgtggggcggagacgggacagggggcctcggcctgtagcgtcacgtccgccagggttacctgtggggctgggagcgaaccgcactcgcaccgcaaccccggcatcagtgcccaggttggcctcgcgccgtcctacggggcggccagaggccgccgaaggcctctcgcgctgcagcagtctcctcaggagcgccgccatgtgggatggaatagcacacgtgggcttctccctgcgtcacttccggggactgcttccagccaatcggcctccgccacagccagcgcagccttgccccttaaagtcacaggccccctagcgcgaaatcccacgcccccctggacggctgcggccgcactcgccaccagggggcagaggccagagaaagggctatttcccggacccgcccccttcagcttgggaaagcgaaagcgtggcaggggccggacctgggagcggaggaggcgggtctccatagaaacctccacctgtttccggccgggctgtgagagattaggggctgctgcgggggccaatctcagccagctcgcctcttcccagcggcctctgcgggagcggtgggtgttgtacacaatcatcatggcggcggccggggccccggatggcatggaggaacctggcatggacacggaggccgagactgtggctactgaggctcccgcgcggcccgtcaactgcctggaggctgaagccgcggcgggggcggcggccgaggactccggcgccgcacgaggcagcctgcagccggccccggcccagccccctggggaccccgcagcccaggcctcggtcagcaacggcgaagacgcgggcggcggcgcgggcagggagctggtggacttgaagatcatctggaataagaccaagcatgacgtgaagttccccctggacagcacaggctccgagctgaaacagaagatccactcgattacaggtctcccgcctgccatgcagaaagtcatgtataagggactcgtccccgaggataaaacattgagagaaataaaagtgaccagtggggccaagatcatggtggttggctccaccatcaatgatgttttagcagtaaacacacccaaagatgctgcgcagcaggatgcaaaggccgaagagaacaagaaggagcctctctgcaggcagaaaggcccatgatggaaatttatggcagcagttgggtgccgcagagtggaggtgacaactacctg

SEQ ID NO: 9015 - protein, 414 aa, Homo sapiens
MGSRCLNPPPPAHSDTTGKDSFGNIRGAETGQGASACSVTSARVTCGAGSEPHSHRNPGISAQVGLAPSYGAARGRRRPLALQQSPQERRHVGWNSTRGLLPASLPGTASSQSASATASAALPLKVTGPLARNPTPPWTAAAALATRGQRPEKGLFPGPAPFSLGKRKRGRGRTWERRRRVSIETSTCFRPGCERLGAAAGANLSQLASSQRPLRERWVLYTIIMAAAGAPDGMEEPGMDTEAETVATEAPARPVNCLEAEAAAGAAAEDSGAARGSLQPAPAQPPGDPAAQASVSNGEDAGGGAGRELVDLKIIWNKTKHDVKFPLDSTGSELKQKIHSITGLPPAMQKVMYKGLVPEDKTLREIKVTSGAKIMVVGSTINDVLAVNTPKDAAQQDAKAEENKKEPLCRQKGP

SEQ ID NO: 9016 - DNA, 1562 bp, Homo sapiens
agatcgaaagagatgggatggcacaaaaaacacaagaaactcctggcaatttgaattatttccgctcctgcacctcagtttccgcctctgtaaaatgggctcgcgctgccttaaccctcctccgcccgcccactctgacaccaccggaaaggattcattcgggaacattcgtggggcggagacgggacagggggcctcggcctgtagcgtcacgtccgccagggttacctgtggggctgggagcgaaccgcactcgcaccgcaaccccggcatcagtgcccaggttggcctcgcgccgtcctacggggcggccagaggccgccgaaggcctctcgcgctgcagcagtctcctcaggagcgccgccatgtgggatggaatagcacacgtgggcttctccctgcgtcacttccggggactgcttccagccaatcggcctccgccacagccagcgcagccttgccccttaaagtcacaggccccctagcgcgaaatcccacgcccccctggacggctgcggccgcactcgccaccagggggcagaggccagagaaagggctatttcccggacccgcccccttcagcttgggaaagcgaaagcgtggcaggggccggacctgggagcggaggaggcgggtctccatagaaacctccacctgtttccggccgggctgtgagagattaggggctgctgcgggggccaatctcagccagctcgcctcttcccagcggcctctgcgggagcggtgggtgttgtacacaatcatcatggcggcggccggggccccggatggcatggaggaacctggcatggacacggaggccgagactgtggctactgaggctcccgcgcggcccgtcaactgcctggaggctgaagccgcggcgggggcggcggccgaggactccggcgccgcacgaggcagcctgcagccggccccggcccagccccctggggaccccgcagcccaggcctcggtcagcaacggcgaagacgcgggcggcggcgcgggcagggagctggtggacttgaagatcatctggaataagaccaagcatgacgtgaagttccccctggacagcacaggctccgagctgaaacagaagatccactcgattacaggtctcccgcctgccatgcagaaagtcatgtataagggactcgtccccgaggataaaacattgagagaaataaaagtgaccagtggggccaagatcatggtggttggctccaccatcaatgatgttttagcagtaaacacacccaaagatgctgcgcagcaggatgcaaaggccgaagagaacaagaaggagcctctctgcaggcagaaacaacacaggaaagtgttggataaaggaaaacctgaagatgtgatgccatctgttaagggggcccaggagcgcctgccaacggtaccgctgtccggcatgtacaataaatctggaggaaaagtgagactcacctttaaactagaacaagaccagctgtggattggcactaaagattcctggagggaaccgaacatgcctaaatcacctgtttctgaccagcactgtaggtatt

SEQ ID NO: 9017 - protein, 488 aa, Homo sapiens
MGSRCLNPPPPAHSDTTGKDSFGNIRGAETGQGASACSVTSARVTCGAGSEPHSHRNPGISAQVGLAPSYGAARGRRRPLALQQSPQERRHVGWNSTRGLLPASLPGTASSQSASATASAALPLKVTGPLARNPTPPWTAAAALATRGQRPEKGLFPGPAPFSLGKRKRGRGRTWERRRRVSIETSTCFRPGCERLGAAAGANLSQLASSQRPLRERWVLYTIIMAAAGAPDGMEEPGMDTEAETVATEAPARPVNCLEAEAAAGAAAEDSGAARGSLQPAPAQPPGDPAAQASVSNGEDAGGGAGRELVDLKIIWNKTKHDVKFPLDSTGSELKQKIHSITGLPPAMQKVMYKGLVPEDKTLREIKVTSGAKIMVVGSTINDVLAVNTPKDAAQQDAKAEENKKEPLCRQKQHRKVLDKGKPEDVMPSVKGAQERLPTVPLSGMYNKSGGKVRLTFKLEQDQLWIGTKDSWREPNMPKSPVSDQHCR

SEQ ID NO: 9018 - DNA, 1964 bp, Homo sapiens
agatcgaaagagatgggatggcacaaaaaacacaagaaactcctggcaatttgaattatttccgctcctgcacctcagtttccgcctctgtaaaatgggctcgcgctgccttaaccctcctccgcccgcccactctgacaccaccggaaaggattcattcgggaacattcgtggggcggagacgggacagggggcctcggcctgtagcgtcacgtccgccagggttacctgtggggctgggagcgaaccgcactcgcaccgcaaccccggcatcagtgcccaggttggcctcgcgccgtcctacggggcggccagaggccgccgaaggcctctcgcgctgcagcagtctcctcaggagcgccgccatgtgggatggaatagcacacgtgggcttctccctgcgtcacttccggggactgcttccagccaatcggcctccgccacagccagcgcagccttgccccttaaagtcacaggccccctagcgcgaaatcccacgcccccctggacggctgcggccgcactcgccaccagggggcagaggccagagaaagggctatttcccggacccgcccccttcagcttgggaaagcgaaagcgtggcaggggccggacctgggagcggaggaggcgggtctccatagaaacctccacctgtttccggccgggctgtgagagattaggggctgctgcgggggccaatctcagccagctcgcctcttcccagcggcctctgcgggagcggtgggtgttgtacacaatcatcatggcggcggccggggccccggatggcatggaggaacctggcatggacacggaggccgagactgtggctactgaggctcccgcgcggcccgtcaactgcctggaggctgaagccgcggcgggggcggcggccgaggactccggcgccgcacgaggcagcctgcagccggccccggcccagccccctggggaccccgcagcccaggcctcggtcagcaacggcgaagacgcgggcggcggcgcgggcagggagctggtggacttgaagatcatctggaataagaccaagcatgacgtgaagttccccctggacagcacaggctccgagctgaaacagaagatccactcgattacaggtctcccgcctgccatgcagaaagtcatgtataagggactcgtccccgaggataaaacattgagagaaataaaagtgaccagtggggccaagatcatggtggttggctccaccatcaatgatgttttagcagtaaacacacccaaagatgctgcgcagcaggatgcaaaggccgaagagaacaagaaggagcctctctgcaggcagaaacaacacaggaaagtgttggataaaggaaaacctgaagatgtgatgccatctgttaagggggcccaggagcgcctgccaacggtaccgctgtccggcatgtacaataaatctggaggaaaagtgagactcacctttaaactagaacaagaccagctgtggattggcactaaagagcggactgagaaattgcccatgggctccataaaaaatgtggtcagtgaacctatcgaaggacatgaagactaccacatgatggcgtttcagttgggccccacggaagcctcttactactgggtgtactgggttccaactcaatatgtggatgcaatcaaagacactgtgctggggaaatggcagtatttttgaaagcactttcacctctggcccaggagactgacccaaagtgaaggacattgccgggagaggcctgcagcatccctggatttcagagttctggaactttgttcataaaaaatctatattcaatctgaggtgatgtggtgactgaagccagaggtgatgtactttcaccattagcttaattttaacttaaaattaccagttccctttcttgcagtcagcttcataccatttttaaagtcaatacgatggaaatcaataaatctgaattccg

SEQ ID NO: 9019 - protein, 533 aa, Homo sapiens
MGSRCLNPPPPAHSDTTGKDSFGNIRGAETGQGASACSVTSARVTCGAGSEPHSHRNPGISAQVGLAPSYGAARGRRRPLALQQSPQERRHVGWNSTRGLLPASLPGTASSQSASATASAALPLKVTGPLARNPTPPWTAAAALATRGQRPEKGLFPGPAPFSLGKRKRGRGRTWERRRRVSIETSTCFRPGCERLGAAAGANLSQLASSQRPLRERWVLYTIIMAAAGAPDGMEEPGMDTEAETVATEAPARPVNCLEAEAAAGAAAEDSGAARGSLQPAPAQPPGDPAAQASVSNGEDAGGGAGRELVDLKIIWNKTKHDVKFPLDSTGSELKQKIHSITGLPPAMQKVMYKGLVPEDKTLREIKVTSGAKIMVVGSTINDVLAVNTPKDAAQQDAKAEENKKEPLCRQKQHRKVLDKGKPEDVMPSVKGAQERLPTVPLSGMYNKSGGKVRLTFKLEQDQLWIGTKERTEKLPMGSIKNVVSEPIEGHEDYHMMAFQLGPTEASYYWVYWVPTQYVDAIKDTVLGKWQYF

SEQ ID NO: 9020 - DNA, 4606 bp, Homo sapiens
agatcgaaagagatgggatggcacaaaaaacacaagaaactcctggcaatttgaattatttccgctcctgcacctcagtttccgcctctgtaaaatgggctcgcgctgccttaaccctcctccgcccgcccactctgacaccaccggaaaggattcattcgggaacattcgtggggcggagacgggacagggggcctcggcctgtagcgtcacgtccgccagggttacctgtggggctgggagcgaaccgcactcgcaccgcaaccccggcatcagtgcccaggttggcctcgcgccgtcctacggggcggccagaggccgccgaaggcctctcgcgctgcagcagtctcctcaggagcgccgccatgtgggatggaatagcacacgtgggcttctccctgcgtcacttccggggactgcttccagccaatcggcctccgccacagccagcgcagccttgccccttaaagtcacaggccccctagcgcgaaatcccacgcccccctggacggctgcggccgcactcgccaccagggggcagaggccagagaaagggctatttcccggacccgcccccttcagcttgggaaagcgaaagcgtggcaggggccggacctgggagcggaggaggcgggtctccatagaaacctccacctgtttccggccgggctgtgagagattaggggctgctgcgggggccaatctcagccagctcgcctcttcccagcggcctctgcgggagcggtgggtgttgtacacaatcatcatggcggcggccggggccccggatggcatggaggaacctggcatggacacggaggccgagactgtggctactgaggctcccgcgcggcccgtcaactgcctggaggctgaagccgcggcgggggcggcggccgaggactccggcgccgcacgaggcagcctgcagccggccccggcccagccccctggggaccccgcagcccaggcctcggtcagcaacggcgaagacgcgggcggcggcgcgggcagggagctggtggacttgaagatcatctggaataagaccaagcatgacgtgaagttccccctggacagcacaggctccgagctgaaacagaagatccactcgattacaggtctcccgcctgccatgcagaaagtcatgtataagggactcgtccccgaggataaaacattgagagaaataaaagtgaccagtggggccaagatcatggtggttggctccaccatcaatgatgtgttttttttttccttttttgtataaaattgtatgcaaaatgggggtgggttagtaagccacatatttctgtccattgattcagatttaattctttccctttttcattctctcgcttcctcaatttgagtttttgttttaagaacccaaagatgtcagttcttcttttggtacctcatcaacgcttcctttcctgggctccctcccgccgtgctgctgctgcctgtgaacgcacggtgggagaggaagagctgctcagtcttgggcaaggagctctcacacttgctgtggtgttcgttgagcagcagagtatctcccagtgactcctgtttaaatgtcttgccctttgggcccccatctccaaggagttccattgctggttggatgattgtctgcacccctcactgagcttggcctagaggcccagcctggcatggttgtgcctgggctgtgccgctcaacagccccagctcccaagcagacaaagacctcttccaggaggagccaggtagaagatagttatacagccatatagctgcagatccagataaccttctttctttggaagttttcaagaaattcttaagcagtccaaggatgatttcaattatgcttctccattgggtccttctgctcatgcattcagttcaagtgtcctttatcccaggttcagagatgctgcctttctgaagaagacatctgaccctagcaggttggccagtgttattgaacaacaaaaatgggataaattgctttcatgattagctcaccttcttctggttttagcccttctgttctctgtacacgtgaacttctgtcatctccttctggcttggttgcctctgaaaggagggaaagtctcttggtaaattatctcttttgtgctgtttgctgtttctctgctgccgtctttgcagttctcctctcactggttgcaggctttcatagtaaggtttggcgagaaatgttccaaacatcacattttggattctaggctgtcacccctcattctgtgaaacgtattagcatgtgttcgcccaagatgactattccttgtgagccagttaatgatgatattctacgcccttcccttctaagctgtagttcaggaatccagcccacatagacagactcttgctttccatggtgtagtcaatgccaagtgatgcatctaggcaggaaaatctactctttgcttttttgggggcaattagtacatttgtgaagtgcagcatccaagaaacagcctgttttttcatcccttgagaaaggagcagtcattgcagcttttctgtccttgtcggcctgcagttcctggggaaaagagtacatctgagctacttgtccaagcctctgtctgcaggtgacaggttttgggggaaatgagatgcattaagtagaacatcatctcgggtcagacattgccccttttgtttgccaatgccccagtcctagagacttgtcctgacagtgccgcacacctacttttgatctctcagagcaggtggctccatccccagactagcctggctgctctccgaggcccctccacctgctccccttattgccccattcttgtggcttgccgggccacttggcctcccttcttgccggtgacagcgttccatcatctccccgctccccaagggccaactgcttctcactcaggctggtgtcatttcaggaggaccaaagcctgcgtgagcctttttattttcagtaaaatggtgcttttttccttacttcgagatactatatataaataataatgtaaatgacaccttttcgtacggagctgtttgagtattgctttacagagctcactaaatcagcttcaacaatcttgagctctgtggctcctcaccctgtctgcatggaagaccttgctggacgctctcgggagagcagacatagcaccagaagccactgggagaagtgttttcgatccgtgtctgggccacagtagtattcactgtttagtctttgagttccgtaagcagtctcttcatacatttcttacagtctggagtgtactgactaaatctgtgtaagcaaattgaaatactctttcttttaggtagcgtcacagtggttttttttttcctcaggataatttctatacaatttccttactgtcagagggaccagatctttccctcactgtggcaggggccgtgcaggtggataaaggaagagctggtttccggagagtgactgtaacagcgttgactcgaagctagagatggagggggtggccgtctcttagacattggacacctctcagagcctcctgagggcttctttgtcttctagaatctctaccggtggtcctcctgcaggttctggctcacagacatcatcatgcctttttttccctccctgaggcgccttggcagaagagcgtgaccctgtgagccaggccccccttagctctgcttcagatcacagaacacagacagactcgcgagttgctggacctctttggtattaagtgtttgaatccatggtgggccttttgcaagtagcgttagctctttttaaatgttgaactgagctaaggatgcactttcttgtggacatagaaggggcccacgtaaggccctgagtaggctccttagttgctgctttacctgatgagggccaaagagattaactctgcctcgttgccatgtctcagaaaagttgccatatttcacccagaaggggcttgttttcctcttactcttactttaaccatgtgcctggaggagccattctgggctcttgcacttgcccagcctttctttgccaggggcagagaagggaaagggggtagattgagtgtgccaagggccgtgcaagggcaggcttgctttccacccatctgctgagggagccctctcctctcgctccttgcctctgttcacacctgttgtcttggaagaggatggtccctttgtcttaaggctttgtgataaagtcatctccagttaggatctgcacctgtttccttcgtaatagtgcctggcggcctttctgaagttacaggtggttgggagccctctcgcatgcagaacatctggtagattgatctgccaggctgggtggttctactgctttctcaatttctaagaaccttttttttttcttaaagagttctgctgaattatttgacaatatttgtaagtaccatgtttccttgtggtgtatgctctgttctggtttctgttttcaaatcaaatgcctgtttgggaggagatgaacgtatttagtctattagatttgcactgctggattttttttttaaagtgtaaccttgaatagctgtcttattgtttatcctgtaagattagtcaatcgattaaagtttgataattaattgcg

SEQ ID NO: 9021 - protein, 391 aa, Homo sapiens
MGSRCLNPPPPAHSDTTGKDSFGNIRGAETGQGASACSVTSARVTCGAGSEPHSHRNPGISAQVGLAPSYGAARGRRRPLALQQSPQERRHVGWNSTRGLLPASLPGTASSQSASATASAALPLKVTGPLARNPTPPWTAAAALATRGQRPEKGLFPGPAPFSLGKRKRGRGRTWERRRRVSIETSTCFRPGCERLGAAAGANLSQLASSQRPLRERWVLYTIIMAAAGAPDGMEEPGMDTEAETVATEAPARPVNCLEAEAAAGAAAEDSGAARGSLQPAPAQPPGDPAAQASVSNGEDAGGGAGRELVDLKIIWNKTKHDVKFPLDSTGSELKQKIHSITGLPPAMQKVMYKGLVPEDKTLREIKVTSGAKIMVVGSTINDVFFFSFFV

SEQ ID NO: 9022 - DNA, 5500 bp, Homo sapiens
agatcgaaagagatgggatggcacaaaaaacacaagaaactcctggcaatttgaattatttccgctcctgcacctcagtttccgcctctgtaaaatgggctcgcgctgccttaaccctcctccgcccgcccactctgacaccaccggaaaggattcattcgggaacattcgtggggcggagacgggacagggggcctcggcctgtagcgtcacgtccgccagggttacctgtggggctgggagcgaaccgcactcgcaccgcaaccccggcatcagtgcccaggttggcctcgcgccgtcctacggggcggccagaggccgccgaaggcctctcgcgctgcagcagtctcctcaggagcgccgccatgtgggatggaatagcacacgtgggcttctccctgcgtcacttccggggactgcttccagccaatcggcctccgccacagccagcgcagccttgccccttaaagtcacaggccccctagcgcgaaatcccacgcccccctggacggctgcggccgcactcgccaccagggggcagaggccagagaaagggctatttcccggacccgcccccttcagcttgggaaagcgaaagcgtggcaggggccggacctgggagcggaggaggcgggtctccatagaaacctccacctgtttccggccgggctgtgagagattaggggctgctgcgggggccaatctcagccagctcgcctcttcccagcggcctctgcgggagcggtgggtgttgtacacaatcatcatggcggcggccggggccccggatggcatggaggaacctggcatggacacggaggccgagactgtggctactgaggctcccgcgcggcccgtcaactgcctggaggctgaagccgcggcgggggcggcggccgaggactccggcgccgcacgaggcagcctgcagccggccccggcccagccccctggggaccccgcagcccaggcctcggtcagcaacggcgaagacgcgggcggcggcgcgggcagggagctggtggacttgaagatcatctggaataagaccaagcatgacgtgaagttccccctggacagcacaggctccgagctgaaacagaagatccactcgattacaggtctcccgcctgccatgcagaaagtcatgtataagggactcgtccccgaggataaaacattgagagaaataaaagtgaccagtggggccaagatcatggtggttggctccaccatcaatgatgttttagcagtaaacacacccaaagatgctgcgcagcaggatgcaaaggccgaagagaacaagaaggagcctctctgcaggcagaaacaacacaggaaagtgttggataaaggaaaacctgaagatgtgatgccatctgttaagggggcccaggagcgcctgccaacggtaccgctgtccggcatgtacaataaatctggaggaaaagtgagactcacctttaaactagaacaagaccagctgtggattggcactaaagagcggactgagaaattgcccatgggctccataaaaaatgtggtcagtgaacctatcgaaggacatgaagactaccacatgatggcgtttcagttgggccccacggaagcctcttactactgggtgtactgggttccaactcaatatgtggatgcaatcaaagacactgtgctggggaaatggcagtatttttgaaagcactttcacctctggcccaggagactgacccaaagtgaaggacattgccgggagaggcctgcagcatccctggatttcagagttctggaactttgttcataaaaaatctatattcaatctgaggtgatgtggtgactgaagccagaggtgatgtactttcaccattagcttaattttaacttaaaattaccagttccctttcttgcagtcagcttcataccatttttaaagtcaatacgatggaaatcaataaatctgaattccgaacatgttgtgtggaatactcttaagtgtgtttgagagtagatctgccaattatgttgacaagggaatgatcaaaagctttgttttttttaaaaaaaaaaaaagcagtttcaattgaaatattttcatacatctttggttgcaaacatttggactgcattgcaatgagttggggtgttttttttttccttttttgtataaaattgtatgcaaaatgggggtgggttagtaagccacatatttctgtccattgattcagatttaattctttccctttttcattctctcgcttcctcaatttgagtttttgttttaagaacccaaagatgtcagttcttcttttggtacctcatcaacgcttcctttcctgggctccctcccgccgtgctgctgctgcctgtgaacgcacggtgggagaggaagagctgctcagtcttgggcaaggagctctcacacttgctgtggtgttcgttgagcagcagagtatctcccagtgactcctgtttaaatgtcttgccctttgggcccccatctccaaggagttccattgctggttggatgattgtctgcacccctcactgagcttggcctagaggcccagcctggcatggttgtgcctgggctgtgccgctcaacagccccagctcccaagcagacaaagacctcttccaggaggagccaggtagaagatagttatacagccatatagctgcagatccagataaccttctttctttggaagttttcaagaaattcttaagcagtccaaggatgatttcaattatgcttctccattgggtccttctgctcatgcattcagttcaagtgtcctttatcccaggttcagagatgctgcctttctgaagaagacatctgaccctagcaggttggccagtgttattgaacaacaaaaatgggataaattgctttcatgattagctcaccttcttctggttttagcccttctgttctctgtacacgtgaacttctgtcatctccttctggcttggttgcctctgaaaggagggaaagtctcttggtaaattatctcttttgtgctgtttgctgtttctctgctgccgtctttgcagttctcctctcactggttgcaggctttcatagtaaggtttggcgagaaatgttccaaacatcacattttggattctaggctgtcacccctcattctgtgaaacgtattagcatgtgttcgcccaagatgactattccttgtgagccagttaatgatgatattctacgcccttcccttctaagctgtagttcaggaatccagcccacatagacagactcttgctttccatggtgtagtcaatgccaagtgatgcatctaggcaggaaaatctactctttgcttttttgggggcaattagtacatttgtgaagtgcagcatccaagaaacagcctgttttttcatcccttgagaaaggagcagtcattgcagcttttctgtccttgtcggcctgcagttcctggggaaaagagtacatctgagctacttgtccaagcctctgtctgcaggtgacaggttttgggggaaatgagatgcattaagtagaacatcatctcgggtcagacattgccccttttgtttgccaatgccccagtcctagagacttgtcctgacagtgccgcacacctacttttgatctctcagagcaggtggctccatccccagactagcctggctgctctccgaggcccctccacctgctccccttattgccccattcttgtggcttgccgggccacttggcctcccttcttgccggtgacagcgttccatcatctccccgctccccaagggccaactgcttctcactcaggctggtgtcatttcaggaggaccaaagcctgcgtgagcctttttattttcagtaaaatggtgcttttttccttacttcgagatactatatataaataataatgtaaatgacaccttttcgtacggagctgtttgagtattgctttacagagctcactaaatcagcttcaacaatcttgagctctgtggctcctcaccctgtctgcatggaagaccttgctggacgctctcgggagagcagacatagcaccagaagccactgggagaagtgttttcgatccgtgtctgggccacagtagtattcactgtttagtctttgagttccgtaagcagtctcttcatacatttcttacagtctggagtgtactgactaaatctgtgtaagcaaattgaaatactctttcttttaggtagcgtcacagtggttttttttttcctcaggataatttctatacaatttccttactgtcagagggaccagatctttccctcactgtggcaggggccgtgcaggtggataaaggaagagctggtttccggagagtgactgtaacagcgttgactcgaagctagagatggagggggtggccgtctcttagacattggacacctctcagagcctcctgagggcttctttgtcttctagaatctctaccggtggtcctcctgcaggttctggctcacagacatcatcatgcctttttttccctccctgaggcgccttggcagaagagcgtgaccctgtgagccaggccccccttagctctgcttcagatcacagaacacagacagactcgcgagttgctggacctctttggtattaagtgtttgaatccatggtgggccttttgcaagtagcgttagctctttttaaatgttgaactgagctaaggatgcactttcttgtggacatagaaggggcccacgtaaggccctgagtaggctccttagttgctgctttacctgatgagggccaaagagattaactctgcctcgttgccatgtctcagaaaagttgccatatttcacccagaaggggcttgttttcctcttactcttactttaaccatgtgcctggaggagccattctgggctcttgcacttgcccagcctttctttgccaggggcagagaagggaaagggggtagattgagtgtgccaagggccgtgcaagggcaggcttgctttccacccatctgctgagggagccctctcctctcgctccttgcctctgttcacacctgttgtcttggaagaggatggtccctttgtcttaaggctttgtgataaagtcatctccagttaggatctgcacctgtttccttcgtaatagtgcctggcggcctttctgaagttacaggtggttgggagccctctcgcatgcagaacatctggtagattgatctgccaggctgggtggttctactgctttctcaatttctaagaaccttttttttttcttaaagagttctgctgaattatttgacaatatttgtaagtaccatgtttccttgtggtgtatgctctgttctggtttctgttttcaaatcaaatgcctgtttgggaggagatgaacgtatttagtctattagatttgcactgctggattttttttttaaagtgtaaccttgaatagctgtcttattgtttatcctgtaagattagtcaatcgattaaagtttgataattaattgcg

SEQ ID NO: 9023 - protein, 533 aa, Homo sapiens; identical to SEQ ID NO: 9019

SEQ ID NO: 9024 - DNA, 4065 bp, Homo sapiens
gtacacaatcatcatggcggcggccggggccccggatggcatggaggaacctgccaacggtaccgctgtccggcatgtacaataaatctggaggaaaagtgagactcacctttaaactagaacaagaccagctgtggattggcactaaaggcgtttcagttgggccccacggaagcctcttactactgggtgtactgggttccaactcaatatgtggatgcaatcaaagacactgtgctggggaaatggcagtatttttgaaagcactttcacctctggcccaggagactgacccaaagtgaaggacattgccgggagaggcctgcagcatccctggatttcagagttctggaactttgttcataaaaaatctatattcaatctgaggtgatgtggtgactgaagccagaggtgatgtactttcaccattagcttaattttaacttaaaattaccagttccctttcttgcagtcagcttcataccatttttaaagtcaatacgatggaaatcaataaatctgaattccgaacatgttgtgtggaatactcttaagtgtgtttgagagtagatctgccaattatgttgacaagggaatgatcaaaagctttgttttttttaaaaaaaaaaaaagcagtttcaattgaaatattttcatacatctttggttgcaaacatttggactgcattgcaatgagttggggtgttttttttttccttttttgtataaaattgtatgcaaaatgggggtgggttagtaagccacatatttctgtccattgattcagatttaattctttccctttttcattctctcgcttcctcaatttgagtttttgttttaagaacccaaagatgtcagttcttcttttggtacctcatcaacgcttcctttcctgggctccctcccgccgtgctgctgctgcctgtgaacgcacggtgggagaggaagagctgctcagtcttgggcaaggagctctcacacttgctgtggtgttcgttgagcagcagagtatctcccagtgactcctgtttaaatgtcttgccctttgggcccccatctccaaggagttccattgctggttggatgattgtctgcacccctcactgagcttggcctagaggcccagcctggcatggttgtgcctgggctgtgccgctcaacagccccagctcccaagcagacaaagacctcttccaggaggagccaggtagaagatagttatacagccatatagctgcagatccagataaccttctttctttggaagttttcaagaaattcttaagcagtccaaggatgatttcaattatgcttctccattgggtccttctgctcatgcattcagttcaagtgtcctttatcccaggttcagagatgctgcctttctgaagaagacatctgaccctagcaggttggccagtgttattgaacaacaaaaatgggataaattgctttcatgattagctcaccttcttctggttttagcccttctgttctctgtacacgtgaacttctgtcatctccttctggcttggttgcctctgaaaggagggaaagtctcttggtaaattatctcttttgtgctgtttgctgtttctctgctgccgtctttgcagttctcctctcactggttgcaggctttcatagtaaggtttggcgagaaatgttccaaacatcacattttggattctaggctgtcacccctcattctgtgaaacgtattagcatgtgttcgcccaagatgactattccttgtgagccagttaatgatgatattctacgcccttcccttctaagctgtagttcaggaatccagcccacatagacagactcttgctttccatggtgtagtcaatgccaagtgatgcatctaggcaggaaaatctactctttgcttttttgggggcaattagtacatttgtgaagtgcagcatccaagaaacagcctgttttttcatcccttgagaaaggagcagtcattgcagcttttctgtccttgtcggcctgcagttcctggggaaaagagtacatctgagctacttgtccaagcctctgtctgcaggtgacaggttttgggggaaatgagatgcattaagtagaacatcatctcgggtcagacattgccccttttgtttgccaatgccccagtcctagagacttgtcctgacagtgccgcacacctacttttgatctctcagagcaggtggctccatccccagactagcctggctgctctccgaggcccctccacctgctccccttattgccccattcttgtggcttgccgggccacttggcctcccttcttgccggtgacagcgttccatcatctccccgctccccaagggccaactgcttctcactcaggctggtgtcatttcaggaggaccaaagcctgcgtgagcctttttattttcagtaaaatggtgcttttttccttacttcgagatactatatataaataataatgtaaatgacaccttttcgtacggagctgtttgagtattgctttacagagctcactaaatcagcttcaacaatcttgagctctgtggctcctcaccctgtctgcatggaagaccttgctggacgctctcgggagagcagacatagcaccagaagccactgggagaagtgttttcgatccgtgtctgggccacagtagtattcactgtttagtctttgagttccgtaagcagtctcttcatacatttcttacagtctggagtgtactgactaaatctgtgtaagcaaattgaaatactctttcttttaggtagcgtcacagtggttttttttttcctcaggataatttctatacaatttccttactgtcagagggaccagatctttccctcactgtggcaggggccgtgcaggtggataaaggaagagctggtttccggagagtgactgtaacagcgttgactcgaagctagagatggagggggtggccgtctcttagacattggacacctctcagagcctcctgagggcttctttgtcttctagaatctctaccggtggtcctcctgcaggttctggctcacagacatcatcatgcctttttttccctccctgaggcgccttggcagaagagcgtgaccctgtgagccaggccccccttagctctgcttcagatcacagaacacagacagactcgcgagttgctggacctctttggtattaagtgtttgaatccatggtgggccttttgcaagtagcgttagctctttttaaatgttgaactgagctaaggatgcactttcttgtggacatagaaggggcccacgtaaggccctgagtaggctccttagttgctgctttacctgatgagggccaaagagattaactctgcctcgttgccatgtctcagaaaagttgccatatttcacccagaaggggcttgttttcctcttactcttactttaaccatgtgcctggaggagccattctgggctcttgcacttgcccagcctttctttgccaggggcagagaagggaaagggggtagattgagtgtgccaagggccgtgcaagggcaggcttgctttccacccatctgctgagggagccctctcctctcgctccttgcctctgttcacacctgttgtcttggaagaggatggtccctttgtcttaaggctttgtgataaagtcatctccagttaggatctgcacctgtttccttcgtaatagtgcctggcggcctttctgaagttacaggtggttgggagccctctcgcatgcagaacatctggtagattgatctgccaggctgggtggttctactgctttctcaatttctaagaaccttttttttttcttaaagagttctgctgaattatttgacaatatttgtaagtaccatgtttccttgtggtgtatgctctgttctggtttctgttttcaaatcaaatgcctgtttgggaggagatgaacgtatttagtctattagatttgcactgctggattttttttttaaagtgtaaccttgaatagctgtcttattgtttatcctgtaagattagtcaatcgattaaagtttgataattaattgcg

SEQ ID NO: 9025 - protein, 88 aa, Homo sapiens
MAWRNLPTVPLSGMYNKSGGKVRLTFKLEQDQLWIGTKGVSVGPHGSLLLLGVLGSNSICGCNQRHCAGEMAVFLKALSPLAQETDPK

SEQ ID NO: 9026 - DNA, 3358 bp, Homo sapiens
acaatcatcatggcggcggccggggccccggatggcatggaggaacctggcatggacaatatttctgtccattgattcagatttaattctttccctttttcattctctcgcttcctcaatttgagtttttgttttaagaacccaaagatgtcagttcttcttttggtacctcatcaacgcttcctttcctgggctccctcccgccgtgctgctgctgcctgtgaacgcacggtgggagaggaagagctgctcagtcttgggcaaggagctctcacacttgctgtggtgttcgttgagcagcagagtatctcccagtgactcctgtttaaatgtcttgccctttgggcccccatctccaaggagttccattgctggttggatgattgtctgcacccctcactgagcttggcctagaggcccagcctggcatggttgtgcctgggctgtgccgctcaacagccccagctcccaagcagacaaagacctcttccaggaggagccaggtagaagatagttatacagccatatagctgcagatccagataaccttctttctttggaagttttcaagaaattcttaagcagtccaaggatgatttcaattatgcttctccattgggtccttctgctcatgcattcagttcaagtgtcctttatcccaggttcagagatgctgcctttctgaagaagacatctgaccctagcaggttggccagtgttattgaacaacaaaaatgggataaattgctttcatgattagctcaccttcttctggttttagcccttctgttctctgtacacgtgaacttctgtcatctccttctggcttggttgcctctgaaaggagggaaagtctcttggtaaattatctcttttgtgctgtttgctgtttctctgctgccgtctttgcagttctcctctcactggttgcaggctttcatagtaaggtttggcgagaaatgttccaaacatcacattttggattctaggctgtcacccctcattctgtgaaacgtattagcatgtgttcgcccaagatgactattccttgtgagccagttaatgatgatattctacgcccttcccttctaagctgtagttcaggaatccagcccacatagacagactcttgctttccatggtgtagtcaatgccaagtgatgcatctaggcaggaaaatctactctttgcttttttgggggcaattagtacatttgtgaagtgcagcatccaagaaacagcctgttttttcatcccttgagaaaggagcagtcattgcagcttttctgtccttgtcggcctgcagttcctggggaaaagagtacatctgagctacttgtccaagcctctgtctgcaggtgacaggttttgggggaaatgagatgcattaagtagaacatcatctcgggtcagacattgccccttttgtttgccaatgccccagtcctagagacttgtcctgacagtgccgcacacctacttttgatctctcagagcaggtggctccatccccagactagcctggctgctctccgaggcccctccacctgctccccttattgccccattcttgtggcttgccgggccacttggcctcccttcttgccggtgacagcgttccatcatctccccgctccccaagggccaactgcttctcactcaggctggtgtcatttcaggaggaccaaagcctgcgtgagcctttttattttcagtaaaatggtgcttttttccttacttcgagatactatatataaataataatgtaaatgacaccttttcgtacggagctgtttgagtattgctttacagagctcactaaatcagcttcaacaatcttgagctctgtggctcctcaccctgtctgcatggaagaccttgctggacgctctcgggagagcagacatagcaccagaagccactgggagaagtgttttcgatccgtgtctgggccacagtagtattcactgtttagtctttgagttccgtaagcagtctcttcatacatttcttacagtctggagtgtactgactaaatctgtgtaagcaaattgaaatactctttcttttaggtagcgtcacagtggttttttttttcctcaggataatttctatacaatttccttactgtcagagggaccagatctttccctcactgtggcaggggccgtgcaggtggataaaggaagagctggtttccggagagtgactgtaacagcgttgactcgaagctagagatggagggggtggccgtctcttagacattggacacctctcagagcctcctgagggcttctttgtcttctagaatctctaccggtggtcctcctgcaggttctggctcacagacatcatcatgcctttttttccctccctgaggcgccttggcagaagagcgtgaccctgtgagccaggccccccttagctctgcttcagatcacagaacacagacagactcgcgagttgctggacctctttggtattaagtgtttgaatccatggtgggccttttgcaagtagcgttagctctttttaaatgttgaactgagctaaggatgcactttcttgtggacatagaaggggcccacgtaaggccctgagtaggctccttagttgctgctttacctgatgagggccaaagagattaactctgcctcgttgccatgtctcagaaaagttgccatatttcacccagaaggggcttgttttcctcttactcttactttaaccatgtgcctggaggagccattctgggctcttgcacttgcccagcctttctttgccaggggcagagaagggaaagggggtagattgagtgtgccaagggccgtgcaagggcaggcttgctttccacccatctgctgagggagccctctcctctcgctccttgcctctgttcacacctgttgtcttggaagaggatggtccctttgtcttaaggctttgtgataaagtcatctccagttaggatctgcacctgtttccttcgtaatagtgcctggcggcctttctgaagttacaggtggttgggagccctctcgcatgcagaacatctggtagattgatctgccaggctgggtggttctactgctttctcaatttctaagaaccttttttttttcttaaagagttctgctgaattatttgacaatatttgtaagtaccatgtttccttgtggtgtatgctctgttctggtttctgttttcaaatcaaatgcctgtttgggaggagatgaacgtatttagtctattagatttgcactgctggattttttttttaaagtgtaaccttgaatagctgtcttattgtttatcctgtaagattagtcaatcgattaaagtttgataattaattgcg

SEQ ID NO: 9027 - protein, 30 aa, Homo sapiens
MAWRNLAWTIFLSIDSDLILSLFHSLASSI

SEQ ID NO: 9028 - DNA, 577 bp, Homo sapiens
ggtgagtgcggcgggggtggcgggcgccgggccggggctgaggttgcggtcgctcctctgggggatgcggcccggcccgggagggagaaccgcggctcgggaacggaggtccggcggcgcccggacagcgtccgttcccaagcccagcccgcggcgagcgcccaccccctaacccccttgcaggcatggaggaacctggcatggacacggaggccgagactgtggctactgaggctcccgcgcggcccgtcaactgcctggaggctgaagccgcggcgggggcggcggccgaggactccggcgccgcacgaggcagcctgcagccggccccggcccagccccctggggaccccgcagcccaggcctcggtcagcaacggcgaagacgcgggcggcggcgcgggcagggagctggtggacttgaagatcatctggaataagaccaagcatgacgtgaagttccccctggacagcacaggctccgagctgaaacagaagatccactcgattacaggtctcccgcctgccatgcagaaagtcatgtataagggactcgtccccgaggataaaacattgag

SEQ ID NO: 9029 - protein, 129 aa, Homo sapiens
MEEPGMDTEAETVATEAPARPVNCLEAEAAAGAAAEDSGAARGSLQPAPAQPPGDPAAQASVSNGEDAGGGAGRELVDLKIIWNKTKHDVKFPLDSTGSELKQKIHSITGLPPAMQKVMYKGLVPEDKT

SEQ ID NO: 9030 - DNA, 749 bp, Homo sapiens
ggccttgaacttttttttttttttaaagctttctacatgtagccttgtaatctccattaagaacaggagttttgtccctattggcttctgtagctctgatgcctgtggattctcacttaatatgtgaatgatttagatgactgaggaacaacttggaaagaatgagagctagtacttactgaacaattattcaatgctagccaccgtactaaatgccccgcattggtctcttaatccttgaaacaggtctgtacagaaggacttactctaataaatcttctacagttctagaaactgaggttcagaggttgtaaatctcccaagttcacaaagctaataggtggtggaggcagtattcactttttggtctgttaccaaagagctgtgtagtatccatacatttttctgtccttccttcctttcactgtccaccttctaccttttcccaaggtctcccgcctgccatgcagaaagtcatgtataagggactcgtccccgaggataaaacattgagagaaataaaagtgaccagtggggccaagatcatggtggttggctccaccatcaatgatgttttagcagtaaacacacccaaagatgctgcgcagcaggatgcaaaggccgaagagaacaagaaggagcctctctgcaggcagaaaggcccatgatggaaatttatggcagcagttgggtgccgcagagtggaggtgacaactacctgagatttgcaactttgtctcatctggcgg

SEQ ID NO: 9031 - protein, 67 aa, Homo sapiens
MQKVMYKGLVPEDKTLREIKVTSGAKIMVVGSTINDVLAVNTPKDAAQQDAKAEENKKEPLCRQKGP

SEQ ID NO: 9032 - DNA, 999 bp, Homo sapiens
gaggggaggagggcaatctggaaatcccgtttgctgtagaactttgatatctaatatggtagctatccacatgtggctggttaaaatgaaattaagaattcagttcctcagtcatagtagctgcatttcaagtgtgtaatagtcacagcagtaggtagtggctagcacaggtacgaacatattcgccctcccagaaagttctgctggacagcactgtgctatagtttcaaaggatccatagtctgtcgtcattaaaagcttttgagccaaaacactaaggctttcttcatcctctctttcaagggaatagtaacacgacgaaatgtagtcagctgtttcatttcattctctcttctgacttatagcaacacaggaaagtgttggataaaggaaaacctgaagatgtgatgccatctgttaagggggcccaggagcgcctgccaacggtaccgctgtccggcatgtacaataaatctggaggaaaagtgagactcacctttaaactagaacaagaccagctgtggattggcactaaagagcggactgagaaattgcccatgggctccataaaaaatgtggtcagtgaacctatcgaaggacatgaagactaccacatgatggcgtttcagttgggccccacggaagcctcttactactgggtgtactgggttccaactcaatatgtggatgcaatcaaagacactgtgctggggaaatggcagtatttttgaaagcactttcacctctggcccaggagactgacccaaagtgaaggacattgccgggagaggcctgcagcatccctggatttcagagttctggaactttgttcataaaaaatctatattcaatctgaggtgatgtggtgactgaagccagaggtgatgtactttcaccattagcttaattttaacttaaaattaccagttccctttcttgcagtcagcttcataccatttttaaagtcaatacgatggaaatcaataaatctgaattccg

SEQ ID NO: 9033 - protein, 107 aa, Homo sapiens
MPSVKGAQERLPTVPLSGMYNKSGGKVRLTFKLEQDQLWIGTKERTEKLPMGSIKNVVSEPIEGHEDYHMMAFQLGPTEASYYWVYWVPTQYVDAIKDTVLGKWQYF

SEQ ID NO: 9034 - DNA, 4535 bp, Homo sapiens
gaggggaggagggcaatctggaaatcccgtttgctgtagaactttgatatctaatatggtagctatccacatgtggctggttaaaatgaaattaagaattcagttcctcagtcatagtagctgcatttcaagtgtgtaatagtcacagcagtaggtagtggctagcacaggtacgaacatattcgccctcccagaaagttctgctggacagcactgtgctatagtttcaaaggatccatagtctgtcgtcattaaaagcttttgagccaaaacactaaggctttcttcatcctctctttcaagggaatagtaacacgacgaaatgtagtcagctgtttcatttcattctctcttctgacttatagcaacacaggaaagtgttggataaaggaaaacctgaagatgtgatgccatctgttaagggggcccaggagcgcctgccaacggtaccgctgtccggcatgtacaataaatctggaggaaaagtgagactcacctttaaactagaacaagaccagctgtggattggcactaaagagcggactgagaaattgcccatgggctccataaaaaatgtggtcagtgaacctatcgaaggacatgaagactaccacatgatggcgtttcagttgggccccacggaagcctcttactactgggtgtactgggttccaactcaatatgtggatgcaatcaaagacactgtgctggggaaatggcagtatttttgaaagcactttcacctctggcccaggagactgacccaaagtgaaggacattgccgggagaggcctgcagcatccctggatttcagagttctggaactttgttcataaaaaatctatattcaatctgaggtgatgtggtgactgaagccagaggtgatgtactttcaccattagcttaattttaacttaaaattaccagttccctttcttgcagtcagcttcataccatttttaaagtcaatacgatggaaatcaataaatctgaattccgaacatgttgtgtggaatactcttaagtgtgtttgagagtagatctgccaattatgttgacaagggaatgatcaaaagctttgttttttttaaaaaaaaaaaaagcagtttcaattgaaatattttcatacatctttggttgcaaacatttggactgcattgcaatgagttggggtgttttttttttccttttttgtataaaattgtatgcaaaatgggggtgggttagtaagccacatatttctgtccattgattcagatttaattctttccctttttcattctctcgcttcctcaatttgagtttttgttttaagaacccaaagatgtcagttcttcttttggtacctcatcaacgcttcctttcctgggctccctcccgccgtgctgctgctgcctgtgaacgcacggtgggagaggaagagctgctcagtcttgggcaaggagctctcacacttgctgtggtgttcgttgagcagcagagtatctcccagtgactcctgtttaaatgtcttgccctttgggcccccatctccaaggagttccattgctggttggatgattgtctgcacccctcactgagcttggcctagaggcccagcctggcatggttgtgcctgggctgtgccgctcaacagccccagctcccaagcagacaaagacctcttccaggaggagccaggtagaagatagttatacagccatatagctgcagatccagataaccttctttctttggaagttttcaagaaattcttaagcagtccaaggatgatttcaattatgcttctccattgggtccttctgctcatgcattcagttcaagtgtcctttatcccaggttcagagatgctgcctttctgaagaagacatctgaccctagcaggttggccagtgttattgaacaacaaaaatgggataaattgctttcatgattagctcaccttcttctggttttagcccttctgttctctgtacacgtgaacttctgtcatctccttctggcttggttgcctctgaaaggagggaaagtctcttggtaaattatctcttttgtgctgtttgctgtttctctgctgccgtctttgcagttctcctctcactggttgcaggctttcatagtaaggtttggcgagaaatgttccaaacatcacattttggattctaggctgtcacccctcattctgtgaaacgtattagcatgtgttcgcccaagatgactattccttgtgagccagttaatgatgatattctacgcccttcccttctaagctgtagttcaggaatccagcccacatagacagactcttgctttccatggtgtagtcaatgccaagtgatgcatctaggcaggaaaatctactctttgcttttttgggggcaattagtacatttgtgaagtgcagcatccaagaaacagcctgttttttcatcccttgagaaaggagcagtcattgcagcttttctgtccttgtcggcctgcagttcctggggaaaagagtacatctgagctacttgtccaagcctctgtctgcaggtgacaggttttgggggaaatgagatgcattaagtagaacatcatctcgggtcagacattgccccttttgtttgccaatgccccagtcctagagacttgtcctgacagtgccgcacacctacttttgatctctcagagcaggtggctccatccccagactagcctggctgctctccgaggcccctccacctgctccccttattgccccattcttgtggcttgccgggccacttggcctcccttcttgccggtgacagcgttccatcatctccccgctccccaagggccaactgcttctcactcaggctggtgtcatttcaggaggaccaaagcctgcgtgagcctttttattttcagtaaaatggtgcttttttccttacttcgagatactatatataaataataatgtaaatgacaccttttcgtacggagctgtttgagtattgctttacagagctcactaaatcagcttcaacaatcttgagctctgtggctcctcaccctgtctgcatggaagaccttgctggacgctctcgggagagcagacatagcaccagaagccactgggagaagtgttttcgatccgtgtctgggccacagtagtattcactgtttagtctttgagttccgtaagcagtctcttcatacatttcttacagtctggagtgtactgactaaatctgtgtaagcaaattgaaatactctttcttttaggtagcgtcacagtggttttttttttcctcaggataatttctatacaatttccttactgtcagagggaccagatctttccctcactgtggcaggggccgtgcaggtggataaaggaagagctggtttccggagagtgactgtaacagcgttgactcgaagctagagatggagggggtggccgtctcttagacattggacacctctcagagcctcctgagggcttctttgtcttctagaatctctaccggtggtcctcctgcaggttctggctcacagacatcatcatgcctttttttccctccctgaggcgccttggcagaagagcgtgaccctgtgagccaggccccccttagctctgcttcagatcacagaacacagacagactcgcgagttgctggacctctttggtattaagtgtttgaatccatggtgggccttttgcaagtagcgttagctctttttaaatgttgaactgagctaaggatgcactttcttgtggacatagaaggggcccacgtaaggccctgagtaggctccttagttgctgctttacctgatgagggccaaagagattaactctgcctcgttgccatgtctcagaaaagttgccatatttcacccagaaggggcttgttttcctcttactcttactttaaccatgtgcctggaggagccattctgggctcttgcacttgcccagcctttctttgccaggggcagagaagggaaagggggtagattgagtgtgccaagggccgtgcaagggcaggcttgctttccacccatctgctgagggagccctctcctctcgctccttgcctctgttcacacctgttgtcttggaagaggatggtccctttgtcttaaggctttgtgataaagtcatctccagttaggatctgcacctgtttccttcgtaatagtgcctggcggcctttctgaagttacaggtggttgggagccctctcgcatgcagaacatctggtagattgatctgccaggctgggtggttctactgctttctcaatttctaagaaccttttttttttcttaaagagttctgctgaattatttgacaatatttgtaagtaccatgtttccttgtggtgtatgctctgttctggtttctgttttcaaatcaaatgcctgtttgggaggagatgaacgtatttagtctattagatttgcactgctggattttttttttaaagtgtaaccttgaatagctgtcttattgtttatcctgtaagattagtcaatcgattaaagtttgataattaattgcg

SEQ ID NO: 9035 - protein, 107 aa, Homo sapiens; identical to SEQ ID NO: 9033

SEQ ID NO: 9036 - DNA, 4077 bp, Homo sapiens
ggcatgtacaataaatctggaggaaaagtgagactcacctttaaactagaacaagaccagctgtggattggcactaaagagcggactgagaaattgcccatgggctccataaaaaatgtggtcagtgaacctatcgaaggacatgaagactaccacatgatggcgtttcagttgggccccacggaagcctcttactactgggtgtactgggttccaactcaatatgtggatgcaatcaaagacactgtgctggggaaatggcagtatttttgaaagcactttcacctctggcccaggagactgacccaaagtgaaggacattgccgggagaggcctgcagcatccctggatttcagagttctggaactttgttcataaaaaatctatattcaatctgaggtgatgtggtgactgaagccagaggtgatgtactttcaccattagcttaattttaacttaaaattaccagttccctttcttgcagtcagcttcataccatttttaaagtcaatacgatggaaatcaataaatctgaattccgaacatgttgtgtggaatactcttaagtgtgtttgagagtagatctgccaattatgttgacaagggaatgatcaaaagctttgttttttttaaaaaaaaaaaaagcagtttcaattgaaatattttcatacatctttggttgcaaacatttggactgcattgcaatgagttggggtgttttttttttccttttttgtataaaattgtatgcaaaatgggggtgggttagtaagccacatatttctgtccattgattcagatttaattctttccctttttcattctctcgcttcctcaatttgagtttttgttttaagaacccaaagatgtcagttcttcttttggtacctcatcaacgcttcctttcctgggctccctcccgccgtgctgctgctgcctgtgaacgcacggtgggagaggaagagctgctcagtcttgggcaaggagctctcacacttgctgtggtgttcgttgagcagcagagtatctcccagtgactcctgtttaaatgtcttgccctttgggcccccatctccaaggagttccattgctggttggatgattgtctgcacccctcactgagcttggcctagaggcccagcctggcatggttgtgcctgggctgtgccgctcaacagccccagctcccaagcagacaaagacctcttccaggaggagccaggtagaagatagttatacagccatatagctgcagatccagataaccttctttctttggaagttttcaagaaattcttaagcagtccaaggatgatttcaattatgcttctccattgggtccttctgctcatgcattcagttcaagtgtcctttatcccaggttcagagatgctgcctttctgaagaagacatctgaccctagcaggttggccagtgttattgaacaacaaaaatgggataaattgctttcatgattagctcaccttcttctggttttagcccttctgttctctgtacacgtgaacttctgtcatctccttctggcttggttgcctctgaaaggagggaaagtctcttggtaaattatctcttttgtgctgtttgctgtttctctgctgccgtctttgcagttctcctctcactggttgcaggctttcatagtaaggtttggcgagaaatgttccaaacatcacattttggattctaggctgtcacccctcattctgtgaaacgtattagcatgtgttcgcccaagatgactattccttgtgagccagttaatgatgatattctacgcccttcccttctaagctgtagttcaggaatccagcccacatagacagactcttgctttccatggtgtagtcaatgccaagtgatgcatctaggcaggaaaatctactctttgcttttttgggggcaattagtacatttgtgaagtgcagcatccaagaaacagcctgttttttcatcccttgagaaaggagcagtcattgcagcttttctgtccttgtcggcctgcagttcctggggaaaagagtacatctgagctacttgtccaagcctctgtctgcaggtgacaggttttgggggaaatgagatgcattaagtagaacatcatctcgggtcagacattgccccttttgtttgccaatgccccagtcctagagacttgtcctgacagtgccgcacacctacttttgatctctcagagcaggtggctccatccccagactagcctggctgctctccgaggcccctccacctgctccccttattgccccattcttgtggcttgccgggccacttggcctcccttcttgccggtgacagcgttccatcatctccccgctccccaagggccaactgcttctcactcaggctggtgtcatttcaggaggaccaaagcctgcgtgagcctttttattttcagtaaaatggtgcttttttccttacttcgagatactatatataaataataatgtaaatgacaccttttcgtacggagctgtttgagtattgctttacagagctcactaaatcagcttcaacaatcttgagctctgtggctcctcaccctgtctgcatggaagaccttgctggacgctctcgggagagcagacatagcaccagaagccactgggagaagtgttttcgatccgtgtctgggccacagtagtattcactgtttagtctttgagttccgtaagcagtctcttcatacatttcttacagtctggagtgtactgactaaatctgtgtaagcaaattgaaatactctttcttttaggtagcgtcacagtggttttttttttcctcaggataatttctatacaatttccttactgtcagagggaccagatctttccctcactgtggcaggggccgtgcaggtggataaaggaagagctggtttccggagagtgactgtaacagcgttgactcgaagctagagatggagggggtggccgtctcttagacattggacacctctcagagcctcctgagggcttctttgtcttctagaatctctaccggtggtcctcctgcaggttctggctcacagacatcatcatgcctttttttccctccctgaggcgccttggcagaagagcgtgaccctgtgagccaggccccccttagctctgcttcagatcacagaacacagacagactcgcgagttgctggacctctttggtattaagtgtttgaatccatggtgggccttttgcaagtagcgttagctctttttaaatgttgaactgagctaaggatgcactttcttgtggacatagaaggggcccacgtaaggccctgagtaggctccttagttgctgctttacctgatgagggccaaagagattaactctgcctcgttgccatgtctcagaaaagttgccatatttcacccagaaggggcttgttttcctcttactcttactttaaccatgtgcctggaggagccattctgggctcttgcacttgcccagcctttctttgccaggggcagagaagggaaagggggtagattgagtgtgccaagggccgtgcaagggcaggcttgctttccacccatctgctgagggagccctctcctctcgctccttgcctctgttcacacctgttgtcttggaagaggatggtccctttgtcttaaggctttgtgataaagtcatctccagttaggatctgcacctgtttccttcgtaatagtgcctggcggcctttctgaagttacaggtggttgggagccctctcgcatgcagaacatctggtagattgatctgccaggctgggtggttctactgctttctcaatttctaagaaccttttttttttcttaaagagttctgctgaattatttgacaatatttgtaagtaccatgtttccttgtggtgtatgctctgttctggtttctgttttcaaatcaaatgcctgtttgggaggagatgaacgtatttagtctattagatttgcactgctggattttttttttaaagtgtaaccttgaatagctgtcttattgtttatcctgtaagattagtcaatcgattaaagtttgataattaattgcg

SEQ ID NO: 9037 - protein, 89 aa, Homo sapiens [sequence omitted]

SEQ ID NO: 9038 - DNA, 534 bp, Homo sapiens
acaataaatctggaggaaaagtgagactcacctttaaactagaacaagaccagctgtggattggcactaaagagcggactgagaaattgcccatgggctccataaaaaatgtggtcagtgaacctatcgaaggacatgaagactaccacatgatggcgtttcagttgggccccacggaagcctcttactactgggtgtactgggttccaactcaatatgtggatgcaatcaaagacactgtgctggggaaatggcagtatttttgaaagcactttcacctctggcccaggagactgacccaaagtgaaggacattgccgggagaggcctgcagcatccctggatttcagagttctggaactttgttcataaaaaatctatattcaatctgaggtgatgtggtgactgaagccagaggtgatgtactttcaccattagcttaattttaacttaaaattaccagttccctttcttgcagtcagcttcataccatttttaaagtcaatacgatggaaatcaataaatctgaattccg

SEQ ID NO: 9039 - protein, 57 aa, Homo sapiens
MGSIKNVVSEPIEGHEDYHMMAFQLGPTEASYYWVYWVPTQYVDAIKDTVLGKWQYF

SEQ ID NO: 9040 - DNA, 4139 bp, Homo sapiens
aataaatctggaggaaaagtgagactcacctttaaactagaacaagaccagctgtggattggcactaaagattcctggagggaaccgaacatgcctaaatcacctgtttctgaccagcactgtaggtattcagtgttcgagagcggactgagaaattgcccatgggctccataaaaaatgtggtcagtgaacctatcgaaggacatgaagactaccacatgatggcgtttcagttgggccccacggaagcctcttactactgggtgtactgggttccaactcaatatgtggatgcaatcaaagacactgtgctggggaaatggcagtatttttgaaagcactttcacctctggcccaggagactgacccaaagtgaaggacattgccgggagaggcctgcagcatccctggatttcagagttctggaactttgttcataaaaaatctatattcaatctgaggtgatgtggtgactgaagccagaggtgatgtactttcaccattagcttaattttaacttaaaattaccagttccctttcttgcagtcagcttcataccatttttaaagtcaatacgatggaaatcaataaatctgaattccgaacatgttgtgtggaatactcttaagtgtgtttgagagtagatctgccaattatgttgacaagggaatgatcaaaagctttgttttttttaaaaaaaaaaaaagcagtttcaattgaaatattttcatacatctttggttgcaaacatttggactgcattgcaatgagttggggtgttttttttttccttttttgtataaaattgtatgcaaaatgggggtgggttagtaagccacatatttctgtccattgattcagatttaattctttccctttttcattctctcgcttcctcaatttgagtttttgttttaagaacccaaagatgtcagttcttcttttggtacctcatcaacgcttcctttcctgggctccctcccgccgtgctgctgctgcctgtgaacgcacggtgggagaggaagagctgctcagtcttgggcaaggagctctcacacttgctgtggtgttcgttgagcagcagagtatctcccagtgactcctgtttaaatgtcttgccctttgggcccccatctccaaggagttccattgctggttggatgattgtctgcacccctcactgagcttggcctagaggcccagcctggcatggttgtgcctgggctgtgccgctcaacagccccagctcccaagcagacaaagacctcttccaggaggagccaggtagaagatagttatacagccatatagctgcagatccagataaccttctttctttggaagttttcaagaaattcttaagcagtccaaggatgatttcaattatgcttctccattgggtccttctgctcatgcattcagttcaagtgtcctttatcccaggttcagagatgctgcctttctgaagaagacatctgaccctagcaggttggccagtgttattgaacaacaaaaatgggataaattgctttcatgattagctcaccttcttctggttttagcccttctgttctctgtacacgtgaacttctgtcatctccttctggcttggttgcctctgaaaggagggaaagtctcttggtaaattatctcttttgtgctgtttgctgtttctctgctgccgtctttgcagttctcctctcactggttgcaggctttcatagtaaggtttggcgagaaatgttccaaacatcacattttggattctaggctgtcacccctcattctgtgaaacgtattagcatgtgttcgcccaagatgactattccttgtgagccagttaatgatgatattctacgcccttcccttctaagctgtagttcaggaatccagcccacatagacagactcttgctttccatggtgtagtcaatgccaagtgatgcatctaggcaggaaaatctactctttgcttttttgggggcaattagtacatttgtgaagtgcagcatccaagaaacagcctgttttttcatcccttgagaaaggagcagtcattgcagcttttctgtccttgtcggcctgcagttcctggggaaaagagtacatctgagctacttgtccaagcctctgtctgcaggtgacaggttttgggggaaatgagatgcattaagtagaacatcatctcgggtcagacattgccccttttgtttgccaatgccccagtcctagagacttgtcctgacagtgccgcacacctacttttgatctctcagagcaggtggctccatccccagactagcctggctgctctccgaggcccctccacctgctccccttattgccccattcttgtggcttgccgggccacttggcctcccttcttgccggtgacagcgttccatcatctccccgctccccaagggccaactgcttctcactcaggctggtgtcatttcaggaggaccaaagcctgcgtgagcctttttattttcagtaaaatggtgcttttttccttacttcgagatactatatataaataataatgtaaatgacaccttttcgtacggagctgtttgagtattgctttacagagctcactaaatcagcttcaacaatcttgagctctgtggctcctcaccctgtctgcatggaagaccttgctggacgctctcgggagagcagacatagcaccagaagccactgggagaagtgttttcgatccgtgtctgggccacagtagtattcactgtttagtctttgagttccgtaagcagtctcttcatacatttcttacagtctggagtgtactgactaaatctgtgtaagcaaattgaaatactctttcttttaggtagcgtcacagtggttttttttttcctcaggataatttctatacaatttccttactgtcagagggaccagatctttccctcactgtggcaggggccgtgcaggtggataaaggaagagctggtttccggagagtgactgtaacagcgttgactcgaagctagagatggagggggtggccgtctcttagacattggacacctctcagagcctcctgagggcttctttgtcttctagaatctctaccggtggtcctcctgcaggttctggctcacagacatcatcatgcctttttttccctccctgaggcgccttggcagaagagcgtgaccctgtgagccaggccccccttagctctgcttcagatcacagaacacagacagactcgcgagttgctggacctctttggtattaagtgtttgaatccatggtgggccttttgcaagtagcgttagctctttttaaatgttgaactgagctaaggatgcactttcttgtggacatagaaggggcccacgtaaggccctgagtaggctccttagttgctgctttacctgatgagggccaaagagattaactctgcctcgttgccatgtctcagaaaagttgccatatttcacccagaaggggcttgttttcctcttactcttactttaaccatgtgcctggaggagccattctgggctcttgcacttgcccagcctttctttgccaggggcagagaagggaaagggggtagattgagtgtgccaagggccgtgcaagggcaggcttgctttccacccatctgctgagggagccctctcctctcgctccttgcctctgttcacacctgttgtcttggaagaggatggtccctttgtcttaaggctttgtgataaagtcatctccagttaggatctgcacctgtttccttcgtaatagtgcctggcggcctttctgaagttacaggtggttgggagccctctcgcatgcagaacatctggtagattgatctgccaggctgggtggttctactgctttctcaatttctaagaaccttttttttttcttaaagagttctgctgaattatttgacaatatttgtaagtaccatgtttccttgtggtgtatgctctgttctggtttctgttttcaaatcaaatgcctgtttgggaggagatgaacgtatttagtctattagatttgcactgctggattttttttttaaagtgtaaccttgaatagctgtcttattgtttatcctgtaagattagtcaatcgattaaagtttgataattaattgcg

SEQ ID NO: 9041 - protein, 57 aa, Homo sapiens; identical to SEQ ID NO: 9039

SEQ ID NO: 9042 - DNA, 735 bp, Homo sapiens
tgaaccctctgctagatcattctcttctgtagagcctgtccatcttccctttatcagtagtaagctgcccagcctctgtcaactttgcaggtgattttgcttagttctgtctcatcacattcacttgctgaagtgcatagacttcctgcctcttgctggacctctacttttgcttgtgggcagcctcattgaaggcagttgctacggctgacctggaaagaccctgccatgaagataggtgcaggcagagaagtctggatgggaactaagtctagcggactgagaaattgcccatgggctccataaaaaatgtggtcagtgaacctatcgaaggacatgaagactaccacatgatggcgtttcagttgggccccacggaagcctcttactactgggtgtactgggttccaactcaatatgtggatgcaatcaaagacactgtgctggggaaatggcagtatttttgaaagcactttcacctctggcccaggagactgacccaaagtgaaggacattgccgggagaggcctgcagcatccctggatttcagagttctggaactttgttcataaaaaatctatattcaatctgaggtgatgtggtgactgaagccagaggtgatgtactttcaccattagcttaattttaacttaaaattaccagttccctttcttgcagtcagcttcataccatttttaaagtcaatacgatggaaatcaataaatctgaattccg

SEQ ID NO: 9043 - protein, 57 aa, Homo sapiens; identical to SEQ ID NO: 9039

SEQ ID NO: 9044 - DNA, 4271 bp, Homo sapiens
tgaaccctctgctagatcattctcttctgtagagcctgtccatcttccctttatcagtagtaagctgcccagcctctgtcaactttgcaggtgattttgcttagttctgtctcatcacattcacttgctgaagtgcatagacttcctgcctcttgctggacctctacttttgcttgtgggcagcctcattgaaggcagttgctacggctgacctggaaagaccctgccatgaagataggtgcaggcagagaagtctggatgggaactaagtctagcggactgagaaattgcccatgggctccataaaaaatgtggtcagtgaacctatcgaaggacatgaagactaccacatgatggcgtttcagttgggccccacggaagcctcttactactgggtgtactgggttccaactcaatatgtggatgcaatcaaagacactgtgctggggaaatggcagtatttttgaaagcactttcacctctggcccaggagactgacccaaagtgaaggacattgccgggagaggcctgcagcatccctggatttcagagttctggaactttgttcataaaaaatctatattcaatctgaggtgatgtggtgactgaagccagaggtgatgtactttcaccattagcttaattttaacttaaaattaccagttccctttcttgcagtcagcttcataccatttttaaagtcaatacgatggaaatcaataaatctgaattccgaacatgttgtgtggaatactcttaagtgtgtttgagagtagatctgccaattatgttgacaagggaatgatcaaaagctttgttttttttaaaaaaaaaaaaagcagtttcaattgaaatattttcatacatctttggttgcaaacatttggactgcattgcaatgagttggggtgttttttttttccttttttgtataaaattgtatgcaaaatgggggtgggttagtaagccacatatttctgtccattgattcagatttaattctttccctttttcattctctcgcttcctcaatttgagtttttgttttaagaacccaaagatgtcagttcttcttttggtacctcatcaacgcttcctttcctgggctccctcccgccgtgctgctgctgcctgtgaacgcacggtgggagaggaagagctgctcagtcttgggcaaggagctctcacacttgctgtggtgttcgttgagcagcagagtatctcccagtgactcctgtttaaatgtcttgccctttgggcccccatctccaaggagttccattgctggttggatgattgtctgcacccctcactgagcttggcctagaggcccagcctggcatggttgtgcctgggctgtgccgctcaacagccccagctcccaagcagacaaagacctcttccaggaggagccaggtagaagatagttatacagccatatagctgcagatccagataaccttctttctttggaagttttcaagaaattcttaagcagtccaaggatgatttcaattatgcttctccattgggtccttctgctcatgcattcagttcaagtgtcctttatcccaggttcagagatgctgcctttctgaagaagacatctgaccctagcaggttggccagtgttattgaacaacaaaaatgggataaattgctttcatgattagctcaccttcttctggttttagcccttctgttctctgtacacgtgaacttctgtcatctccttctggcttggttgcctctgaaaggagggaaagtctcttggtaaattatctcttttgtgctgtttgctgtttctctgctgccgtctttgcagttctcctctcactggttgcaggctttcatagtaaggtttggcgagaaatgttccaaacatcacattttggattctaggctgtcacccctcattctgtgaaacgtattagcatgtgttcgcccaagatgactattccttgtgagccagttaatgatgatattctacgcccttcccttctaagctgtagttcaggaatccagcccacatagacagactcttgctttccatggtgtagtcaatgccaagtgatgcatctaggcaggaaaatctactctttgcttttttgggggcaattagtacatttgtgaagtgcagcatccaagaaacagcctgttttttcatcccttgagaaaggagcagtcattgcagcttttctgtccttgtcggcctgcagttcctggggaaaagagtacatctgagctacttgtccaagcctctgtctgcaggtgacaggttttgggggaaatgagatgcattaagtagaacatcatctcgggtcagacattgccccttttgtttgccaatgccccagtcctagagacttgtcctgacagtgccgcacacctacttttgatctctcagagcaggtggctccatccccagactagcctggctgctctccgaggcccctccacctgctccccttattgccccattcttgtggcttgccgggccacttggcctcccttcttgccggtgacagcgttccatcatctccccgctccccaagggccaactgcttctcactcaggctggtgtcatttcaggaggaccaaagcctgcgtgagcctttttattttcagtaaaatggtgcttttttccttacttcgagatactatatataaataataatgtaaatgacaccttttcgtacggagctgtttgagtattgctttacagagctcactaaatcagcttcaacaatcttgagctctgtggctcctcaccctgtctgcatggaagaccttgctggacgctctcgggagagcagacatagcaccagaagccactgggagaagtgttttcgatccgtgtctgggccacagtagtattcactgtttagtctttgagttccgtaagcagtctcttcatacatttcttacagtctggagtgtactgactaaatctgtgtaagcaaattgaaatactctttcttttaggtagcgtcacagtggttttttttttcctcaggataatttctatacaatttccttactgtcagagggaccagatctttccctcactgtggcaggggccgtgcaggtggataaaggaagagctggtttccggagagtgactgtaacagcgttgactcgaagctagagatggagggggtggccgtctcttagacattggacacctctcagagcctcctgagggcttctttgtcttctagaatctctaccggtggtcctcctgcaggttctggctcacagacatcatcatgcctttttttccctccctgaggcgccttggcagaagagcgtgaccctgtgagccaggccccccttagctctgcttcagatcacagaacacagacagactcgcgagttgctggacctctttggtattaagtgtttgaatccatggtgggccttttgcaagtagcgttagctctttttaaatgttgaactgagctaaggatgcactttcttgtggacatagaaggggcccacgtaaggccctgagtaggctccttagttgctgctttacctgatgagggccaaagagattaactctgcctcgttgccatgtctcagaaaagttgccatatttcacccagaaggggcttgttttcctcttactcttactttaaccatgtgcctggaggagccattctgggctcttgcacttgcccagcctttctttgccaggggcagagaagggaaagggggtagattgagtgtgccaagggccgtgcaagggcaggcttgctttccacccatctgctgagggagccctctcctctcgctccttgcctctgttcacacctgttgtcttggaagaggatggtccctttgtcttaaggctttgtgataaagtcatctccagttaggatctgcacctgtttccttcgtaatagtgcctggcggcctttctgaagttacaggtggttgggagccctctcgcatgcagaacatctggtagattgatctgccaggctgggtggttctactgctttctcaatttctaagaaccttttttttttcttaaagagttctgctgaattatttgacaatatttgtaagtaccatgtttccttgtggtgtatgctctgttctggtttctgttttcaaatcaaatgcctgtttgggaggagatgaacgtatttagtctattagatttgcactgctggattttttttttaaagtgtaaccttgaatagctgtcttattgtttatcctgtaagattagtcaatcgattaaagtttgataattaattgcg

SEQ ID NO: 9045 - protein, 57 aa, Homo sapiens; identical to SEQ ID NO: 9039

SEQ ID NO: 9046 - DNA, 2485 bp, Homo sapiens
tgttgaggagcatggccatggactactcatgttttctagggttgaacaaggttaagattttcattcccacccatagcactgtacctctggagcccaaggggcaggcagtcttgtcacttgcccagtcctgttacctaagtgtcataagcactcataagaggacagcttgttctgggagttggctgctagccactggcttcgtctttctgctggcaagaagaagcggctatggaatgaccatcccagcagcgagttggcctcttcgtggggcgctttgctgagtaagtgacccttaagggctgctactcttgactaaactctgctagcttgtgtaggaggaggcagttctaacagcctcaaaagaatgagaacaagctccaggcaggaaaccggaagccgctggaggagagcatgtaccctgctcgtaggaaagttgaatctggctgaaggtctgatgtagtgatcaggagtgtgggtccagaattgcccaatttttggagttttcaagagaagccagaaatctgttgtatatttttgtgaaatctccagacatttcaggatgaaaggtgttttaaaagtttccatcttaaagacagctgctgcccaggtcctgctttagggccgactgttgtagagccactagaagtccaaacctaaataaacatcttcaggtcccttctccccagcccccatttttcagatactgaggcccacagaactgaagtaaaatgtcttaagtccccagctagaccagaacgctggtctctaaattcctagtctgtttggccaacttatctatttttagactctatctttccagatttttctttctgcaaaggctgcaagtttttttccacttggtttagctgtttgctgagcctccctgcccccctccccctgcgcccccgtccctgaggtgtctgctgctccaggatggccatgtccccttgtgcaggtgcacctcgcctcccctgacctcacccagtcccgcttcacttggctcactcccggcagtctcatctcactccaggcatcccttgctgcccccttctcttacctgccatcctccttaaactcgcctcaatgtcttctgaccccatgtgatcagtggtatctcaagtgttaatcacaaaaggttataaatgttttaagagaacttcataaaagtgtgtgaatatagagtgcggaggactcgaggagggaggccggggaagggagcagggtcgtggtatagaatctagccctaaaatccaggcactccccttcccttgtgagagccacaggggaacgtgttgcctctttgttcgtaggcctcttgactctccctactgcccaagaccttagtcaatgctgggcttgcataaggttacaaaggaatttcttgggtatttatttattttatatttttttttgttgagatggagtttcgctctttggcccaggctgaagtaaagtggcatgatctcggctcactgcaacttctgccccccgggttcaagcgattctcgtgcttcagcctcctgagtagctgggattataggtgcccaccaccacgcctggctaattttttgtatttttagtagagacggggtttcaccatgctggccaggctggtctcgaactcctgatctcaggtgatccacccaccttggccaaatcctgactcacaagatgttaggattacaggcttgagccaccgcgcctggcctttcttggatatttattaaccatcagacttttaaaaaataatcccagggaagatacaattctgccctcagagacctttactataccattgccaaacccagtttcccacttgctcctacggagttcccagctcccacacgaagccctatgtgcactggtcagaagaccctgtcgtgttgtccccagagggcatggcgccagtcacttgagtttactgtagatcccgcagccaccagccctgatgagggactgctgagtcagagaagttagaacaggagggccctttgaataatcactgtaatccctctcaacttagagcggactgagaaattgcccatgggctccataaaaaatgtggtcagtgaacctatcgaaggacatgaagactaccacatgatggcgtttcagttgggccccacggaagcctcttactactgggtgtactgggttccaactcaatatgtggatgcaatcaaagacactgtgctggggaaatggcagtatttttgaaagcactttcacctctggcccaggagactgacccaaagtgaaggacattgccgggagaggcctgcagcatccctggatttcagagttctggaactttgttcataaaaaatctatattcaatctgaggtgatgtggtgactgaagccagaggtgatgtactttcaccattagcttaattttaacttaaaattaccagttccctttcttgcagtcagcttcataccatttttaaagtcaatacgatggaaatcaataaatctgaattccg

SEQ ID NO: 9047 - protein, 57 aa, Homo sapiens; identical to SEQ ID NO: 9039

SEQ ID NO: 9048 - DNA, 6021 bp, Homo sapiens
tgttgaggagcatggccatggactactcatgttttctagggttgaacaaggttaagattttcattcccacccatagcactgtacctctggagcccaaggggcaggcagtcttgtcacttgcccagtcctgttacctaagtgtcataagcactcataagaggacagcttgttctgggagttggctgctagccactggcttcgtctttctgctggcaagaagaagcggctatggaatgaccatcccagcagcgagttggcctcttcgtggggcgctttgctgagtaagtgacccttaagggctgctactcttgactaaactctgctagcttgtgtaggaggaggcagttctaacagcctcaaaagaatgagaacaagctccaggcaggaaaccggaagccgctggaggagagcatgtaccctgctcgtaggaaagttgaatctggctgaaggtctgatgtagtgatcaggagtgtgggtccagaattgcccaatttttggagttttcaagagaagccagaaatctgttgtatatttttgtgaaatctccagacatttcaggatgaaaggtgttttaaaagtttccatcttaaagacagctgctgcccaggtcctgctttagggccgactgttgtagagccactagaagtccaaacctaaataaacatcttcaggtcccttctccccagcccccatttttcagatactgaggcccacagaactgaagtaaaatgtcttaagtccccagctagaccagaacgctggtctctaaattcctagtctgtttggccaacttatctatttttagactctatctttccagatttttctttctgcaaaggctgcaagtttttttccacttggtttagctgtttgctgagcctccctgcccccctccccctgcgcccccgtccctgaggtgtctgctgctccaggatggccatgtccccttgtgcaggtgcacctcgcctcccctgacctcacccagtcccgcttcacttggctcactcccggcagtctcatctcactccaggcatcccttgctgcccccttctcttacctgccatcctccttaaactcgcctcaatgtcttctgaccccatgtgatcagtggtatctcaagtgttaatcacaaaaggttataaatgttttaagagaacttcataaaagtgtgtgaatatagagtgcggaggactcgaggagggaggccggggaagggagcagggtcgtggtatagaatctagccctaaaatccaggcactccccttcccttgtgagagccacaggggaacgtgttgcctctttgttcgtaggcctcttgactctccctactgcccaagaccttagtcaatgctgggcttgcataaggttacaaaggaatttcttgggtatttatttattttatatttttttttgttgagatggagtttcgctctttggcccaggctgaagtaaagtggcatgatctcggctcactgcaacttctgccccccgggttcaagcgattctcgtgcttcagcctcctgagtagctgggattataggtgcccaccaccacgcctggctaattttttgtatttttagtagagacggggtttcaccatgctggccaggctggtctcgaactcctgatctcaggtgatccacccaccttggccaaatcctgactcacaagatgttaggattacaggcttgagccaccgcgcctggcctttcttggatatttattaaccatcagacttttaaaaaataatcccagggaagatacaattctgccctcagagacctttactataccattgccaaacccagtttcccacttgctcctacggagttcccagctcccacacgaagccctatgtgcactggtcagaagaccctgtcgtgttgtccccagagggcatggcgccagtcacttgagtttactgtagatcccgcagccaccagccctgatgagggactgctgagtcagagaagttagaacaggagggccctttgaataatcactgtaatccctctcaacttagagcggactgagaaattgcccatgggctccataaaaaatgtggtcagtgaacctatcgaaggacatgaagactaccacatgatggcgtttcagttgggccccacggaagcctcttactactgggtgtactgggttccaactcaatatgtggatgcaatcaaagacactgtgctggggaaatggcagtatttttgaaagcactttcacctctggcccaggagactgacccaaagtgaaggacattgccgggagaggcctgcagcatccctggatttcagagttctggaactttgttcataaaaaatctatattcaatctgaggtgatgtggtgactgaagccagaggtgatgtactttcaccattagcttaattttaacttaaaattaccagttccctttcttgcagtcagcttcataccatttttaaagtcaatacgatggaaatcaataaatctgaattccgaacatgttgtgtggaatactcttaagtgtgtttgagagtagatctgccaattatgttgacaagggaatgatcaaaagctttgttttttttaaaaaaaaaaaaagcagtttcaattgaaatattttcatacatctttggttgcaaacatttggactgcattgcaatgagttggggtgttttttttttccttttttgtataaaattgtatgcaaaatgggggtgggttagtaagccacatatttctgtccattgattcagatttaattctttccctttttcattctctcgcttcctcaatttgagtttttgttttaagaacccaaagatgtcagttcttcttttggtacctcatcaacgcttcctttcctgggctccctcccgccgtgctgctgctgcctgtgaacgcacggtgggagaggaagagctgctcagtcttgggcaaggagctctcacacttgctgtggtgttcgttgagcagcagagtatctcccagtgactcctgtttaaatgtcttgccctttgggcccccatctccaaggagttccattgctggttggatgattgtctgcacccctcactgagcttggcctagaggcccagcctggcatggttgtgcctgggctgtgccgctcaacagccccagctcccaagcagacaaagacctcttccaggaggagccaggtagaagatagttatacagccatatagctgcagatccagataaccttctttctttggaagttttcaagaaattcttaagcagtccaaggatgatttcaattatgcttctccattgggtccttctgctcatgcattcagttcaagtgtcctttatcccaggttcagagatgctgcctttctgaagaagacatctgaccctagcaggttggccagtgttattgaacaacaaaaatgggataaattgctttcatgattagctcaccttcttctggttttagcccttctgttctctgtacacgtgaacttctgtcatctccttctggcttggttgcctctgaaaggagggaaagtctcttggtaaattatctcttttgtgctgtttgctgtttctctgctgccgtctttgcagttctcctctcactggttgcaggctttcatagtaaggtttggcgagaaatgttccaaacatcacattttggattctaggctgtcacccctcattctgtgaaacgtattagcatgtgttcgcccaagatgactattccttgtgagccagttaatgatgatattctacgcccttcccttctaagctgtagttcaggaatccagcccacatagacagactcttgctttccatggtgtagtcaatgccaagtgatgcatctaggcaggaaaatctactctttgcttttttgggggcaattagtacatttgtgaagtgcagcatccaagaaacagcctgttttttcatcccttgagaaaggagcagtcattgcagcttttctgtccttgtcggcctgcagttcctggggaaaagagtacatctgagctacttgtccaagcctctgtctgcaggtgacaggttttgggggaaatgagatgcattaagtagaacatcatctcgggtcagacattgccccttttgtttgccaatgccccagtcctagagacttgtcctgacagtgccgcacacctacttttgatctctcagagcaggtggctccatccccagactagcctggctgctctccgaggcccctccacctgctccccttattgccccattcttgtggcttgccgggccacttggcctcccttcttgccggtgacagcgttccatcatctccccgctccccaagggccaactgcttctcactcaggctggtgtcatttcaggaggaccaaagcctgcgtgagcctttttattttcagtaaaatggtgcttttttccttacttcgagatactatatataaataataatgtaaatgacaccttttcgtacggagctgtttgagtattgctttacagagctcactaaatcagcttcaacaatcttgagctctgtggctcctcaccctgtctgcatggaagaccttgctggacgctctcgggagagcagacatagcaccagaagccactgggagaagtgttttcgatccgtgtctgggccacagtagtattcactgtttagtctttgagttccgtaagcagtctcttcatacatttcttacagtctggagtgtactgactaaatctgtgtaagcaaattgaaatactctttcttttaggtagcgtcacagtggttttttttttcctcaggataatttctatacaatttccttactgtcagagggaccagatctttccctcactgtggcaggggccgtgcaggtggataaaggaagagctggtttccggagagtgactgtaacagcgttgactcgaagctagagatggagggggtggccgtctcttagacattggacacctctcagagcctcctgagggcttctttgtcttctagaatctctaccggtggtcctcctgcaggttctggctcacagacatcatcatgcctttttttccctccctgaggcgccttggcagaagagcgtgaccctgtgagccaggccccccttagctctgcttcagatcacagaacacagacagactcgcgagttgctggacctctttggtattaagtgtttgaatccatggtgggccttttgcaagtagcgttagctctttttaaatgttgaactgagctaaggatgcactttcttgtggacatagaaggggcccacgtaaggccctgagtaggctccttagttgctgctttacctgatgagggccaaagagattaactctgcctcgttgccatgtctcagaaaagttgccatatttcacccagaaggggcttgttttcctcttactcttactttaaccatgtgcctggaggagccattctgggctcttgcacttgcccagcctttctttgccaggggcagagaagggaaagggggtagattgagtgtgccaagggccgtgcaagggcaggcttgctttccacccatctgctgagggagccctctcctctcgctccttgcctctgttcacacctgttgtcttggaagaggatggtccctttgtcttaaggctttgtgataaagtcatctccagttaggatctgcacctgtttccttcgtaatagtgcctggcggcctttctgaagttacaggtggttgggagccctctcgcatgcagaacatctggtagattgatctgccaggctgggtggttctactgctttctcaatttctaagaaccttttttttttcttaaagagttctgctgaattatttgacaatatttgtaagtaccatgtttccttgtggtgtatgctctgttctggtttctgttttcaaatcaaatgcctgtttgggaggagatgaacgtatttagtctattagatttgcactgctggattttttttttaaagtgtaaccttgaatagctgtcttattgtttatcctgtaagattagtcaatcgattaaagtttgataattaattgcg

SEQ ID NO: 9049 - protein, 57 aa, Homo sapiens; identical to SEQ ID NO: 9039

SEQ ID NO: 9050 - DNA, 3199 bp, Homo sapiens
gggttagtaagccacatatttctgtccattgattcagatttaattctttccctttttcattctctcgcttcctcaatttgagtttttgttttaagaacccaaagatgtcagttcttcttttggtacctcatcaacgcttcctttcctgggctccctcccgccgtgctgctgctgcctgtgaacgcacggtgggagaggaagagctgctcagtcttgggcaaggagctctcacacttgctgtggtgttcgttgagcagcagagtatctcccagtgactcctgtttaaatgtcttgccctttgggcccccatctccaaggagttccattgctggttggatgattgtctgcacccctcactgagcttggcctagaggcccagcctggcatggttgtgcctgggctgtgccgctcaacagccccagctcccaagcagacaaagacctcttccaggaggagccaggtagaagatagttatacagccatatagctgcagatccagataaccttctttctttggaagttttcaagaaattcttaagcagtccaaggatgatttcaattatgcttctccattgggtccttctgctcatgcattcagttcaagtgtcctttatcccaggttcagagatgctgcctttctgaagaagacatctgaccctagcaggttggccagtgttattgaacaacaaaaatgggataaattgctttcatgattagctcaccttcttctggttttagcccttctgttctctgtacacgtgaacttctgtcatctccttctggcttggttgcctctgaaaggagggaaagtctcttggtaaattatctcttttgtgctgtttgctgtttctctgctgccgtctttgcagttctcctctcactggttgcaggctttcatagtaaggtttggcgagaaatgttccaaacatcacattttggattctaggctgtcacccctcattctgtgaaacgtattagcatgtgttcgcccaagatgactattccttgtgagccagttaatgatgatattctacgcccttcccttctaagctgtagttcaggaatccacatccaagaaacagcctgttttttcatcccttgagaaaggagcagtcattgcagcttttctgtccttgtcggcctgcagttcctggggaaaagagtacatctgagctacttgtccaagcctctgtctgcaggtgacaggttttgggggaaatgagatgcattaagtagaacatcatctcgggtcagacattgccccttttgtttgccaatgccccagtcctagagacttgtcctgacagtgccgcacacctacttttgatctctcagagcaggtggctccatccccagactagcctggctgctctccgaggcccctccacctgctccccttattgccccattcttgtggcttgccgggccacttggcctcccttcttgccggtgacagcgttccatcatctccccgctccccaagggccaactgcttctcactcaggctggtgtcatttcaggaggaccaaagcctgcgtgagcctttttattttcagtaaaatggtgcttttttccttacttcgagatactatatataaataataatgtaaatgacaccttttcgtacggagctgtttgagtattgctttacagagctcactaaatcagcttcaacaatcttgagctctgtggctcctcaccctgtctgcatggaagaccttgctggacgctctcgggagagcagacatagcaccagaagccactgggagaagtgttttcgatccgtgtctgggccacagtagtattcactgtttagtctttgagttccgtaagcagtctcttcatacatttcttacagtctggagtgtactgactaaatctgtgtaagcaaattgaaatactctttcttttaggtagcgtcacagtggttttttttttcctcaggataatttctatacaatttccttactgtcagagggaccagatctttccctcactgtggcaggggccgtgcaggtggataaaggaagagctggtttccggagagtgactgtaacagcgttgactcgaagctagagatggagggggtggccgtctcttagacattggacacctctcagagcctcctgagggcttctttgtcttctagaatctctaccggtggtcctcctgcaggttctggctcacagacatcatcatgcctttttttccctccctgaggcgccttggcagaagagcgtgaccctgtgagccaggccccccttagctctgcttcagatcacagaacacagacagactcgcgagttgctggacctctttggtattaagtgtttgaatccatggtgggccttttgcaagtagcgttagctctttttaaatgttgaactgagctaaggatgcactttcttgtggacatagaaggggcccacgtaaggccctgagtaggctccttagttgctgctttacctgatgagggccaaagagattaactctgcctcgttgccatgtctcagaaaagttgccatatttcacccagaaggggcttgttttcctcttactcttactttaaccatgtgcctggaggagccattctgggctcttgcacttgcccagcctttctttgccaggggcagagaagggaaagggggtagattgagtgtgccaagggccgtgcaagggcaggcttgctttccacccatctgctgagggagccctctcctctcgctccttgcctctgttcacacctgttgtcttggaagaggatggtccctttgtcttaaggctttgtgataaagtcatctccagttaggatctgcacctgtttccttcgtaatagtgcctggcggcctttctgaagttacaggtggttgggagccctctcgcatgcagaacatctggtagattgatctgccaggctgggtggttctactgctttctcaatttctaagaaccttttttttttcttaaagagttctgctgaattatttgacaatatttgtaagtaccatgtttccttgtggtgtatgctctgttctggtttctgttttcaaatcaaatgcctgtttgggaggagatgaacgtatttagtctattagatttgcactgctggattttttttttaaagtgtaaccttgaatagctgtcttattgtttatcctgtaagattagtcaatcgattaaagtttgataattaattgcg

SEQ ID NO: 9051 - protein, 40 aa, Homo sapiens
MCSPKMTIPCEPVNDDILRPSLLSCSSGIHIQETACFFIP

SEQ ID NO: 9052 - DNA, 1196 bp, Homo sapiens
attcttgtggcttgccgggccacttggcctcccttcttgccggtgacagcgttccatcatctccccgctccccaagggccaactgcttctcactcaggctggtgtcatttcaggaggaccaaagcctgcgtgagcctttttattttcagtaaaatggtgcttttttccttacttcgagatactatatataaataataatgtaaatgacaccttttcgtacggagctgtttgagtattgctttacagagctcactaaatcagcttcaacaatcttgagctctgtggctcctcaccctgtctgcatggaagaccttgctggacgctctcgggagagcagacatagcaccagaagccactgggagaagtgttttcgatccgtgtctgggccacagtagtattcactgtttagtctttgagttccgtaagcagtctcttcatacatttcttacagtctggagtgtactgactaaatctgtgtaagcaaattgaaatactctttcttttaggtagcgtcacagtggttttttttttcctcaggataatttctatacaatttccttatttaaccatgtgcctggaggagccattctgggctcttgcacttgcccagcctttctttgccaggggcagagaagggaaagggggtagattgagtgtgccaagggccgtgcaagggcaggcttgctttccacccatctgctgagggagccctctcctctcgctccttgcctctgttcacacctgttgtcttggaagaggatggtccctttgtcttaaggctttgtgataaagtcatctccagttaggatctgcacctgtttccttcgtaatagtgcctggcggcctttctgaagttacaggtggttgggagccctctcgcatgcagaacatctggtagattgatctgccaggctgggtggttctactgctttctcaatttctaagaaccttttttttttcttaaagagttctgctgaattatttgacaatatttgtaagtaccatgtttccttgtggtgtatgctctgttctggtttctgttttcaaatcaaatgcctgtttgggaggagatgaacgtatttagtctattagatttgcactgctggattttttttttaaagtgtaaccttgaatagctgtcttattgtttatcctgtaagattagtcaatcgattaaagtttgataattaattgcg

SEQ ID NO: 9053 - protein, 63 aa, Homo sapiens [sequence omitted]

SEQ ID NO: 9054 - DNA, 988 bp, Homo sapiens
attcttgtggcttgccgggccacttggcctcccttcttgccggtgacagcgttccatcatctccccgctccccaagggccaactgcttctcactcaggctggtgtcatttcaggaggaccaaagcctgcgtgagcctttttattttcagtaaaatggtgcttttttccttacttcgagatactatatataaataataatgtaaatgacaccttttcgtacggagctgtttgagtattgctttacagagctcactaaatcagcttcaacaatcttgagctctgtggctcctcaccctgtctgcatggaagaccttgctggacgctctcgggagagcagacatagcaccagaagccactgggagaagtgttttcgatccgtgtctgggccacagtagtattcactgtttagtctttgagttccgtaagcagtctcttcatacatttcttacagtctggagtgtactgactaaatctgtgtaagcaaattgaaatactctttcttttaggtagcgtcacagtggttttttttttcctcaggataatttctatacaatttccctttgtcttaaggctttgtgataaagtcatctccagttaggatctgcacctgtttccttcgtaatagtgcctggcggcctttctgaagttacaggtggttgggagccctctcgcatgcagaacatctggtagattgatctgccaggctgggtggttctactgctttctcaatttctaagaaccttttttttttcttaaagagttctgctgaattatttgacaatatttgtaagtaccatgtttccttgtggtgtatgctctgttctggtttctgttttcaaatcaaatgcctgtttgggaggagatgaacgtatttagtctattagatttgcactgctggattttttttttaaagtgtaaccttgaatagctgtcttattgtttatcctgtaagattagtcaatcgattaaagtttgataattaattgcg

SEQ ID NO: 9055 - protein, 63 aa, Homo sapiens [sequence omitted]

SEQ ID NO: 9056 - DNA, 1470 bp, Homo sapiens
cggagctgtttgagtattgctttacagagctcactaaatcagcttcaacaatcttgagctctgtggctcctcaccctgtctgcatggaagaccttgctggacgctctcgggagagcagacatagcaccagaagccactgggagaagtgttttcgatccgtgtctgggccacagtagtattcactgtttagtctttgagttccgtaagcagtctcttcatacatttcttacagtctggagtgtactgactaaatctgtgtaagcaaattgaaatactctttcttttaggtagcgtcacagtggttttttttttcctcaggataatttctatacaatttccttactgtcagagggaccagatctttccctcactgtggcaggggccgtgcaggtggataaaggaagagctggtttccggagagtgactgtaacagcgttgactcgaagctagagatggagggggtggccgtctcttagacattggacacctctcagagcctcctgagggcttctttgtcttctagaatctctaccggtggtcctcctgcaggttctggctcacagacatcatcatgcctttttttccctccctgaggcgccttggcagaagagcgtgaccctgtgagccaggccccccttagctctgcttcagatcacagaacacagacagactcgcgagttgctggacctctttggtattaagtgtttgaatccatggtgggccttttgcaagtagcgttagctctttttaaatgttgaactgagctaaggatgcactttcttgtggacatagaaggggcccacgtaaggccctgagtaggctccttagttgctgctttacctgatgagggccaaagagattaactctgcctcgttgccatgtctcagaaaagttgccatatttcacccagaaggggcttgttttcctcttactcttactttaaccatgtgcctggaggagccattctgggctcttgcacttgcccagcctttctttgccaggggcagagaagggaaagggggtagattgagtgtgccaagggccgtgcaagggctttgtgataaagtcatctccagttaggatctgcacctgtttccttcgtaatagtgcctggcggcctttctgaagttacaggtggttgggagccctctcgcatgcagaacatctggtagattgatctgccaggctgggtggttctactgctttctcaatttctaagaaccttttttttttcttaaagagttctgctgaattatttgacaatatttgtaagtaccatgtttccttgtggtgtatgctctgttctggtttctgttttcaaatcaaatgcctgtttgggaggagatgaacgtatttagtctattagatttgcactgctggattttttttttaaagtgtaaccttgaatagctgtcttattgtttatcctgtaagattagtcaatcgattaaagtttgataattaattgcg

SEQ ID NO: 9057 - protein, 78 aa, Homo sapiens [sequence omitted]

SEQ ID NO: 9058 - DNA, 745 bp, Homo sapiens
gccgccggaaaggaaccctggtccggaggcggcggcgcagtgcatcctgggttggcgtagccatggcgtctcgtgtcctttcagcctatgtcagccgcctgcccgcggcctttgcgccgctgccccgggtccggatgctggccgtggcccggcctctcagcaccgctctctgctccgcggggacccagacgaggctcgggactttgcagccggccttagtgctcgcgcaggttcctggtagagttacacagttgtgccgccagtatagcgacatgcctcctttgacgttagagggcatccaggaccgtgttctttacgtattgaaactctatgacaagattgacccagagaagctttcagtaaattctcattttatgaaagacctgggcttagacagtttggaccaagtggagattatcatggccatggaagacgaatttgggtttgaaattcctgatatagatgctgaaaagttaatgtgtccacaagaaattgtagattacattgcagataagaaggatgtatatgaataaagtatcagaccctttggctttgctgagagaggactcagatgatagtgacgaatgtctggcagtgaggacacattttggcattcttgctgactctgacagagtgattctgatggacttgtatttaaattgtatgtgttttactctttgaaaataaatctataaaaccaacattttcccccatcttcagtttttcaatgatgtctataaagtgc

SEQ ID NO: 9059 - protein, 156 aa, Homo sapiens; identical to SEQ ID NO: 1344

SEQ ID NO: 9060 - DNA, 1010 bp, Homo sapiens
gcttcctttgtcctggctgagatcagggagataactgctggaaccaaactagacctttctggtgtatggtcctcaatttgaattgcctttgggtttaccatgacagctctttccttttgggttattttgacttgggtcagcctattaaaggtggcagcaccctgtagaggcctcgggatgctgaagatgccatgagaagacacaggcattctgcagacgctagacaattttagtggcagttagtgtcgcagagcagtatgaatgtccagagcctgagggttgaagccaggaggcagaggggccggtcctgactcccaggaaggaggcctgagatgctgctgaactgttggggcttctgcgattacccagtcctgcaacttagtgtgtcctggtggccacaatgagaatcagatgctgtgggttctctaaagccccgaaagttctgtgaaagttacctataggcttgtgcattgatttagaggtattttccattcaatgacagtgtttccttcctgccgtcgctctaggttcctggtagagttacacagttgtgccgccagtatagcgacatgcctcctttgacgttagagggcatccaggaccgtgttctttacgtattgaaactctatgacaagattgacccagagaagctttcagtaaattctcattttatgaaagacctgggcttagacagtttggaccaagtggagattatcatggccatggaagacgaatttgggtttgaaattcctgatatagatgctgaaaagttaatgtgtccacaagaaattgtagattacattgcagataagaaggatgtatatgaataaagtatcagaccctttggctttgctgagagaggactcagatgatagtgacgaatgtctggcagtgaggacacattttggcattcttgctgactctgacagagtgattctgatggacttgtatttaaattgtatgtgttttactctttgaaaataaatctataaaaccaacattttccccca

SEQ ID NO: 9061 - protein, 86 aa, Homo sapiens [sequence omitted]

SEQ ID NO: 9062 - DNA, 880 bp, Homo sapiens
atcctgggttggcgtagccatggcgtctcgtgtcctttcagcctatgtcagccgcctgcccgcggcctttgcgccgctgccccgggtccggatgctggccgtggcccggcctctcagcaccgctctctgctccgcggggacccagacgaggctcgggactttgcagccggccttagtgctcgcgcagcaccttctgcctgtgtccaggactcctggaagtaattctaggaaacaagccaagtgacctttgaccaataaggatttgaattgcgcgggtccacttatatgcggattttttttcaaccaaacgcgaccagtatttacgggatgtgccgccccgcgtataaggagggcaggctcttcctataagcggattctgcaaggctgactgcgggacgttcctggtagagttacacagttgtgccgccagtatagcgacatgcctcctttgacgttagagggcatccaggaccgtgttctttacgtattgaaactctatgacaagattgacccagagaagctttcagtaaattctcattttatgaaagacctgggcttagacagtttggaccaagtggagattatcatggccatggaagacgaatttgggtttgaaattcctgatatagatgctgaaaagttaatgtgtccacaagaaattgtagattacattgcagataagaaggatgtatatgaataaagtatcagaccctttggctttgctgagagaggactcagatgatagtgacgaatgtctggcagtgaggacacattttggcattcttgctgactctgacagagtgattctgatggacttgtatttaaattgtatgtgttttactctttgaaaataaatctataaaaccaacattttccccca

SEQ ID NO: 9063 - protein, 86 aa, Homo sapiens [sequence omitted]

SEQ ID NO: 9064 - DNA, 547 bp, Homo sapiens
atcctgggttggcgtagccatggcgtctcgtgtcctttcagcctatgtcagccgcctgcccgcggcctttgcgccgctgccccgggtccggatgctggccgtggcccggcctctcagcaccgctctctgctccgcggggacccagacgaggctcgggactttgcagccggccttagtgctcgcgcagctttcagtaaattctcattttatgaaagacctgggcttagacagtttggaccaagtggagattatcatggccatggaagacgaatttgggtttgaaattcctgatatagatgctgaaaagttaatgtgtccacaagaaattgtagattacattgcagataagaaggatgtatatgaataaagtatcagaccctttggctttgctgagagaggactcagatgatagtgacgaatgtctggcagtgaggacacattttggcattcttgctgactctgacagagtgattctgatggacttgtatttaaattgtatgtgttttactctttgaaaataaatctataaaaccaacattttccccca

SEQ ID NO: 9065 - protein, 115 aa, Homo sapiens [sequence omitted]

SEQ ID NO: 9066 - DNA, 712 bp, Homo sapiens
gccgccggaaaggaaccctggtccggaggcggcggcgcagtgcatcctgggttggcgtagccatggcgtctcgtgtcctttcagcctatgtcagccgcctgcccgcggcctttgcgccgctgccccgggtccggatgctggccgtggcccggcctctcagcaccgctctctgctccgcggggacccagacgaggctcgggactttgcagccggccttagtgctcgcgcaggttcctggtagagttacacagttgtgccgccagtatagcgacatgcctcctttgacgttagagggcatccaggaccgtgttctttacgtattgaaactctatgacaagattgacccagagaagctttcagtaaattctcattttatgaaagacctgggcttagacagtttggaccaagtggagattatcatggccatggaagacgaatttgggtttgaaattcctgatatagatgctgaaaagttaatgtgtccacaagaaattgtagattacattgcagataagaaggatgtatatgaataaagtatcagaccctttggctttgctgagagaggactcagatgatagtgacgaatgtctggcagtgaggacacattttggcattcttgctgactctgacagagtgattctgatggacttgtatttaaattgtatgtgttttactctttgaaaataaatctataaaaccaacattttccccc

SEQ ID NO: 9067 - protein, 156 aa, Homo sapiens; identical to SEQ ID NO: 1344

SEQ ID NO: 9068 - DNA, 1765 bp, Homo sapiens
gcagtgcatcctgggttggcgtagccatggcgtctcgtgtcctttcagcctatgtcagccgcctgcccgcggcctttgcgccgctgccccgggtccggatgctggccgtggcccggcctctcagcaccgctctctgctccgcggggacccagacgaggctcgggactttgcagccggccttagtgctcgcgcaggttcctggtagagttacacagttgtgccgccagtatagcgacatgcctcctttgacgttagagggcatccaggaccgtgttctttacgtattgaaactctatgacaagattgacccagagaagctttcagtaaattctcattttatgaaagacctgggcttagacagtttggaccaagtggagattatcatggccatggaagacgaatttgggtttgaaattcctgatatagatgctgaaaagttaatgtgtccacaagaaattgtagattacattgcagataagaaggatgtatatgaataaagtatcaggtaaatagacttaaaaaatgatgttcacccatagatttgtctgtggttcttcaataaaggaaacttaagaagaaacagaaaatggaaatgcttgaccaagatttttcactacttataaaatgcaagccctttcctgttgtctgccactcaaaggggcccagccctggtggtgatctttgagaggttgagaactgtcattcctggatagaactcccttgattgtcagctgtcctcacaaaagcagaacattgtacaaagtactgaacagggtaacctggaaacagacctctgtctccctcaattactcagccaaggtaagcccagcctgctgggtaagacactgaagtgacctggctcttaagtaggcaagagaggcctcatgtataagaggatggactttggagtcagagacacccaagtttattctcagctttgccacacactataagcctggtggtctcaggcaggctgcttagctctgtaagcctcagtttcctcatatgtaatatggtggtaatgataggacctacctggggcttttgtgaaagcaaaattgaagagagtatatatatcacttgatataatgatgtaaagaagcctctcagtaaatagtagcttttgttacttgggacctagaataatcaaataagactttttgaattaaaacattgtattagtgtttttagtctttagcttttagtgaccctgcatttttttttttttttttttaaagatggaaccttgctctgttgcccaggctggagtgtagtggcacaatctcggctcactgcaacctccgcctcctgggttcaagcaattctccggcctcagcctcctgagtaactgggattacaggcgtgcacctccacgcccagctaatttttatatttttagtagagatggggtttcaccatgttggccaggctggtctcgaactcctgacctcaggtgatccgcccagcttggcctcccaaagtgctgagattacgggcatgagccactgcactcagccagaggctgcatttttagcacctgaaagatgtcacttatcattagtaagaatacatcaaaaataacattgaacttattttgtcttttccagaccctttggctttgctgagagaggactcagatgatagtgacgaatgtctggcagtgaggacacattttggcattcttgctgactctgacagagtgattctgatggacttgtatttaaattgtatgtgttttactctttgaaaataaatctataaaacc

SEQ ID NO: 9069 - protein, 156 aa, Homo sapiens; identical to SEQ ID NO: 1344

SEQ ID NO: 9070 - DNA, 800 bp, Homo sapiens
gcgactatttttagaagtcatcaagtgtttcttttgtgaagccagtgttgctgttcactgacagtgtaatggattcattcattgggcactgccctgttggctgtatcaaaaggtgaaaagtgtcaccttgaaattaaggattacaggcatgagccatcacacctggtgtgcctaacccttaaatgttggtgggctcccgagttctcttaccacacatgctccctggactcttcactcctggtttctgttattgctgtatatcccagacctccgcctccagtccttgttcatctcatttggaccattgctcatgctacctattccctgctgtgaaatttcctctcctcaaatccatccactatgccaacttcagagcaactagtcactcatttacaccctttttcccaaaaggagctaaggcagttttcctgggtataaaaataccagatgatataaaatagaaggtaaggaaaaaacaaaaaaacaaaaaccaagggcaatggcctaaaatgcagcctggaagtcttatacttgatccaggtaggccccgaatctacactgtctagcagatggagcacaaagataatttccagcagttctatggggcatggtacgcagatgaagacagcacttgtacaaaaaaaagctagctattccaggactgggaccaggaccagacaaagtcccagtcccttcccatggcccttaaggctctgcagacctgggccctccctcttagcctccaagcctgtcatctgtgtaccatctcccaacatgagctgatgtcttctcacatagac

SEQ ID NO: 9071 - protein, 92 aa, Homo sapiens
MLVGSRVLLPHMLPGLFTPGFCYCCISQTSASSPCSSHLDHCSCYLFPAVKFPLLKSIHYANFRATSHSFTPFFPKGAKAVFLGIKIPDDIK

SEQ ID NO: 9072 - DNA, 4066 bp, Homo sapiens
gcaggccgaatggtggatttaattggccggagtttagggcgcgcttggcccgcgtgggtcagctgatcgcgcactgagggtgcgatcccgggctccccattccttcctggggcgcctccccggcccagggccaactgggtcccggtgtcggcaggcctggggtcggcgacggctgctcttttcgttctgtcgcctgcccgatggacgagcctcccgggaagcccctcagctgtgaggagaaggaaaagttaaaggagaaattagcattcttgaaaagggaatacagcaagacactagcccgccttcagcgtgcccaaagagctgaaaagattaagcattctattaagaaaacagtagaagaacaagattgtttgtctcagcaggatctctcaccgcagctaaaacactcagaacctaaaaataaaatatgtgtttatgacaagttacacatcaaaacccatcttgatgaagaaactggagaaaagacatctatcacacttgatgttgggcctgagtcctttaaccctggagatggcccaggaggattacctatacaaagaacagatgacacccaagaacattttccccacagggtcagtgaccctagtggtgagcaaaagcagaagctgccaagcagaagaaagaagcagcagaagaggacatttatttcacaggagagagactgtgtctttggcactgattcactcagattgtctgggaaaagactaaaggaacaggaagaaatcagtagcaaaaatcctgctagatcaccagtaactgaaataagaactcaccttttaagtcttaaatctgaacttccagattctccagaaccagttacagaaattaatgaagacagtgtattaattccaccaactgcccaaccagaaaaaggtgttgatacattcctaagaagacctaatttcaccagggcgactacagttcctttacagactctatcagatagcggtagtagtcagcaccttgaacacattcctcctaaaggtagcagtgaacttactactcacgacctaaaaaacattagatttacttcacctgtaagtttggaggcacaaggcaaaaaaatgactgtctctacagataacctccttgtaaataaagctataagtaaaagtggccaactgcccacaagttctaatttagaggcaaatatttcatgttctctaaatgaactcacctacaataacttaccagcaaatgaaaaccaaaacttaaaagaacaaaatcaaacagagaaatctttaaaatctcccagtgacactcttgatggcaggaatgaaaatcttcaggaaagtgagattctaagtcaacctaagagtcttagcctggaagcaacctctcctctttctgcagaaaaacattcttgcacagtgcctgaaggccttctgtttcctgcagaatattatgttagaacaacacgaagcatgtccaattgccagaggaaagtagccgtggaggctgtcattcagagtcatttggatgtcaagaaaaaagggtttaaaaataaaaataaggatgcaagtaaaaatttaaacctttccaatgaggaaactgaccaaagtgaaattaggatgtctggcacatgcacaggacaaccaagttcaagaacctctcagaaacttctctcattaactaaagtcagctctcccgctgggcccactgaagataatgacttgtctaggaaggcagttgcccaagcacctggtagaagatacacaggaaaaagaaaatcagcctgcaccccagcatcagatcattgtgaaccacttttgccaacttctagcctgtcgattgttaacaggtccaaggaagaagtcacctcacacaaatatcagcacgaaaaattatttattcaagtgaaagggaagaaaagtcgtcatcaaaaagaggattccctttcttggagtaatagtgcttatttatccttggatgatgatgctttcacggctccatttcatagggatggaatgctgagtttaaagcaactactgtcttttctcagtatcacagactttcagttacctgatgaagactttggacctcttaagcttgaaaaagtgaagtcctgctcagaaaaaccagtggagccctttgagtcaaaaatgtttggagagagacatcttaaagagggaagctgtatttttccagaggaactgagtcctaaacgcatggatacagaaatggaggacttagaagaggaccttattgttctaccaggaaaatcacatcccaaaaggccaaactcgcaaagccagcatacaaagacgggcctttcttcatccatattactttatactcctttaaatacggttgcgcctgatgataatgacaggcctaccacagacatgtgttcacctgctttccccatcttaggtactactccagcctttggccctcaaggctcctatgaaaaagcatctacagaagttgctggacgaacttgctgcacaccccaacttgctcatttgaaagactcagtctgtcttgccagtgatactaaacaattcgacagttcaggcagcccagcaaaaccacataccaccctgcaagtgtcaggcaggcaaggacaacctacctgtgactgtgactctgtcccgccaggaacacctccacccattgagtcattcacttttaaagaaaatcagctctgtagaaacacatgccaggagctgcataaacattccgtcgaacagactgaaacagcagagcttcctgcttctgatagcataaacccaggcaacctacaattggtttcagagttaaagaatccttcaggttcctgttccgtagatgtgagtgccatgttttgggaaagagccggttgtaaagagccatgtatcataactgcttgcgaagatgtagtttctctttggaaagctctggatgcttggcagtgggaaaaactttatacctggcacttcgcagaggttccagtattacagatagttccagtgcctgatgtgtataatctcgtgtgtgtagctttgggaaatttggaaatcagagagatcagggcattgttttgttcctctgatgatgaaagtgaaaagcaagtactactgaagtctggaaatataaaagctgtgcttggcctgacaaagaggaggctagttagtagcagtgggaccctttctgatcaacaagtagaagtcatgacgtttgcagaagatggaggaggcaaagaaaaccaatttttgatgccccctgaggagactatactaacttttgctgaggtccaagggatgcaagaagctctgcttggtactactattatgaacaacattgttatttggaatttaaaaactggtcaactcctgaaaaagatgcacattgatgattcttaccaagcttcagtctgtcacaaagcctattctgaaatggggcttctctttattgtcctgagtcatccctgtgccaaagagagtgagtcgttgcgaagccctgtgtttcagctcattgtgattaaccctaagacgactctcagcgtgggtgtgatgctgtactgtcttcctccagggcaggctggcaggttcctggaaggtgacgtgaaagatcactgtgcagcagcaatcttgacttctggaacaattgccatttgggacttacttctcggtcagtgtactgccctcctcccacctgtctctgaccaacattggtcttttgtgaaatggtcgggtacagactctcatttgctggctggacaaaaagatggaaatatatttgtataccactattcataagttagggtaaagtgaaaacacaattttctggatatattgggcctcttagtattttttggagttttaaatataaaggagaatatctgaatgacacttaaaatgattgcttgtttatgtccagacagacttattttttattctaatgatggtagcaccactgatcttggatgtacatttatgtatactttgagaaaaagggttttaggttgatttttgtaatttcccacatttgtacatgtgcttttaaaggtgtacataaagcttcaaatggcaataaatatttatttttatacattctgcttggc

SEQ ID NO: 9073 - protein, 1186 aa, Homo sapiens [sequence omitted]

SEQ ID NO: 9074 - DNA, 627 bp, Homo sapiens
ttgttttatttaggttccagtattacagatagttccagtgcctgatgtgtataatctcgtgtgtgtagctttgggaaatttggaaatcagagagatcaggtatgtaattcccaaggagtgatttgtttttccttcatctttgtctctgtcagctggttttaagtgcaggtaataacctaggcttgagtcttgaaagaatctgaaagatcttgagttctgttgtactattccagccttcattgatgtttccttctccgaattcatactgccttggttgtttttttgtttttgcttttttgagagagggtctcagtctgttgcccatgctggagtacagtggcatgactatggctcactgaagtctcaacctctcaggctcaagcagtcctcccacctcagcctcctgagtagcaggactacagatgcatgccaccagccttgactgggaggtggaggctgcagtgagctgaaatcataccacttcactcaagcctggcaacagagcaagacccattcttttggctgggaagtccaagatcaaggtgctggcggattcactgtctggtgagagcccatttcctggctcatagatgtgtcctcacatggtagaaggcagctttctggggc

SEQ ID NO: 9075 - protein, 38 aa, Homo sapiens
MFPSPNSYCLGCFFVFAFLREGLSLLPMLEYSGMTMAH

SEQ ID NO: 9076 - DNA, 326 bp, Homo sapiens
gctttgttttatttaggttccagtattacagatagttccagtgcctgatgtgtataatctcgtgtgtgtagctttgggaaatttggaaatcagagagatcaggtatgtaattcccaaggagtgatttgtttttccttcatctttgtctctgtcagctggttttaagtgcaggtaataacctaggcttgagtcttgaaagaatctgaaagatcattcttttggctgggaagtccaagatcaaggtgctggcggattcactgtctggtgagagcccatttcctggctcatagatgtgtcctcacatggtagaaggcagctttctgggg

SEQ ID NO: 9077 - protein, 39 aa, Homo sapiens
VLKESERSFFWLGSPRSRCWRIHCLVRAHFLAHRCVLTW

SEQ ID NO: 9078 - DNA, 868 bp, Homo sapiens
agccgtagacggccgagcagtggagcgaggccgcctaaaggagagccgcgctgtcgatgagtcccagtgggccacctggagcggaagtggaggagcggccggaagtagccggaatctctgaaagactgaccgactgactctgacaggatccggggctgagggaaggaggcggcggccatggagttgggcgagctgctctacaacaagtctgagtacatcgagacggcatctgggaacaaagtcagtcgccagtcagtgttgtgtggaagccagaacatcgttctcaatggcaagaccattgtgatgaatgactgtattatccgaggggatctggcaaatgtaagagttggacgtcattgtgttgtgaaaagtcgtagtgtcataaggccaccattcaagaagttcagcaaaggtgttgcattctttcctttacatattggagaccatgtctttattgaggaagattgtgtggtcaacgcagcacagattggttcctatgttcatgttgggaagaactgtgtgattgggcgccgatgtgtgttgaaagactgctgcaaaattcttgacaacacagtattacctccagaaactgtggttccaccattcactgtcttctcaggctgcccaggactcttctcaggggagctcccggagtgcactcaggagctgatgattgacgtcaccaagagctactaccagaagtttttgcccctgacgcaagtctagcatctctgcctcatgtcttgaatctgcttgagctctaagatgaacctggggacaaagtgagccagtcagcacctacaaagagcttttgtgtctttgacatctaccaccctcctccttttaaaaaatttctttagaatttctc

SEQ ID NO: 9079 - protein, 182 aa, Homo sapiens; identical to SEQ ID NO: 1348

SEQ ID NO: 9080 - DNA, 1285 bp, Homo sapiens
agccgtagacggccgagcagtggagcgaggccgcctaaaggagagccgcgctgtcgatgagtcccagtgggccacctggagcggaagtggaggagcggccggaagtagccggaatctctgaaagactgaccgactgactctgacaggatccggggctgagggaaggaggcggcggccatggagttgggcgagctgctctacaacaagtctgagtacatcgagacggcatctgggaacaaagtcagtcgccagtcagtgttgtgtggaagccagaacatcgttctcaatggcaagaccattgtgatgaatgactgtattatccgaggggatctggcaaatgtaagagttggacgtcattgtgttgtgaaaagtcgtagtgtcataaggccaccattcaagaagttcagcaaaggtgttgcattctttcctttacatattggagaccatgtctttattgaggaagattgtgtggtcaacgcagcacagattggttcctatgttcatgttgggaagaactgtgtgattgggcgccgatgtgtgttgaaagactgctgcaaaattcttgacaacacagtattacctccagaaactgtggttccaccattcactgtcttctcaggctgcccaggactcttctcaggggagctcccggagtgcactcaggagctgatgattgacgtcaccaagagctactaccagaagtttttgcccctgacgcaagtctagcatctctgcctcatgtcttgaatctgcttgagctctaagatgaacctggggacaaagtgagccagtcagcacctacaaagagcttttgtgtctttgacatctaccaccctcctccttttaaaaaatttctttagaatttctcaatcttcaaggctctaagtgcttaagaattcactaacagacagaccatctggaggagctgtcttcaaatgctgtgcttacaccttatctatgaacagtcactttgtaccattatctgtggaacacagaatcatctgttcccaacactccagccccttggtcctgtggatggctggatcccgcctgaaacggacctgcagagcagcagcacccttccggtgtggaggctatgtagctggtgcgctgctcacggccattcactgcccatgctgagcgcctctcacacaggtaatgcccagcttttctgctgctaacacatttggccagttgttgcagttgctcatcatcttgggaaaggtgtttgtgacttttcagagcccagattcctgttgtctattaaaacttgaagggaggggtg

SEQ ID NO: 9081 - protein, 182 aa, Homo sapiens; identical to SEQ ID NO: 1348

SEQ ID NO: 9082 - DNA, 3456 bp, Homo sapiens
agccgtagacggccgagcagtggagcgaggccgcctaaaggagagccgcgctgtcgatgagtcccagtgggccacctggagcggaagtggaggagcggccggaagtagccggaatctctgaaagactgaccgactgactctgacaggatccggggctgagggaaggaggcggcggccatggagttgggcgagctgctctacaacaagtctgagtacatcgagacggcatctgggaacaaagtcagtcgccagtcagtgttgtgtggaagccagaacatcgttctcaatggcaagaccattgtgatgaatgactgtattatccgaggggatctggcaaatgtaagagttggacgtcattgtgttgtgaaaagtcgtagtgtcataaggccaccattcaagaagttcagcaaaggtgttgcattctttcctttacatattggagaccatgtctttattgaggaagattgtgtggtcaacgcagcacagattggttcctatgttcatgttgggaagaactgtgtgattgggcgccgatgtgtgttgaaagactgctgcaaaattcttgacaacacagtattacctccagaaactgtggttccaccattcactgtcttctcaggctgcccaggactcttctcaggggagctcccggagtgcactcaggagctgatgattgacgtcaccaagagctactaccagaagtttttgcccctgacgcaagtctagcatctctgcctcatgtcttgaatctgcttgagctctaagatgaacctggggacaaagtgagccagtcagcacctacaaagagcttttgtgtctttgacatctaccaccctcctccttttaaaaaatttctttagaatttctcaatcttcaaggctctaagtgcttaagaattcactaacagacagaccatctggaggagctgtcttcaaatgctgtgcttacaccttatctatgaacagtcactttgtaccattatctgtggaacacagaatcatctgttcccaacactccagccccttggtcctgtggatggctggatcccgcctgaaacggacctgcagagcagcagcacccttccggtgtggaggctatgtagctggtgcgctgctcacggccattcactgcccatgctgagcgcctctcacacaggtaatgcccagcttttctgctgctaacacatttggccagttgttgcagttgctcatcatcttgggaaaggtgtttgtgacttttcagagcccagattcctgttgtctattaaaacttgaagggaggggtgaatagtgtttctctcttcttcccaaaatgaccttagctgtcctaggatagttagtaaaagactttttagcattttgacctagggcctttggctttcactaaaagtggggacctcagtatcccagattgtaattttgccaagtgttagatttgagtctctcatgtggatgcattagtcaggtggttactccttgcttcaaggtacttaccttatttcattgaagacaccgcatttgtgaactcttgcttcctggcctagaaccattcagcctaccctgtatttgccataaactccacaattcacaccaaaatgtctgtacttagagctaattcgcatatatacaggaagggctcttagaatcagtttgtgggcacagagcctcaggagtaaatgaagttactagggctgttcttaccatctccttctggccaaatagcacaacatttcctcgttctgctctgacctcttagcttagaaggaagattcagaagtgaggggctaagaaggttgtccttgcctaatgctctgatctgtaagtgaatagggcagaacagttcagccttgaggttagaatttagcaggagctatcctgacttaatatccagttgtggggtttgcaaaacaaaacagctgtatgtaatcattgccactagttccatctagaactcctttctagtttgttatttttaaaatgtttatacataaaaccaccaaaatacatagcttcgacaagatggaagtttatttctctctcccataacagtgcagtgatagtcagctggtccaggccaggcaaggggctggtccatgatgtcatcaggcacccaggttcctactgtcttgccatgtggccacagttagcaacaaaggaggctgtaaatttagtttctacttgggcagccaaaactctgaggaaggagattctgctagtaaaaaggagtgggggaagaatggccattgggagacaacaagcagactcaaccaggcctctttgttggcttcctttcctcctgctgcacatgagccttcgccgtgcatttggagccatgacagctgatagctccagacctgcatcctcctagcttgggggctctgaatgaaaggtttcttcccttccagttcgaatttggaaactcccaaagttctcaatggtttgttgtgagttccatgtcctcttggatcagtcactgtggccatgcatgtttggccacatgattaatccagtctgggtcatgaccttttcttcatccaaaacaaggtgatgggaagacaaaaacaatagctactacaaacaataggagtttataattatgtgctgatgtattcgaagatgtgttgacagtcgtgagtgtgtatcctaggaaaggcgagctggactctgtctccatggtggctctcaccccagggacctaggaacagcctgtcaccacacaattacttttataaccctggagatgaaaatctccttgtcctcaaaatacttccagaagaacaaccagatgggaaggaccttggttgggactctttccagttcacttggggcagagggaatttaatggctcacgtagctgaaaaggatgggctagattgggcttcaggctgcatcccaggactccaaacagggatctgtctctttggctctcagctctgctttcatttgagttggctttattcttgggcttcacagtgtggccccacagcaccagttattgataaaaagagctcccctttgctgacagaactgctggatttggttctcattggtccagacgaggaaggtatccagcctcaagtcatcattgtggccaggaagatggaatacaccaaatggacaggcctggcatgtacccacagagactgagagttggtgctggtggttgtggtggcagatgatattacctgaagaagggacgaatgggtgctgggcaggacaaagcatcagctgtccagttcaggcctctcctctttccctggtgtcttcattttcctccgtctccctgctgtcccttaccctctgcccaatctctcattactcctggtcttgggagttgccttctgaggatactccactgggggtacctgagcctggattagagggcagggggaggatattgcctagccaaagtgggtgttcaataaagaaccatttggagatggtcttctgtctggaa

SEQ ID NO: 9083 - protein, 182 aa, Homo sapiens; identical to SEQ ID NO: 1348

SEQ ID NO: 9084 - DNA, 2561 bp, Homo sapiens
agccgtagacggccgagcagtggagcgaggccgcctaaaggagagccgcgctgtcgatgagtcccagtgggccacctggagcggaagtggaggagcggccggaagtagccggaatctctgaaagactgaccgactgactctgacaggatccggggctgagggaaggaggcggcggccatggagttgggcgagctgctctacaacaagtctgagtacatcgagacggcatctgggaacaaagtcagtcgccagtcagtgttgtgtggaagccagaacatcgttctcaatggcaagaccattgtgatgaatgactgtattatccgaggggatctggcaaatgtaagagttggacgtcattgtgttgtgaaaagtcgtagtgtcataaggccaccattcaagaagttcagcaaaggtgttgcattctttcctttacatattggagaccatgtctttattgaggaagattgtgtggtcaacgcagcacagattggttcctatgttcatgttgggaagaactgtgtgattgggcgccgatgtgtgttgaaagactgctgcaaaattcttgacaacacagtattacctccagaaactgtggttccaccattcactgtcttctcaggctgcccaggactcttctcaggggagctcccggagtgcactcaggagctgatgattgacgtcaccaagagctactaccagaagtttttgcccctgacgcaagtctagcatctctgcctcatgtcttgaaatcagtttgtgggcacagagcctcaggagtaaatgaagttactagggctgttcttaccatctccttctggccaaatagcacaacatttcctcgttctgctctgacctcttagcttagaaggaagattcagaagtgaggggctaagaaggttgtccttgcctaatgctctgatctgtaagtgaatagggcagaacagttcagccttgaggttagaatttagcaggagctatcctgacttaatatccagttgtggggtttgcaaaacaaaacagctgtatgtaatcattgccactagttccatctagaactcctttctagtttgttatttttaaaatgtttatacataaaaccaccaaaatacatagcttcgacaagatggaagtttatttctctctcccataacagtgcagtgatagtcagctggtccaggccaggcaaggggctggtccatgatgtcatcaggcacccaggttcctactgtcttgccatgtggccacagttagcaacaaaggaggctgtaaatttagtttctacttgggcagccaaaactctgaggaaggagattctgctagtaaaaaggagtgggggaagaatggccattgggagacaacaagcagactcaaccaggcctctttgttggcttcctttcctcctgctgcacatgagccttcgccgtgcatttggagccatgacagctgatagctccagacctgcatcctcctagcttgggggctctgaatgaaaggtttcttcccttccagttcgaatttggaaactcccaaagttctcaatggtttgttgtgagttccatgtcctcttggatcagtcactgtggccatgcatgtttggccacatgattaatccagtctgggtcatgaccttttcttcatccaaaacaaggtgatgggaagacaaaaacaatagctactacaaacaataggagtttataattatgtgctgatgtattcgaagatgtgttgacagtcgtgagtgtgtatcctaggaaaggcgagctggactctgtctccatggtggctctcaccccagggacctaggaacagcctgtcaccacacaattacttttataaccctggagatgaaaatctccttgtcctcaaaatacttccagaagaacaaccagatgggaaggaccttggttgggactctttccagttcacttggggcagagggaatttaatggctcacgtagctgaaaaggatgggctagattgggcttcaggctgcatcccaggactccaaacagggatctgtctctttggctctcagctctgctttcatttgagttggctttattcttgggcttcacagtgtggccccacagcaccagttattgataaaaagagctcccctttgctgacagaactgctggatttggttctcattggtccagacgaggaaggtatccagcctcaagtcatcattgtggccaggaagatggaatacaccaaatggacaggcctggcatgtacccacagagactgagagttggtgctggtggttgtggtggcagatgatattacctgaagaagggacgaatgggtgctgggcaggacaaagcatcagctgtccagttcaggcctctcctctttccctggtgtcttcattttcctccgtctccctgctgtcccttaccctctgcccaatctctcattactcctggtcttgggagttgccttctgaggatactccactgggggtacctgagcctggattagagggcagggggaggatattgcctagccaaagtgggtgttcaataaagaaccatttggagatggtcttctgtctggaa

SEQ ID NO: 9085 - protein, 182 aa, Homo sapiens; identical to SEQ ID NO: 1348

SEQ ID NO: 9086 - DNA, 844 bp, Homo sapiens
acctggagcggaagtggaggagcggccggaagtagccggaatctctgaaagactgaccgactgactctgacaggatccggggctgagggaaggaggcggcggccatggagttgggcgagctgctctacaacaagtctgagtacatcgagacggcatctgggaacaaagtcagtcgccagtcagtgttgtgtggaagccagaacatcgttctcaatggcaagaccattgtgatgaatgactgtattatccgaggggatctggcaaatgtaagagttggacgtcattgtgttgtgaaaagtcgtagtgtcataaggccaccattcaagaagttcagcaaaggtgttgcattctttcctttacatattggagaccatgtctttattgaggaagattgtgtggtcaacgcagcacagattggttcctatgttcatgttgggaagaactgtgtgattgggcgccgatgtgtgttgaaagactgctgcaaaattcttgacaacacagtattacctccagaaactgtggttccaccattcactgtcttctcaggctgcccaggtaaccttggctgttgattaattttattttaacttcctaaaactcagttgtattttccatcgcaaaagtaatgcttacgattcctatctctggcaatatgttgatagagctaacttagaaattcacctgtacaaagtacctagaaatgctacctaacatataacaagcatctgtttaaatgcataattgggttcaccagaaaataaggaaattatgaagggccaaacacaaagaggaaactaagcccaagctgtgagattgcacgggttaatgctgtcttcataataga

SEQ ID NO: 9087 - protein, 155 aa, Homo sapiens
MELGELLYNKSEYIETASGNKVSRQSVLCGSQNIVLNGKTIVMNDCIIRGDLANVRVGRHCVVKSRSVIRPPFKKFSKGVAFFPLHIGDHVFIEEDCVVNAAQIGSYVHVGKNCVIGRRCVLKDCCKILDNTVLPPETVVPPFTVFSGCPGNLGC

SEQ ID NO: 9088 - DNA, 2529 bp, Homo sapiens
agtagccggaatctctgaaagactgaccgactgactctgacaggatccggggctgagggaaggaggcggcggccatggagttgggcgagctgctctacaacaagtctgagtacatcgagacggcatctgggaacaaagtcagtcgccagtcagtgttgttgtggaggctatgtagctggtgcgctgctcacggccattcactgcccatgctgagcgcctctcacacaggtaatgcccagcttttctgctgctaacacatttggccagttgttgcagttgctcatcatcttgggaaaggtgtttgtgacttttcagagcccagattcctgttgtctattaaaacttgaagggaggggtgaatagtgtttctctcttcttcccaaaatgaccttagctgtcctaggatagttagtaaaagactttttagcattttgacctagggcctttggctttcactaaaagtggggacctcagtatcccagattgtaattttgccaagtgttagatttgagtctctcatgtggatgcattagtcaggtggttactccttgcttcaaggtacttaccttatttcattgaagacaccgcatttgtgaactcttgcttcctggcctagaaccattcagcctaccctgtatttgccataaactccacaattcacaccaaaatgtctgtacttagagctaattcgcatatatacaggaagggctcttagaatcagtttgtgggcacagagcctcaggagtaaatgaagttactagggctgttcttaccatctccttctggccaaatagcacaacatttcctcgttctgctctgacctcttagcttagaaggaagattcagaagtgaggggctaagaaggttgtccttgcctaatgctctgatctgtaagtgaatagggcagaacagttcagccttgaggttagaatttagcaggagctatcctgacttaatatccagttgtggggtttgcaaaacaaaacagctgtatgtaatcattgccactagttccatctagaactcctttctagtttgttatttttaaaatgtttatacataaaaccaccaaaatacatagcttcgacaagatggaagtttatttctctctcccataacagtgcagtgatagtcagctggtccaggccaggcaaggggctggtccatgatgtcatcaggcacccaggttcctactgtcttgccatgtggccacagttagcaacaaaggaggctgtaaatttagtttctacttgggcagccaaaactctgaggaaggagattctgctagtaaaaaggagtgggggaagaatggccattgggagacaacaagcagactcaaccaggcctctttgttggcttcctttcctcctgctgcacatgagccttcgccgtgcatttggagccatgacagctgatagctccagacctgcatcctcctagcttgggggctctgaatgaaaggtttcttcccttccagttcgaatttggaaactcccaaagttctcaatggtttgttgtgagttccatgtcctcttggatcagtcactgtggccatgcatgtttggccacatgattaatccagtctgggtcatgaccttttcttcatccaaaacaaggtgatgggaagacaaaaacaatagctactacaaacaataggagtttataattatgtgctgatgtattcgaagatgtgttgacagtcgtgagtgtgtatcctaggaaaggcgagctggactctgtctccatggtggctctcaccccagggacctaggaacagcctgtcaccacacaattacttttataaccctggagatgaaaatctccttgtcctcaaaatacttccagaagaacaaccagatgggaaggaccttggttgggactctttccagttcacttggggcagagggaatttaatggctcacgtagctgaaaaggatgggctagattgggcttcaggctgcatcccaggactccaaacagggatctgtctctttggctctcagctctgctttcatttgagttggctttattcttgggcttcacagtgtggccccacagcaccagttattgataaaaagagctcccctttgctgacagaactgctggatttggttctcattggtccagacgaggaaggtatccagcctcaagtcatcattgtggccaggaagatggaatacaccaaatggacaggcctggcatgtacccacagagactgagagttggtgctggtggttgtggtggcagatgatattacctgaagaagggacgaatgggtgctgggcaggacaaagcatcagctgtccagttcaggcctctcctctttccctggtgtcttcattttcctccgtctccctgctgtcccttaccctctgcccaatctctcattactcctggtcttgggagttgccttctgaggatactccactgggggtacctgagcctggattagagggcagggggaggatattgcctagccaaagtgggtgttcaataaagaaccatttggagatggtcttctgtctggaa

SEQ ID NO: 9089 - protein, 59 aa, Homo sapiens [sequence omitted]

SEQ ID NO: 9090 - DNA, 1125 bp, Homo sapiens
gtagccggaatctctgaaagactgaccgactgactctgacaggatccggggctgagggaaggaggcggcggccatggagttgggcgagctgctctacaacaagtctgagtacatcgagacggcatctgggaacaaagtcagtcgccagtcagtgttgtgtggaagccagaacatcgttctcaatggcaagacgtcattgtgttgtgaaaagtcgtagtgtcataaggccaccattcaagaagttcagcaaaggtgttgcattctttcctttacatattggagaccatgtctttattgaggaagattgtgtggtcaacgcagcacagattggttcctatgttcatgttgggaagaactgtgtgattgggcgccgatgtgtgttgaaagactgctgcaaaattcttgacaacacagtattacctccagaaactgtggttccaccattcactgtcttctcaggctgcccaggactcttctcaggggagctcccggagtgcactcaggagctgatgattgacgtcaccaagagctactaccagaagtttttgcccctgacgcaagtctagcatctctgcctcatgtcttgaatctgcttgagctctaagatgaacctggggacaaagtgagccagtcagcacctacaaagagcttttgtgtctttgacatctaccaccctcctccttttaaaaaatttctttagaatttctcaatcttcaaggctctaagtgcttaagaattcactaacagacagaccatctggaggagctgtcttcaaatgctgtgcttacaccttatctatgaacagtcactttgtaccattatctgtggaacacagaatcatctgttcccaacactccagccccttggtcctgtggatggctggatcccgcctgaaacggacctgcagagcagcagcacccttccggtgtggaggctatgtagctggtgcgctgctcacggccattcactgcccatgctgagcgcctctcacacaggtaatgcccagcttttctgctgctaacacatttggccagttgttgcagttgctcatcatcttgggaaaggtgtttgtgacttttcagagcccagattcctgttgtctattaaaacttgaagggaggggtg

SEQ ID NO: 9091 - protein, 127 aa, Homo sapiens
MARRHCVVKSRSVIRPPFKKFSKGVAFFPLHIGDHVFIEEDCVVNAAQIGSYVHVGKNCVIGRRCVLKDCCKILDNTVLPPETVVPPFTVFSGCPGLFSGELPECTQELMIDVTKSYYQKFLPLTQV

SEQ ID NO: 9092 - DNA, 3296 bp, Homo sapiens
gtagccggaatctctgaaagactgaccgactgactctgacaggatccggggctgagggaaggaggcggcggccatggagttgggcgagctgctctacaacaagtctgagtacatcgagacggcatctgggaacaaagtcagtcgccagtcagtgttgtgtggaagccagaacatcgttctcaatggcaagacgtcattgtgttgtgaaaagtcgtagtgtcataaggccaccattcaagaagttcagcaaaggtgttgcattctttcctttacatattggagaccatgtctttattgaggaagattgtgtggtcaacgcagcacagattggttcctatgttcatgttgggaagaactgtgtgattgggcgccgatgtgtgttgaaagactgctgcaaaattcttgacaacacagtattacctccagaaactgtggttccaccattcactgtcttctcaggctgcccaggactcttctcaggggagctcccggagtgcactcaggagctgatgattgacgtcaccaagagctactaccagaagtttttgcccctgacgcaagtctagcatctctgcctcatgtcttgaatctgcttgagctctaagatgaacctggggacaaagtgagccagtcagcacctacaaagagcttttgtgtctttgacatctaccaccctcctccttttaaaaaatttctttagaatttctcaatcttcaaggctctaagtgcttaagaattcactaacagacagaccatctggaggagctgtcttcaaatgctgtgcttacaccttatctatgaacagtcactttgtaccattatctgtggaacacagaatcatctgttcccaacactccagccccttggtcctgtggatggctggatcccgcctgaaacggacctgcagagcagcagcacccttccggtgtggaggctatgtagctggtgcgctgctcacggccattcactgcccatgctgagcgcctctcacacaggtaatgcccagcttttctgctgctaacacatttggccagttgttgcagttgctcatcatcttgggaaaggtgtttgtgacttttcagagcccagattcctgttgtctattaaaacttgaagggaggggtgaatagtgtttctctcttcttcccaaaatgaccttagctgtcctaggatagttagtaaaagactttttagcattttgacctagggcctttggctttcactaaaagtggggacctcagtatcccagattgtaattttgccaagtgttagatttgagtctctcatgtggatgcattagtcaggtggttactccttgcttcaaggtacttaccttatttcattgaagacaccgcatttgtgaactcttgcttcctggcctagaaccattcagcctaccctgtatttgccataaactccacaattcacaccaaaatgtctgtacttagagctaattcgcatatatacaggaagggctcttagaatcagtttgtgggcacagagcctcaggagtaaatgaagttactagggctgttcttaccatctccttctggccaaatagcacaacatttcctcgttctgctctgacctcttagcttagaaggaagattcagaagtgaggggctaagaaggttgtccttgcctaatgctctgatctgtaagtgaatagggcagaacagttcagccttgaggttagaatttagcaggagctatcctgacttaatatccagttgtggggtttgcaaaacaaaacagctgtatgtaatcattgccactagttccatctagaactcctttctagtttgttatttttaaaatgtttatacataaaaccaccaaaatacatagcttcgacaagatggaagtttatttctctctcccataacagtgcagtgatagtcagctggtccaggccaggcaaggggctggtccatgatgtcatcaggcacccaggttcctactgtcttgccatgtggccacagttagcaacaaaggaggctgtaaatttagtttctacttgggcagccaaaactctgaggaaggagattctgctagtaaaaaggagtgggggaagaatggccattgggagacaacaagcagactcaaccaggcctctttgttggcttcctttcctcctgctgcacatgagccttcgccgtgcatttggagccatgacagctgatagctccagacctgcatcctcctagcttgggggctctgaatgaaaggtttcttcccttccagttcgaatttggaaactcccaaagttctcaatggtttgttgtgagttccatgtcctcttggatcagtcactgtggccatgcatgtttggccacatgattaatccagtctgggtcatgaccttttcttcatccaaaacaaggtgatgggaagacaaaaacaatagctactacaaacaataggagtttataattatgtgctgatgtattcgaagatgtgttgacagtcgtgagtgtgtatcctaggaaaggcgagctggactctgtctccatggtggctctcaccccagggacctaggaacagcctgtcaccacacaattacttttataaccctggagatgaaaatctccttgtcctcaaaatacttccagaagaacaaccagatgggaaggaccttggttgggactctttccagttcacttggggcagagggaatttaatggctcacgtagctgaaaaggatgggctagattgggcttcaggctgcatcccaggactccaaacagggatctgtctctttggctctcagctctgctttcatttgagttggctttattcttgggcttcacagtgtggccccacagcaccagttattgataaaaagagctcccctttgctgacagaactgctggatttggttctcattggtccagacgaggaaggtatccagcctcaagtcatcattgtggccaggaagatggaatacaccaaatggacaggcctggcatgtacccacagagactgagagttggtgctggtggttgtggtggcagatgatattacctgaagaagggacgaatgggtgctgggcaggacaaagcatcagctgtccagttcaggcctctcctctttccctggtgtcttcattttcctccgtctccctgctgtcccttaccctctgcccaatctctcattactcctggtcttgggagttgccttctgaggatactccactgggggtacctgagcctggattagagggcagggggaggatattgcctagccaaagtgggtgttcaataaagaaccatttggagatggtcttctgtctggaa

SEQ ID NO: 9093 - protein, 127 aa, Homo sapiens; identical to SEQ ID NO: 9091

SEQ ID NO: 9094 - DNA, 1056 bp, Homo sapiens
ggaatctctgaaagactgaccgactgactctgacaggatccggggctgagggaaggaggcggcggccatggagttgggcgagctgctctacaacaagtctgagtacatcgagacggcatctgggaacaaagtcagtcgccagtcagtgttgtgtggaagccagaacatcgttctcaatggcaagtgttgcattctttcctttacatattggagaccatgtctttattgaggaagattgtgtggtcaacgcagcacagattggttcctatgttcatgttgggaagaactgtgtgattgggcgccgatgtgtgttgaaagactgctgcaaaattcttgacaacacagtattacctccagaaactgtggttccaccattcactgtcttctcaggctgcccaggactcttctcaggggagctcccggagtgcactcaggagctgatgattgacgtcaccaagagctactaccagaagtttttgcccctgacgcaagtctagcatctctgcctcatgtcttgaatctgcttgagctctaagatgaacctggggacaaagtgagccagtcagcacctacaaagagcttttgtgtctttgacatctaccaccctcctccttttaaaaaatttctttagaatttctcaatcttcaaggctctaagtgcttaagaattcactaacagacagaccatctggaggagctgtcttcaaatgctgtgcttacaccttatctatgaacagtcactttgtaccattatctgtggaacacagaatcatctgttcccaacactccagccccttggtcctgtggatggctggatcccgcctgaaacggacctgcagagcagcagcacccttccggtgtggaggctatgtagctggtgcgctgctcacggccattcactgcccatgctgagcgcctctcacacaggtaatgcccagcttttctgctgctaacacatttggccagttgttgcagttgctcatcatcttgggaaaggtgtttgtgacttttcagagcccagattcctgttgtctattaaaacttgaagggaggggtg

SEQ ID NO: 9095 - protein, 106 aa, Homo sapiens
MASVAFFPLHIGDHVFIEEDCVVNAAQIGSYVHVGKNCVIGRRCVLKDCCKILDNTVLPPETVVPPFTVFSGCPGLFSGELPECTQELMIDVTKSYYQKFLPLTQV

SEQ ID NO: 9096 - DNA, 3227 bp, Homo sapiens
ggaatctctgaaagactgaccgactgactctgacaggatccggggctgagggaaggaggcggcggccatggagttgggcgagctgctctacaacaagtctgagtacatcgagacggcatctgggaacaaagtcagtcgccagtcagtgttgtgtggaagccagaacatcgttctcaatggcaagtgttgcattctttcctttacatattggagaccatgtctttattgaggaagattgtgtggtcaacgcagcacagattggttcctatgttcatgttgggaagaactgtgtgattgggcgccgatgtgtgttgaaagactgctgcaaaattcttgacaacacagtattacctccagaaactgtggttccaccattcactgtcttctcaggctgcccaggactcttctcaggggagctcccggagtgcactcaggagctgatgattgacgtcaccaagagctactaccagaagtttttgcccctgacgcaagtctagcatctctgcctcatgtcttgaatctgcttgagctctaagatgaacctggggacaaagtgagccagtcagcacctacaaagagcttttgtgtctttgacatctaccaccctcctccttttaaaaaatttctttagaatttctcaatcttcaaggctctaagtgcttaagaattcactaacagacagaccatctggaggagctgtcttcaaatgctgtgcttacaccttatctatgaacagtcactttgtaccattatctgtggaacacagaatcatctgttcccaacactccagccccttggtcctgtggatggctggatcccgcctgaaacggacctgcagagcagcagcacccttccggtgtggaggctatgtagctggtgcgctgctcacggccattcactgcccatgctgagcgcctctcacacaggtaatgcccagcttttctgctgctaacacatttggccagttgttgcagttgctcatcatcttgggaaaggtgtttgtgacttttcagagcccagattcctgttgtctattaaaacttgaagggaggggtgaatagtgtttctctcttcttcccaaaatgaccttagctgtcctaggatagttagtaaaagactttttagcattttgacctagggcctttggctttcactaaaagtggggacctcagtatcccagattgtaattttgccaagtgttagatttgagtctctcatgtggatgcattagtcaggtggttactccttgcttcaaggtacttaccttatttcattgaagacaccgcatttgtgaactcttgcttcctggcctagaaccattcagcctaccctgtatttgccataaactccacaattcacaccaaaatgtctgtacttagagctaattcgcatatatacaggaagggctcttagaatcagtttgtgggcacagagcctcaggagtaaatgaagttactagggctgttcttaccatctccttctggccaaatagcacaacatttcctcgttctgctctgacctcttagcttagaaggaagattcagaagtgaggggctaagaaggttgtccttgcctaatgctctgatctgtaagtgaatagggcagaacagttcagccttgaggttagaatttagcaggagctatcctgacttaatatccagttgtggggtttgcaaaacaaaacagctgtatgtaatcattgccactagttccatctagaactcctttctagtttgttatttttaaaatgtttatacataaaaccaccaaaatacatagcttcgacaagatggaagtttatttctctctcccataacagtgcagtgatagtcagctggtccaggccaggcaaggggctggtccatgatgtcatcaggcacccaggttcctactgtcttgccatgtggccacagttagcaacaaaggaggctgtaaatttagtttctacttgggcagccaaaactctgaggaaggagattctgctagtaaaaaggagtgggggaagaatggccattgggagacaacaagcagactcaaccaggcctctttgttggcttcctttcctcctgctgcacatgagccttcgccgtgcatttggagccatgacagctgatagctccagacctgcatcctcctagcttgggggctctgaatgaaaggtttcttcccttccagttcgaatttggaaactcccaaagttctcaatggtttgttgtgagttccatgtcctcttggatcagtcactgtggccatgcatgtttggccacatgattaatccagtctgggtcatgaccttttcttcatccaaaacaaggtgatgggaagacaaaaacaatagctactacaaacaataggagtttataattatgtgctgatgtattcgaagatgtgttgacagtcgtgagtgtgtatcctaggaaaggcgagctggactctgtctccatggtggctctcaccccagggacctaggaacagcctgtcaccacacaattacttttataaccctggagatgaaaatctccttgtcctcaaaatacttccagaagaacaaccagatgggaaggaccttggttgggactctttccagttcacttggggcagagggaatttaatggctcacgtagctgaaaaggatgggctagattgggcttcaggctgcatcccaggactccaaacagggatctgtctctttggctctcagctctgctttcatttgagttggctttattcttgggcttcacagtgtggccccacagcaccagttattgataaaaagagctcccctttgctgacagaactgctggatttggttctcattggtccagacgaggaaggtatccagcctcaagtcatcattgtggccaggaagatggaatacaccaaatggacaggcctggcatgtacccacagagactgagagttggtgctggtggttgtggtggcagatgatattacctgaagaagggacgaatgggtgctgggcaggacaaagcatcagctgtccagttcaggcctctcctctttccctggtgtcttcattttcctccgtctccctgctgtcccttaccctctgcccaatctctcattactcctggtcttgggagttgccttctgaggatactccactgggggtacctgagcctggattagagggcagggggaggatattgcctagccaaagtgggtgttcaataaagaaccatttggagatggtcttctgtctggaa

SEQ ID NO: 9097 - protein, 106 aa, Homo sapiens; identical to SEQ ID NO: 9095

SEQ ID NO: 9098 - DNA, 531 bp, Homo sapiens
ctgagggaaggaggcggcggccatggagttgggcgagctgctctacaacaagtctgagtacatcgagacggcatctgggaacaaagtcagtcgccagtcagtgttgtgtggaagccagaacatcgttctcaatggcaagaactttgtcatttctgttttcctgagcccatatatcagatgtcacagtgcctgcagggatagaaagagatcagatgagtcagtaagactgagtgtgaacaatagagagtggtggggcctggtgaattggagaatgtgaccaatctaagcccaagctggttgttactgtgtgggaatacaggcccacgtggcaacaatcagctttccagagcgtctgattctttttcaaaagcaactggaaatctcactttttaaaatgcaagatgttccactactcaaatagtaatgtttaattttaaatgatttgttaaaatgccacgtgtccttcctgtaggagatagctaaaaaaaattaaaagaaataaataataaaaatgctgcatgagccaaacaa

SEQ ID NO: 9099 - protein, 84 aa, Homo sapiens
MELGELLYNKSEYIETASGNKVSRQSVLCGSQNIVLNGKNFVISVFLSPYIRCHSACRDRKRSDESVRLSVNNREWWGLVNWRM

SEQ ID NO: 9100 - DNA, 2449 bp, Homo sapiens
ccgggaccgacggctgggggctgccgagcggcggcggaggcgcccaggacgcctggctccggaccccgctggcccccagcgagatgatcacggctcagagcgcgctgccggagagggaagcgcaggagtccagcaccaccgacgaggatctcgcaggccggagagcggccaacgggagcagcgagaggggcggcgccgtcagcacccccgactatggggagaagaagctgccacaggcgctcatcatcggggtcaagaaaggagggacccgcgcgctgctggaggcgatccgcgtgcacccggacgtgcgggcggtgggcgtagagccgcacttcttcgacaggaactacgaaaaggggttggagtggtacagaaatgtgatgcccaagactttggatgggcaaataaccatggagaagactccaagttactttgtgacaaatgaggctcccaagcgcattcactccatggccaaggacatcaaactgattgtggtggtgagaaaccccgtgaccagggccatctctgactacacgcagacactgtcaaagaaacccgagatccccacctttgaggtgctggccttcaaaaaccggaccctcgggctgatcgatgcttcctggagtgccattcgaatagggatctatgcgctgcatctggaaaactggctccagtatttccccctctcccagatcctctttgtcagtggtgagcgactcattgtggaccccgccggggaaatggccaaagtacaggattttctaggcctcaaacgtgttgtgactgagaagcatttctatttcaacaaaaccaaggggttcccttgcctaaagaagccagaagacagcagtgccccgaggtgcttaggcaagagcaaaggtcggactcatcctcgcattgacccagatgtcatccacagactgaggaaattctacaaacccttcaacttgatgttttaccaaatgactggtcaagattttcagtgggaacaggaagagggtgataaatgaggctagagaggcagaggaaggctagtcaataagctaaggaggctccttgcctgagtccttgaataccccagcttctgcagcttcacttgctggagtgccaagtagatctcctcctccttcatgcagccaggattgcctccagtgctgttagcttaggcaaacaggtggatcccatggcatccccatggaggaaccaggcccatctgggcagcagcatctggttgaccagatggccaccagaacccactgttcattcttatcttctgctagttaatatagcctgaagacagaggataaatagttgtcaatgtcagagacagtgctattaatgtatatgtgagcgacaaaaaaggtctgctttataggggttctcactctagcttggggagccagggttctagccctgtatctgtcatgggcacctgctgtctaaacctctgcttgggcttctccccagaatgcactttgtggctgagtgctccaggactcctagggagcaaggtcctccctctaaggtgtttctagtcttctctttaaaggtctcatcccacaacccctgacttcctccctccccacatcatgaaggcagaggcatgcacattcctcactgaaaaagaaaacacacacccacccacacacacacacacagaagaaaatgaaagctgacacacctcgaagccttctttccaagagccctctaaatggggttgggtctcactcttcatgagtatcctgggttgtgcagaagcttagcatatgcccttgtgttcggatcaggcccacagggctgctcaaagagtagagtaattgtaaccgaggtcagagctctggggttggcagagatgagtggccatatctgggggtaaaagaagaaatcctgtcctcttggtgggaggttaccttacctgaagaccatctctcccaagcactgtagttctgagcatgtttttggggtggactctgtcccctagggtccctagaagggcaaagaccagagagttgacaagtctgttattaggaataatccttagccatgtaatggagaaaggagcagtcagcattcttccaatttgccccaccaccacctcctcgggcttcattttctctatttagagatggcagagagtgaggtagtggcgagaaagctgactccattcatcagatccagtttatgagggttgggggtgagcaagggctgtctgcagaaacccccatcaagagctgctgaatgaagtgtcccttcccatcagtttgattcaattaaaatgcatcatttgacataaagcacttgttcacagatctccaaaaccaggaattgttctagtaaaactggaaatttgtatgagtggggggagttaaatctgttcagctgttattaaactgtcatttctcccgctaaatgaaaaccgtgttgttataaagcttaatgcaacctgatt

SEQ ID NO: 9101 - protein, 308 aa, Homo sapiens
MITAQSALPEREAQESSTTDEDLAGRRAANGSSERGGAVSTPDYGEKKLPQALIIGVKKGGTRALLEAIRVHPDVRAVGVEPHFFDRNYEKGLEWYRNVMPKTLDGQITMEKTPSYFVTNEAPKRIHSMAKDIKLIVVVRNPVTRAISDYTQTLSKKPEIPTFEVLAFKNRTLGLIDASWSAIRIGIYALHLENWLQYFPLSQILFVSGERLIVDPAGEMAKVQDFLGLKRVVTEKHFYFNKTKGFPCLKKPEDSSAPRCLGKSKGRTHPRIDPDVIHRLRKFYKPFNLMFYQMTGQDFQWEQEEGDK

SEQ ID NO: 9102 - DNA, 434 bp, Homo sapiens
ctaaattgttacaaatgggacagtatatgtgccattccagatacctaatcacagctcaatcgatgctggtgtctttttcctttttccttctgcagaaaacatgctttacataggatctctgaacttaaagaatgggaagaagaaaaatcatgtttccagcttgggctgctgtttcatctgttggacttgcttgatccctgaatggaaaggaatgctatgcacactttttggatacaggaagtgagattcagaggggttaaacagctttcctaaagccacacagcgagagagtcgatctgaactgaagattgtttgacatcaaagctcatttctttccctaaatgtcagcattctttcctgacttattaatttgatttctgtcctcccctcatggaagttaattaaaggaatgcgagaaccttttagaaaatctc

SEQ ID NO: 9103 - protein, 47 aa, Homo sapiens
MLYIGSLNLKNGKKKNHVSSLGCCFICWTCLIPEWKGMLCTLFGYRK

SEQ ID NO: 9104 - DNA, 400 bp, Homo sapiens
cgtggctcaaatcctccaactgcaggactgccggccctgggactcatgaataatggaagtgcagtaaccactccttacagcccagacgactttccaggagcaggctgtaccccgaaagtaaacaaggaacaaggggcaaggagacagagagagatggggaaatgatccctgaatggaaaggaatgctatgcacactttttggatacaggaagtgagattcagaggggttaaacagctttcctaaagccacacagcgagagagtcgatctgaactgaagattgtttgacatcaaagctcatttctttccctaaatgtcagcattctttcctgacttattaatttgatttctgtcctcccctcatggaagttaattaaaggaatgcgagaaccttttagaaa

SEQ ID NO: 9105 - protein, 39 aa, Homo sapiens
MNNGSAVTTPYSPDDFPGAGCTPKVNKEQGARRQREMGK

SEQ ID NO: 9106 - DNA, 6835 bp, Homo sapiens
acgtgatttctcggcagcagccgccagttccatgcactggcggagcagctctaggcggcggcttctactttcagtttcgtgcagagcgcggaggagccgcgagcgctgagggagtctgcactatggaaacaacctgtcaatccagctcaaggcacacatagcccagacacccatgagaccctctccgtggggaccctagagcacctatcatgaacgaggagaccaaggctggctcctcatggaccccgttggcctccagctcggcaacaagaacctgtggagctgtcttgtgaggctgctcaccaaagacccagaatggctgaacgccaagatgaagttcttcctccccaacacggacctggattccaggaacgagaccttggaccctgaacagagagtcatcctgcaactcaacaagctgcatgtccagggttcggacacctggcagtctttcattcattgtgtgtgcatgcagctggaggtgcctctggacctggaggtgctgctgctgagtacttttggctatgatgatgggttcaccagccagctgggagctgaggggaaaagccaacctgaatctcagctccaccatggcctgaagcgcccacatcagagctgtgggtcctcaccccgccggaagcagtgcaagaagcagcagctagagttggccaagaagtacctgcagctcctgcggacctctgcccagcagcgctacaggagccaaatccctgggtcagggcagccccacgccttccaccaggtctatgtccctccaatcctgcgccgggccacagcatccttagacactccggagggggccattatgggggacgtcaaggtggaagatggtgctgacgtgagcatctcggacctcttcaacaccagggttaacaagggcccgagggtgaccgtgcttttggggaaggctggcatgggcaagaccacgctggcccaccggctctgccagaagtgggcagagggccatctgaactgtttccaggccctgttcctttttgaattccgccagctcaacttgatcacgaggttcctgacaccgtccgagctcctttttgatctgtacctgagccctgaatcggaccacgacactgtcttccagtacctggagaagaacgctgaccaagtcctgctgatctttgatgggctagatgaggccctccagcctatgggtcctgatggcccaggcccagtcctcacccttttctcccatctctgcaatgggaccctcctgcctggctgccgggtgatggctacctcccgtccagggaagctgcctgcctgcctgcctgcagaggcagccatggtccacatgttgggctttgatgggccacgggtggaagaatatgtgaatcacttcttcagcgcccagccatcgcgggagggggccctggtggagttacagacaaatggacgtctccgaagcctgtgtgcggtgcccgcactgtgccaagtcgcctgtctctgcctccaccatctgcttcctgaccacgccccaggccagtctgtggccctcctgcccaacatgactcagctctatatgcagatggtgctcgccctcagcccccctgggcacttgcccacctcgtccctactggacctgggggaggtggccctgaggggcctggagacagggaaggttatcttctatgcaaaagatattgctccacccttgatagcttttggggccactcacagcctgctgacttccttctgcgtctgcacaggccctgggcaccagcagacaggctatgctttcacccacctcagcctgcaggagtttcttgctgccctgcacctgatggccagccccaaggtgaacaaagacacacttacccagtatgttaccctccattcccgctgggtacagcggaccaaagctagactgggcctctcagaccacctccccaccttcctggcgggcctggcatcctgcacctgccgccccttccttagccacctggcgcagggcaatgaggactgtgtgggtgccaagcaggctgctgtagtgcaggtgttgaagaagttggccacccgcaagctcacagggccaaaggttgtagagctgtgtcactgtgtggatgagacacaggagcctgagctggccagtctcaccgcacaaagcctcccctatcaactgcccttccacaatttcccactgacctgcaccgacctggccaccctgaccaacatcctagagcacagggaggcccccatccacctggattttgatggctgtcccctggagccccactgccctgaggctctggtaggctgtgggcagatagagaatctcagctttaagagcaggaagtgtggggatgcctttgcagaagccctctccaggagcttgccgacaatggggaggctgcagatgctggggttagcaggaagtaaaatcactgcccgaggcatcagccacctggtgaaagctttgcctctctgtccacagctgaaagaagtcagttttcgggacaaccagctcagtgaccaggtggtgctgaacattgtggaggttctccctcacctaccacggctccggaagcttgacctgagcagcaacagcatctgcgtgtcaaccctactctgcttggcaagggtggcagtcacgtgtcctaccgtcaggatgcttcaggccagggaggcggacctcatcttccttctttccccgcccacagagacaactgcagagctacaaagagctccagacctgcaggaaagtgacggccagaggaaaggggctcagagcagaagcttgacgctcaggctgcagaagtgtcagctccaggtccacgatgcggaggccctcatagccctgctccaggaaggccctcacctggaggaagtggacctctcagggaaccagctggaagatgaaggctgtcggctgatggcagaggctgcatcccagctgcacatcgccaggaagctggacctcagtaacaacgggctttctgtggccggggtgcattgtgtgctgagggccgtgagtgcgtgctggaccctggcagagctgcacatcagcctgcagcacaaaactgtgatcttcatgtttgcccaggagccagaggagcagaaggggccccaggagagggctgcatttcttgacagcctcatgctccagatgccctctgagctgcctctgagctcccgaaggatgaggctgacacattgtggcctccaagaaaagcacctagagcagctctgcaaggctctgggaggaagctgccacctcggtcacctccacctcgacttctcaggcaatgctctgggggatgaaggtgcagcccggctggctcagctgctcccagggctgggagctctgcagtccttgaacctcagtgagaacggtttgtccctggatgccgtgttgggtttggttcggtgcttctccactctgcagtggctcttccgcttggacatcagctttgaaagccaacacatcctcctgagaggggacaagacaagcagggatatgtgggccactggatctttgccagacttcccagctgcagccaagttcttagggttccgtcagcgctgcatccccaggagcctctgcctcagtgagtgtcctctggagcccccaagcctcacccgcctctgtgccactctgaaggactgcccgggacccctggaactgcaattgtcctgtgagttcctgagtgaccagagcctggagactctactggactgcttacctcaactccctcagctgagcctgctgcagctgagccagacgggactgtccccgaaaagccccttcctgctggccaacaccttaagcctgtgtccacgggttaaaaaggtggatctcaggtccctgcaccatgcaactttgcacttcagatccaacgaggaggaggaaggcgtgtgctgtggcaggttcacaggctgcagcctcagccaggagcacgtagagtcactctgctggttgctgagcaagtgtaaagacctcagccaggtggatctctcagcaaacctgctgggcgacagcggactcagatgccttctggaatgtctgccgcaggtgcccatctccggtttgcttgatctgagtcacaacagcatttctcaggaaagtgccctgtacctgctggagacactgccctcctgcccacgtgtccgggaggcctcagtgaacctgggctctgagcagagcttccggattcacttctccagagaggaccaggctgggaagacactcaggctaagtgagtgcagcttccggccagagcacgtgtccaggctggccaccggcttgagcaagtccctgcagctgacggagctcacgctgacccagtgctgcctgggccagaagcagctggccatcctcctgagcttggtggggcgacccgcagggctgttcagcctcagggtgcaggagccgtgggcggacagagccagggttctctccctgttagaagtctgcgcccaggcctcaggcagtgtcactgaaatcagcatctccgagacccagcagcagctctgtgtccagctggaatttcctcgccaggaagagaatccagaagctgtggcactcaggttggctcactgtgaccttggagcccaccacagccttcttgtcgggcagctgatggagacatgtgccaggctgcagcagctcagcttgtctcaggttaacctctgtgaggacgatgatgccagttccctgctgctgcagagcctcctgctgtccctctctgagctgaagacatttcggctgacctccagctgtgtgagcaccgagggcctcgcccacctggcatctggtctgggccactgccaccacttggaggagctggacttgtctaacaatcaatttgatgaggagggcaccaaggcgctgatgagggcccttgaggggaaatggatgctaaagaggctggacctcagtcaccttctgctgaacagctccaccttggccttgcttactcacagactaagccagatgacctgcctgcagagcctcagactgaacaggaacagtatcggtgatgtcggttgctgccacctttctgaggctctcagggctgccaccagcctagaggagctggacttgagccacaaccagattggagacgctggtgtccagcacttagctaccatcctgcctgggctgccagagctcaggaagatagacctctcagggaatagcatcagctcagccgggggagtgcagttggcagagtctctcgttctttgcaggcgcctggaggagttgatgcttggctgcaatgccctgggggatcccacagccctggggctggctcaggagctgccccagcacctgagggtcctacacctaccattcagccatctgggcccaggtggggccctgagcctggcccaggccctggatggatccccccatttggaagagatcagcttggcggaaaacaacctggctggaggggtcctgcgtttctgtatggagctcccgctgctcagacagatagacctggtttcctgtaagattgacaaccagactgccaagctcctcacctccagcttcacgagctgccctgccctggaagtaatcttgctgtcctggaatctcctcggggatgaggcagctgccgagctggcccaggtgctgccgcagatgggccggctgaagagagtggacctggagaagaatcagatcacagctttgggggcctggctcctggctgaaggactggcccaggggtctagcatccaagtcatccgcctctggaataaccccattccctgcgacatggcccagcacctgaagagccaggagcccaggctggactttgccttctttgacaaccagccccaggccccttggggtacttgatggccccctcaagacctttggaatccagccaagtgatgcacccaaatgatccacctttcgcccactgggataattgactcaggaaagaagagcctcggcagggcgctctgcactccacccaggaggaaggatacgtgtgtcctgctgcagtcctcagggagaacttttttgggaaccaggagctgggtctggacaaaggagtaccctgcattacgtgggatatgtgtgatcaattggggacatgcgacacacaatgagggtgtcatgacaatgcatgacacgtacggttatatgtggcagtgtgaccccttgacatgtggcgttacatgaaagtcagtgtggcacgtgttctgtggcatgggtgctggcatcccaagtagcaggatacatgattgttggtctatatatgacacatgacaaatgtccatgtcacaggactcatggctggccagatgacctcaggctggcccaagatctaatttattaatttttaaagcaaatacatatttatagattgtgtgtatggagcagctaagtcaggaaaagtcttccgcccgagctgggaggggagagtgtccatgcactgaccagtccaggggctcaagggccagggctctggaacaagccagggactcagccattaagtcccctcctgcctcaatcctcagcctacccatctataaacttgatgactcctcccttacttacatactagcttccaaggacaggtggaggtagggccagcctggcgggagtggagaagcccagtctgtcctatgtaagggacaaagccaggtctaatggtactgggtagggggcactgccaagacaataagctaggctactgggtccagctactactttggtgggattcaggtgagtctccatgcacttcacatgttacccagtgttcttgttacttccaaggagaaccaagaatggctctgtcacactcgaagccaggcttgatcaataaacacaatggtattccacgtc

SEQ ID NO: 9107 - protein, 1866 aa, Homo sapiens
MDPVGLQLGNKNLWSCLVRLLTKDPEWLNAKMKFFLPNTDLDSRNETLDPEQRVILQLNKLHVQGSDTWQSFIHCVCMQLEVPLDLEVLLLSTFGYDDGFTSQLGAEGKSQPESQLHHGLKRPHQSCGSSPRRKQCKKQQLELAKKYLQLLRTSAQQRYRSQIPGSGQPHAFHQVYVPPILRRATASLDTPEGAIMGDVKVEDGADVSISDLFNTRVNKGPRVTVLLGKAGMGKTTLAHRLCQKWAEGHLNCFQALFLFEFRQLNLITRFLTPSELLFDLYLSPESDHDTVFQYLEKNADQVLLIFDGLDEALQPMGPDGPGPVLTLFSHLCNGTLLPGCRVMATSRPGKLPACLPAEAAMVHMLGFDGPRVEEYVNHFFSAQPSREGALVELQTNGRLRSLCAVPALCQVACLCLHHLLPDHAPGQSVALLPNMTQLYMQMVLALSPPGHLPTSSLLDLGEVALRGLETGKVIFYAKDIAPPLIAFGATHSLLTSFCVCTGPGHQQTGYAFTHLSLQEFLAALHLMASPKVNKDTLTQYVTLHSRWVQRTKARLGLSDHLPTFLAGLASCTCRPFLSHLAQGNEDCVGAKQAAVVQVLKKLATRKLTGPKVVELCHCVDETQEPELASLTAQSLPYQLPFHNFPLTCTDLATLTNILEHREAPIHLDFDGCPLEPHCPEALVGCGQIENLSFKSRKCGDAFAEALSRSLPTMGRLQMLGLAGSKITARGISHLVKALPLCPQLKEVSFRDNQLSDQVVLNIVEVLPHLPRLRKLDLSSNSICVSTLLCLARVAVTCPTVRMLQAREADLIFLLSPPTETTAELQRAPDLQESDGQRKGAQSRSLTLRLQKCQLQVHDAEALIALLQEGPHLEEVDLSGNQLEDEGCRLMAEAASQLHIARKLDLSNNGLSVAGVHCVLRAVSACWTLAELHISLQHKTVIFMFAQEPEEQKGPQERAAFLDSLMLQMPSELPLSSRRMRLTHCGLQEKHLEQLCKALGGSCHLGHLHLDFSGNALGDEGAARLAQLLPGLGALQSLNLSENGLSLDAVLGLVRCFSTLQWLFRLDISFESQHILLRGDKTSRDMWATGSLPDFPAAAKFLGFRQRCIPRSLCLSECPLEPPSLTRLCATLKDCPGPLELQLSCEFLSDQSLETLLDCLPQLPQLSLLQLSQTGLSPKSPFLLANTLSLCPRVKKVDLRSLHHATLHFRSNEEEEGVCCGRFTGCSLSQEHVESLCWLLSKCKDLSQVDLSANLLGDSGLRCLLECLPQVPISGLLDLSHNSISQESALYLLETLPSCPRVREASVNLGSEQSFRIHFSREDQAGKTLRLSECSFRPEHVSRLATGLSKSLQLTELTLTQCCLGQKQLAILLSLVGRPAGLFSLRVQEPWADRARVLSLLEVCAQASGSVTEISISETQQQLCVQLEFPRQEENPEAVALRLAHCDLGAHHSLLVGQLMETCARLQQLSLSQVNLCEDDDASSLLLQSLLLSLSELKTFRLTSSCVSTEGLAHLASGLGHCHHLEELDLSNNQFDEEGTKALMRALEGKWMLKRLDLSHLLLNSSTLALLTHRLSQMTCLQSLRLNRNSIGDVGCCHLSEALRAATSLEELDLSHNQIGDAGVQHLATILPGLPELRKIDLSGNSISSAGGVQLAESLVLCRRLEELMLGCNALGDPTALGLAQELPQHLRVLHLPFSHLGPGGALSLAQALDGSPHLEEISLAENNLAGGVLRFCMELPLLRQIDLVSCKIDNQTAKLLTSSFTSCPALEVILLSWNLLGDEAAAELAQVLPQMGRLKRVDLEKNQITALGAWLLAEGLAQGSSIQVIRLWNNPIPCDMAQHLKSQEPRLDFAFFDNQPQAPWGT

SEQ ID NO: 9108 - DNA, 560 bp, Homo sapiens
gtgcagagcgcggaggagccgcgagcgctgagggagtctgcactatggaaacaacctgtcaatccagctcaaggcacacatagcccagacacccatgagaccctctccgtggggaccctagagcacctatcatgaacgaggagaccaaggctggctcctcatggaccccgttggcctccagctcggcaacaagaacctgtggagctgtcttgtgaggctgctcaccaaagacccagaatggctgaacgccaagatgaagttcttcctccccaacacggacctggattccaggaacgagaccttggaccctgaacagagagtcatcctgcaactcaacaagctgcatgtccagggttcggacacctggcagtctttcattcattgtgtgtgcatgcagctggaggtgcctctggacctggaggtgctgctgctgagtacttttggctatgatgatggtaagggcaggtgtgagagacgcaaagcagccgggccagtacctgcgtcatggggagccgggaggagcccagggacccacctaagtcagagagagggtgtagccc

SEQ ID NO: 9109 - protein, 132 aa, Homo sapiens
MDPVGLQLGNKNLWSCLVRLLTKDPEWLNAKMKFFLPNTDLDSRNETLDPEQRVILQLNKLHVQGSDTWQSFIHCVCMQLEVPLDLEVLLLSTFGYDDGKGRCERRKAAGPVPASWGAGRSPGTHLSQREGV

SEQ ID NO: 9110 - DNA, 6967 bp, Homo sapiens
acagatgaggacgctgaggtacgaagaggctgcgtaacctaccagggtcacacagctttggtgtggagtagggactcaaatccagggccctggtacggaggcatttgccctcaccaagattcaggcactgagagaagctgacgggcctagagaatggcaagacttgagatagcagaaggaaggagagagggtgagaaatggatccccgtgctgaggtctggtctggaaggagaagtctgcaaggagtctgcactatggaaacaacctgtcaatccagctcaaggcacacatagcccagacacccatgagaccctctccgtggggaccctagagcacctatcatgaacgaggagaccaaggctggctcctcatggaccccgttggcctccagctcggcaacaagaacctgtggagctgtcttgtgaggctgctcaccaaagacccagaatggctgaacgccaagatgaagttcttcctccccaacacggacctggattccaggaacgagaccttggaccctgaacagagagtcatcctgcaactcaacaagctgcatgtccagggttcggacacctggcagtctttcattcattgtgtgtgcatgcagctggaggtgcctctggacctggaggtgctgctgctgagtacttttggctatgatgatgggttcaccagccagctgggagctgaggggaaaagccaacctgaatctcagctccaccatggcctgaagcgcccacatcagagctgtgggtcctcaccccgccggaagcagtgcaagaagcagcagctagagttggccaagaagtacctgcagctcctgcggacctctgcccagcagcgctacaggagccaaatccctgggtcagggcagccccacgccttccaccaggtctatgtccctccaatcctgcgccgggccacagcatccttagacactccggagggggccattatgggggacgtcaaggtggaagatggtgctgacgtgagcatctcggacctcttcaacaccagggttaacaagggcccgagggtgaccgtgcttttggggaaggctggcatgggcaagaccacgctggcccaccggctctgccagaagtgggcagagggccatctgaactgtttccaggccctgttcctttttgaattccgccagctcaacttgatcacgaggttcctgacaccgtccgagctcctttttgatctgtacctgagccctgaatcggaccacgacactgtcttccagtacctggagaagaacgctgaccaagtcctgctgatctttgatgggctagatgaggccctccagcctatgggtcctgatggcccaggcccagtcctcacccttttctcccatctctgcaatgggaccctcctgcctggctgccgggtgatggctacctcccgtccagggaagctgcctgcctgcctgcctgcagaggcagccatggtccacatgttgggctttgatgggccacgggtggaagaatatgtgaatcacttcttcagcgcccagccatcgcgggagggggccctggtggagttacagacaaatggacgtctccgaagcctgtgtgcggtgcccgcactgtgccaagtcgcctgtctctgcctccaccatctgcttcctgaccacgccccaggccagtctgtggccctcctgcccaacatgactcagctctatatgcagatggtgctcgccctcagcccccctgggcacttgcccacctcgtccctactggacctgggggaggtggccctgaggggcctggagacagggaaggttatcttctatgcaaaagatattgctccacccttgatagcttttggggccactcacagcctgctgacttccttctgcgtctgcacaggccctgggcaccagcagacaggctatgctttcacccacctcagcctgcaggagtttcttgctgccctgcacctgatggccagccccaaggtgaacaaagacacacttacccagtatgttaccctccattcccgctgggtacagcggaccaaagctagactgggcctctcagaccacctccccaccttcctggcgggcctggcatcctgcacctgccgccccttccttagccacctggcgcagggcaatgaggactgtgtgggtgccaagcaggctgctgtagtgcaggtgttgaagaagttggccacccgcaagctcacagggccaaaggttgtagagctgtgtcactgtgtggatgagacacaggagcctgagctggccagtctcaccgcacaaagcctcccctatcaactgcccttccacaatttcccactgacctgcaccgacctggccaccctgaccaacatcctagagcacagggaggcccccatccacctggattttgatggctgtcccctggagccccactgccctgaggctctggtaggctgtgggcagatagagaatctcagctttaagagcaggaagtgtggggatgcctttgcagaagccctctccaggagcttgccgacaatggggaggctgcagatgctggggttagcaggaagtaaaatcactgcccgaggcatcagccacctggtgaaagctttgcctctctgtccacagctgaaagaagtcagttttcgggacaaccagctcagtgaccaggtggtgctgaacattgtggaggttctccctcacctaccacggctccggaagcttgacctgagcagcaacagcatctgcgtgtcaaccctactctgcttggcaagggtggcagtcacgtgtcctaccgtcaggatgcttcaggccagggaggcggacctcatcttccttctttccccgcccacagagacaactgcagagctacaaagagctccagacctgcaggaaagtgacggccagaggaaaggggctcagagcagaagcttgacgctcaggctgcagaagtgtcagctccaggtccacgatgcggaggccctcatagccctgctccaggaaggccctcacctggaggaagtggacctctcagggaaccagctggaagatgaaggctgtcggctgatggcagaggctgcatcccagctgcacatcgccaggaagctggacctcagtaacaacgggctttctgtggccggggtgcattgtgtgctgagggccgtgagtgcgtgctggaccctggcagagctgcacatcagcctgcagcacaaaactgtgatcttcatgtttgcccaggagccagaggagcagaaggggccccaggagagggctgcatttcttgacagcctcatgctccagatgccctctgagctgcctctgagctcccgaaggatgaggctgacacattgtggcctccaagaaaagcacctagagcagctctgcaaggctctgggaggaagctgccacctcggtcacctccacctcgacttctcaggcaatgctctgggggatgaaggtgcagcccggctggctcagctgctcccagggctgggagctctgcagtccttgaacctcagtgagaacggtttgtccctggatgccgtgttgggtttggttcggtgcttctccactctgcagtggctcttccgcttggacatcagctttgaaagccaacacatcctcctgagaggggacaagacaagcagggatatgtgggccactggatctttgccagacttcccagctgcagccaagttcttagggttccgtcagcgctgcatccccaggagcctctgcctcagtgagtgtcctctggagcccccaagcctcacccgcctctgtgccactctgaaggactgcccgggacccctggaactgcaattgtcctgtgagttcctgagtgaccagagcctggagactctactggactgcttacctcaactccctcagctgagcctgctgcagctgagccagacgggactgtccccgaaaagccccttcctgctggccaacaccttaagcctgtgtccacgggttaaaaaggtggatctcaggtccctgcaccatgcaactttgcacttcagatccaacgaggaggaggaaggcgtgtgctgtggcaggttcacaggctgcagcctcagccaggagcacgtagagtcactctgctggttgctgagcaagtgtaaagacctcagccaggtggatctctcagcaaacctgctgggcgacagcggactcagatgccttctggaatgtctgccgcaggtgcccatctccggtttgcttgatctgagtcacaacagcatttctcaggaaagtgccctgtacctgctggagacactgccctcctgcccacgtgtccgggaggcctcagtgaacctgggctctgagcagagcttccggattcacttctccagagaggaccaggctgggaagacactcaggctaagtgagtgcagcttccggccagagcacgtgtccaggctggccaccggcttgagcaagtccctgcagctgacggagctcacgctgacccagtgctgcctgggccagaagcagctggccatcctcctgagcttggtggggcgacccgcagggctgttcagcctcagggtgcaggagccgtgggcggacagagccagggttctctccctgttagaagtctgcgcccaggcctcaggcagtgtcactgaaatcagcatctccgagacccagcagcagctctgtgtccagctggaatttcctcgccaggaagagaatccagaagctgtggcactcaggttggctcactgtgaccttggagcccaccacagccttcttgtcgggcagctgatggagacatgtgccaggctgcagcagctcagcttgtctcaggttaacctctgtgaggacgatgatgccagttccctgctgctgcagagcctcctgctgtccctctctgagctgaagacatttcggctgacctccagctgtgtgagcaccgagggcctcgcccacctggcatctggtctgggccactgccaccacttggaggagctggacttgtctaacaatcaatttgatgaggagggcaccaaggcgctgatgagggcccttgaggggaaatggatgctaaagaggctggacctcagtcaccttctgctgaacagctccaccttggccttgcttactcacagactaagccagatgacctgcctgcagagcctcagactgaacaggaacagtatcggtgatgtcggttgctgccacctttctgaggctctcagggctgccaccagcctagaggagctggacttgagccacaaccagattggagacgctggtgtccagcacttagctaccatcctgcctgggctgccagagctcaggaagatagacctctcagggaatagcatcagctcagccgggggagtgcagttggcagagtctctcgttctttgcaggcgcctggaggagttgatgcttggctgcaatgccctgggggatcccacagccctggggctggctcaggagctgccccagcacctgagggtcctacacctaccattcagccatctgggcccaggtggggccctgagcctggcccaggccctggatggatccccccatttggaagagatcagcttggcggaaaacaacctggctggaggggtcctgcgtttctgtatggagctcccgctgctcagacagatagacctggtttcctgtaagattgacaaccagactgccaagctcctcacctccagcttcacgagctgccctgccctggaagtaatcttgctgtcctggaatctcctcggggatgaggcagctgccgagctggcccaggtgctgccgcagatgggccggctgaagagagtggacctggagaagaatcagatcacagctttgggggcctggctcctggctgaaggactggcccaggggtctagcatccaagtcatccgcctctggaataaccccattccctgcgacatggcccagcacctgaagagccaggagcccaggctggactttgccttctttgacaaccagccccaggccccttggggtacttgatggccccctcaagacctttggaatccagccaagtgatgcacccaaatgatccacctttcgcccactgggataattgactcaggaaagaagagcctcggcagggcgctctgcactccacccaggaggaaggatacgtgtgtcctgctgcagtcctcagggagaacttttttgggaaccaggagctgggtctggacaaaggagtaccctgcattacgtgggatatgtgtgatcaattggggacatgcgacacacaatgagggtgtcatgacaatgcatgacacgtacggttatatgtggcagtgtgaccccttgacatgtggcgttacatgaaagtcagtgtggcacgtgttctgtggcatgggtgctggcatcccaagtagcaggatacatgattgttggtctatatatgacacatgacaaatgtccatgtcacaggactcatggctggccagatgacctcaggctggcccaagatctaatttattaatttttaaagcaaatacatatttatagattgtgtgtatggagcagctaagtcaggaaaagtcttccgcccgagctgggaggggagagtgtccatgcactgaccagtccaggggctcaagggccagggctctggaacaagccagggactcagccattaagtcccctcctgcctcaatcctcagcctacccatctataaacttgatgactcctcccttacttacatactagcttccaaggacaggtggaggtagggccagcctggcgggagtggagaagcccagtctgtcctatgtaagggacaaagccaggtctaatggtactgggtagggggcactgccaagacaataagctaggctactgggtccagctactactttggtgggattcaggtgagtctccatgcacttcacatgttacccagtgttcttgttacttccaaggagaaccaagaatggctctgtcacactcgaagccaggcttgatcaataaacacaatggtattccacgtc

SEQ ID NO: 9111 - protein, 1866 aa, Homo sapiens; identical to SEQ ID NO: 9107

SEQ ID NO: 9112 - DNA, 565 bp, Homo sapiens
gacatctgggtggaagtcaccagtgcctgcacatggaactatgaagatcaccatttttcagattaagaaactgaggctcacattgtgaaataacactctctggaaagctgactcagaaattggaatgagttgtctgtggatcctgtaaggagcctggacatggtgaagagaatgccttgaccatcaggagacagcttagcttgttgaatcttgatcacttcttctgaccgctttggatcttaaaagaacaaggtcgaggagtttcgcagacataactccttgggagcagtgcccaggtcaagaaagaaaatgtggccaatgccccaggatcttatttggtcatccaggctggactgcagtggtgtgatcatagctcactgcagcctcaaactgctggactccagtgatcttccagcctcagcctcccccggtagcaaggactacagggtcccagaaggaaccaacgctgcccacaccttaatttgagacttctggcctctgagaaatgagaaagagtctcactctctgtcgcccagcctggagtgcagtggcatcatctgagctc

SEQ ID NO: 9113 - protein, 58 aa, Homo sapiens
MWPMPQDLIWSSRLDCSGVIIAHCSLKLLDSSDLPASASPGSKDYRVPEGTNAAHTLI

SEQ ID NO: 9114 - DNA, 495 bp, Homo sapiens
gtggttatcacattaattcgtgcctcaatgaatgaatgaatggacaaacacaggccgggagcctgacccacttccctcttccctcccgggacccactgctccaggattgggcgaacctcaggcagaggtggaggaaaccttaaagaggatccagagtcataaaggggttattggaactatggttgtaaatgcagaaggtattcccatccgaacaaccttggacaactcaacaactgttcaatatgcaggccttcttcatcacctgacaatgaaagccaaaagcacagttcgtgatattgatcctcagaacgacctgacttttcttaggatcagatcaaagaaacatgaaatcatggtagctccagataaggaatatcttctgatcgtcattcagaatccatgtgaatagacctgcgatggccaaggctgtttaagcgacactgggttggaaacacttggctctctcatgagtattaaaattctatttcaatctaa

SEQ ID NO: 9115 - protein, 125 aa, Homo sapiens
MNEWTNTGREPDPLPSSLPGPTAPGLGEPQAEVEETLKRIQSHKGVIGTMVVNAEGIPIRTTLDNSTTVQYAGLLHHLTMKAKSTVRDIDPQNDLTFLRIRSKKHEIMVAPDKEYLLIVIQNPCE

SEQ ID NO: 9116 - DNA, 497 bp, Homo sapiens
cagccctgacgcttccgtggggccacttccttttttgtctcctagcaacggcgggtagcgttgttgacatcccgggaggctgtgccgccggcctgagcccagagtttcgcggcctccgcgatggcagaggtggaggaaaccttaaagaggatccagagtcataaaggggttattggaactatggttgtaaatgcagaaggtattcccatccgaacaaccttggacaactcaacaactgttcaatatgcaggccttcttcatcacctgacaatgaaagccaaaagcacagttcgtgatattgatcctcagaacgacctgacttttcttaggatcagatcaaagaaacatgaaatcatggtagctccagataaggaatatcttctgatcgtcattcagaatccatgtgaatagacctgcgatggccaaggctgtttaagcgacactgggttggaaacacttggctctctcatgagtattaaaattctatttcaatctaa

SEQ ID NO: 9117 - protein, 96 aa, Homo sapiens; identical to SEQ ID NO: 1354

SEQ ID NO: 9118 - DNA, 512 bp, Homo sapiens
atcccgggaggctgtgccgccggcctgagcccagagtttcgcggcctccgcgatggcagaggtggaggaaaccttaaagaggatccagagtcataaaggggttattggaactatggttgtaaatgcagaagatccacgctttgtgaccttcaagtatgcaagacagctgactgccttccagagaaaaagtggccaacaaatcacaataaaagattagcaaggtattcccatccgaacaaccttggacaactcaacaactgttcaatatgcaggccttcttcatcacctgacaatgaaagccaaaagcacagttcgtgatattgatcctcagaacgacctgacttttcttaggatcagatcaaagaaacatgaaatcatggtagctccagataaggaatatcttctgatcgtcattcagaatccatgtgaatagacctgcgatggccaaggctgtttaagcgacactgggttggaaacacttggctctctcatgagtattaaaattctatttc

SEQ ID NO: 9119 - protein, 54 aa, Homo sapiens
MAEVEETLKRIQSHKGVIGTMVVNAEDPRFVTFKYARQLTAFQRKSGQQITIKD

SEQ ID NO: 9120 - DNA, 970 bp, Homo sapiens
ccgggaggctgtgccgccggcctgagcccagagtttcgcggcctccgcgatggcagaggtggaggaaaccttaaagaggatccagagtcataaaggggttattggaactatggttgtaaatgcagaagggaagaagactaacaccatgtcacagagcaagaacttcagagcagactcactatagacaagatgttcaggggagtgcatttcatataaaaatatgttaacttagtactcaagtagtcagttaatggcttctgaaagatttatgcacaaaaatgttcatcatcaccccattagctataaaaaatataaggtaccaaatgaccaaacaataggagattgattatatgtccataaaatagtgaagtatgcagttattaaaaataatgttgatgacattgtcaacaaggacaacttgtatgttataattttgtgaagaaaaaagcaacagtcaagtttgtaaatatagtttcacacaactatacttaaaaatctacgtagcgacaaaaggatttgagggaaataaactaaaattgttaccagagagggataagccatcacttttttctcttctttacaactatcagtgttttccaatacttccacactgtacttattacttttctaatcagaaaaaatattaaccaaaattaaatttcataataggtattcccatccgaacaaccttggacaactcaacaactgttcaatatgcaggccttcttcatcacctgacaatgaaagccaaaagcacagttcgtgatattgatcctcagaacgacctgacttttcttaggatcagatcaaagaaacatgaaatcatggtagctccagataaggaatatcttctgatcgtcattcagaatccatgtgaatagacctgcgatggccaaggctgtttaagcgacactgggttggaaacacttggctctctcatgagtattaaaattctatttcaatctaactg

SEQ ID NO: 9121 - protein, 46 aa, Homo sapiens
MKAKSTVRDIDPQNDLTFLRIRSKKHEIMVAPDKEYLLIVIQNPCE

SEQ ID NO: 9122 - DNA, 397 bp, Homo sapiens
agttctggaggttagaagttgaaatcaagatgtccgaaggctcatgctgtctctgaagactctgtgggaggaccattccttacctcttcctagcttctggtattcccatccgaacaaccttggacaactcaacaactgttcaatatgcaggccttcttcatcacctgacaatgaaagccaaaagcacagttcgtgatattgatcctcagaacgacctgacttttcttaggatcagatcaaagaaacatgaaatcatggtagctccagataaggaatatcttctgatcgtcattcagaatccatgtgaatagacctgcgatggccaaggctgtttaagcgacactgggttggaaacacttggctctctcatgagtattaaaattctatttcaatctaa

SEQ ID NO: 9123 - protein, 50 aa, Homo sapiens
MLSLKTLWEDHSLPLPSFWYSHPNNLGQLNNCSICRPSSSPDNESQKHSS

SEQ ID NO: 9124 - DNA, 534 bp, Homo sapiens
tgcattcctgaccacggttgagcatgtctcggcctgcagctgcattgcaactacctagagaacatttgcaaaatttacacgtgcaggcactgctcccaggagtatggagttatgcagtggggctcagacatctgttgcatacaaaggtttggctgtttggcttcagtctcccttgtctccctcagccttgggaggagatatgaaggtgaatttggaattgctatcaaattccttaggtatccgtattaagggcactcaagaaatgagcctaacatggctcctggtttccttcagagaatgtgggtccagaaacgattaaacgagacaagcgctttcaagaatggaagagtgttacaaacttaggattttaccaggttttcataaaaatcttgaagaccatcaattttgactttgaagactgatttctctttcttttaagataactgctatgtccagaatgttttgctaaacagtatgaggataatatttacaggaaaacctattcaataaataaagcataataaaaaccttgct

SEQ ID NO: 9125 - protein, 71 aa, Homo sapiens
MELCSGAQTSVAYKGLAVWLQSPLSPSALGGDMKVNLELLSNSLGIRIKGTQEMSLTWLLVSFRECGSRND

SEQ ID NO: 9126 - DNA, 1347 bp, Homo sapiens
agtctagtctgtgacctgagccatcatggtagggtgtccagggtgaggggagggtggtgtgaatccccagtaatgcaggtcctttccaggccaggcccctggtccccaggagtgcggggatgcctgaggtctactgctgccttatccagagctgccatccccggcgatgactcagagttcctgtggccccagcatcatccctccatccctggctgtgaggcaggagcagagttgcagacctgagaggccttgaatttgtttgatataggactttgccaccagacaaagtgctttgcctgtgaggtctggcttggcctggcctctgagaaagaacaaacacagacctcactggaaggaacctggagaacgggagaggagaggctgctgctgtctgccctcccagcagcagatataaagacaatgggcttctaagtcccctagagtcccagctgtgtaatttaaggcgagttcatctctcacagcctcagtttcctcatttgctggcacctgtctttctccttcatagccattgtcactgttgcaatgatatcaacaatgcttacatttcagatagatccccagctgggttgaaaggaacgtcaagacccttcctttcttatgacctatgtatcaactcccttctaccttgcctccctccacttggagcgagttctagttggtgaaatgtagccagaggttcctggaaaggctttccttctcaagtaaagcctggctcagagaaaaccactggtctctttccttttcttcctcctgacatgaacatggggcaggaaggagcatggagaagacaagaacaaggctctcagaaggaaatggtgtggctggagccatgagaactggttgtggagggggtgaggaaggcaaatataatttctgacctacgtaatgatgtatgcacaagaagcctctcttgaatgtattaattcagtaaacagttatggagtccttacaatgtgctagtgggactttgaagatgaatccaaatttggatcctggcctggaaaggctcaaagcccaatatgggagtgattctgagcagaaacaaaggggaacgtatgtcttcattgtgactcagcgagcaaagagatggagtcttttccaagaagaaagtgggagatttgggaccactgacatatttggcccactgattccattcccctagaccaacacgtgttcatcaaattgcatcactcttatggggaacttaatgcaactccggtgcccattgcattagtttttgatgatggaattctctttgtgaacttgaacttgaggggtctggctacccctctgagacttcttttttgagataaaatcatataacat

SEQ ID NO: 9127 - protein, 74 aa, Homo sapiens
MESLQCASGTLKMNPNLDPGLERLKAQYGSDSEQKQRGTYVFIVTQRAKRWSLFQEESGRFGTTDIFGPLIPFP

SEQ ID NO: 9128 - DNA, 1049 bp, Homo sapiens
acagttggaattttgttctaaggatgatggaagccattggaaggttttctttgccaaagtgatgtgatctgatagaaggttttatgaagcccacgttgtctactgtgcagagaatggagtaacaggccaagaggaaccgtagggagaccagttaagaggcagagacagtgaagaggcaaatataatttctgacctacgtaatgatgtatgcacaagaagcctctcttgaatgtattaattcagtaaacagttatggagtccttacaatgtgctagtgggactttgaagatgaatccaaatttggatcctggcctggaaaggctcaaagcccaatatgggagggtctcactcttatcttcgttcttctccccgcactcccaccaccttacttactcccatggcatgctacatccttgaataaatatgcccaaggcagatgtggtaatgaagattggttgagaattctgaaggcagacgtcccagacgccaatcacacaatttctctgtggctcacttttcttatctgtgaaaagggagctagttaccaccagccccaaccccaatcctcttcccacctcacagaatggggagaggattcagtgggcagtccctggcataggggtcacagaatctacaccaccaaatatcattcatattctaattctgtattctgtgtcccctattgccccaagataagttcatttaaaacaaaaaagcttctatctcaggtagaaaacccatcatcactgggcattgtcttccagtgattctgagcagaaacaaaggggaacgtatgtcttcattgtgactcagcgagcaaagagatggagtcttttccaagaagaaagtgggagatttgggaccactgacatatttggcccactgattccattcccctagaccaacacgtgttcatcaaattgcatcactcttatggggaacttaatgcaactccggtgcccattgcattagtttttgatgatggaattctctttgtgaacttgaacttgaggggtctggctacccctctgagacttcttttttgagat

SEQ ID NO: 9129 - protein, 54 aa, Homo sapiens
MESLQCASGTLKMNPNLDPGLERLKAQYGRVSLLSSFFSPHSHHLTYSHGMLHP

SEQ ID NO: 9130 - DNA, 478 bp, Homo sapiens
acatgaacatggggcaggaaggagcatggagaagacaagaacaaggctctcagaaggaaatggtgtggctggagccatgagaactggttgtggagggggtgaggaaggcaaatataatttctgacctacgtaatgatgtatgcacaagaagcctctcttgaatgtattaattcagtaaacagttatggagtccttacaatgtgctagtgggactttgaagatgaatccaaatttggatcctggcctggaaaggctcaaagcccaatatgggagcctggatacaaatgtgaaacttatcttcttttattaaccaatcaatcacctcctgccaaaacaacatcagcaaaaacaacagaaaaaaacaaaaacaaaaacaaaaacaaatctgtgtacacaagacctttgtttccacagcagacttggctaaaggtttgggcatgcatatgcatacccccaaaattaaaaatggaaaattgaa

SEQ ID NO: 9131 - protein, 41 aa, Homo sapiens
MESLQCASGTLKMNPNLDPGLERLKAQYGSLDTNVKLIFFY

SEQ ID NO: 9132 - DNA, 283 bp, Homo sapiens
acaatgggcttctaagtcccctagagtcccagctgtgtaatttaaggcaaatataatttctgacctacgtaatgatgtatgcacaagaagcctctcttgaatgtattaattcagtaaacagttatggagtccttacaatgtgctagtgggactttgaagatgaatccaaatttggatcctggcctggaaaggctcaaagcccaatatgggagcctggatacaaatgtgaaacttatcttcttttattaaccaatcaatcacctcctgccaaaacaacatcagc

SEQ ID NO: 9133 - protein, 41 aa, Homo sapiens; identical to SEQ ID NO: 9131

SEQ ID NO: 9134 - DNA, 692 bp, Homo sapiens
aggccaggcccctggtccccaggagtgcggggatgcctgaggtctactgctgccttatccagagctgccatccccggcgatgactcagagttcctgtggccccagcatcatccctccatccctggctgtgaggcaggagcagagttgcagacctgagaggccttgaatttgtttgatataggactttgccaccagacaaagtgctttgcctgtgaggtctggcttggcctggcctctgagaaagaacaaacacagacctcactggaaggaacctggagaacgggagaggagaggctgctgctgtctgccctcccagcagcagatataaagacaatgggcttctaagtcccctagagtcccagctgtgtaatttaaggcgaatagatccccagctgggttgaaaggaacgtcaagacccttcctttcttatgacctatgtatcaactcccttctaccttgcctccctccacttggagcgagttctagttggtgaaatgtagccagaggttcctggaaaggctttccttctcaagtaaagcctggctcagagaaaaccactggtctctttccttttcttcctcctgacatgaacatggggcaggaaggagcatggagaagacaagaacaaggctctcagaaggaaatggtgtggctggagccatgagaactggttgtggagggggtgaggaagg

SEQ ID NO: 9135 - protein, 53 aa, Homo sapiens
ERTNTDLTGRNLENGRGEAAAVCPPSSRYKDNGLLSPLESQLCNLRRIDPQLG

SEQ ID NO: 9136 - DNA, 2429 bp, Homo sapiens
ccaagcctgtcattctgcaaaaacacagtttactcaacacaccacacacactcgcacacacacgcgcgcacacacacgcgcacaccggaccccgcgcgcacacgcacggagggcgcgagcgagcagacgcgcacaccggcgagccaagttccgcagcctggcatggcttctggggacctttacgaggttgaaaggattgtagacaagaggaagaacaagaaaggaaaatgggagtatcttatccgatggaaaggctacgggagcaccgaggacacgtgggagccggagcaccacctcttgcactgtgaggagtttattgatgaattcaatgggttgcacatgtccaaggacaagaggatcaagtcagggaagcagtccagtacctccaagctgctgcgtgacagtcgaggcccgtcggttgagaaactgtcccacagaccttcagatcctggaaagagcaaggggacctcccataaacggaagcgaattaaccctcccctggccaagccaaaaaaagggtattcaggcaagccctcttcaggaggtgacagggccaccaagacggtgtcttacaggactacccccagtggtttgcaaataatgcccctgaaaaagtctcagaacgggatggaaaatggggacgccggctctgagaaggatgagaggcactttggaaatgggtcccatcagcctggcttggatttgaatgatcatgttggagagcaagatatgggtgaatgtgacgtgaatcacgctacactggcggagaacgggctcggctctgctctgaccaacgggggattgaacctgcacagtccagtgaagaggaagctggaagcggagaaggactacgtctttgacaaaaggctcagatacagtgtccgccagaatgaaagcaactgtcggtttcgagacatcgttgtgcggaaggaagaagggttcacgcacatcctgctgtccagtcagacctcggataacaatgccctgacacctgagatcatgaaagaagtccggcgagcgctctgcaacgcagccacagacgacagcaaactgctgctcctcagcgcagtggggagcgtgttctgcagcggcctggattattcctacctaattggccggttgtccagcgaccggcgaaaggagagcactcggattgcagaagccatcagggactttgtgaaggcctttatccagtttaagaagcctatcgtggtggccatcaatgggccggccctgggcctgggtgcctccatcctgcccctctgtgacatcgtgtgggccagtgagaaggcctggttccagacgccctacgccaccatccgcctcacgcctgctggctgctcctcctacaccttcccccagatcctgggcgtcgcgctggccaatgagatgctgttctgtgggcggaagctcaccgcccaggaggcctgcagcagggggctggtgtcgcaggtcttctggcccaccacgttcagccaggaggtcatgctgcgggtcaaggagatggcatcctgcagtgccgtggtgttagaggagtccaaatgcctcgtgcggagcttcctgaaatcagtgctggaagacgtgaacgagaaggaatgcctcatgctcaagcagctctggagctcctccaaaggccttgactcccttttcagctacctgcaggacaaaatttatgaagtctgaggggccccagctcacgggcccccaacttccagctctgccctgtgtttcggaaaccagagcacagtgtctgccccggccaaggagtttgtcaaggtgtctctttatacgtagggttgtgtccatttcctcgtgtcctttggttgctcctccttggtttgattttgtgtaatggatggaaaacgcagcatacttggcctcccccacctccctgcccttcctggccagagagctgtccaaggctgtatcttcccagggctccgccaagcaccgctgtcctttccccacttgctgaaatgcaccatgacggtccaggaaggggaagaccactttcacattcttctgactcaggctgtgtctacacagtgcctctgacttggagacttggccatcatggctctctctggttgtatttagatcgggtgtcagaggacgaccaatcttagggaatttccagaccaatgagcaaaatgattgtgcacacctggcctcagtctcctttccgacgcaaatctgtgtgactattagggcttggtcttaaaacccaattgagtgatttgcaaacccagatattgtacatttagaaatgttttgttaaatatatatttttaaaacaatgtaagtggaaattctgataatttatgtgtattatatgtaaagctagttttgcaaaaacaaactactagggaaatgttttttctttccttggacttgttttatttatttatttttgtttatatattgtgatg

SEQ ID NO: 9137 - protein, 506 aa, Homo sapiens; identical to SEQ ID NO: 1356

SEQ ID NO: 9138 - DNA, 650 bp, Homo sapiens
gattcaagactgtttttcttacctcttcggtgcttctttcagcaatatgaagttaaaaccgggtcctgctctgctctgaccaacgggggattgaacctgcacagtccagtgaagaggaagctggaagcggagaaggactacgtctttgacaaaaggctcagatacagtgtccgccagaatgaaagcaactgtcggtttcgagacatcgttgtgcggaaggaagaagggttcacgcacatcctgctgtccagtcagacctcggataacaatgccctgacacctgagatcatgaaagaagtccggcgagcgctctgcaacgcagccacagacgacagcaaactgctgctcctcagcgcagtggggagcgtgttctgcagcggcctggattattcctacctaattggccggttgtccagcgaccggcgaaaggagagcactcggattgcagaagccatcagggactttgtgaaggcctttatccagtttaagaagcctatcgtggtggccatcaatgggccggccctgggcctgggtgcctccatcctgcccctctgtgacatcgtgtgggccagtgagaaggcctggttccagacgccctacgccaccatccgcctcacgcctgctggctgctcctcctacaccttccccca

SEQ ID NO: 9139 - protein, 119 aa, Homo sapiens
MKEVRRALCNAATDDSKLLLLSAVGSVFCSGLDYSYLIGRLSSDRRKESTRIAEAIRDFVKAFIQFKKPIVVAINGPALGLGASILPLCDIVWASEKAWFQTPYATIRLTPAGCSSYTF

SEQ ID NO: 9140 - DNA, 4357 bp, Homo sapiens
gggggccccgccgccccagcagcccaggacagccccctctccccgcccccagccccctcccccggcgcggccatggatgtgaccagcagctcgggcggcggcggcgacccccggcagatcgaggagaccaagccgctgctggggggcgacgtgtcggcccccgaaggcacgaagatgggcgccgtgccctgccgccgggctcttctgctttgcaacgggatgaggtacaaactgctgcaggagggcgacattcaggtctgtgtcatccggcacccgcggacctttctcagcaagatcctcacctcgaaattcctgaggcgctgggagccgcaccacctaacgctggccgacaacagcctggcgtccgccacgccaactgggtacatggaaaactcagtctcctacagcgcaattgaagacgttcagctgctgtcctgggagaatgccccgaagtactgtttacagctcacgattcctgggggaactgtcttactgcaggctgccaatagctacctgcgagaccagtggttccattctctgcaatggaagaaaaagatttacaaatataagaaagtgctgagtaacccaagccgctgggaagttgtcttgaaagagatccggaccctggtggacatggccctgacatcccccctgcaggatgactccatcaaccaggccccactggaaatcgtctcgaaactgctctcagagaacacaaacttgaccacccaggagcatgaaaacatcattgtggcaatcgctcctttgctggaaaacaaccacccaccaccagatctctgtgaattcttttgcaagcactgcagagagcggccccggtccatggtggtcatcgaggtgttcacccccgtggtgcagcgaatcctcaagcataacatggactttgggaagtgcccgcgactgaggctgtttactcaggagtacatccttgccttgaacgagctcaacgcggggatggaagtggtgaagaagttcattcagagcatgcacggccccacagggcactgcccccacccccgggtcctgcccaacctggtggccgtgtgcctggctgccatctactcctgctatgaagagttcatcaacagccgcgacaattccccaagcctgaaggaaatccggaacggctgccagcagccgtgcgaccggaagcccactttacctctgcgccttctgcaccccagcccggacctggtgtctcaggaagccacgctgtctgaggcccggctcaagtcggtggtcgtggcctccagtgagatccacgtggaggtggaacgcaccagcactgccaagccggcgctgacggccagcgcaggcaacgacagcgagcccaacctcatcgactgcctcatggtcagccccgcctgcagcaccatgagcatcgagctgggcccccaggccgaccgcacgctcggctgctacgtggaaatcctcaagctgctgtcagactatgatgactggagaccgtctctggccagtttgcttcaacccattccattccccaaagaagctctcgcacatgagaagttcaccaaggaactgaagtacgtgattcagaggttcgccgaagaccccaggcaagaggtccactcatgcctgctgagcgtgcgggccggcaaagatggctggttccagctctacagccccggaggggtggcctgcgacgatgacggggagctgttcgccagcatggtgcacatcctcatgggctcctgttacaagaccaaaaaattcctgctctccctggcagaaaacaagctgggtccctgcatgctcctggcactgagggggaaccagaccatggtggagatcctgtgcttgatgctggaatacaacatcatcgacaacaacgacacccaactgcagatcatctcaaccctggagagcacagacgtggggaagcgcatgtacgagcagctgtgtgaccggcagcgggagctgaaggagctgcaaaggaaaggcgggcccaccaggctaacactgccctccaagtccacagacgctgacttggctcgtttgctgagctccggctccttcggaaacctggagaacctcagtttggccttcaccaatgtaaccagtgcctgcgccgagcacctcatcaaactgccttcgctcaagcagctgaacctgtggtccactcagtttggagacgctggccttcggctcctgtcggaacacctcaccatgctccaggtgctgaacctgtgcgagaccccggtcacagacgctggcctgctggccctgagctccatgaagagtctctgcagtttaaacatgaacagcaccaagctctcagctgacacctacgaagatctgaaggccaagcttcccaatttgaaggaagtggacgtccgctacaccgaagcctggtgaagctcccagctcaaggcaggaagacgtttgcaaccgcgacaaaataactcttgactaacagccgcagagcagccggtcctggggtcccaccctggtgccctggctgtgagatagatggggagtctttctgggggcggaggggggagggggtggggagggggcccacaagcacgcccagcccccgccgaattcttttagcttcgtaattggaacctttgacctgatctaaagtggactttgtagcaacaagaggagcatcagcgggtcggggaggggtttgggggtgggctggggggtgggggaccctttgtggattttctttgcctttgtgtttgatgccgtcgtgtgggaaaagtcaactccgatgccaccattgcgggccggacgaaggatgctttcttcctagaggctccgagctgagctgcgaactcgccccccgcccttgggacaagaagacccagtcacatcactgcacccgtcctgtgtcctcaccattgctatgcaaagtgattcttgttgtacataagatttaaataatgcacctatttaagacatgttgacaaattgcgggtctgggacccgcctcttatttatgaagtctttgaccgtcccccccgcccgaccccaccgccctcccgcccccacctggcgtgtagtactgtataaaccagtcagctgtcgggttagtggtagtattattgttatttttttaaaggaaacaaacagacaacaaaaagaagaaaaaaaaaaagaacctccttggaaaaattaattgctttttcgtaatggattctctatgctaatgctctctcgtctgtctgtctgtctgcccactcccccacccaccactgtgcgtttctgatttccaaatgtctccaactccctcacgaggtggggctcaggctggaggaggagggattaagatccccttgctccactaaggcccaagctctttctctcggcaccttttagacttgaatgggaggctgctaacccgccctctccagtccaccccggtaaaagagctgttccccacccccagggagctcctgtccctgtcagcctttgctgtcccctgtccccaacggagactctgtcacccctgggctccccctgccatcgtgtgcttcacgtggccccatgcatgcccgcctctctgcatggtctcttgggaaaagagagatgtgtcgcctccgccagtccgactgccctccccaccccacccccgccaccccccacatgtgaccactgcaacgaagacactccttctgtccccacctgctccgaagacaaaccaacctccgtttcttttataaacagtcggctttttcttaataagccctcactgtacagaacagcccgttgatggtttatttggggtccccctctccccccagcccttttttctgttggtttagcacaaatacttccctcctccggcacctccaaacctaccccacagtcagtgtacttgttttatatatatttaatcttattcaatggaaaccatgcttttgtcgttttatactttgctaggtagactttattacccccccactatgccctcatttttttaaaaaaggaaaaaaaaaagaaactgggttccagtcttaattcattttccgtgccaggttttatttcgtgtgtgtgtgagtgtgttctgttttgtgttttgttttttgttgttgtttttagttgtttggttttcttttctttcccccctccggtcccatacttcacagcactctggtgcgggaagaagcagaagcaaaaaaaataaaaataaaaaaataaataaaaataaaaaaaataaaaaaggaaaaaaaaaaaagaagaaacaagacatgccacctttcccctcgcactgttgcttttcctgatggttaatactactgtcacgtagctgtgtacaaagagatgtgaaatactttcaggcaaaaataaactgtaagtgactcatcaa

SEQ ID NO: 9141 - protein, 773 aa, Homo sapiens
MDVTSSSGGGGDPRQIEETKPLLGGDVSAPEGTKMGAVPCRRALLLCNGMRYKLLQEGDIQVCVIRHPRTFLSKILTSKFLRRWEPHHLTLADNSLASATPTGYMENSVSYSAIEDVQLLSWENAPKYCLQLTIPGGTVLLQAANSYLRDQWFHSLQWKKKIYKYKKVLSNPSRWEVVLKEIRTLVDMALTSPLQDDSINQAPLEIVSKLLSENTNLTTQEHENIIVAIAPLLENNHPPPDLCEFFCKHCRERPRSMVVIEVFTPVVQRILKHNMDFGKCPRLRLFTQEYILALNELNAGMEVVKKFIQSMHGPTGHCPHPRVLPNLVAVCLAAIYSCYEEFINSRDNSPSLKEIRNGCQQPCDRKPTLPLRLLHPSPDLVSQEATLSEARLKSVVVASSEIHVEVERTSTAKPALTASAGNDSEPNLIDCLMVSPACSTMSIELGPQADRTLGCYVEILKLLSDYDDWRPSLASLLQPIPFPKEALAHEKFTKELKYVIQRFAEDPRQEVHSCLLSVRAGKDGWFQLYSPGGVACDDDGELFASMVHILMGSCYKTKKFLLSLAENKLGPCMLLALRGNQTMVEILCLMLEYNIIDNNDTQLQIISTLESTDVGKRMYEQLCDRQRELKELQRKGGPTRLTLPSKSTDADLARLLSSGSFGNLENLSLAFTNVTSACAEHLIKLPSLKQLNLWSTQFGDAGLRLLSEHLTMLQVLNLCETPVTDAGLLALSSMKSLCSLNMNSTKLSADTYEDLKAKLPNLKEVDVRYTEAW

SEQ ID NO: 9142 - DNA, 4131 bp, Homo sapiens
ggcttcttggatgggctgggcgtgcatggcataaccgtttgagaacaacaaaccaagccggccgggctgccgctctgtttcctgcgaggagggaagttacagatctccgccctggcgtccggggaaggatgggacaggctgctgagccaactgggtacatggaaaactcagtctcctacagcgcaattgaagacgttcagctgctgtcctgggagaatgccccgaagtactgtttacagctcacgattcctgggggaactgtcttactgcaggctgccaatagctacctgcgagaccagtggttccattctctgcaatggaagaaaaagatttacaaatataagaaagtgctgagtaacccaagccgctgggaagttgtcttgaaagagatccggaccctggtggacatggccctgacatcccccctgcaggatgactccatcaaccaggccccactggaaatcgtctcgaaactgctctcagagaacacaaacttgaccacccaggagcatgaaaacatcattgtggcaatcgctcctttgctggaaaacaaccacccaccaccagatctctgtgaattcttttgcaagcactgcagagagcggccccggtccatggtggtcatcgaggtgttcacccccgtggtgcagcgaatcctcaagcataacatggactttgggaagtgcccgcgactgaggctgtttactcaggagtacatccttgccttgaacgagctcaacgcggggatggaagtggtgaagaagttcattcagagcatgcacggccccacagggcactgcccccacccccgggtcctgcccaacctggtggccgtgtgcctggctgccatctactcctgctatgaagagttcatcaacagccgcgacaattccccaagcctgaaggaaatccggaacggctgccagcagccgtgcgaccggaagcccactttacctctgcgccttctgcaccccagcccggacctggtgtctcaggaagccacgctgtctgaggcccggctcaagtcggtggtcgtggcctccagtgagatccacgtggaggtggaacgcaccagcactgccaagccggcgctgacggccagcgcaggcaacgacagcgagcccaacctcatcgactgcctcatggtcagccccgcctgcagcaccatgagcatcgagctgggcccccaggccgaccgcacgctcggctgctacgtggaaatcctcaagctgctgtcagactatgatgactggagaccgtctctggccagtttgcttcaacccattccattccccaaagaagctctcgcacatgagaagttcaccaaggaactgaagtacgtgattcagaggttcgccgaagaccccaggcaagaggtccactcatgcctgctgagcgtgcgggccggcaaagatggctggttccagctctacagccccggaggggtggcctgcgacgatgacggggagctgttcgccagcatggtgcacatcctcatgggctcctgttacaagaccaaaaaattcctgctctccctggcagaaaacaagctgggtccctgcatgctcctggcactgagggggaaccagaccatggtggagatcctgtgcttgatgctggaatacaacatcatcgacaacaacgacacccaactgcagatcatctcaaccctggagagcacagacgtggggaagcgcatgtacgagcagctgtgtgaccggcagcgggagctgaaggagctgcaaaggaaaggcgggcccaccaggctaacactgccctccaagtccacagacgctgacttggctcgtttgctgagctccggctccttcggaaacctggagaacctcagtttggccttcaccaatgtaaccagtgcctgcgccgagcacctcatcaaactgccttcgctcaagcagctgaacctgtggtccactcagtttggagacgctggccttcggctcctgtcggaacacctcaccatgctccaggtgctgaacctgtgcgagaccccggtcacagacgctggcctgctggccctgagctccatgaagagtctctgcagtttaaacatgaacagcaccaagctctcagctgacacctacgaagatctgaaggccaagcttcccaatttgaaggaagtggacgtccgctacaccgaagcctggtgaagctcccagctcaaggcaggaagacgtttgcaaccgcgacaaaataactcttgactaacagccgcagagcagccggtcctggggtcccaccctggtgccctggctgtgagatagatggggagtctttctgggggcggaggggggagggggtggggagggggcccacaagcacgcccagcccccgccgaattcttttagcttcgtaattggaacctttgacctgatctaaagtggactttgtagcaacaagaggagcatcagcgggtcggggaggggtttgggggtgggctggggggtgggggaccctttgtggattttctttgcctttgtgtttgatgccgtcgtgtgggaaaagtcaactccgatgccaccattgcgggccggacgaaggatgctttcttcctagaggctccgagctgagctgcgaactcgccccccgcccttgggacaagaagacccagtcacatcactgcacccgtcctgtgtcctcaccattgctatgcaaagtgattcttgttgtacataagatttaaataatgcacctatttaagacatgttgacaaattgcgggtctgggacccgcctcttatttatgaagtctttgaccgtcccccccgcccgaccccaccgccctcccgcccccacctggcgtgtagtactgtataaaccagtcagctgtcgggttagtggtagtattattgttatttttttaaaggaaacaaacagacaacaaaaagaagaaaaaaaaaaagaacctccttggaaaaattaattgctttttcgtaatggattctctatgctaatgctctctcgtctgtctgtctgtctgcccactcccccacccaccactgtgcgtttctgatttccaaatgtctccaactccctcacgaggtggggctcaggctggaggaggagggattaagatccccttgctccactaaggcccaagctctttctctcggcaccttttagacttgaatgggaggctgctaacccgccctctccagtccaccccggtaaaagagctgttccccacccccagggagctcctgtccctgtcagcctttgctgtcccctgtccccaacggagactctgtcacccctgggctccccctgccatcgtgtgcttcacgtggccccatgcatgcccgcctctctgcatggtctcttgggaaaagagagatgtgtcgcctccgccagtccgactgccctccccaccccacccccgccaccccccacatgtgaccactgcaacgaagacactccttctgtccccacctgctccgaagacaaaccaacctccgtttcttttataaacagtcggctttttcttaataagccctcactgtacagaacagcccgttgatggtttatttggggtccccctctccccccagcccttttttctgttggtttagcacaaatacttccctcctccggcacctccaaacctaccccacagtcagtgtacttgttttatatatatttaatcttattcaatggaaaccatgcttttgtcgttttatactttgctaggtagactttattacccccccactatgccctcatttttttaaaaaaggaaaaaaaaaagaaactgggttccagtcttaattcattttccgtgccaggttttatttcgtgtgtgtgtgagtgtgttctgttttgtgttttgttttttgttgttgtttttagttgtttggttttcttttctttcccccctccggtcccatacttcacagcactctggtgcgggaagaagcagaagcaaaaaaaataaaaataaaaaaataaataaaaataaaaaaaataaaaaaggaaaaaaaaaaaagaagaaacaagacatgccacctttcccctcgcactgttgcttttcctgatggttaatactactgtcacgtagctgtgtacaaagagatgtgaaatactttcaggcaaaaataaactgtaagtgactcatcaa

SEQ ID NO: 9143 - protein, 679 aa, Homo sapiens; identical to SEQ ID NO: 1358

SEQ ID NO: 9144 - DNA, 4049 bp, Homo sapiens
gtgtacgcgcgcgagccccagaggctgcggcagcagcagagcagcagagcagcagcccctgcctggcgcgacgtgcttccagtgcattctgagtcactcctctcctggcaaggggcacattcctgctgacgacttgtctcccgtggaggagcaacaggctctgctttccctggcctgagaaccctggcatatgtgcttgcctctgctgacagttgccagagcgatggcaagtgttgcccagaaaaagatttacaaatataagaaagtgctgagtaacccaagccgctgggaagttgtcttgaaagagatccggaccctggtggacatggccctgacatcccccctgcaggatgactccatcaaccaggccccactggaaatcgtctcgaaactgctctcagagaacacaaacttgaccacccaggagcatgaaaacatcattgtggcaatcgctcctttgctggaaaacaaccacccaccaccagatctctgtgaattcttttgcaagcactgcagagagcggccccggtccatggtggtcatcgaggtgttcacccccgtggtgcagcgaatcctcaagcataacatggactttgggaagtgcccgcgactgaggctgtttactcaggagtacatccttgccttgaacgagctcaacgcggggatggaagtggtgaagaagttcattcagagcatgcacggccccacagggcactgcccccacccccgggtcctgcccaacctggtggccgtgtgcctggctgccatctactcctgctatgaagagttcatcaacagccgcgacaattccccaagcctgaaggaaatccggaacggctgccagcagccgtgcgaccggaagcccactttacctctgcgccttctgcaccccagcccggacctggtgtctcaggaagccacgctgtctgaggcccggctcaagtcggtggtcgtggcctccagtgagatccacgtggaggtggaacgcaccagcactgccaagccggcgctgacggccagcgcaggcaacgacagcgagcccaacctcatcgactgcctcatggtcagccccgcctgcagcaccatgagcatcgagctgggcccccaggccgaccgcacgctcggctgctacgtggaaatcctcaagctgctgtcagactatgatgactggagaccgtctctggccagtttgcttcaacccattccattccccaaagaagctctcgcacatgagaagttcaccaaggaactgaagtacgtgattcagaggttcgccgaagaccccaggcaagaggtccactcatgcctgctgagcgtgcgggccggcaaagatggctggttccagctctacagccccggaggggtggcctgcgacgatgacggggagctgttcgccagcatggtgcacatcctcatgggctcctgttacaagaccaaaaaattcctgctctccctggcagaaaacaagctgggtccctgcatgctcctggcactgagggggaaccagaccatggtggagatcctgtgcttgatgctggaatacaacatcatcgacaacaacgacacccaactgcagatcatctcaaccctggagagcacagacgtggggaagcgcatgtacgagcagctgtgtgaccggcagcgggagctgaaggagctgcaaaggaaaggcgggcccaccaggctaacactgccctccaagtccacagacgctgacttggctcgtttgctgagctccggctccttcggaaacctggagaacctcagtttggccttcaccaatgtaaccagtgcctgcgccgagcacctcatcaaactgccttcgctcaagcagctgaacctgtggtccactcagtttggagacgctggccttcggctcctgtcggaacacctcaccatgctccaggtgctgaacctgtgcgagaccccggtcacagacgctggcctgctggccctgagctccatgaagagtctctgcagtttaaacatgaacagcaccaagctctcagctgacacctacgaagatctgaaggccaagcttcccaatttgaaggaagtggacgtccgctacaccgaagcctggtgaagctcccagctcaaggcaggaagacgtttgcaaccgcgacaaaataactcttgactaacagccgcagagcagccggtcctggggtcccaccctggtgccctggctgtgagatagatggggagtctttctgggggcggaggggggagggggtggggagggggcccacaagcacgcccagcccccgccgaattcttttagcttcgtaattggaacctttgacctgatctaaagtggactttgtagcaacaagaggagcatcagcgggtcggggaggggtttgggggtgggctggggggtgggggaccctttgtggattttctttgcctttgtgtttgatgccgtcgtgtgggaaaagtcaactccgatgccaccattgcgggccggacgaaggatgctttcttcctagaggctccgagctgagctgcgaactcgccccccgcccttgggacaagaagacccagtcacatcactgcacccgtcctgtgtcctcaccattgctatgcaaagtgattcttgttgtacataagatttaaataatgcacctatttaagacatgttgacaaattgcgggtctgggacccgcctcttatttatgaagtctttgaccgtcccccccgcccgaccccaccgccctcccgcccccacctggcgtgtagtactgtataaaccagtcagctgtcgggttagtggtagtattattgttatttttttaaaggaaacaaacagacaacaaaaagaagaaaaaaaaaaagaacctccttggaaaaattaattgctttttcgtaatggattctctatgctaatgctctctcgtctgtctgtctgtctgcccactcccccacccaccactgtgcgtttctgatttccaaatgtctccaactccctcacgaggtggggctcaggctggaggaggagggattaagatccccttgctccactaaggcccaagctctttctctcggcaccttttagacttgaatgggaggctgctaacccgccctctccagtccaccccggtaaaagagctgttccccacccccagggagctcctgtccctgtcagcctttgctgtcccctgtccccaacggagactctgtcacccctgggctccccctgccatcgtgtgcttcacgtggccccatgcatgcccgcctctctgcatggtctcttgggaaaagagagatgtgtcgcctccgccagtccgactgccctccccaccccacccccgccaccccccacatgtgaccactgcaacgaagacactccttctgtccccacctgctccgaagacaaaccaacctccgtttcttttataaacagtcggctttttcttaataagccctcactgtacagaacagcccgttgatggtttatttggggtccccctctccccccagcccttttttctgttggtttagcacaaatacttccctcctccggcacctccaaacctaccccacagtcagtgtacttgttttatatatatttaatcttattcaatggaaaccatgcttttgtcgttttatactttgctaggtagactttattacccccccactatgccctcatttttttaaaaaaggaaaaaaaaaagaaactgggttccagtcttaattcattttccgtgccaggttttatttcgtgtgtgtgtgagtgtgttctgttttgtgttttgttttttgttgttgtttttagttgtttggttttcttttctttcccccctccggtcccatacttcacagcactctggtgcgggaagaagcagaagcaaaaaaaataaaaataaaaaaataaataaaaataaaaaaaataaaaaaggaaaaaaaaaaaagaagaaacaagacatgccacctttcccctcgcactgttgcttttcctgatggttaatactactgtcacgtagctgtgtacaaagagatgtgaaatactttcaggcaaaaataaactgtaagtgactcatcaa

SEQ ID NO: 9145 - protein, 631 aa, Homo sapiens
MCLPLLTVARAMASVAQKKIYKYKKVLSNPSRWEVVLKEIRTLVDMALTSPLQDDSINQAPLEIVSKLLSENTNLTTQEHENIIVAIAPLLENNHPPPDLCEFFCKHCRERPRSMVVIEVFTPVVQRILKHNMDFGKCPRLRLFTQEYILALNELNAGMEVVKKFIQSMHGPTGHCPHPRVLPNLVAVCLAAIYSCYEEFINSRDNSPSLKEIRNGCQQPCDRKPTLPLRLLHPSPDLVSQEATLSEARLKSVVVASSEIHVEVERTSTAKPALTASAGNDSEPNLIDCLMVSPACSTMSIELGPQADRTLGCYVEILKLLSDYDDWRPSLASLLQPIPFPKEALAHEKFTKELKYVIQRFAEDPRQEVHSCLLSVRAGKDGWFQLYSPGGVACDDDGELFASMVHILMGSCYKTKKFLLSLAENKLGPCMLLALRGNQTMVEILCLMLEYNIIDNNDTQLQIISTLESTDVGKRMYEQLCDRQRELKELQRKGGPTRLTLPSKSTDADLARLLSSGSFGNLENLSLAFTNVTSACAEHLIKLPSLKQLNLWSTQFGDAGLRLLSEHLTMLQVLNLCETPVTDAGLLALSSMKSLCSLNMNSTKLSADTYEDLKAKLPNLKEVDVRYTEAW

SEQ ID NO: 9146 - DNA, 556 bp, Homo sapiens
agtgccactgactacctgccaggctctcaccccatcttttggcccatctgggaccaaaaacagtgccataaaccttccttgtcccaaccaaagctgactgtcaccctctctcattctaggtcagactatgatgactggagaccgtctctggccagtttgcttcaacccattccattccccaaagaagctctcgcacatgagaagttcaccaaggaactgaagtacgtgattcagaggttcgccgaagaccccaggcaagaggtccactcatgcctgctgagcgtgcgggccggcaaagatggctggttccagctctacagccccggaggggtggcctgcgacgatgacggggagctgttcgccagcatggtgcacatcctcatgggctcctgttacaagaccaaaaaattcctgctctccctggcagaaaacaagctgggtccctgcatgctcctggcactgagggggaaccagaccatggtggaggcaggcggcatcacttctgccacatcctcctgctggcagtgagtcaccgcggccggccctcagtcaaagc

SEQ ID NO: 9147 - protein, 54 aa, Homo sapiens
MAGSSSTAPEGWPATMTGSCSPAWCTSSWAPVTRPKNSCSPWQKTSWVPACSWH

SEQ ID NO: 9148 - DNA, 2423 bp, Homo sapiens
ggaggaggataggggataggagggctcagggtctcgggaactcccagcagcaccctcaggcctctcccccgtctgcccgcaggacgctgacttggctcgtttgctgagctccggctccttcggaaacctggagaacctcagtttggccttcaccaatgtaaccagtgcctgcgccgagcacctcatcaaactgccttcgctcaagcagctgaacctgtggtccactcagtttggagacgctggccttcggctcctgtcggaacacctcaccatgctccaggtgctgaacctgtgcgagaccccggtcacagacgctggcctgctggccctgagctccatgaagagtctctgcagtttaaacatgaacagcaccaagctctcagctgacacctacgaagatctgaaggccaagcttcccaatttgaaggaagtggacgtccgctacaccgaagcctggtgaagctcccagctcaaggcaggaagacgtttgcaaccgcgacaaaataactcttgactaacagccgcagagcagccggtcctggggtcccaccctggtgccctggctgtgagatagatggggagtctttctgggggcggaggggggagggggtggggagggggcccacaagcacgcccagcccccgccgaattcttttagcttcgtaattggaacctttgacctgatctaaagtggactttgtagcaacaagaggagcatcagcgggtcggggaggggtttgggggtgggctggggggtgggggaccctttgtggattttctttgcctttgtgtttgatgccgtcgtgtgggaaaagtcaactccgatgccaccattgcgggccggacgaaggatgctttcttcctagaggctccgagctgagctgcgaactcgccccccgcccttgggacaagaagacccagtcacatcactgcacccgtcctgtgtcctcaccattgctatgcaaagtgattcttgttgtacataagatttaaataatgcacctatttaagacatgttgacaaattgcgggtctgggacccgcctcttatttatgaagtctttgaccgtcccccccgcccgaccccaccgccctcccgcccccacctggcgtgtagtactgtataaaccagtcagctgtcgggttagtggtagtattattgttatttttttaaaggaaacaaacagacaacaaaaagaagaaaaaaaaaaagaacctccttggaaaaattaattgctttttcgtaatggattctctatgctaatgctctctcgtctgtctgtctgtctgcccactcccccacccaccactgtgcgtttctgatttccaaatgtctccaactccctcacgaggtggggctcaggctggaggaggagggattaagatccccttgctccactaaggcccaagctctttctctcggcaccttttagacttgaatgggaggctgctaacccgccctctccagtccaccccggtaaaagagctgttccccacccccagggagctcctgtccctgtcagcctttgctgtcccctgtccccaacggagactctgtcacccctgggctccccctgccatcgtgtgcttcacgtggccccatgcatgcccgcctctctgcatggtctcttgggaaaagagagatgtgtcgcctccgccagtccgactgccctccccaccccacccccgccaccccccacatgtgaccactgcaacgaagacactccttctgtccccacctgctccgaagacaaaccaacctccgtttcttttataaacagtcggctttttcttaataagccctcactgtacagaacagcccgttgatggtttatttggggtccccctctccccccagcccttttttctgttggtttagcacaaatacttccctcctccggcacctccaaacctaccccacagtcagtgtacttgttttatatatatttaatcttattcaatggaaaccatgcttttgtcgttttatactttgctaggtagactttattacccccccactatgccctcatttttttaaaaaaggaaaaaaaaaagaaactgggttccagtcttaattcattttccgtgccaggttttatttcgtgtgtgtgtgagtgtgttctgttttgtgttttgttttttgttgttgtttttagttgtttggttttcttttctttcccccctccggtcccatacttcacagcactctggtgcgggaagaagcagaagcaaaaaaaataaaaataaaaaaataaataaaaataaaaaaaataaaaaaggaaaaaaaaaaaagaagaaacaagacatgccacctttcccctcgcactgttgcttttcctgatggttaatactactgtcacgtagctgtgtacaaagagatgtgaaatactttcaggcaaaaataaactgtaagtgactcatcaa

SEQ ID NO: 9149 - protein, 62 aa, Homo sapiens
MLQVLNLCETPVTDAGLLALSSMKSLCSLNMNSTKLSADTYEDLKAKLPNLKEVDVRYTEAW

SEQ ID NO: 9150 - DNA, 1556 bp, Homo sapiens
ccccgccgaattcttttagcttcgtaattggaacctttgacctgatctaaagtggactttgtagcaacaagaggagcatcagcgggtcggggaggggtttgggggtgggctggggggtgggggaccctttgtggattttctttgcctttgtgtttgatgccgtcgtgtgggaaaagtcaactccgatgccaccattgcgggccggacgaaggatgctttcttcctagaggctccgagctgagctgcgaactcgccccccgcccttgggacaagaagacccagtcacatcactgcacccgtcctgtgtcctcaccattgctatgcaaagtgattcttgttgtacataagatttaaataatgcacctatttaagacatgttgacaaattgcgggtctgggacccgcctcttatttatgaagtctttgaccgtcccccccaccactgtgcgtttctgatttccaaatgtctccaactccctcacgaggtggggctcaggctggaggaggagggattaagatccccttgctccactaaggcccaagctctttctctcggcaccttttagacttgaatgggaggctgctaacccgccctctccagtccaccccggtaaaagagctgttccccacccccagggagctcctgtccctgtcagcctttgctgtcccctgtccccaacggagactctgtcacccctgggctccccctgccatcgtgtgcttcacgtggccccatgcatgcccgcctctctgcatggtctcttgggaaaagagagatgtgtcgcctccgccagtccgactgccctccccaccccacccccgccaccccccacatgtgaccactgcaacgaagacactccttctgtccccacctgctccgaagacaaaccaacctccgtttcttttataaacagtcggctttttcttaataagccctcactgtacagaacagcccgttgatggtttatttggggtccccctctccccccagcccttttttctgttggtttagcacaaatacttccctcctccggcacctccaaacctaccccacagtcagtgtacttgttttatatatatttaatcttattcaatggaaaccatgcttttgtcgttttatactttgctaggtagactttattacccccccactatgccctcatttttttaaaaaaggaaaaaaaaaagaaactgggttccagtcttaattcattttccgtgccaggttttatttcgtgtgtgtgtgagtgtgttctgttttgtgttttgttttttgttgttgtttttagttgtttggttttcttttctttcccccctccggtcccatacttcacagcactctggtgcgggaagaagcagaagcaaaaaaaataaaaataaaaaaataaataaaaataaaaaaaataaaaaaggaaaaaaaaaaaagaagaaacaagacatgccacctttcccctcgcactgttgcttttcctgatggttaatactactgtcacgtagctgtgtacaaagagatgtgaaatactttcaggcaaaaataaactgtaagtgactcatcaa

SEQ ID NO: 9151 - protein, 73 aa, Homo sapiens
MPASLHGLLGKERCVASASPTALPTPPPPPPTCDHCNEDTPSVPTCSEDKPTSVSFINSRLFLNKPSLYRTAR

SEQ ID NO: 9152 - DNA, 1664 bp, Homo sapiens
agcttcgtaattggaacctttgacctgatctaaagtggactttgtagcaacaagaggagcatcagcgggtcggggaggggtttgggggtgggctggggggtgggggaccctttgtggattttctttgcctttgtgtttgatgccgtcgtgtgggaaaagtcaactccgatgccaccattgcgggccggacgaaggatgctttcttcctagaggctccgagctgagctgcgaactcgccccccgcccttgggacaagaagacccagtcacatcactgcacccgtcctgtgtcctcaccattgctatgcaaagtgattcttgttgtacataagatttaaataatgcacctggcgtgtagtactgtataaaccagtcagctgtcgggttagtggtagtattattgttatttttttaaaggaaacaaacagacaacaaaaagaagaaaaaaaaaaagaacctccttggaaaaattaattgctttttcgtaatggattctctatgctaatgctctctcgtctgtctgtctgtctgcccactcccccacccaccactgtgcgtttctgatttccaaatgtctccaactccctcacgaggtggggctcaggctggaggaggagggattaagatccccttgctccactaaggcccaagctctttctctcggcaccttttagacttgaatgggaggctgctaacccgccctctccagtccaccccggtaaaagagctgttccccacccccagggagctcctgtccctgtcagcctttgctgtcccctgtccccaacggagactctgtcacccctgggctccccctgccatcgtgtgcttcacgtggccccatgcatgcccgcctctctgcatggtctcttgggaaaagagagatgtgtcgcctccgccagtccgactgccctccccaccccacccccgccaccccccacatgtgaccactgcaacgaagacactccttctgtccccacctgctccgaagacaaaccaacctccgtttcttttataaacagtcggctttttcttaataagccctcactgtacagaacagcccgttgatggtttatttggggtccccctctccccccagcccttttttctgttggtttagcacaaatacttccctcctccggcacctccaaacctaccccacagtcagtgtacttgttttatatatatttaatcttattcaatggaaaccatgcttttgtcgttttatactttgctaggtagactttattacccccccactatgccctcatttttttaaaaaaggaaaaaaaaaagaaactgggttccagtcttaattcattttccgtgccaggttttatttcgtgtgtgtgtgagtgtgttctgttttgtgttttgttttttgttgttgtttttagttgtttggttttcttttctttcccccctccggtcccatacttcacagcactctggtgcgggaagaagcagaagcaaaaaaaataaaaataaaaaaataaataaaaataaaaaaaataaaaaaggaaaaaaaaaaaagaagaaacaagacatgccacctttcccctcgcactgttgcttttcctgatggttaatactactgtcacgtagctgtgtacaaagagatgtgaaatactttcaggcaaaaataaactgtaagtgactcatcaa

SEQ ID NO: 9153 - protein, 73 aa, Homo sapiens; identical to SEQ ID NO: 9151

SEQ ID NO: 9154 - DNA, 1519 bp, Homo sapiens
gtgtttgatgccgtcgtgtgggaaaagtcaactccgatgccaccattgcgggccggacgaaggatgctttcttcctagaggctccgagctgagctgcgaactcgccccccgcccttgggacaagaagacccagtcacatcactgcacccgtcctgtgtcctcaccattgctatgcaaagtgattcttgttgtacataagatttaaataatgcacctatttaagacatgttgacaaattgcgggtctgggacccgcctcttatttatgaagtctttgaccgtcccccccgcccgaccccaccgccctcccgcccccacctggcgtgtagtactgtataaaccagtcagctgtcgggttagtggtagtattattgttatttttttaaaggaaacaaacagacaacaaaaagaagaaaaaaaaaaagaacctccttggaaaaattaattgctttttcgtaatggattctctatgctaatgctctctcgtctgtctgtctgtctgcccactcccccacccaccactgtgcgtttctgatttccaaatgtctccaactccctcacgaggtggggctcaggctggaggaggagggattaagatccccttgctccactaaggcccaagctctttctctcggcaccttttagacttgaatgggaggctgctaacccgccctctccagtccaccccggtaaaagagctgttccccacccccagggagctcctgtccctgtcagcctttgctgtcccctgtccccaacggagactctgtcaccccccacccccgccaccccccacatgtgaccactgcaacgaagacactccttctgtccccacctgctccgaagacaaaccaacctccgtttcttttataaacagtcggctttttcttaataagccctcactgtacagaacagcccgttgatggtttatttggggtccccctctccccccagcccttttttctgttggtttagcacaaatacttccctcctccggcacctccaaacctaccccacagtcagtgtacttgttttatatatatttaatcttattcaatggaaaccatgcttttgtcgttttatactttgctaggtagactttattacccccccactatgccctcatttttttaaaaaaggaaaaaaaaaagaaactgggttccagtcttaattcattttccgtgccaggttttatttcgtgtgtgtgtgagtgtgttctgttttgtgttttgttttttgttgttgtttttagttgtttggttttcttttctttcccccctccggtcccatacttcacagcactctggtgcgggaagaagcagaagcaaaaaaaataaaaataaaaaaataaataaaaataaaaaaaataaaaaaggaaaaaaaaaaaagaagaaacaagacatgccacctttcccctcgcactgttgcttttcctgatggttaatactactgtcacgtagctgtgtacaaagagatgtgaaatactttcaggcaaaaataaactgtaagtgactcatcaa

SEQ ID NO: 9155 - protein, 72 aa, Homo sapiens [sequence omitted]

SEQ ID NO: 9156 - DNA, 724 bp, Homo sapiens
cttgggaaaagagagatgtgtcgcctccgccagtccgactgccctccccaccccacccccgccaccccccacatgtgaccactgcaacgaagacactccttctgtccccacctgctccgaagacaaaccaacctccgtttcttttataaacagtcggctttttcttaataagccctcactgtacagaacagcccgttgatggtttatttggggtccccctctccccccagcccttttttctgttggtttagcacaaatacttccctcctccggcacctccaaacctaccccacagtcagtgtacttgttttatatatatttaatcttattcaatggaaaccatgcttttgtcgttttatactttgctaggtagactttattacccccccactatgccctcatttttttaaaaaaggaaaaaaaaaagaaactgggttccagtcttaattcattttccgtgccaggttttatttcgtgtgtgtgtgagtgtgttctgttttgtgttttgttttttgttgttgtttttagttgtttggttttcttttctttcccccctccggtcccatacttcacagcactctggtgcgggaagaagcagaagccaagacatgccacctttcccctcgcactgttgcttttcctgatggttaatactactgtcacgtagctgtgtacaaagagatgtgaaatactttcaggcaaaaataaactgtaagtgactcat

SEQ ID NO: 9157 - protein, 56 aa, Homo sapiens
MVYLGSPSPPSPFFCWFSTNTSLLRHLQTYPTVSVLVLYIFNLIQWKPCFCRFILC

SEQ ID NO: 9158 - DNA, 1322 bp, Homo sapiens
ctccagtgttgatattttatcttgttgctgtggttagcctcttaagtttgttcacttgttccctgaagaaatacaggtattcatgctagtgagagactggcagcaggactgttatttactgccatattttgagtcaactttctgcagatttgataagagcagctcaagagtttagcagcatttcagaggaaaaataaaaacgaagagcagacttatagatgtacctttgcttctgcctacatttatcgggctcttactgtgcttcagtcatcatattgggacagatgaaggagatgacccagacacccagtccttaaggtctccagaaaagatagatgctcagaaagttcagatgtgtttatgcaaaggggactggactcagaaaccaagaaacaactagaagaagaagaaaagaaaatcattagtgaagagcactggtacttggatttgccagagcttaaagagaaagagagtttcataatagaagagcagagtttcttactatgtgaagatcttctctatggaagaatgtcattcagaggatttaatcctgaggttgagaaattgatgcttcagatgaatgctaagcacaaagcagaagaagttgaagatgaaacagtagagcttgatgtgtcagatgaagagatggctagaagatatgagaccttggtggggacaattgggaaaaagtttgccagaaagagagaccatgccaattatgaagaagatgaaaatggagacataacaccaattaaagcaaagaagatgttcttaaagccccaggattaagatggatgccttaagcgatggcccaggggtgcttggtggaagtcagcagggcatctggagctcatcccaatgataagtacctaggacttctgagaactactgatttaatttcgctcccaggaagtgaatgaggtacatgtctcctctctcctcaaatctctgtaaggaaggttttattgctctgtgacctcagttctctggtgagttatgagaaaagataggactttgaagttaatctggccttttttttttttttcactgtgagtatgagaatgatgcacctcccaactctgggaagtaacgagttcttcccagtgccttaccagcaccacaatccacggacttactaccggacttactacgtgtcttatgtacctgtctgcacagtcgacttctgattgacaaactcatttcaccataaaagaagtggggtaatgggggcttatgcctcttgagtgcactggtcttagcatatcccccatcacccaggaatagcgggcataataggacgatggaatggtctgctgaagaca

SEQ ID NO: 9159 - protein, 142 aa, Homo sapiens
MQRGLDSETKKQLEEEEKKIISEEHWYLDLPELKEKESFIIEEQSFLLCEDLLYGRMSFRGFNPEVEKLMLQMNAKHKAEEVEDETVELDVSDEEMARRYETLVGTIGKKFARKRDHANYEEDENGDITPIKAKKMFLKPQD

SEQ ID NO: 9160 - DNA, 1764 bp, Homo sapiens
gagaaggagaggggctgggcagtggggtgaagagggaagaaaaaggcagggattatgaagatgtggtattcaaagagtagggtttggataggcgagcattccaaagtatgtctgctgcaatgggaaaggagaggtgccactgcccgcagaaattgatggggggcagggacgggtgttagaaaatggccctaattactggattctgaaacactgaatacactccccctaggaaaaggttttaaactattatcactcttttaagccttagaaaaactagttaagactgatttctcatcttttattccttctcctcttgctaaaaagaagagattacacatttaaaaaaaaaaaggtcagaggataattatcacaaaaaggtttatgtgaaagagttggaggagagaccctgtggtgcatggatgttacatgggatgcattatccactctaaagtttaggagggtaaggctgaggtgcagattccctccattaaacagggccagccttccacttctcccacctcctccactcaccaccaccaccaccaagagatgcatttaaaattattactgacgactagtgtttcttccatatggcttaaagatgggtgggggaagttcagggaaaatctgaaagtttattatttcttcccccactcaccggaatgtgtcagcagtatgcctgctttaaatatgagtaactaatactaagatttatgatcttaaatacactttaaattcaccctaagtataattcagtggggctttgccttactatttttttgactcagagcttacttctcttacaccattgtggtatcaagtattacagagagtcccttatcaattttgactagttctctagattatttgacttcagtttctctgccttcaggtaagtttgacatcagttcctttcacaagcgttttctagcctgaaggtcagcactggtgtatttttcagaaattgatgcttcagatgaatgctaagcacaaagcagaagaagttgaagatgaaacagtagagcttgatgtgtcagatgaagagatggctagaagatatgagaccttggtggggacaattgggaaaaagtttgccagaaagagagaccatgccaattatgaagaagatgaaaatggagacataacaccaattaaagcaaagaagatgttcttaaagccccaggattaagatggatgccttaagcgatggcccaggggtgcttggtggaagtcagcagggcatctggagctcatcccaatggtgtctctatagttattaatactgtaacgtttacttgtaaagagattatcattttagaaacatgctgtttttgaaacagatgtgtgatggatgttgtacatcctttgcttcttggtattcattcagagtggatttttagcccctgatctacaaatgtacattgttacagggctgcttcctaaagattttttttacctcaggtttctcttaatatagttctccagtcactgaccttgaattgacttacataaactactgccaatgtttaaattgcccttatgtttatatttattatgtcaagccaattcgtacatacaatttggaatcaaatgtcataagaatttattatataaatttatcaagaataaaaatgcctctccagccttaagtatttacatgctcccaggtcattgtcagtttatggtattatgttgttttatttaaagcattgaattgatagaaaaatttgctctgtaataaaaatctactttcacatacttttt

SEQ ID NO: 9161 - protein, 73 aa, Homo sapiens
MLQMNAKHKAEEVEDETVELDVSDEEMARRYETLVGTIGKKFARKRDHANYEEDENGDITPIKAKKMFLKPQD

SEQ ID NO: 9162 - DNA, 1042 bp, Homo sapiens
gctgggcggaagctaccatggcggccgagcgaaagacaaggttgtccaagaatctactgcgcatgaagtttatgcaaaggggactggactcagaaaccaagaaacaactagaagaagaagaaaagaaaatcattagtgaagagcactggagtttcataatagaagagcagagtttcttactatgtgaagatcttctctatggaagaatgtcattcagaggatttaatcctgaggttgagaaattgatgcttcagatgaatgctaagcacaaagcagaagaagttgaagatgaaacagtagagcttgatgtgtcagatgaagagatggctagaagatatgagaccttggtggggacaattgggaaaaagtttgccagaaagagagaccatgccaattatgaagaagatgaaaatggagacataacaccaattaaagcaaagaagatgttcttaaagccccaggattaagatggatgccttaagcgatggcccaggggtgcttggtggaagtcagcagggcatctggagctcatcccaatggtgtctctatagttattaatactgtaacgtttacttgtaaagagattatcattttagaaacatgctgtttttgaaacagatgtgtgatggatgttgtacatcctttgcttcttggtattcattcagagtggatttttagcccctgatctacaaatgtacattgttacagggctgcttcctaaagattttttttacctcaggtttctcttaatatagttctccagtcactgaccttgaattgacttacataaactactgccaatgtttaaattgcccttatgtttatatttattatgtcaagccaattcgtacatacaatttggaatcaaatgtcataagaatttattatataaatttatcaagaataaaaatgcctctccagccttaagtatttacatgctcccaggtcattgtcagtttatggtattatgttgttttatttaaagcattgaattgatagaaaaatttgctctgtaataaaaatctactttcacatacttttt

SEQ ID NO: 9163 - protein, 149 aa, Homo sapiens
MAAERKTRLSKNLLRMKFMQRGLDSETKKQLEEEEKKIISEEHWSFIIEEQSFLLCEDLLYGRMSFRGFNPEVEKLMLQMNAKHKAEEVEDETVELDVSDEEMARRYETLVGTIGKKFARKRDHANYEEDENGDITPIKAKKMFLKPQD

SEQ ID NO: 9164 - DNA, 1107 bp, Homo sapiens
atgtgcggtgaggctcgcggccggagtgcggcgctgggcggaagctaccatggcggccgagcgaaagacaaggttgtccaagaatctactgcgcatgaagtttatgcaaaggggactggactcagaaaccaagaaacaactagaagaagaagaaaagaaaatcattagtgaagagcactggtacttggatttgccagagcttaaagagaaagagagtttcataatagaagagcagagtttcttactatgtgaagatcttctctatggaagaatgtcattcagaggatttaatcctgaggttgagaaattgatgcttcagatgaatgctaagcacaaagcagaagaagttgaagatgaaacagtagagcttgatgtgtcagatgaagagatggctagaagatatgagaccttggtggggacaattgggaaaaagtttgccagaaagagagaccatgccaattatgaagaagatgaaaatggagacataacaccaattaaagcaaagaagatgttcttaaagccccaggattaagatggatgccttaagcgatggcccaggggtgcttggtggaagtcagcagggcatctggagctcatcccaatggtgtctctatagttattaatactgtaacgtttacttgtaaagagattatcattttagaaacatgctgtttttgaaacagatgtgtgatggatgttgtacatcctttgcttcttggtattcattcagagtggatttttagcccctgatctacaaatgtacattgttacagggctgcttcctaaagattttttttacctcaggtttctcttaatatagttctccagtcactgaccttgaattgacttacataaactactgccaatgtttaaattgcccttatgtttatatttattatgtcaagccaattcgtacatacaatttggaatcaaatgtcataagaatttattatataaatttatcaagaataaaaatgcctctccagccttaagtatttacatgctcccaggtcattgtcagtttatggtattatgttgttttatttaaagcattgaattgatagaaaaatttgctctgtaataaaaatctactttcacatacttttt

SEQ ID NO: 9165 - protein, 160 aa, Homo sapiens; identical to SEQ ID NO: 1363

SEQ ID NO: 9166 - DNA, 1655 bp, Homo sapiens
gagaaggagaggggctgggcagtggggtgaagagggaagaaaaaggcagggattatgaagatgtggtattcaaagagtagggtttggataggcgagcattccaaagtatgtctgctgcaatgggaaaggagaggtgccactgcccgcagaaattgatggggggcagggacgggtgttagaaaatggccctaattactggattctgaaacactgaatacactccccctaggaaaaggttttaaactattatcactcttttaagccttagaaaaactagttaagactgatttctcatcttttattccttctcctcttgctaaaaagaagagattacacatttaaaaaaaaaaaggtcagaggataattatcacaaaaaggtttatgtgaaagagttggaggagagaccctgtggtgcatggatgttacatgggatgcattatccactctaaagtttaggagggtaaggctgaggtgcagattccctccattaaacagggccagccttccacttctcccacctcctccactcaccaccaccaccaccaagagatgcatttaaaattattactgacgactagtgtttcttccatatggcttaaagatgggtgggggaagttcagggaaaatctgaaagtttattatttcttcccccactcaccggaatgtgtcagcagtatgcctgctttaaatatgagtaactaatactaagatttatgatcttaaatacactttaaattcaccctaagtataattcagtggggctttgccttactatttttttgactcagagcttacttctcttacaccattgtggtatcaagtattacagagagtcccttatcaattttgactagttctctagattatttgacttcagtttctctgccttcaggtaagtttgacatcagttcctttcacaagcgttttctagcctgaaggtcagcactggtgtatttttcagaaattgatgcttcagatgaatgctaagcacaaagcagaagaagttgaagatgaaacagtagagcttgatgtgtcagatgaagagatggctagaagatatgagaccttggtggggacaattgggaaaaagtttgccagaaagagagaccatgccaattatgaagaagatgaaaatggagacataacaccaattaaagcaaagaagatgttcttaaagccccaggattaagatggatgccttaagcgatggcccaggggtgcttggtggaagtcagcagggcatctggagctcatcccaatggtgtctctatagttattaatactgtaacgtttacttgtaaagagattatcattttagaaacatgctgtttttgaaacagatgtgtgatggatgttgtacatcctttgcttcttggtattcattcagagtggatttttagcccctgatctacaaatgtacattgttacagggctgcttcctaaagattttttttacctcaggtttctcttaatatagttctccagtcactgaccttgaattgacttacataaactactgccaatgtttaaattgcccttatgtttatatttattatgtcaagccaattcgtacatacaatttggaatcaaatgtcataagaatttattatataaatttatcaagaataaaaatgcctctccagccttaagtattt

SEQ ID NO: 9167 - protein, 73 aa, Homo sapiens; identical to SEQ ID NO: 9161

SEQ ID NO: 9168 - DNA, 933 bp, Homo sapiens
gctgggcggaagctaccatggcggccgagcgaaagacaaggttgtccaagaatctactgcgcatgaagtttatgcaaaggggactggactcagaaaccaagaaacaactagaagaagaagaaaagaaaatcattagtgaagagcactggagtttcataatagaagagcagagtttcttactatgtgaagatcttctctatggaagaatgtcattcagaggatttaatcctgaggttgagaaattgatgcttcagatgaatgctaagcacaaagcagaagaagttgaagatgaaacagtagagcttgatgtgtcagatgaagagatggctagaagatatgagaccttggtggggacaattgggaaaaagtttgccagaaagagagaccatgccaattatgaagaagatgaaaatggagacataacaccaattaaagcaaagaagatgttcttaaagccccaggattaagatggatgccttaagcgatggcccaggggtgcttggtggaagtcagcagggcatctggagctcatcccaatggtgtctctatagttattaatactgtaacgtttacttgtaaagagattatcattttagaaacatgctgtttttgaaacagatgtgtgatggatgttgtacatcctttgcttcttggtattcattcagagtggatttttagcccctgatctacaaatgtacattgttacagggctgcttcctaaagattttttttacctcaggtttctcttaatatagttctccagtcactgaccttgaattgacttacataaactactgccaatgtttaaattgcccttatgtttatatttattatgtcaagccaattcgtacatacaatttggaatcaaatgtcataagaatttattatataaatttatcaagaataaaaatgcctctccagccttaagtattt

SEQ ID NO: 9169 - protein, 149 aa, Homo sapiens; identical to SEQ ID NO: 9163

SEQ ID NO: 9170 - DNA, 998 bp, Homo sapiens
atgtgcggtgaggctcgcggccggagtgcggcgctgggcggaagctaccatggcggccgagcgaaagacaaggttgtccaagaatctactgcgcatgaagtttatgcaaaggggactggactcagaaaccaagaaacaactagaagaagaagaaaagaaaatcattagtgaagagcactggtacttggatttgccagagcttaaagagaaagagagtttcataatagaagagcagagtttcttactatgtgaagatcttctctatggaagaatgtcattcagaggatttaatcctgaggttgagaaattgatgcttcagatgaatgctaagcacaaagcagaagaagttgaagatgaaacagtagagcttgatgtgtcagatgaagagatggctagaagatatgagaccttggtggggacaattgggaaaaagtttgccagaaagagagaccatgccaattatgaagaagatgaaaatggagacataacaccaattaaagcaaagaagatgttcttaaagccccaggattaagatggatgccttaagcgatggcccaggggtgcttggtggaagtcagcagggcatctggagctcatcccaatggtgtctctatagttattaatactgtaacgtttacttgtaaagagattatcattttagaaacatgctgtttttgaaacagatgtgtgatggatgttgtacatcctttgcttcttggtattcattcagagtggatttttagcccctgatctacaaatgtacattgttacagggctgcttcctaaagattttttttacctcaggtttctcttaatatagttctccagtcactgaccttgaattgacttacataaactactgccaatgtttaaattgcccttatgtttatatttattatgtcaagccaattcgtacatacaatttggaatcaaatgtcataagaatttattatataaatttatcaagaataaaaatgcctctccagccttaagtattt

SEQ ID NO: 9171 - protein, 160 aa, Homo sapiens; identical to SEQ ID NO: 1363

SEQ ID NO: 9172 - DNA, 862 bp, Homo sapiens
gagtgcggcgctgggcggaagctaccatggcggccgagcgaaagacaaggttgtccaagaatctactgcgcatgaagtttatgcaaaggggactggactcagaaaccaagaaacaactagaagaagaagaaaagaaaatcattagtgaagagcactggtacttggatttgccagagcttaaagagaaagagagtttcataatagaagagcagagtttcttactatgtgaagatcttctctatggaagaatgtcattcagaggatttaatcctgaggttgaggtattaaatataattgcttcaaattaaaaatttttccaattgaatttttttctgctaataattgggcttaggtgtttctccaccaggtaccatttctactcattatatagaaaataacaagtcttgaaatatcgccatagctatttaaagaaattggaggcattgcagtctagttttatggtagaggtgagtagataatttcatatagcagtatacagcccttgacagagccaccataaatattaaaatttcaagttgtgtcttttacaggaacgtcaagattttattcatatcatgctattatgaaaagttattttctggcacctatacatgtattttttctaacggaaaaatgttactttagaattatgtcatttgactttttaatggactgttgtaatccaagcttgtaagtagatttttaaatgaatcctttcgacagtttgtttgaaaaatgaatatttgccttataactgagctattcatttgaattttcctgctccaggatagagaagcagacctttatttaacaaatattcattagaactctggctcatatgttaaaagccatcctatcaagt

SEQ ID NO: 9173 - protein, 93 aa, Homo sapiens
MAAERKTRLSKNLLRMKFMQRGLDSETKKQLEEEEKKIISEEHWYLDLPELKEKESFIIEEQSFLLCEDLLYGRMSFRGFNPEVEVLNIIASN

SEQ ID NO: 9174 - DNA, 1031 bp, Homo sapiens
tcgcggccggagtgcggcgctgggcggaagctaccatggcggccgagcgaaagacaaggttgtccaagaatctactgcgcatgaagatgggactgtctagtttcaggaaaacaagctcaggtcttccactgattcttcattgtgtttatgcaaaggggactggactcagaaaccaagaaacaactagaagaagaagaaaagaaaatcattagtgaagagcactggtacttggatttgccagagcttaaagagaaagaggagatcatggaatggattggttgattaagcacatgggctctgaagtcaggcagacctgggtttgatgcccagctccgccagttgtttacttgtcaccttgggagtttcataatagaagagcagagtttcttactatgtgaagatcttctctatggaagaatgtcattcagaggatttaatcctgaggttgaggtattaaatataattgcttcaaattaaaaatttttccaattgaatttttttctgctaataattgggcttaggtgtttctccaccaggtaccatttctactcattatatagaaaataacaagtcttgaaatatcgccatagctatttaaagaaattggaggcattgcagtctagttttatggtagaggtgagtagataatttcatatagcagtatacagcccttgacagagccaccataaatattaaaatttcaagttgtgtcttttacaggaacgtcaagattttattcatatcatgctattatgaaaagttattttctggcacctatacatgtattttttctaacggaaaaatgttactttagaattatgtcatttgactttttaatggactgttgtaatccaagcttgtaagtagatttttaaatgaatcctttcgacagtttgtttgaaaaatgaatatttgccttataactgagctattcatttgaattttcctgctccaggatagagaagcagacctttatttaacaaatattcattagaactctggctcatatgttaaaagccatcctatcaagt

SEQ ID NO: 9175 - protein, 58 aa, Homo sapiens
MAAERKTRLSKNLLRMKMGLSSFRKTSSGLPLILHCVYAKGTGLRNQETTRRRRKENH

SEQ ID NO: 9176 - DNA, 734 bp, Homo sapiens
gtcttgaaaaagttatttgtcattaaaaatgtgttaggtaatgaatttgttatttaaataatttttaaaatttcttacatagtaaatattaacaaatataaatcacacaaaacactctttaggtgttctaaataaatttttttttttgagatggagtctcattctgttgcccaggctggatcaggaatgcccttcagttgttccaagttgaggcacagcagctagatcatcattcccctacatggtctagccactggctaaaagtgtcccctgtgaggcagtgttaacactgaatagccctaattatcttcactgaattacagactgatacggctgacattaaaaatgggaaagtcgagactttcagagcacagacacatgcaatctccaaattcacagaatagttaagacaacactagcaaaaaaggatacacaaacataagtgagtagaaaggaatgggtgtacttcatatattcagatataaggaaatacacacaatggtgacaatcactgtgctttatgcctggtgttatggtgactgttttacatatattacctcatctacttctcggaatgtactggacaggtactatcatcatacccaatacacaaatgacacaaaacaggttaagtaactcacccaaggtgacaagtaaacaactggcggagctgggcatcaaacccaggtctgcctgacttcagagcccatgtgcttaatcaaccaatccattcc

SEQ ID NO: 9177 - protein, 59 aa, Homo sapiens [sequence omitted]

SEQ ID NO: 9178 - DNA, 540 bp, Homo sapiens
atgtgcggtgaggctcgcggccggagtgcggcgctgggcggaagctaccatggcggccgagcgaaagacaaggttgtccaagaatctactgcgcatgaagtttatgcaaaggggactggactcagaaaccaagaaacaactagaagaagaagaaaagaaaatcattagtgaagagcactggtacttggatttgccagagcttaaagagaaagagtaggtttattaaaattgatactgatgatgcttgtggcattcagaaggaaactcctggtaaatttaactcatcattccggtgacataaagcccatgaaattgtttctgttcagtttattgatttagtagcacaactaaaaaatattaaacctatagaagttgtacatggatttatacatttttactactccccctcccagccactattttgtccttttttacattgaatgaaggaacctagcccacatatctctgatagtaacagcagacctttggggaagctgtaatgttctctctatcaccttaagttctaaagattaggggtgt

SEQ ID NO: 9179 - protein, 55 aa, Homo sapiens
MCGEARGRSAALGGSYHGGRAKDKVVQESTAHEVYAKGTGLRNQETTRRRRKENH

SEQ ID NO: 9180 - DNA, 1997 bp, Homo sapiens
gggaggagcagcccatttccaagccgggatgcagttccagggcaggcagtagaggcccaggtgcaacccccagcccaggaggagacttgactcgcctgaggtcagctggagccaggaacacctttgtgcaacagctgccgtggcccatctgtgagagacacgtggaccccgtgcctcgaaacaggcagtgttgtaagcacggggacagagacgtacgtgagcagatggaacccccgaagacctgcagctgtcatcctgggactgtgtgcccggcactgtgctaaatgctccctggggcatctcgtgtaacctttgcaggaaccctaaaaacgacgatcagattagcctcctcctcttgaaaatggagacaaaattcaaataacataaacttcaccactttaaccattttattttatttacatattttttttgagacagagtctcgctctgttgccaggctggagtgcagtggtgcgatgtaggctctctgcaacctgggcctcccgggttcaagcaattctgtctcagcctcccgcgcagctgggactgcaggggtgttccaccacacccagccaatttttgtatttttagtagagacagggtttccacatgttggccaggatggtttcggtctcttgacctcatgatctgcccgccttggcctcccaaagtgctgggattacaggcatgagccactgcacctggcccactttaactattttaaagggtacaattcagtggcgttcagtgcagtcatgaggttgtgcagccaccacctgtatctcatttcagaatatgcccatcactccaaaaggaaaaccctatccccacgatccgtggttccccagccccctggcccccagccctaagcagccactaagctgccttctgtctctacggattgccggttttgggtatttcatgtcgatgggatcagtgtgtggccttgtgtctggcttctgtctccaggcatatgttgtcaagggctatcattccttttcttggccaaataatgctccatgttgtggacacatcgtattttgtttatccgttcacctgctgatgcatgccagatggttgtttccaactttttaattcccattataaagataaggaaactggccaggtgcggtggctcaagcctgtaatcccagcactttgggaggccaaggcgggtgcatcacctgaggtcgggagtttgagaccagtctgacccacacagcgaaaccccgtctctactaaaaatacaaaaaatcagctgggcgtggtggtgtgagcctgtaatcccagctactcagaaggctgaggcatgagaatcacttgaacctgggaggcgaaggttgcagtgagctgagatcgcgccactgcgcttcagcctgggagacagagactctgtctctaaataaataaataaacaaacaaataaataaatgtaaactgaggctaaaccgctccactcagggtcaacacctgccctgtgacccagcagttccacttttcggtatttatctaggagaaatgagaacacatgtccacacaaagacctgtgcacaaatgttcacagcatctttctctgtaataacttcgagctggcaacgatccaaatatccatccacaggagctgggtaaacaaaccgtggtgtcatcctggagtgggacgctcctcatcaggaaagaggaaagaatgacccatgcacgcagcagcttggaagagtctcaaaaacaagatgccaatgaaggaagccaggcacgggactgcaactgtaagctgtgactctgtgtgactccagcggtacgaacttccaggaaaagcaaaaatatgggacagagtatccacaagtggcattcagggactggagtgggaactggcagggaaaggggaaatgtattgattatttcgattgcagtggtggggaggagggtggacacctgtgccaaactcacttaaaacggatgtattttattgtataaattatgcctcaatgaaatccattcat

SEQ ID NO: 9181 - protein, 99 aa, Homo sapiens
MPITPKGKPYPHDPWFPSPLAPSPKQPLSCLLSLRIAGFGYFMSMGSVCGLVSGFCLQAYVVKGYHSFSWPNNAPCCGHIVFCLSVHLLMHARWLFPTF

SEQ ID NO: 9182 - DNA, 603 bp, Homo sapiens
aatagcggccggctcctctatctattttgtgtccagccggagccgcgcgcgatgattcattgccccaattaggggctctctgcagcgcgcccggctctagccgtctgaagggtctcctgggggacccgccgaaacccatcagcggctggagctggtctttaagtaaaggtcaatcaggacgcgggaggagccagggttcctgcaaaggttacacgagatgccccagggagcatttagcacagtgccgggcacacagtcccaggatgacagctgcaggtcttcgggggttccatctgctcacgtacgtctctgtccccgtgcttacaacactgcctgcatgtgggagacacgcaatgaatatcttttcatcaggaacagttagcttcgagactatgatgtcctcaggcccctaagcaaagccctgccaggaatgcatggtaatgagaatgtctgcagcacgactgtgaccttgacatccactatcttcaagaaatcttcacaacaaccccatcgttaatctccccatgtttacagagaaggaaaccgagaggggttaaggaagccgtccaaggtcagccaccagcccagactggcgactcccga

SEQ ID NO: 9183 - protein, 54 aa, Homo sapiens
MPQGAFSTVPGTQSQDDSCRSSGVPSAHVRLCPRAYNTACMWETRNEYLFIRNS

SEQ ID NO: 9184 - DNA, 542 bp, Homo sapiens
gtgtccagccggagccgcgcgcgatgattcattgccccaattaggggctctctgcagcgcgcccggctctagccgtctgaagggtctcctgggggacccgccgaaacccatcagcggctggagctggtctttaagtaaaggtcaatcaggacgcgggaggagccagttcccactccagtccctgaatgccacttgtggatactctgtcccatatttttgcttttcctggaagttcgtaccgctggagtcacacagagtcacagcttacagttgcagtcccgtgcctggcttccttcattggcatcttgtttttgagactcttccaagctgctgcgtgcatgggtcattctttcctctttcctgatgaggagcgtcccactccaggatgacaccacggtttgtttacccagctcctgtggatggatatttggatcgttgccagctcgaagttattacagagaaagatgctgtgaacatttgtgcacaggtctttgtgtggacatgtgttctcatttctcctagataaataccgaaaagtggaa

SEQ ID NO: 9185 - protein, 67 aa, Homo sapiens
MPLVDTLSHIFAFPGSSYRWSHTESQLTVAVPCLASFIGILFLRLFQAAACMGHSFLFPDEERPTPG

SEQ ID NO: 9186 - DNA, 1529 bp, Homo sapiens
ggagatcagaaccttctggaatcttaatatgcgaggactcggtggagaaggcggcactgaagaagagtcgtccctaggccaggctggagggaaactcaagacggcggcctggccctcctgggtggcggaagtgggagcagcaggagccctggcggatccgggaggccagaagagcggaagcttcctcccctctcagcagctacagtgcattccaggccctggtctctatgcgggagaagccagcaaagaccctgtcctcaggaagcttccatttcagtgcgggaggacccacaatccatgaggccccgggcctgcgggtgtcaagtcctgcgaaggaaaataaggcagggaaacaggctggagactgcgggtgctgcgtgatgttgtttaggacagccacaaggactttcgggggtcgtggcagctgctccacttccaacttccagatccctctcactttcctcttcccaccaactccaacctgggaccaagcaggggaaagcagctgcagcccagcttgacgcccctgcaaatggagacctgtgcacctggttgtgagcattttaaagggtgtcacacagggcatacccttcggtgcctggattcctttgatgaaagggcaaagccttgaacctaagtcatcttcgagtcctcagcacttcacccagagcctggcacacagtaggagcacagaaaggtttacatccagcaggagttggccctgagctctgagtccagatcattgctcttggctgaagcagcctgtctactcacaaagatgagcatggtccctgccacgaggaaactcgtggtcctgtggactgcggtgtggagggaaagcttgggattctgagcctgataatgcaccattacatccccactcactcgggctgtgtgaacccagcaagtcacaggatcactgggtggtgaaagaaagaaacactcacagaagcgtctgtgcttggagagccatctggtccgtcattgtgactgctgctctcattgctatcatgggtgtcaccattgccatcactcaaggacttctctccaggccccgaagccaagctggtgcctggttcctctgggttgggagaggggctgggcatggacaggaggagggaaaagggacctgtgctagcaggtgatgccatccaagacatctgcatcctaatccctggaacctgggattccactaggtgccatggcaaagagggattaaggtggcaggtggagtgaaggttgctaatcagccgaccttaaagtagggagatgatcctgaatgagacaaaagagagaaccagtcatggtgtcatgagaaggactcaaaatgcaactgctgactttgaagattaaggggctacaaaccaaggaacgtggtagtctctggaaaagacaaggaatagacgctgcgttggggccaccagaaggaaccagccctgtcaacaccctaattttagcccagtgaggcctgtgctggacttctgacctccagaactgtaaactaataaatgtgtgttgtttctgccact

SEQ ID NO: 9187 - protein, 97 aa, Homo sapiens
MREKPAKTLSSGSFHFSAGGPTIHEAPGLRVSSPAKENKAGKQAGDCGCCVMLFRTATRTFGGRGSCSTSNFQIPLTFLFPPTPTWDQAGESSCSPA

SEQ ID NO: 9188 - DNA, 2674 bp, Homo sapiens
ggggcggcctctctgacgagaaggaggccactgggctgaggccaatgaatgggaaagagccagccatgtggtgagctgggagagggcatcccaggccgtgcgacctgcgcttgcaaaggccctggggccggacagttcttggcagagtctgagggcttgagtctgggggagcctggctgcccagaggtggcagatgacatgaagaaataaccatgtaagggctggctgtgtatgagagcaagcattgggaaggatgaatgccaactatgttccaggaacttccactgttctcacacacccaggtgagtggtgttcaggtgggtggcacccaggtgagtgacatcccagttgagtggcacccaggtgagtagcatccaggtgagtgacacctaggtgagtgacattcaggttagtggcgtctgtgtgagtggcatcatccaggtgagtagcttccaggtgagtggcacccaggtgagtggcattcgggtgagtggcattatccaggtgacacctgggtgagtggcatccaggtgagtgatatcatccaggtaagtggcacctaggtgacatccaggtgagtgacgacatccaggtgagtgacatcatccaggtaaatggcacccaggtgagtagcattcaggtgagtgacacccaggcgagtggcatccacgtgactagcattgtccaggtgcataacacccaggtgagtggcacccagttgagtggtgcccaagtgagtcacatccaggtaagtggggtccaggtggtggcacccaggcgagtggtgcccaggtgagtgacagccaggtgaatggtgtccaggtgagtggcatcacccaggtgaatggtgtccaggtgagtggcatccaggtaagtggtgtccaggtggtggcacccaggtgagtggtgtccaggtgaggggcatcacccaggtgaatggtgtccaggtgagtggcatccaggtgggtggtaccgtcgacgtgacaatagctaaaaattattgggctcattgtggacaggcactgtgccgagcttgacatcactgaactcagttcatcctcgccaggagcttgtgggccgtccctagatcagaatccgaggagaaaggacttccacacggcagccagcgagctggagggcggcctcctgccaccaccaggctccctaacccagtcctggatatctgtgaaagaatgagtggatccccacaggccaggtgggcggggacggagggctattgtttcctgggacaaacgtgtgtggggagctgagtgtttctcctttctcagccctgacttcccacagctatccccaaacacactcgtttacactgaagcaccaggagatcagaaccttctggaatcttaatatgcgaggactcggtggagaaggcggcactgaagaagagtcgtccctaggccaggctggagggaaactcaagacggcggcctggccctcctgggtggcggaagtgggagcagcaggagccctggcggatccgggaggccagaagagcggaagcttcctcccctctcaggacagccacaaggactttcgggggtcgtggcagctgctccacttccaacttccagatccctctcactttcctcttcccaccaactccaacctgggaccaagcaggggaaagcagctgcagcccagcttgacgcccctgcaaatggagacctgtgcacctggttgtgagcattttaaagggtgtcacacagggcatacccttcggtgcctggattcctttgatgaaagggcaaagccttgaacctaagtcatcttcgagtcctcagcacttcacccagagcctggcacacagtaggagcacagaaaggtttacatccagcaggagttggccctgagctctgagtccagatcattgctcttggctgaagcagcctgtctactcacaaagatgagcatggtccctgccacgaggaaactcgtggtcctgtggactgcggtgtggagggaaagcttgggattctgagcctgataatgcaccattacatccccactcactcgggctgtgtgaacccagcaagtcacaggatcactgggtggtgaaagaaagaaacactcacagaagcgtctgtgcttggagagccatctggtccgtcattgtgactgctgctctcattgctatcatgggtgtcaccattgccatcactcaaggacttctctccaggccccgaagccaagctggtgcctggttcctctgggttgggagaggggctgggcatggacaggaggagggaaaagggacctgtgctagcaggtgatgccatccaagacatctgcatcctaatccctggaacctgggattccactaggtgccatggcaaagagggattaaggtggcaggtggagtgaaggttgctaatcagccgaccttaaagtagggagatgatcctgaatgagacaaaagagagaaccagtcatggtgtcatgagaaggactcaaaatgcaactgctgactttgaagattaaggggctacaaaccaaggaacgtggtagtctctggaaaagacaaggaatagacgctgcgttggggccaccagaaggaaccagccctgtcaacaccctaattttagcccagtgaggcctgtgctggacttctgacctccagaactgtaaactaataaatgtgtgttgtttctgccac

SEQ ID NO: 9189 - protein, 135 aa, Homo sapiens
MRGLGGEGGTEEESSLGQAGGKLKTAAWPSWVAEVGAAGALADPGGQKSGSFLPSQDSHKDFRGSWQLLHFQLPDPSHFPLPTNSNLGPSRGKQLQPSLTPLQMETCAPGCEHFKGCHTGHTLRCLDSFDERAKP

SEQ ID NO: 9190 - DNA, 2618 bp, Homo sapiens
attgtgggggaggggccggccagccagggcaggcaggggcggcctctctgacgagaaggaggccactgggctgaggccaatgaatgggaaagagccagccatgtggtgagctgggagagggcatcccaggccgtgcgacctgcgcttgcaaaggccctggggccggacagttcttggcagagtctgagggcttgagtctgggggagcctggctgcccagaggtggcagatgacatgaagaaataaccatgtaagggctggctgtgtatgagagcaagcattgggaaggatgaatgccaactatgttccaggaacttccactgttctcacacacccaggtgagtggtgttcaggtgggtggcacccaggtgagtgacatcccagttgagtggcacccaggtgagtagcatccaggtgagtgacacctaggtgagtgacattcaggttagtggcgtctgtgtgagtggcatcatccaggtgagtagcttccaggtgagtggcacccaggtgagtggcattcgggtgagtggcattatccaggtgacacctgggtgagtggcatccaggtgagtgatatcatccaggtaagtggcacctaggtgacatccaggtgagtgacgacatccaggtgagtgacatcatccaggtaaatggcacccaggtgagtagcattcaggtgagtgacacccaggcgagtggcatccacgtgactagcattgtccaggtgcataacacccaggtgagtggcacccagttgagtggtgcccaagtgagtcacatccaggtaagtggggtccaggtggtggcacccaggcgagtggtgcccaggtgagtgacagccaggtgaatggtgtccaggtgagtggcatcacccaggtgaatggtgtccaggtgagtggcatccaggtaagtggtgtccaggtggtggcacccaggtgagtggtgtccaggtgaggggcatcacccaggtgaatggtgtccaggtgagtggcatccaggtgggtggtaccgtcgacgtgacaatagctaaaaattattgggctcattgtggacaggcactgtgccgagcttgacatcactgaactcagttcatcctcgccaggagcttgtgggccgtccctagatcagaatccgaggagaaaggacttccacacggcagccagcgagctggagggcggcctcctgccaccaccaggctccctaacccagtcctggatatctgtgaaagaatgagtggatccccacaggccagctatccccaaacacactcgtttacactgaagcaccaggagatcagaaccttctggaatcttaatatgcgaggactcggtggagaaggcggcactgaagaagagtcgtccctaggccaggctggagggaaactcaagacggcggcctggccctcctgggtggcggaagtgggagcagcaggagccctggcggatccgggaggccagaagagcggaagcttcctcccctctcaggacagccacaaggactttcgggggtcgtggcagctgctccacttccaacttccagatccctctcactttcctcttcccaccaactccaacctgggaccaagcaggggaaagcagctgcagcccagcttgacgcccctgcaaatggagacctgtgcacctggttgtgagcattttaaagggtgtcacacagggcatacccttcggtgcctggattcctttgatgaaagggcaaagccttgaacctaagtcatcttcgagtcctcagcacttcacccagagcctggcacacagtaggagcacagaaaggtttacatccagcaggagttggccctgagctctgagtccagatcattgctcttggctgaagcagcctgtctactcacaaagatgagcatggtccctgccacgaggaaactcgtggtcctgtggactgcggtgtggagggaaagcttgggattctgagcctgataatgcaccattacatccccactcactcgggctgtgtgaacccagcaagtcacaggatcactgggtggtgaaagaaagaaacactcacagaagcgtctgtgcttggagagccatctggtccgtcattgtgactgctgctctcattgctatcatgggtgtcaccattgccatcactcaaggacttctctccaggccccgaagccaagctggtgcctggttcctctgggttgggagaggggctgggcatggacaggaggagggaaaagggacctgtgctagcaggtgatgccatccaagacatctgcatcctaatccctggaacctgggattccactaggtgccatggcaaagagggattaaggtggcaggtggagtgaaggttgctaatcagccgaccttaaagtagggagatgatcctgaatgagacaaaagagagaaccagtcatggtgtcatgagaaggactcaaaatgcaactgctgactttgaagattaaggggctacaaaccaaggaacgtggtagtctctggaaaagacaaggaatagacgctgcgttggggccaccagaaggaaccagccctgtcaacaccctaattttagcccagtgaggcctgtgctggacttctgacctccagaactgtaaactaataaatgtgtgttgtttctgcc

SEQ ID NO: 9191 - protein, 164 aa, Homo sapiens
MSGSPQASYPQTHSFTLKHQEIRTFWNLNMRGLGGEGGTEEESSLGQAGGKLKTAAWPSWVAEVGAAGALADPGGQKSGSFLPSQDSHKDFRGSWQLLHFQLPDPSHFPLPTNSNLGPSRGKQLQPSLTPLQMETCAPGCEHFKGCHTGHTLRCLDSFDERAKP

SEQ ID NO: 9192 - DNA, 1154 bp, Homo sapiens
cagtgttcaggtccatgaaatgggctcccgaagtccaacctcacagaccccataggaaagcagatggaatctccaagggcaccagctatacatggtggtggaaggaccaacgcatgctctgaatgccactgcggaccacagggcttgagtctgggggagcctggctgcccagaggtggcagatgacatgaagaaataaccatgtaagggctggctgtgtatgagagcaagcattgggaaggatgaatgccaactatgttccaggaacttccactgttctcacacacccaggtgagtggtgttcaggtgggtggcacccaggtgagtgacatcccagttgagtggcacccaggtgagtagcatccaggtgagtgacacctaggtgagtgacattcaggttagtggcgtctgtgtgagtggcatcatccaggtgagtagcttccaggtgagtggcacccaggtgagtggcattcgggtgagtggcattatccaggtgacacctgggtgagtggcatccaggtgagtgatatcatccaggtaagtggcacctaggtgacatccaggtgagtgacgacatccaggtgagtgacatcatccaggtaaatggcacccaggtgagtagcattcaggtgagtgacacccaggcgagtggcatccacgtgactagcattgtccaggtgcataacacccaggtgagtggcacccagttgagtggtgcccaagtgagtcacatccaggtaagtggggtccaggtggtggcacccaggcgagtggtgcccaggtgagtgacagccaggtgaatggtgtccaggtgagtggcatcacccaggtgaatggtgtccaggtgagtggcatccaggtaagtggtgtccaggtggtggcacccaggtgagtggtgtccaggtgaggggcatcacccaggtgaatggtgtccaggtgagtggcatccaggtgggtggtaccgtcgacgtgacaatagctaaaaattattgggctcattgtggacaggcactgtgccgagcttgacatcactgaactcagttcatcctcgccaggagcttgtgggccgtccctagatcagaatccgaggagaaaggacttccacacggcagccagcgagctggagggcggcctcctgccaccaccaggctccct

SEQ ID NO: 9193 - protein, 44 aa, Homo sapiens
MESPRAPAIHGGGRTNACSECHCGPQGLSLGEPGCPEVADDMKK

SEQ ID NO: 9194 - DNA, 1140 bp, Homo sapiens
attgtgggggaggggttgggccagccagggcaggcagggacagcccctctgatgaggaggccactgggctgagaccaatgaatgagatggagccagccacgtggtgagccagaagagggcatcacagggcttgagtctgggggagcctggctgcccagaggtggcagatgacatgaagaaataaccatgtaagggctggctgtgtatgagagcaagcattgggaaggatgaatgccaactatgttccaggaacttccactgttctcacacacccaggtgagtggtgttcaggtgggtggcacccaggtgagtgacatcccagttgagtggcacccaggtgagtagcatccaggtgagtgacacctaggtgagtgacattcaggttagtggcgtctgtgtgagtggcatcatccaggtgagtagcttccaggtgagtggcacccaggtgagtggcattcgggtgagtggcattatccaggtgacacctgggtgagtggcatccaggtgagtgatatcatccaggtaagtggcacctaggtgacatccaggtgagtgacgacatccaggtgagtgacatcatccaggtaaatggcacccaggtgagtagcattcaggtgagtgacacccaggcgagtggcatccacgtgactagcattgtccaggtgcataacacccaggtgagtggcacccagttgagtggtgcccaagtgagtcacatccaggtaagtggggtccaggtggtggcacccaggcgagtggtgcccaggtgagtgacagccaggtgaatggtgtccaggtgagtggcatcacccaggtgaatggtgtccaggtgagtggcatccaggtaagtggtgtccaggtggtggcacccaggtgagtggtgtccaggtgaggggcatcacccaggtgaatggtgtccaggtgagtggcatccaggtgggtggtaccgtcgacgtgacaatagctaaaaattattgggctcattgtggacaggcactgtgccgagcttgacatcactgaactcagttcatcctcgccaggagcttgtgggccgtccctagatcagaatccgaggagaaaggacttccacacggcagccagcgagctggagggcggcctcctgccaccaccaggctccct

SEQ ID NO: 9195 - protein, 37 aa, Homo sapiens [sequence omitted]

SEQ ID NO: 9196 - DNA, 838 bp, Homo sapiens
caaaggcttgactgaagtcacgggtctcatcattcctttcctaagctttcttcaaacagcatggtgcgtggatgaggacacacgtgctctgtagaaggtggggccacaaagccctgccgaccgacctttcctgccttctgcctctaaggtgcaaccccgaaagcacctgctggaacctttggggctcagggagcacagcctggaagcagggggatactccccagggctgcagtccacctcggaagctgctcaccacaggtgtctgcttacacttcaattcagatcacataagatacacatgcagctcttaggcttctgagccacccttcaagagcacagccactcgtggctaatggctgctgactggaaccctggatggcccaatctggaacttttcatcaccccagagcatcctgtgcagtgcttctcccggggagccctgcaggcagtgacctccagctccgagcctgatcccacatgagcaggaagaagacagcccagggaggctgcccacagccacaagctcatttctcatggcaaaccacaaatgggagatgctaagaaattagaatagaggatgctccagagcagacgctcctgtttacagagctgaaactcagtactcattaaacaactccctcctgcagccacgctgggagctgacactctccacacatgcttcatgcacccaggcgctcatccagggatcatcctgtacctcaaatacccccaagaactgtcctgccccaggacctttgcacatgctggacccactacctgtgatgccctcttctggctcaccacgtggctggctccatctcattcattggtctcagcc

SEQ ID NO: 9197 - protein, 79 aa, Homo sapiens
MRTHVLCRRWGHKALPTDLSCLLPLRCNPESTCWNLWGSGSTAWKQGDTPQGCSPPRKLLTTGVCLHFNSDHIRYTCSS

SEQ ID NO: 9198 - DNA, 5057 bp, Homo sapiens
atgaggggacttgggacttgcctggcgactttggccggacttttgctaactgcggcgggcgagacgttctcaggtggctgcctctttgatgagccgtatagcacatgtggatatagtcaatctgaaggtgatgacttcaattgggagcaagtgaacaccttgactaaaccgacttctgatccatggatgccatcaggttctttcatgctggtgaatgcctctgggagacctgaggggcagagagcccacctgctcttaccccaacttaaagaaaatgacacccactgcatcgattttcactattttgtgtccagcaagagtaattctcctccggggttactcaatgtctacgtgaaggtcaataacgggccactggggaatcctatctggaatatatctggagacccaacacgtacatggaacagggcagaactggccattagtactttctggcctaacttttatcaggtgatttttgaagtgataacttctggacatcaaggctatctcgctatcgatgaggtgaaggtgttaggacatccatgtaccaggactcctcacttcctgcggattcagaatgtggaagttaatgctggccagtttgctaccttccagtgcagtgccatcggcaggaccgtggcaggagacaggctctggttacagggcattgatgtgcgagatgctcctctgaaggaaatcaaggtgaccagctcccgacgcttcattgcttcatttaatgttgtgaataccaccaaacgagatgctggaaagtaccgctgcatgattcgcactgaaggaggtgttggaatatcaaactatgcagagttggtagttaaagaaccacccgttcctattgccccacctcagctcgcctctgtaggagccacctacctgtggatacagctcaacgccaactccatcaatggggatgggcccattgtggcccgagaggtggagtactgcacggccagtgggagctggaatgaccggcagccagtcgattccacgagctataaaattggacaccttgacccagatacagaatatgagattagtgtgctcctgaccaggccaggggagggtggcactggctctcctggtccagctctcaggacaagaacaaagtgtgctgatcccatgcgaggcccaagaaaactagaagtagtggaggtcaaatctcggcaaatcactatccgctgggagccatttggatataatgtaactcgttgccacagttataatctcactgtccactactgttaccaagttggaggacaagaacaagtgcgagaagaagtaagctgggatacagaaaactcacaccctcaacacacgatcactaacctgtcaccatacaccaatgtcagtgtgaaactgatcctcatgaacccagagggccggaaggaaagccaagaactcatagtgcagacagatgaagacctcccaggtgctgttcccactgaatccatacaaggaagtacctttgaagagaagatatttcttcagtggagagaaccaactcaaacatatggtgtaatcactttatatgagatcacctacaaagcagtcagttcctttgacccagaaatagatttatccaatcagagtggaagagtttcaaagctgggaaatgaaacccattttctgttttttggactgtatccggggaccacatactcctttaccatccgagctagcacagctaagggttttgggcctccagcaacaaaccagttcaccaccaaaatatcagcaccctctatgccagcttatgaacttgagacacctttgaatcaaactgacaataccgtgacagtcatgctgaaacctgcccacagcagaggagcacctgtcagtgtctatcaaatagttgttgaggaagaacgtcctcgaagaactaaaaagacgacagaaatcttaaagtgctacccagtgccaattcacttccagaatgcttctctgctgaactcacagtactactttgctgcagaatttcctgcagacagcctccaagctgcgcagccttttacaattggtgataataagacatataatggatactggaacactccccttctcccctataaaagctacagaatttatttccaagctgctagtagagccaatggggaaaccaaaatagactgtgtccaagtggccacaaaaggagctgccactccgaaaccagtcccagaacccgagaaacagacagaccatacagttaaaattgctggagtcatcgcgggcatcttgctgttcgtgattatatttcttggagttgtgttggtaatgaagaaaaggaaactggccaagaagcggaaagagaccatgagcagcacccgacaggagatgactgtgatggtgaactcaatggacaagagctatgctgagcagggcacaaactgcgacgaggctttctcattcatggacacgcacaatctgaatgggagatctgtgtcttcaccatcgtccttcacaatgaaaacaaatacactgagcacatcggtgcctaattcctattacccagatgaaacccacacaatggccagcgataccagcagcctggtgcagtcccatacttacaagaagcgagagccggccgacgtgccctatcagactgggcagctccaccccgccatccgggtggcagacctccttcagcacatcacacagatgaagtgtgcggagggctacggcttcaaggaggaatacgagagcttctttgaagggcagtctgcaccatgggactcggctaagaaagatgagaacagaatgaagaacagatacgggaatatcattgcatacgatcattcccgagtgaggctgcagacaatagaaggagacacaaactcagactatatcaatggcaattatatcgatggttatcatcgacccaatcattacattgctacccaagggccaatgcaggaaaccatctatgacttctggaggatggtgtggcacgaaaacactgcaagtatcatcatggtgaccaatcttgtggaagtgggaagggtcaaatgctgcaaatactggccagatgacacagagatatataaagacattaaagttaccctaatagaaacagaactactggcagaatatgtgataagaacatttgctgttgaaaagagaggtgtgcatgaaatccgagagatcagacagtttcacttcactggctggccggatcatggggtcccctaccatgccaccggcctgctgggattcgtgcggcaagtcaagtccaagagcccgcccagtgcaggcccactggtggtgcactgcagtgctggtgcagggaggactggctgtttcatcgtcattgatatcatgttggacatggccgaaagggaaggggtcgtagacatctacaactgcgtcagggagctgcggtcacggagggtgaacatggtgcaaacagaggagcagtatgtgtttatccacgatgcgatcctggaagcctgtctttgtggggacacctctgtgcctgcttcccaagttaggtctctgtattatgacatgaacaaactggatccacagacaaactcaagccagattaaagaggaattccggacgctaaacatggtgacaccaacgctgcgagtagaggactgcagcatcgcactgttgccccggaaccatgagaaaaaccggtgcatggacatcctgcccccagaccgctgcctgcccttcctcatcaccatcgatggggagagcagcaactacatcaatgctgccctcatggacagctataaacagccttcagcttttatagtcacccagcatcctttgccaaacacagtgaaagacttttggagactggtcctggattatcactgcacatccgtagttatgctaaatgatgtggatcctgcccagttgtgtccacagtactggccagaaaacggagtacacagacacggccccatccaggtggaatttgtctctgctgacctggaagaggacatcatcagcaggatattccgcatttacaatgccgccagaccccaagatggatatcggatggtgcagcaattccagttcctgggctggccgatgtacagggacacaccagtgtctaagcgctccttcttgaagctcattcgccaggtggacaagtggcaagaggagtacaatggcggggaaggccgcacggttgtgcactgcttgaacgggggaggccgcagtgggacgttctgcgccatcagcatcgtatgtgagatgctccggcaccagagaaccgtggatgtctttcacgctgtgaagacactgaggaacaacaagcccaacatggtcgacctcctggatcagtacaagttctgctacgaggtggccctggaatacttgaattctggctgatggtgtaaacagctctgcaaacaatccctttcataccacaaagccaagacgttccatggtatttgtgcaaaagagatgaagacttctcaatatgcttattttgctttgcataattggctctttttaagagcccaagaaagtgtttctaaaattgcttgcactgcccaatcccagtaatgctgctgcctgacagaaacacacacacagccacagttgccaaatcccgtactccttgccaccggcttcctagagcagcgtagacagctggtaaactgaagagcacaactatattcttatgaaggaatttgtacctttggggtattattttgtggcccgtgaccctcgttattgttacagctgagtgtatgtttttgttctgtggagaatgctatctggcattatggtaatatattattttaggtaatatttgtactttaacatgttgcataatatatgcttatgtagctttccaggactaacagataaatgtgtaatgaacaaagatatgttgtatgagtcgtcgtttctgtcagatttgtattgtttccaagggaaaagcttgggggaggactcagttcacaaaatgcaaaactcaacgatcagattcacggacccagagcttttccatgtgtttatattgtaaatatttttgatttcatcaaattatttattcattaaaagaaatttttgtgaagcac

SEQ ID NO: 9199 - protein, 1452 aa, Homo sapiens; identical to SEQ ID NO: 1434

SEQ ID NO: 9200 - DNA, 5151 bp, Homo sapiens
atgaggggacttgggacttgcctggcgactttggccggacttttgctaactgcggcgggcgagacgttctcaggtggctgcctctttgatgagccgtatagcacatgtggatatagtcaatctgaaggtgatgacttcaattgggagcaagtgaacaccttgactaaaccgacttctgatccatggatgccatcaggttctttcatgctggtgaatgcctctgggagacctgaggggcagagagcccacctgctcttaccccaacttaaagaaaatgacacccactgcatcgattttcactattttgtgtccagcaagagtaattctcctccggggttactcaatgtctacgtgaaggtcaataacgggccactggggaatcctatctggaatatatctggagacccaacacgtacatggaacagggcagaactggccattagtactttctggcctaacttttatcaggtgatttttgaagtgataacttctggacatcaaggctatctcgctatcgatgaggtgaaggtgttaggacatccatgtaccaggactcctcacttcctgcggattcagaatgtggaagttaatgctggccagtttgctaccttccagtgcagtgccatcggcaggaccgtggcaggagacaggctctggttacagggcattgatgtgcgagatgctcctctgaaggaaatcaaggtgaccagctcccgacgcttcattgcttcatttaatgttgtgaataccaccaaacgagatgctggaaagtaccgctgcatgattcgcactgaaggaggtgttggaatatcaaactatgcagagttggtagttaaagaaccacccgttcctattgccccacctcagctcgcctctgtaggagccacctacctgtggatacagctcaacgccaactccatcaatggggatgggcccattgtggcccgagaggtggagtactgcacggccagtgggagctggaatgaccggcagccagtcgattccacgagctataaaattggacaccttgacccagatacagaatatgagattagtgtgctcctgaccaggccaggggagggtggcactggctctcctggtccagctctcaggacaagaacaaagtgtgctgatcccatgcgaggcccaagaaaactagaagtagtggaggtcaaatctcggcaaatcactatccgctgggagccatttggatataatgtaactcgttgccacagttataatctcactgtccactactgttaccaagttggaggacaagaacaagtgcgagaagaagtaagctgggatacagaaaactcacaccctcaacacacgatcactaacctgtcaccatacaccaatgtcagtgtgaaactgatcctcatgaacccagagggccggaaggaaagccaagaactcatagtgcagacagatgaagacctcccaggtgctgttcccactgaatccatacaaggaagtacctttgaagagaagatatttcttcagtggagagaaccaactcaaacatatggtgtaatcactttatatgagatcacctacaaagcagtcagttcctttgacccagaaatagatttatccaatcagagtggaagagtttcaaagctgggaaatgaaacccattttctgttttttggactgtatccggggaccacatactcctttaccatccgagctagcacagctaagggttttgggcctccagcaacaaaccagttcaccaccaaaatatcagcaccctctatgccagcttatgaacttgagacacctttgaatcaaactgacaataccgtgacagtcatgctgaaacctgcccacagcagaggagcacctgtcagtgtctatcaaatagttgttgaggaagaacgtcctcgaagaactaaaaagacgacagaaatcttaaagtgctacccagtgccaattcacttccagaatgcttctctgctgaactcacagtactactttgctgcagaatttcctgcagacagcctccaagctgcgcagccttttacaattggtgataataagacatataatggatactggaacactccccttctcccctataaaagctacagaatttatttccaagctgctagtagagccaatggggaaaccaaaatagactgtgtccaagtggccacaaaaggagctgccactccgaaaccagtcccagaacccgagaaacagacagaccatacagttaaaattgctggagtcatcgcgggcatcttgctgttcgtgattatatttcttggagttgtgttggtaatgaagaaaaggaaactggccaagaagcggaaagagaccatgagcagcacccgacaggagatgactgtgatggtgaactcaatggacaagagctatgctgagcagggcacaaactgcgacgaggctttctcattcatggacacgcacaatctgaatgggagatctgtgtcttcaccatcgtccttcacaatgaaaacaaatacactgagcacatcggtgcctaattcctattacccagatgaaacccacacaatggccagcgataccagcagcctggtgcagtcccatacttacaagaagcgagagccggccgacgtgccctatcagactgggcagctccaccccgccatccgggtggcagacctccttcagcacatcacacagatgaagtgtgcggagggctacggcttcaaggaggaatacgagagcttctttgaagggcagtctgcaccatgggactcggctaagaaagatgagaacagaatgaagaacagatacgggaatatcattgcatacgatcattcccgagtgaggctgcagacaatagaaggagacacaaactcagactatatcaatggcaattatatcgatggttatcatcgacccaatcattacattgctacccaagggccaatgcaggaaaccatctatgacttctggaggatggtgtggcacgaaaacactgcaagtatcatcatggtgaccaatcttgtggaagtgggaagggtcaaatgctgcaaatactggccagatgacacagagatatataaagacattaaagttaccctaatagaaacagaactactggcagaatatgtgataagaacatttgctgttgaaaagagaggtgtgcatgaaatccgagagatcagacagtttcacttcactggctggccggatcatggggtcccctaccatgccaccggcctgctgggattcgtgcggcaagtcaagtccaagagcccgcccagtgcaggcccactggtggtgcactgcagtgctggtgcagggaggactggctgtttcatcgtcattgatatcatgttggacatggccgaaagggaaggggtcgtagacatctacaactgcgtcagggagctgcggtcacggagggtgaacatggtgcaaacagaggagcagtatgtgtttatccacgatgcgatcctggaagcctgtctttgtggggacacctctgtgcctgcttcccaagttaggtctctgtattatgacatgaacaaactggatccacagacaaactcaagccagattaaagaggaattccggacgctaaacatggtgacaccaacgctgcgagtagaggactgcagcatcgcactgttgccccggaaccatgagaaaaaccggtgcatggacatcctgcccccagaccgctgcctgcccttcctcatcaccatcgatggggagagcagcaactacatcaatgctgccctcatggacagctataaacagccttcagcttttatagtcacccagcatcctttgccaaacacagtgaaagacttttggagactggtcctggattatcactgcacatccgtagttatgctaaatgatgtggatcctgcccagttgtgtccacagtactggccagaaaacggagtacacagacacggccccatccaggtggaatttgtctctgctgacctggaagaggacatcatcagcaggatattccgcatttacaatgccgccagaccccaagatggatatcggatggtgcagcaattccagttcctgggctggccgatgtacagggacacaccagtgtctaagcgctccttcttgaagctcattcgccaggtggacaagtggcaagaggagtacaatggcggggaaggccgcacggttgtgcactgcttgaacgggggaggccgcagtgggacgttctgcgccatcagcatcgtatgtgagatgctccggcaccagagaaccgtggatgtctttcacgctgtgaagacactgaggaacaacaagcccaacatggtcgacctcctggatcagtacaagttctgctacgaggtggccctggaatacttgaattctggctgatggtgtaaacagctctgcaaacaatccctttcataccacaaagccaagacgttccatggtatttgtgcaaaagagatgaagacttctcaatatgcttattttgctttgcataattggctctttttaagagcccaagaaagtgtttctaaaattgcttgcactgcccaatcccagtaatgctgctgcctgacagaaacacacacacagccacagttgccaaatcccgtactccttgccaccggcttcctagagcagcgtagacagctggtaaactgaagagcacaactatattcttatgaaggaatttgtacctttggggtattattttgtggcccgtgaccctcgttattgttacagctgagtgtatgtttttgttctgtggagaatgctatctggcattatggtaatatattattttaggtaatatttgtactttaacatgttgcataatatatgcttatgtagctttccaggactaacagataaatgtgtaatgaacaaagatatgttgtatgagtcgtcgtttctgtcagatttgtattgtttccaagggaaaagcttgggggaggactcagttcacaaaatgcaaaactcaacgatcagattcacggacccagagcttttccatgtgtttatattgtaaatatttttgatttcatcaaattatttattcattaaaagaaatttttgtgaagcacagtgagtgacaatcatttttcttaaggcctggaaacgattttctgtatgatgttactttatgtgaattctcatctcaataaatgatgacccgtg

SEQ ID NO: 9201 - protein, 1452 aa, Homo sapiens; identical to SEQ ID NO: 1434

SEQ ID NO: 9202 - DNA, 3672 bp, Homo sapiens
caagagcttggcgatacagaaatttctgctggtgttggggcgggtgcgggaactgaagacgggcgagtgcgagccgggggcgggtgctggggaagggtaagcgggaagcgagggcgaggggtaggggctggggaagggcgagcgggaggcgcgggctctctctagcagggggctgcagccatgaagaggctcttagctgccgctggcaagggcgtgcggggcccggagcccccgaaccccttcagcgaacgggtctacactgagaaggactacgggaccatctacttcggggatctagggaagatccatacagctgcctcccggggccaagtccagaagctggagaagatgacagtagggaagaagcccgtcaacctgaacaaaagagatatgaagaagaggactgctctacactgggcctgtgtcaatggccatgcagaagtagtaacatttctggtagacagaaagtgccagcttaatgtccttgatggcgaagggaggacacctctgatgaaggctctacaatgcgagagggaggcttgtgcaaatattctcatagatgctggtgctgatctaaattatgtagatgtgtatggcaacacggctctccattatgccgtttatagtgagaatttgttaatggtggcaacactgctgtcctatggtgcagtcatcgaggtgcaaaacaaggctagcctcacaccccttttactggccatacagaaaagaagcaagcaaactgtggaatttttactaacaaaaaatgcaaatgcaaacgcatttaatgagtctaaatgcacagccctcatgcttgccatatgtgaaggctcatcagagatagtcggcatgcttcttcagcaaaatgttgacgtctttgctgaagacatacatggaataactgcagaacgttatgctgctgcttgtggagttaattacattcatcaacaacttttggaacatatacgaaaattacctaaaaatcctcaaaataccaatccagaaggaacatctacaggaacacctgatgaggctgcacccttggcggaaagaacacctgacacggctgaaagcttgctggaaaaaacacctgacgaggctgcacgcttggtggagggaacgtctgccaaaattcaatgtctggggaaagcaacatctggaaagtttgaacagtcaacagaagaaacacctaggaaaattttgaggcctacaaaagaaacatctgagaaattttcatggccagcaaaagaaagatctaggaagatcacatgggaggaaaaagaaacatctgtaaagactgaatgcgtggcaggagtaacacctaataaaactgaagttttggaaaaaggaacatctaatatgattgcatgtcctacaaaagaaacatctacaaaagcaagtacaaatgtggatgtgagttctgtagagcctatattcagtctttttggcacacggactattgaaaattcacagtgtacaaaagttgaggaagactttaatcttgctaccaagattatctctaagagtgctgcacagaattatacgtgtttacctgatgctacatatcaaaaagatatcaaaacaataaatcacaaaatagaagatcagatgttcccatcagaatccaaacgagaggaagatgaagaatattcttgggattctgggagtctctttgagagttctgcaaagactcaagtgtgtatacctgagtctatgtatcagaaagtaatggagataaatagagaagtagaagagcttcctgagaagccatctgccttcaagcctgccgttgaaatgcaaaagactgttccaaataaagcctttgaattgaagaatgaacaaacattgagagcagctcagatgttcccatcagaatccaaacaaaaggacgatgaagaaaattcttgggattctgagagtccctgtgagacggtttcacagaaggatgtgtatttacccaaagctacacatcaaaaagaattcgataccttaagtggaaaattagaagagtctcctgttaaagatggtcttctgaagcctacctgtggaaggaaagtttctcttccaaataaagccttagaattaaaggacagagaaacattcaaagcagagtctcctgataaagatggtcttctgaagcctacctgtggaaggaaagtttctcttccaaataaagccttagaattaaaggacagagaaacactcaaagcagagtctcctgataatgatggtcttctgaagcctacctgtggaaggaaagtttctcttccaaataaagctttagaattgaaggacagagaaacattcaaagcagctcagatgttcccatcagaatccaaacaaaaggatgatgaagaaaattcttgggattttgagagtttccttgagactctcttacagaatgatgtgtgtttacccaaggctacacatcaaaaagaattcgataccttaagtggaaaattagaagagtctcctgataaagatggtcttctgaagcctacctgtggaatgaaaatttctcttccaaataaagccttagaattgaaggacagagaaacattcaaagcagaggatgtgagttctgtagagtccacattcagtctttttggcaaaccgactactgaaaattcacagtctacaaaagttgaggaagactttaatcttactaccaaggagggagcaacaaagacagtaactggacaacaggaacgtgatattggcattattgaacgagctccacaagatcaaacaaataagatgcccacatcagaattaggaagaaaagaagatacaaaatcaacttcagattctgagattatctctgtgagtgatacacagaattatgagtgtttacctgaggctacatatcaaaaagaaataaagacaacaaatggcaaaatagaagagtctcctgaaaagccttctcactttgagcctgccactgaaatgcaaaactctgttccaaataaaggcttagaatggaagaataaacaaacattgagagcagattcaactaccctatcaaaaatcttggatgcacttccttcttgtgaaagaggaagggaacttaaaaaagataactgtgaacaaattacagcaaaaatggaacaaacgaaaaataagttttgtgtactacaaaaggaactgtcagaagcgaaagaaataaaatcacagttagagaaccaaaaagctaaatgggaacaagagctctgcagtgtgagattgactttaaatcaagaagaagagaagagaagaaatgtcgatatattaaaagaaaaaattagacccgaagagcaacttaggaaaaagttagaagtgaaacaacaacttgaacagactctcagaatacaagatatagaattgaaaagtgtaacaagtaatttgaatcaggtttctcacactcatgaaagtgaaaatgatctctttcatgaaaattgcatgttgaaaaaggaaattgccatgctaaaactggaagtagccacactgaaacatcaacaccaggtgaaggaaaataaatactttgaggacattaagattttacaagaaaagaatgctgaacttcaaatgaccctaaaactgaaacagaaaacagtaacaaaaagggcatctcagtatagagagcagcttaaagttctgacggcagagaacacgatgctgacttctaaattgaaggaa

SEQ ID NO: 9203 - protein, 1163 aa, Homo sapiens
MKRLLAAAGKGVRGPEPPNPFSERVYTEKDYGTIYFGDLGKIHTAASRGQVQKLEKMTVGKKPVNLNKRDMKKRTALHWACVNGHAEVVTFLVDRKCQLNVLDGEGRTPLMKALQCEREACANILIDAGADLNYVDVYGNTALHYAVYSENLLMVATLLSYGAVIEVQNKASLTPLLLAIQKRSKQTVEFLLTKNANANAFNESKCTALMLAICEGSSEIVGMLLQQNVDVFAEDIHGITAERYAAACGVNYIHQQLLEHIRKLPKNPQNTNPEGTSTGTPDEAAPLAERTPDTAESLLEKTPDEAARLVEGTSAKIQCLGKATSGKFEQSTEETPRKILRPTKETSEKFSWPAKERSRKITWEEKETSVKTECVAGVTPNKTEVLEKGTSNMIACPTKETSTKASTNVDVSSVEPIFSLFGTRTIENSQCTKVEEDFNLATKIISKSAAQNYTCLPDATYQKDIKTINHKIEDQMFPSESKREEDEEYSWDSGSLFESSAKTQVCIPESMYQKVMEINREVEELPEKPSAFKPAVEMQKTVPNKAFELKNEQTLRAAQMFPSESKQKDDEENSWDSESPCETVSQKDVYLPKATHQKEFDTLSGKLEESPVKDGLLKPTCGRKVSLPNKALELKDRETFKAESPDKDGLLKPTCGRKVSLPNKALELKDRETLKAESPDNDGLLKPTCGRKVSLPNKALELKDRETFKAAQMFPSESKQKDDEENSWDFESFLETLLQNDVCLPKATHQKEFDTLSGKLEESPDKDGLLKPTCGMKISLPNKALELKDRETFKAEDVSSVESTFSLFGKPTTENSQSTKVEEDFNLTTKEGATKTVTGQQERDIGIIERAPQDQTNKMPTSELGRKEDTKSTSDSEIISVSDTQNYECLPEATYQKEIKTTNGKIEESPEKPSHFEPATEMQNSVPNKGLEWKNKQTLRADSTTLSKILDALPSCERGRELKKDNCEQITAKMEQTKNKFCVLQKELSEAKEIKSQLENQKAKWEQELCSVRLTLNQEEEKRRNVDILKEKIRPEEQLRKKLEVKQQLEQTLRIQDIELKSVTSNLNQVSHTHESENDLFHENCMLKKEIAMLKLEVATLKHQHQVKENKYFEDIKILQEKNAELQMTLKLKQKTVTKRASQYREQLKVLTAENTMLTSKLK

SEQ ID NO: 9204 - DNA, 482 bp, Homo sapiens
gaggcatgtttctaagctgatatagtcagtgtccatgggatggacccggcaggtggcaagacaaactatgcaaaaggatcgtgatggaaccctcaaatatgaaggtgaaaagaactgcacaggcagcgaagtctggccctgtcacccaggctggagtagacggggtttcaccatgttagccaggatggtctcgatctgctgacctcgtgatccgcatgcctctgcctcccaaagggctgggattacaggcgtgaaccacagtgcccggcctgaaatcttgaaataaatgaaaaacgagctaatcgctgaacaaaaaaataaaaaatcactgtggaatgacaagaacattctacaaacatttatatgtgatttttgcaaaaagtgttaatgccaatgtgtatatgctgagtgatgaggagataagtgatcctgaatcagaggagcaaatcgtgacactgagaaaataaatgcaaaagctgaac

SEQ ID NO: 9205 - protein, 55 aa, Homo sapiens [sequence omitted]

SEQ ID NO: 9206 - DNA, 414 bp, Homo sapiens
gtccatgggatggacccggcaggtggcaagacaaactatgcaaaaggatcgtgatggaaccctcaaatatgaaggtgaaaagaactgcacaggcagcgaagacggggtttcaccatgttagccaggatggtctcgatctgctgacctcgtgatccgcatgcctctgcctcccaaagggctgggattacaggcgtgaaccacagtgcccggcctgaaatcttgaaataaatgaaaaacgagctaatcgctgaacaaaaaaataaaaaatcactgtggaatgacaagaacattctacaaacatttatatgtgatttttgcaaaaagtgttaatgccaatgtgtatatgctgagtgatgaggagataagtgatcctgaatcagaggagcaaatcgtgacactgagaaaataaatgca

SEQ ID NO: 9207 - protein, 38 aa, Homo sapiens
MGWTRQVARQTMQKDRDGTLKYEGEKNCTGSEDGVSPC

SEQ ID NO: 9208 - DNA, 573 bp, Homo sapiens
gtccatgggatggacccggcaggtggcaagacaaactatgcaaaaggatcgtgatggaaccctcaaatatgaaggtgaaaagaactgcacaggcagcgaagtctggccctgtcacccaggctggagtgtaggtgcatgatcttggctcactgcaatctctgcctcatgggttctcacattctcctgcctcagcctcccgagtagctgggactagaggcacccaccaccatgcttggctaattttttgtattttttcatagagacggggtttcaccatgttagccaggatggtctcgatctgctgacctcgtgatccgcatgcctctgcctcccaaagggctgggattacaggcgtgaaccacagtgcccggcctgaaatcttgaaataaatgaaaaacgagctaatcgctgaacaaaaaaataaaaaatcactgtggaatgacaagaacattctacaaacatttatatgtgatttttgcaaaaagtgttaatgccaatgtgtatatgctgagtgatgaggagataagtgatcctgaatcagaggagcaaatcgtgacactgagaaaataaatg

SEQ ID NO: 9209 - protein, 44 aa, Homo sapiens
MGWTRQVARQTMQKDRDGTLKYEGEKNCTGSEVWPCHPGWSVGA

SEQ ID NO: 9210 - DNA, 551 bp, Homo sapiens
aaatacaatttttttctgaagttttttttttgtgtttgctttctgtgttttgtttgtaataggagggagcaacaaagacagtaactggacaacaggaacgtgatattggcattattgaacgagctccacaagatcaaacaaataagatgcccacatcagaattaggaagaaaagaagatacaaaatcaacttcagattctgagattatctctgtgagtgatacacagaattatgagtgtttacctgaggctacatatcaaaaagaaataaagacaacaaatggcaaaatagaagagtctcctgaaaagccttctcactttgagcctgccactgaaatgcaaaactctgttccaaataaaggcttagaatggaagaataaacaaacattgagagcagattcaactaccctatcaaaaatcttggatgcacttccttcttgtgaaagaggaagggaacttaaaaaagataactgtgaacaaattacagcaaaaatggaacaaacgaaaaataagttttgtgtactacaaaaggaactgtcagaagcgaaagaa

SEQ ID NO: 9211 - protein, 134 aa, Homo sapiens
MPTSELGRKEDTKSTSDSEIISVSDTQNYECLPEATYQKEIKTTNGKIEESPEKPSHFEPATEMQNSVPNKGLEWKNKQTLRADSTTLSKILDALPSCERGRELKKDNCEQITAKMEQTKNKFCVLQKELSEAK

SEQ ID NO: 9212 - DNA, 503 bp, Homo sapiens
aaatataccatccccactgaacagatgagaaaactgaggctcagaggtgtcagctcctgagagagccctggctttgtggggtgaagtcctttgattgcctcaggttcctgatctgttcgtgaccctgttagcccaaaagctggcagagctccattctttttaggtcttattctcagacggtcttgggtaaatggtggctgattgccttcagcatctagaacaaaacactctatggcccagaggaattccagctggaatctatgatcttattctcttgaggaatggaccatgcagtatccttcaaggaagaatcaagaatgtttccacagagaatatacatatttcatctctttctctgctgaatggatccccactgaaagccatgaatttctcttattagaccctgtagaatcccagtttatggcagtgacattaaaaacatctagtttatgacttggattaggcagcctgtaaaatggcttccagtgatccctgctctctgg

SEQ ID NO: 9213 - protein, 69 aa, Homo sapiens
MVADCLQHLEQNTLWPRGIPAGIYDLILLRNGPCSILQGRIKNVSTENIHISSLSLLNGSPLKAMNFSY

SEQ ID NO: 9214 - DNA, 468 bp, Homo sapiens
caattgttctccttggatactccctctggtctctatgtagacagagaacgttctcctccagcctctgttgatctctgaaggtctttaattcaaaatgcacgttacatcagggaccactattttgggggtctgctgtcatgtgatgctataccagagtcaagctggaatttggcatcttagtgccaaagggtctgtttcatccatgaagggatgtctattttaatgttaatgctgcaggtcaagcagtacctgagagcactgaggagcacctggacccagtaacttctctaaatctagtgtgggggaagatgcgcccctgccatggagccatgttctatggcaggcaaccactggtcaataaaaaaaaatcagatgatgtcaagtgtatatctaattgacattaaaatacacatttgaaaatttggaaatccttttttaaataaaatttttaaatttcatttttaatat

SEQ ID NO: 9215 - protein, 42 aa, Homo sapiens
MHVTSGTTILGVCCHVMLYQSQAGIWHLSAKGSVSSMKGCLF

SEQ ID NO: 9216 - DNA, 541 bp, Homo sapiens
acttggttgaaagaatttagctttgtctaaagacagtagaaagaaatgcttgagttaagaaaaggaaggttatggaagccaaggttcttgttatgtagatgaagcctctaggtagtattcttcagagagaatagatggtcaatgtctcttttcagattttaaatagagtccaactcagttaaatctcctctagacctggcaaagacctagaaagggaaagagattctaaagatgcaaaattttaccccacaaaaggctttgcagggccatttcaacatatgtcagataaatatattttgaagtaaagtgtgttaatttctttcagggtctgctgtcatgtgatgctataccagagtcaagctggaatttggcatcttagtgccaaagggtctgtttcatccatgaagggatgtctattttaatgttaatgctgggcctagtatgaggtgagtgcctaggcattgccatgtagacgctgtctgagagatgaaggtcattctccaaggagcagagaaaatgagtatcgtcctcatcaaccaag

SEQ ID NO: 9217 - DNA, 483 bp, Homo sapiens
ctcctctagacctggcaaagacctagaaagggaaagagattctaaagatgcaaaattttaccccacaaaaggctttgcagggccatttcaacatatgtcagataaatatattttgaagtaaagtgtgttaatttctttcagggtctgctgtcatgtgatgctataccagagtcaagctggaatttggcatcttagtgccaaagggtctgtttcatccatgaagggatgtctattttaatgttaatgctgcaggtcaagcagtacctgagagcactgaggagcacctggacccagtaacttctctaaatctagtgtgggggaagatgcgcccctgccatggagccatgttctatggcaggcaaccactggtcaataaaaaaaaatcagatgatgtcaagtgtatatctaattgacattaaaatacacatttgaaaatttggaaatccttttttaaataaaatttttaaatttcatttttaatat

SEQ ID NO: 9218 - protein, 31 aa, Homo sapiens
MEPCSMAGNHWSIKKNQMMSSVYLIDIKIHI

SEQ ID NO: 9219 - DNA, 1405 bp, Homo sapiens
acttcaggccactcctgcaccccgggactttcactctgagaaatcctttaccgtggaagcaggttatgctgtacaattggaggcattgtactgatctcttcctaccacactgaatatcgcatgatatcctgaaagtgatctagatgaagttgtgccaacaacatcatgacctgctggattccacacttcccagtgcagcagagccctgacctcactctcacatgccttatgtccctggaatcacgtaacagccaccgccaggcagtcatcgcagagaaaacaaggaaaacaccacgtggattccctcgggatgagatcaggtgcacgctgccagctcaatgggtccaccacccaccagagactccagcccagtgtcgcagccggcggggcggcacccactgctctcccactccagacctgatttcacattcacatggagccacggtcaggtggtcttcggtcccataaagcctatgcatgtattttcctcagagagcccacggaggagagagagatggctaaaacaagaagagatcggtggatgactacatctgccggccagaagaccactctgatagctttcatgaggatgactgcgtctcccagccaaaaggccactctgatagcttccatgaggatgactgcatctcctggccaaaagaccactctgatagcttccatgagctctccctggggcatccatggagaagatatttttgagggagaaatccccaatgcttcttgaatcttgcagcccacacagggatttcctacaagcaacccagccttgagctataaagacctgatcactttcctgggtgaagacagcagactgactcagttattctgtggataggtgacttgatcaatgagttggcgagagttctaagatgtgtctttcaggcacatatctcagatttgtaaaattattatcagatttgtaagataatttaaacaagactcagtgtctctgcatctcacactggttgtatattgcattaaaatggtgataattctcccctaatcaaactgtgcccaatgctggcaaggacactaatgttatgaagacaagaggtagctgaaaaataaagagacaatagccacgagacagacccagaggtcaggcagggcagggttgccgtgaggacatggctcgtcccacaggacctgggaactggtggtcacagcagtgcaaggtcctgttctctcctctgcagggacagacaggccaccagcctgacagagacggcattagtgggcagctgccaggaactagcagggattgcactagacttgcccgcctccactcagaaccagccagtgtggtgccagcaacctatctaacacaagcaaagaggatttcttaatgaaaacattttgtcttgcacaaaacaatactcaattt

SEQ ID NO: 9220 - protein, 103 aa, Homo sapiens
MEPRSGGLRSHKAYACIFLREPTEEREMAKTRRDRWMTTSAGQKTTLIAFMRMTASPSQKATLIASMRMTASPGQKTTLIASMSSPWGIHGEDIFEGEIPNAS

SEQ ID NO: 9221 - DNA, 650 bp, Homo sapiens
gaagctgcataaccggcacacttccagaaaggaccgaggaagagagcgtcgcttcagctagggatctgattagtcatgcctggagctaaaggagtggagctggggatgcaaatgtttctgtttagacagctgaagtggccatgcgagcccacagcgagagctgcaggagcagctactacagggagtgggcagattttaggatgtgcagctttgtacttggtgtggctcggttgtacattcaggaatctctttccttgtgatacatggagctgcacgtggaagatgttaggaaaacagctgggtgcagttttgctggttagttctgaacaaacctaaagatgtgagatttgaactctataagggaagaaagtgaggaggaagaaggcactgaggctgcctgtcaccaggagggttctgggcaaaacagggtagagtgacttgggacagttcctcttaacgatagcacaggcagtaggggttgagacacagtggggttgagacttgcttaaatgtacagttattcagtcaaccattttcatagaataattgtgggttgtgtgggttgtcttgagctgccgagttcacatgttctgcagtggagcactatatgctaatgtgagatgtgagtacacccagatttcacctgccct

SEQ ID NO: 9222 - protein, 86 aa, Homo sapiens
MPGAKGVELGMQMFLFRQLKWPCEPTARAAGAATTGSGQILGCAALYLVWLGCTFRNLFPCDTWSCTWKMLGKQLGAVLLVSSEQT

SEQ ID NO: 9223 - DNA, 763 bp, Homo sapiens
gccatagtagctctgggaactgaatctcggggaccaggaacagtctcgcatgtcattgtaatctggattcatgaactctgactttccacagtctttgagtcactgagcaccaggatcaactttcacagaggatccagataatcagccagcttgagtcacactcctgcagcttggctagggtagggattcctgaccaacagtcccataagatcttatccagtcaggaggtactggaccaatctgaagtgcagccaagaccgggagccacagacctggaacctgggtactcaaagagttgtccacgtgccagcagcactggcccctccaggagcttgttagaaatgtagaacctcagagcctacattaaagatattgaatcggagtctgcacgtcacatctgagaagccatgagctaagctgatgccattcagctgggtagcatcgcagtcactgtgcaacttttaaacctacagctgcccaggcccactgcagacctgctaaattcgagctccttgtagtggggccagggccctgggacttcacacaaaactctgcaagtcatcactgatgagaaaaccaagactcgatgagagtctcctgagctcgggggaagaagctgcataaccggcacacttccagaaaggaccgaggaagagagcgtcgcttcagctagggatctgattagtcatgcctggtaggctctgctgagctgggggctcttgggttttgcttgttgagctgaattaatatattaatggatttc

SEQ ID NO: 9224 - protein, 35 aa, Homo sapiens
ESPELGGRSCITGTLPERTEEESVASARDLISHAW

SEQ ID NO: 9225 - DNA, 1768 bp, Homo sapiens
ggtgatatggcttcagcctggttctcttgggatgatcactcttagaagaaatttgaagaagcccaaatagccacatggagaagccacaaacagatattctggctggcagcccagcagaggtcccagccagcagccagcatcaactgccatgtgaagaagtgtgcctgcagggggtttcagaccccagctgccaagctgcttccagcctcccggtcttccaagctgaggatgcagacagtgtggagcagagataagccaccctacagtgctgttctcagatccctggctcgcagaactcaagagcactataaaacagttgctattttacattgccaagtttggcattgcttgtggcatcaaggacaggaaattccaagctctcggtcaatgagagcccacggaggagagagagatggctaaaacaagaagagatcggtggatgactacatctgccggccagaagaccactctgatagctttcatgaggatgactgcgtctcccagccaaaaggccactctgatagcttccatgaggatgactgcatctcctggccaaaagaccactctgatagcttccatgagctctccctggggcatccatggagaagatatttttgagggagaaatccccaatgcttcttgaatcttgcagcccacacagggatttcctacaagcaacccagccttgagctataaagacctgatcactttcctgggtgaagacagcagactgactcagttattctgtggataggtgacttgatcaatgagttggcgagagttctaagatgtgtctttcaggcacatatctcagatttgtaaaattattatttatttatttaattcatttttttttttgagatggagactcactctgtcacccaggctggagtgcagtggcacaatctcggctcactgcaacctccacctcccaggttcaaatgattctcctgcctcagcctcctgagtagccgggattacaggcacctgccaccatgcccagctaatctttgtatttttagtatagacagggtttcaccatattggctgcactggtctccaactcctgacctcaggtgatccacctgcctcagcctcccaaattgctgggattacaggcatgaaccactgtgcctggcctcagatttgtaagataatttaaacaagactcagtgtctctgcatctcacactggttgtatattgcattaaaatggtgataattctcccctaatcaaactgtgcccaatgctggcaaggacactaatgttatgaagacaagaggtagctgaaaaataaagagacaatagccacgagacagacccagaggtcaggcagggcagggttgccgtgaggacatggctcgtcccacaggacctgggaactggtggtcacagcagtgcaaggtcctgttctctcctctgcagggacagacaggccaccagcctgacagagacggcattagtgggcagctgccaggaactagcagggattgcactagactttatagcgccatagttcagaattgctggatttggagacaaaatccaggtttgaattgtgattctatttcttactgctccgtgtcctggggcagccaggtcagctctctgagccctatggtctccatggctgagtgagaatgcccgcctccactcagaaccagccagtgtggtgccagcaacctatctaacacaagcaaagaggatttcttaatgaaaacattttgtcttgcacaaaacaatactcaatttaagaaacagcaaatgc

SEQ ID NO: 9226 - protein, 63 aa, Homo sapiens
MQTVWSRDKPPYSAVLRSLARRTQEHYKTVAILHCQVWHCLWHQGQEIPSSRSMRAHGGERDG

SEQ ID NO: 9227 - DNA, 963 bp, Homo sapiens
atggagcttgcaggactggaagttgcctgggaggtgggctactacagggacatgagctgcctaactgccatcctcctcctgtatctgccagaggaagacaccttctgggcactggatcagctgatggctgaggagaggcactccctgcagggtaggcggacagctacccccagggcctcacacagccaggccatgggacggccaccctgcctgggcgatcctgacttcccgtcagttactgaggaagctgtgggacattttcaaagccttttatataaaaaaacacacaacatactgctgtgggtctgtgtgcagggaccacgaagagcacagctgccgctgttctgtgtcgcagatgctatgggaagtgccttaacacacacagatgtgcttcatgcaaccagggccaaaggaagcagtcagcaagcgccatccaccccagcttttctctccctggggactgctggactgagggtacaggtggcccagctccgaaggctgttgctggccaggcctgcccacctcccctctgccctgcaggcacttgccttttcagagtcacatttgaatcctactccttacatcaaggttcaggcagctgtccaaacaccttatctcttcatctctggccatttcttcagagtcgactatgagcagaaatcacccagacaccccacagcctatgggcatgcagagtgcaagaatgacggctgggcattctctgcgccagcgccggtgcgctgcgtactcctcagcacagacccggagagcatcgccagggcggagctgagttctcctctgcacagacctggggaggccgggggcaccgcgagggtgaagctgcgttctgctcagcacagccccaggggactctgtgaaggcagagccacgttctcctcagcacagaccttggggacactgcctcgctttgggacaactcggggccacatcgacgatgaataa

SEQ ID NO: 9228 - protein, 320 aa, Homo sapiens [sequence omitted]

SEQ ID NO: 9229 - DNA, 660 bp, Homo sapiens
atgagggaaaaacattcagaccctcataacattgttctggaatccaatataagggacaagcactcagaaaccagcagcatcgttccagaatcctatgcgcctgcgccccgggctccctgcctaggccgctgtggcctgcatagagtggcgctgcgcgcggaggcgatgggagagaagaaggagggcggtggtgggggtgatgcgggagctgcggagggtggctcaggggtcgctcccagccgggtgctgcagcagtgcgggcagctccagaagctcattgtcatcttcattggcagcctgtgcgggctgtgcaccaagtgcgctgtgtccaatgacctcacccagcaggagatacggaccctggagcgttggttgtgcaacatgtggtcaggcattgttgtggagaagaaccaggcccctcatgttgaccagtgccgactgcaggctttgcagtttttggtgtatctcattgatttgctgtgcatacttctcaggtataatggtttcgccaggattcagaccgttgtgattcctaaaagagatattgagctaagtgaaactattgcttggaggaaaatggggagagaaagtggaaaagcaagtagtggtactaacatgaaccaggaaaagctgaatcacgtctacctgcaaatgacctga

SEQ ID NO: 9230 - protein, 219 aa, Homo sapiens
MREKHSDPHNIVLESNIRDKHSETSSIVPESYAPAPRAPCLGRCGLHRVALRAEAMGEKKEGGGGGDAGAAEGGSGVAPSRVLQQCGQLQKLIVIFIGSLCGLCTKCAVSNDLTQQEIRTLERWLCNMWSGIVVEKNQAPHVDQCRLQALQFLVYLIDLLCILLRYNGFARIQTVVIPKRDIELSETIAWRKMGRESGKASSGTNMNQEKLNHVYLQMT

SEQ ID NO: 9231 - DNA, 1618 bp, Homo sapiens
agatgccggcggcgcggcgtggcagggttgtggttccgggtcgggccgcgccgcagccagctctcggctcgcagccgcagcgccccgcccccgcgctccggacctggcaggcggcggctgcagggcaggtccaggggccacatggctgagggggacgcagggagcgaccagaggcagaatgaggaaattgaagcaatggcagccatttatggcgaggagtggtgtgtcattgatgactgtgccaaaatattttgtattagaattagcgacgatatagatgaccccaaatggacactttgcttgcaggtgatgctgccgaatgaatacccaggtacagctccacctatctaccagttgaatgctccttggcttaaagggcaagaacgtgcggatttatcaaatagccttgaggaaatatatattcagaatatcggtgaaagtattctttacctgtgggtggagaaaataagagatgttcttatacaaaaatctcagatgacagaaccaggcccagatgtaaagaagaaaactgaagaggaagatgttgaatgtgaagatgatctcattttagcatgtcagccggaaagttcgcttaaagcattggattttgatatcagtgaaactcggacagaagtagaagtagaagaattacctccgattgatcatggcattcctattacagaccgaagaagtacttttcaggcacacttggctccagtggtttgtcccaaacaggtgaaaatggttctttccaaattgtatgagaataagaaaatagctagtgccacccacaacatctatgcctacagaatatattgtgaggataaacagaccttcttacaggattgtgaggatgatggggaaacagcagctggtgggcgtcttcttcatctcatggagattttgaatgtgaagaatgtcatggtggtagtatcacgctggtatggagggattctgctaggaccagatcgctttaaacatatcaacaactgtgccagaaacatactagtggaaaagaactacacaaattcacctgaggagtcatctaaggctttgggaaagaacaaaaaagcttatttgggagaactaatttgaacttaatcaccacttcatctaattttagcaaggtaacagttgcccagggcagtacctgaattaactgtccatttcagtacatgtcaagtgcctttgttaggtggagaagaaatgtctctagaggaatataaatacctgatttcttgtcatcgagattcttgtactgttaaatgaatattgccttttactgctctttatggcttattggaataggagctcatttaagattgatcttggagagtttcttcttgtgattttagttcataagtatgtcacctttcattttatagtgttcatcattgagtaatggattaagtgaaaatccaggagtatccatctgcagttatgtgctgaggtgataattcatccaacatatttgttagcataaatattatgcttcagtttctgttgcaaattggtgattgtgaaattacagaaagtgattttctagtctgctttttttgtttaattcttgtaatgtaagcaataaatatggagtgtcagtagtctccttccaccccag

SEQ ID NO: 9232 - protein, 317 aa, Homo sapiens
MAEGDAGSDQRQNEEIEAMAAIYGEEWCVIDDCAKIFCIRISDDIDDPKWTLCLQVMLPNEYPGTAPPIYQLNAPWLKGQERADLSNSLEEIYIQNIGESILYLWVEKIRDVLIQKSQMTEPGPDVKKKTEEEDVECEDDLILACQPESSLKALDFDISETRTEVEVEELPPIDHGIPITDRRSTFQAHLAPVVCPKQVKMVLSKLYENKKIASATHNIYAYRIYCEDKQTFLQDCEDDGETAAGGRLLHLMEILNVKNVMVVVSRWYGGILLGPDRFKHINNCARNILVEKNYTNSPEESSKALGKNKKAYLGELI

SEQ ID NO: 9233 - DNA, 1850 bp, Homo sapiens
agatgccggcggcgcggcgtggcagggttgtggttccgggtcgggccgcgccgcagccagctctcggctcgcagccgcagcgccccgcccccgcgctccggacctggcaggcggcggctgcagggcaggtccaggggccacatggctgagggggacgcagggagcgaccagaggcagaatgaggaaattgaagcaatggcagccatttatggcgaggagtggtgtgtcattgatgactgtgccaaaatattttgtattagaattagcgacgatatagatgaccccaaatggacactttgcttgcaggtgatgctgccgaatgaatacccaggtacagctccacctatctaccagttgaatgctccttggcttaaagggcaagaacgtgcggatttatcaaatagccttgaggaaatatatattcagaatatcggtgaaagtattctttacctgtgggtggagaaaataagagatgttcttatacaaaaatctcagatgacagaaccaggcccagatgtaaagaagaaaactgaagaggaagatgttgaatgtgaagatgatctcattttagcatgtcagccggaaagttcgcttaaagcattggattttgatatcagtgaaactcggacagaagtagaagtagaagaattacctccgattgatcatggcattcctattacagaccgaagaagtacttttcaggcacacttggctccagtggtttgtcccaaacaggtgaaaatggttctttccaaattgtatgagaataagaaaatagctagtgccacccacaacatctatgcctacagaatatattgtgaggataaacagaccttcttacaggattgtgaggatgatggggaaacagcagctggtgggcgtcttcttcatctcatggagattttgaatgtgaagaatgtcatggtggtagtatcacgctggtatggagggattctgctaggaccagatcgctttaaacatatcaacaactgtgccagaaacatactagtggaaaagaactacacaaattcacctgaggagtcatctaaggctttgggaaagaacaaaaaagtaagaaaagacaagaagaggaatgaacattaatacctgaaactataggaaaggttaatttgcctataattatatatacattccatagtcatcaaggaatatattgtgcagagagagtatccttgactgcttaagtcagccagttcagcatggataccaacattagcttttcttcttggttatatcatctgccaaaaatagagaacttatgatctattcatgtgtgtttcaggcttatttgggagaactaatttgaacttaatcaccacttcatctaattttagcaaggtaacagttgcccagggcagtacctgaattaactgtccatttcagtacatgtcaagtgcctttgttaggtggagaagaaatgtctctagaggaatataaatacctgatttcttgtcatcgagattcttgtactgttaaatgaatattgccttttactgctctttatggcttattggaataggagctcatttaagattgatcttggagagtttcttcttgtgattttagttcataagtatgtcacctttcattttatagtgttcatcattgagtaatggattaagtgaaaatccaggagtatccatctgcagttatgtgctgaggtgataattcatccaacatatttgttagcataaatattatgcttcagtttctgttgcaaattggtgattgtgaaattacagaaagtgattttctagtctgctttttttgtttaattcttgtaatgtaagcaataaatatggagtgtcagtagtctccttccaccccag

SEQ ID NO: 9234 - protein, 320 aa, Homo sapiens
MAEGDAGSDQRQNEEIEAMAAIYGEEWCVIDDCAKIFCIRISDDIDDPKWTLCLQVMLPNEYPGTAPPIYQLNAPWLKGQERADLSNSLEEIYIQNIGESILYLWVEKIRDVLIQKSQMTEPGPDVKKKTEEEDVECEDDLILACQPESSLKALDFDISETRTEVEVEELPPIDHGIPITDRRSTFQAHLAPVVCPKQVKMVLSKLYENKKIASATHNIYAYRIYCEDKQTFLQDCEDDGETAAGGRLLHLMEILNVKNVMVVVSRWYGGILLGPDRFKHINNCARNILVEKNYTNSPEESSKALGKNKKVRKDKKRNEH

SEQ ID NO: 9235 - DNA, 3560 bp, Homo sapiens
agatgccggcggcgcggcgtggcagggttgtggttccgggtcgggccgcgccgcagccagctctcggctcgcagccgcagcgccccgcccccgcgctccggacctggcaggcggcggctgcagggcaggtccaggggccacatggctgagggggacgcagggagcgaccagaggcagaatgaggaaattgaagcaatggcagccatttatggcgaggagtggtgtgtcattgatgactgtgccaaaatattttgtattagaattagcgacgatatagatgaccccaaatggacactttgcttgcaggtgatgctgccgaatgaatacccaggtacagctccacctatctaccagttgaatgctccttggcttaaagggcaagaacgtgcggatttatcaaatagccttgaggaaatatatattcagaatatcggtgaaagtattctttacctgtgggtggagaaaataagagatgttcttatacaaaaatctcagatgacagaaccaggcccagatgtaaagaagaaaactgaagaggaagatgttgaatgtgaagatgatctcattttagcatgtcagccggaaagttcgcttaaagcattggattttgatatcagtgaaactcggacagaagtagaagtagaagaattacctccgattgatcatggcattcctattacagaccgaagaagtacttttcaggcacacttggctccagtggtttgtcccaaacaggtgaaaatggttctttccaaattgtatgagaataagaaaatagctagtgccacccacaacatctatgcctacagaatatattgtgaggataaacagaccttcttacaggattgtgaggatgatggggaaacagcagctggtgggcgtcttcttcatctcatggagattttgaatgtgaagaatgtcatggtggtagtatcacgctggtatggagggattctgctaggaccagatcgctttaaacatatcaacaactgtgccagaaacatactagtggaaaagaactacacaaattcacctgaggagtcatctaaggctttgggaaagaacaaaaaagcttatttgggagaactaatttgaacttaatcaccacttcatctaattttagcaaggtaacagttgcccagggcagtacctgaattaactgtccatttcagtacatgtcaagtgcctttgttaggtggagaagaaatgtctctagaggaatataaatacctgatttcttgtcatcgagattcttgtactgttaaatgaatattgccttttactgctctttatggcttattggaataggagctcatttaagattgatcttggagagtttcttcttgtgattttagttcataagtatgtcacctttcattttatagtgttcatcattgagtaatggattaagtgaaaatccaggagtatccatctgcagttatgtgctgaggtgataattcatccaacatatttgttagcataaatattatgcttcagtttctgttgcaaattggtgattgtgaaattacagaaagtgattttctagtctgctttttttgtttaattcttgtaatgtaagcaataaatatggagtgtcagtagtctccttccaccccagaaatgtgttggtgtaacattctcgtttcttttaacaacctggaagtacctttcttgtgatcttcactgaggaattagaactatgatagaagttaggctgtggcaaatgggacattcgtagagtgggatagaggtggcagaatgaacctggtgtagggcaggagtatgttgtgtagttacatcaatttgatgcatgctttccatctgcactccagacggctttctcagttccaagattttgcagagagaaggagcaaaccttttcattggaaaaacagaaacaaccctcccccccattttttcccctctattcatcaaacctttatgtatctttcatcttccagttacctctaggcatttagatagtgaaatttacctttgagatataacaataagtgattaactgttcactttcagatgtaatggcaaacaattgttaaaagttattaactgatcacagatttgcctggacttcccttcccagggagggaacagaagttaggaggcaactttgggatggtgctagagcatggaaagcacagagaattggacaaacaggtctttttctcttttctctgatgttttacctttaaaagatccaacatccttaccgttggtatttttagtaaggttatagtaaatagctttacaccaggatggattctgaaatataaattctaaattatatttgttataactatattttatgttgtatgttatcaggagccatcagagaatgacctttttgtgtttggaacacttggttccatgaaaagtatgctttgtgttttaactgttaaaataatttaaaaattaattattttacataattaaagaagttaaaaactattaacattaaataatttcacaatttcaacatgtcaaacctatgaagggagataggaaacaatgagaaacttacttttgctcctttatacagaattattaactatattttactaactaaaaaactctagtattctttacctaaagtcaattggctggtaagagggagagatgcaaaattctccagctctgaacttggagctacttcacactctactcttaatggaaacttgaactaatgatagatagtatttttttcctctatttaaaatttttgtcttgattaggagatttttcagttctccatataataattttctacaatcagatctatgctgtggcatattttgctttatttaaaaatttttttttagagatgagttcttgctctgtcacctaggctggagtgcagtggcatgatcatggctcactgcagccttgaccttccagcctgccaagtagctgggattacagacaggcatgtgctattacacctggctaatttttaaagttttttttgtaaagatagggtctttctatgttgcccaggctcgtcttgagctcctggcctcaatcgatcttcctgccaaggttttggaattacaggtgtgagccaccatgcctggcctgctttgacatattttatagtgtgttaattacaaatagtcttcatatgccagaatataagagcaagtgttatctactttttagatgggaattgcagaagctgcatcaaaagtatgctttgaggtatatatagtgaaacagagcctttctgaagagaattatatcaaactaattacaaccaagaaataatagtatgaagcggatgctgtttggaggacaggaaaatttatcgggaaaattacataatccctctgattccactatccagagatagccattattattaatatttggtatgtacatccttatattatttttttcttatgcatgattttgtatatatggttatttttctttccataaaaatggtattaaactgtatatactgttttgtagcctacatatttcatatagaagtatattgttaacattttccatgtcaataaatattcttctatggcttaaatgtc

SEQ ID NO: 9236 - protein, 317 aa, Homo sapiens; identical to SEQ ID NO: 9232

SEQ ID NO: 9237 - DNA, 3792 bp, Homo sapiens
agatgccggcggcgcggcgtggcagggttgtggttccgggtcgggccgcgccgcagccagctctcggctcgcagccgcagcgccccgcccccgcgctccggacctggcaggcggcggctgcagggcaggtccaggggccacatggctgagggggacgcagggagcgaccagaggcagaatgaggaaattgaagcaatggcagccatttatggcgaggagtggtgtgtcattgatgactgtgccaaaatattttgtattagaattagcgacgatatagatgaccccaaatggacactttgcttgcaggtgatgctgccgaatgaatacccaggtacagctccacctatctaccagttgaatgctccttggcttaaagggcaagaacgtgcggatttatcaaatagccttgaggaaatatatattcagaatatcggtgaaagtattctttacctgtgggtggagaaaataagagatgttcttatacaaaaatctcagatgacagaaccaggcccagatgtaaagaagaaaactgaagaggaagatgttgaatgtgaagatgatctcattttagcatgtcagccggaaagttcgcttaaagcattggattttgatatcagtgaaactcggacagaagtagaagtagaagaattacctccgattgatcatggcattcctattacagaccgaagaagtacttttcaggcacacttggctccagtggtttgtcccaaacaggtgaaaatggttctttccaaattgtatgagaataagaaaatagctagtgccacccacaacatctatgcctacagaatatattgtgaggataaacagaccttcttacaggattgtgaggatgatggggaaacagcagctggtgggcgtcttcttcatctcatggagattttgaatgtgaagaatgtcatggtggtagtatcacgctggtatggagggattctgctaggaccagatcgctttaaacatatcaacaactgtgccagaaacatactagtggaaaagaactacacaaattcacctgaggagtcatctaaggctttgggaaagaacaaaaaagtaagaaaagacaagaagaggaatgaacattaatacctgaaactataggaaaggttaatttgcctataattatatatacattccatagtcatcaaggaatatattgtgcagagagagtatccttgactgcttaagtcagccagttcagcatggataccaacattagcttttcttcttggttatatcatctgccaaaaatagagaacttatgatctattcatgtgtgtttcaggcttatttgggagaactaatttgaacttaatcaccacttcatctaattttagcaaggtaacagttgcccagggcagtacctgaattaactgtccatttcagtacatgtcaagtgcctttgttaggtggagaagaaatgtctctagaggaatataaatacctgatttcttgtcatcgagattcttgtactgttaaatgaatattgccttttactgctctttatggcttattggaataggagctcatttaagattgatcttggagagtttcttcttgtgattttagttcataagtatgtcacctttcattttatagtgttcatcattgagtaatggattaagtgaaaatccaggagtatccatctgcagttatgtgctgaggtgataattcatccaacatatttgttagcataaatattatgcttcagtttctgttgcaaattggtgattgtgaaattacagaaagtgattttctagtctgctttttttgtttaattcttgtaatgtaagcaataaatatggagtgtcagtagtctccttccaccccagaaatgtgttggtgtaacattctcgtttcttttaacaacctggaagtacctttcttgtgatcttcactgaggaattagaactatgatagaagttaggctgtggcaaatgggacattcgtagagtgggatagaggtggcagaatgaacctggtgtagggcaggagtatgttgtgtagttacatcaatttgatgcatgctttccatctgcactccagacggctttctcagttccaagattttgcagagagaaggagcaaaccttttcattggaaaaacagaaacaaccctcccccccattttttcccctctattcatcaaacctttatgtatctttcatcttccagttacctctaggcatttagatagtgaaatttacctttgagatataacaataagtgattaactgttcactttcagatgtaatggcaaacaattgttaaaagttattaactgatcacagatttgcctggacttcccttcccagggagggaacagaagttaggaggcaactttgggatggtgctagagcatggaaagcacagagaattggacaaacaggtctttttctcttttctctgatgttttacctttaaaagatccaacatccttaccgttggtatttttagtaaggttatagtaaatagctttacaccaggatggattctgaaatataaattctaaattatatttgttataactatattttatgttgtatgttatcaggagccatcagagaatgacctttttgtgtttggaacacttggttccatgaaaagtatgctttgtgttttaactgttaaaataatttaaaaattaattattttacataattaaagaagttaaaaactattaacattaaataatttcacaatttcaacatgtcaaacctatgaagggagataggaaacaatgagaaacttacttttgctcctttatacagaattattaactatattttactaactaaaaaactctagtattctttacctaaagtcaattggctggtaagagggagagatgcaaaattctccagctctgaacttggagctacttcacactctactcttaatggaaacttgaactaatgatagatagtatttttttcctctatttaaaatttttgtcttgattaggagatttttcagttctccatataataattttctacaatcagatctatgctgtggcatattttgctttatttaaaaatttttttttagagatgagttcttgctctgtcacctaggctggagtgcagtggcatgatcatggctcactgcagccttgaccttccagcctgccaagtagctgggattacagacaggcatgtgctattacacctggctaatttttaaagttttttttgtaaagatagggtctttctatgttgcccaggctcgtcttgagctcctggcctcaatcgatcttcctgccaaggttttggaattacaggtgtgagccaccatgcctggcctgctttgacatattttatagtgtgttaattacaaatagtcttcatatgccagaatataagagcaagtgttatctactttttagatgggaattgcagaagctgcatcaaaagtatgctttgaggtatatatagtgaaacagagcctttctgaagagaattatatcaaactaattacaaccaagaaataatagtatgaagcggatgctgtttggaggacaggaaaatttatcgggaaaattacataatccctctgattccactatccagagatagccattattattaatatttggtatgtacatccttatattatttttttcttatgcatgattttgtatatatggttatttttctttccataaaaatggtattaaactgtatatactgttttgtagcctacatatttcatatagaagtatattgttaacattttccatgtcaataaatattcttctatggcttaaatgtc

SEQ ID NO: 9238 - protein, 320 aa, Homo sapiens; identical to SEQ ID NO: 9234

SEQ ID NO: 9239 - DNA, 2945 bp, Homo sapiens
ggttccgggtcgggccgcgccgcagccagctctcggctcgcagccgcagcgccccgcccccgcgctccggacctggcaggcggcggctgcagggcaggtccaggggccacatggctgagggggacgcagggagcgaccagaggcaggtgaggccccggcggggtgctgtctctccaggctcggctccggctcgcctcgccatgccagtcctcctcagccgaggggccctccgcctggggccgccccgggttccgccagcactggccacgccatttgctccaccgcgttccattttcccggcgcttcccgtcggccgagcgctcttaggccggcggctcctcggcggccgcggtctcggcctgtctcggacggtgtcctcgtcaaccattaacacgcgactaagcagctctgggccgaaggcaaaaaccggggtttcgatccccaccctgccgccgccgagtcatcttggacaaatcacttaagaattcgggtttccccctttgcaaaatggcaatagcccagaccctgcaggtcccgagagcccaccgaatctcactccttctggtccttggcatcgagctttccctgtgccttgttcacgtgggcgatcataagtcttttcctacagggctgtgagtacaaaatgaaatgctacgaagtcgaatggatactttgcttcccatcttttccctttaggtcctccagttatttttcttttttaaccccaagcccaaagaataatttatgaaacgttttaagggtttgattaccaagcaaccacccacccatctagtccttgtgtaccccctccccacctccccccaacacaaaatttaatacgaaggaaccagtgagacacccagcaggagtacacagataatgtggggcagagctattgggggtgggagtcaggggtggagattacctgttaaaaaagagaaggtggaacagagaagataggtttatcttttcacgtgtgaatggtcactacaaagtatgggagtgcatatatattatattttgactcaatagtggccaaaagcacagtaatgcagtagcaaggctggctccagtcattgcagtagcgcctagcaaccacccagagagcagaacatggtgacctgctcttaagaaactcttggcctggtgaggctcatctaggaatttttgatctactctggtaatgttgaatttgaataccttataaagtagtaagaataggattttaagatgtgtacatttgttgacttttaaaaaatcaatttctttcagaatgaggaaattgaagcaatggcagccatttatggcgaggagtggtgtgtcattgatgactgtgccaaaatattttgtattagaattagcgacgatatagatgaccccaaatggacactttgcttgcaggtgatgctgccgaatgaatacccaggtacagctccacctatctaccagttgaatgctccttggcttaaagggcaagaacgtgcggatttatcaaatagccttgaggaaatatatattcagaatatcggtgaaagtattctttacctgtgggtggagaaaataagagatgttcttatacaaaaatctcagatgacagaaccaggcccagatgtaaagaagaaaactgaagaggaagatgttgaatgtgaagatgatctcattttagcatgtcagccggaaagttcgcttaaagcattggattttgatatcagtgaaactcggacagaagtagaagtagaagaattacctccgattgatcatggcattcctattacagaccgaagaagtacttttcaggcacacttggctccagtggtttgtcccaaacaggtgaaaatggttctttccaaattgtatgagaataagaaaatagctagtgccacccacaacatctatgcctacagaatatattgtgaggataaacagaccttcttacaggattgtgaggatgatggggaaacagcagctggtgggcgtcttcttcatctcatggagattttgaatgtgaagaatgtcatggtggtagtatcacgctggtatggagggattctgctaggaccagatcgctttaaacatatcaacaactgtgccagaaacatactagtggaaaagaactacacaaattcacctgaggagtcatctaaggctttgggaaagaacaaaaaagtaagaaaagacaagaagaggaatgaacattaatacctgaaactataggaaaggttaatttgcctataattatatatacattccatagtcatcaaggaatatattgtgcagagagagtatccttgactgcttaagtcagccagttcagcatggataccaacattagcttttcttcttggttatatcatctgccaaaaatagagaacttatgatctattcatgtgtgtttcaggcttatttgggagaactaatttgaacttaatcaccacttcatctaattttagcaaggtaacagttgcccagggcagtacctgaattaactgtccatttcagtacatgtcaagtgcctttgttaggtggagaagaaatgtctctagaggaatataaatacctgatttcttgtcatcgagattcttgtactgttaaatgaatattgccttttactgctctttatggcttattggaataggagctcatttaagattgatcttggagagtttcttcttgtgattttagttcataagtatgtcacctttcattttatagtgttcatcattgagtaatggattaagtgaaaatccaggagtatccatctgcagttatgtgctgaggtgataattcatccaacatatttgttagcataaatattatgcttcagtttctgttgcaaattggtgattgtgaaattacagaaagtgattttctagtctgctttttttgtttaattcttgtaatgtaagcaataaatatggagtgtcagtagtctccttccaccccag

SEQ ID NO: 9240 - protein, 302 aa, Homo sapiens
MAAIYGEEWCVIDDCAKIFCIRISDDIDDPKWTLCLQVMLPNEYPGTAPPIYQLNAPWLKGQERADLSNSLEEIYIQNIGESILYLWVEKIRDVLIQKSQMTEPGPDVKKKTEEEDVECEDDLILACQPESSLKALDFDISETRTEVEVEELPPIDHGIPITDRRSTFQAHLAPVVCPKQVKMVLSKLYENKKIASATHNIYAYRIYCEDKQTFLQDCEDDGETAAGGRLLHLMEILNVKNVMVVVSRWYGGILLGPDRFKHINNCARNILVEKNYTNSPEESSKALGKNKKVRKDKKRNEH

SEQ ID NO: 9241 - DNA, 4887 bp, Homo sapiens
ggttccgggtcgggccgcgccgcagccagctctcggctcgcagccgcagcgccccgcccccgcgctccggacctggcaggcggcggctgcagggcaggtccaggggccacatggctgagggggacgcagggagcgaccagaggcaggtgaggccccggcggggtgctgtctctccaggctcggctccggctcgcctcgccatgccagtcctcctcagccgaggggccctccgcctggggccgccccgggttccgccagcactggccacgccatttgctccaccgcgttccattttcccggcgcttcccgtcggccgagcgctcttaggccggcggctcctcggcggccgcggtctcggcctgtctcggacggtgtcctcgtcaaccattaacacgcgactaagcagctctgggccgaaggcaaaaaccggggtttcgatccccaccctgccgccgccgagtcatcttggacaaatcacttaagaattcgggtttccccctttgcaaaatggcaatagcccagaccctgcaggtcccgagagcccaccgaatctcactccttctggtccttggcatcgagctttccctgtgccttgttcacgtgggcgatcataagtcttttcctacagggctgtgagtacaaaatgaaatgctacgaagtcgaatggatactttgcttcccatcttttccctttaggtcctccagttatttttcttttttaaccccaagcccaaagaataatttatgaaacgttttaagggtttgattaccaagcaaccacccacccatctagtccttgtgtaccccctccccacctccccccaacacaaaatttaatacgaaggaaccagtgagacacccagcaggagtacacagataatgtggggcagagctattgggggtgggagtcaggggtggagattacctgttaaaaaagagaaggtggaacagagaagataggtttatcttttcacgtgtgaatggtcactacaaagtatgggagtgcatatatattatattttgactcaatagtggccaaaagcacagtaatgcagtagcaaggctggctccagtcattgcagtagcgcctagcaaccacccagagagcagaacatggtgacctgctcttaagaaactcttggcctggtgaggctcatctaggaatttttgatctactctggtaatgttgaatttgaataccttataaagtagtaagaataggattttaagatgtgtacatttgttgacttttaaaaaatcaatttctttcagaatgaggaaattgaagcaatggcagccatttatggcgaggagtggtgtgtcattgatgactgtgccaaaatattttgtattagaattagcgacgatatagatgaccccaaatggacactttgcttgcaggtgatgctgccgaatgaatacccaggtacagctccacctatctaccagttgaatgctccttggcttaaagggcaagaacgtgcggatttatcaaatagccttgaggaaatatatattcagaatatcggtgaaagtattctttacctgtgggtggagaaaataagagatgttcttatacaaaaatctcagatgacagaaccaggcccagatgtaaagaagaaaactgaagaggaagatgttgaatgtgaagatgatctcattttagcatgtcagccggaaagttcgcttaaagcattggattttgatatcagtgaaactcggacagaagtagaagtagaagaattacctccgattgatcatggcattcctattacagaccgaagaagtacttttcaggcacacttggctccagtggtttgtcccaaacaggtgaaaatggttctttccaaattgtatgagaataagaaaatagctagtgccacccacaacatctatgcctacagaatatattgtgaggataaacagaccttcttacaggattgtgaggatgatggggaaacagcagctggtgggcgtcttcttcatctcatggagattttgaatgtgaagaatgtcatggtggtagtatcacgctggtatggagggattctgctaggaccagatcgctttaaacatatcaacaactgtgccagaaacatactagtggaaaagaactacacaaattcacctgaggagtcatctaaggctttgggaaagaacaaaaaagtaagaaaagacaagaagaggaatgaacattaatacctgaaactataggaaaggttaatttgcctataattatatatacattccatagtcatcaaggaatatattgtgcagagagagtatccttgactgcttaagtcagccagttcagcatggataccaacattagcttttcttcttggttatatcatctgccaaaaatagagaacttatgatctattcatgtgtgtttcaggcttatttgggagaactaatttgaacttaatcaccacttcatctaattttagcaaggtaacagttgcccagggcagtacctgaattaactgtccatttcagtacatgtcaagtgcctttgttaggtggagaagaaatgtctctagaggaatataaatacctgatttcttgtcatcgagattcttgtactgttaaatgaatattgccttttactgctctttatggcttattggaataggagctcatttaagattgatcttggagagtttcttcttgtgattttagttcataagtatgtcacctttcattttatagtgttcatcattgagtaatggattaagtgaaaatccaggagtatccatctgcagttatgtgctgaggtgataattcatccaacatatttgttagcataaatattatgcttcagtttctgttgcaaattggtgattgtgaaattacagaaagtgattttctagtctgctttttttgtttaattcttgtaatgtaagcaataaatatggagtgtcagtagtctccttccaccccagaaatgtgttggtgtaacattctcgtttcttttaacaacctggaagtacctttcttgtgatcttcactgaggaattagaactatgatagaagttaggctgtggcaaatgggacattcgtagagtgggatagaggtggcagaatgaacctggtgtagggcaggagtatgttgtgtagttacatcaatttgatgcatgctttccatctgcactccagacggctttctcagttccaagattttgcagagagaaggagcaaaccttttcattggaaaaacagaaacaaccctcccccccattttttcccctctattcatcaaacctttatgtatctttcatcttccagttacctctaggcatttagatagtgaaatttacctttgagatataacaataagtgattaactgttcactttcagatgtaatggcaaacaattgttaaaagttattaactgatcacagatttgcctggacttcccttcccagggagggaacagaagttaggaggcaactttgggatggtgctagagcatggaaagcacagagaattggacaaacaggtctttttctcttttctctgatgttttacctttaaaagatccaacatccttaccgttggtatttttagtaaggttatagtaaatagctttacaccaggatggattctgaaatataaattctaaattatatttgttataactatattttatgttgtatgttatcaggagccatcagagaatgacctttttgtgtttggaacacttggttccatgaaaagtatgctttgtgttttaactgttaaaataatttaaaaattaattattttacataattaaagaagttaaaaactattaacattaaataatttcacaatttcaacatgtcaaacctatgaagggagataggaaacaatgagaaacttacttttgctcctttatacagaattattaactatattttactaactaaaaaactctagtattctttacctaaagtcaattggctggtaagagggagagatgcaaaattctccagctctgaacttggagctacttcacactctactcttaatggaaacttgaactaatgatagatagtatttttttcctctatttaaaatttttgtcttgattaggagatttttcagttctccatataataattttctacaatcagatctatgctgtggcatattttgctttatttaaaaatttttttttagagatgagttcttgctctgtcacctaggctggagtgcagtggcatgatcatggctcactgcagccttgaccttccagcctgccaagtagctgggattacagacaggcatgtgctattacacctggctaatttttaaagttttttttgtaaagatagggtctttctatgttgcccaggctcgtcttgagctcctggcctcaatcgatcttcctgccaaggttttggaattacaggtgtgagccaccatgcctggcctgctttgacatattttatagtgtgttaattacaaatagtcttcatatgccagaatataagagcaagtgttatctactttttagatgggaattgcagaagctgcatcaaaagtatgctttgaggtatatatagtgaaacagagcctttctgaagagaattatatcaaactaattacaaccaagaaataatagtatgaagcggatgctgtttggaggacaggaaaatttatcgggaaaattacataatccctctgattccactatccagagatagccattattattaatatttggtatgtacatccttatattatttttttcttatgcatgattttgtatatatggttatttttctttccataaaaatggtattaaactgtatatactgttttgtagcctacatatttcatatagaagtatattgttaacattttccatgtcaataaatattcttctatggcttaaatgtc

SEQ ID NO: 9242 - protein, 302 aa, Homo sapiens; identical to SEQ ID NO: 9240

SEQ ID NO: 9243 - DNA, 520 bp, Homo sapiens
ggctttgggaaagaacaaaaaagtaagaaaagacaagaagaggaatgaacattaatacctgaaactataggaaagtgttcatcattgagtaatggattaagtgaaaatccaggagtatccatctgcagttatgtgctgagatgggaattgcagaagctgcatcaaaagtatgctttgaggtatatatagtgaaacagagcctttctgaagagaattatatcaaactaattacaaccaagaaataatagtatgaagcggatgctgtttggaggacaggaaaatttatcgggaaaattacataatccctctgattccactatccagagatagccattattattaatatttggtatgtacatccttatattatttttttcttatgcatgattttgtatatatggttatttttctttccataaaaatggtattaaactgtatatactgttttgtagcctacatatttcatatagaagtatattgttaacattttccatgtcaataaatattcttctatggctta

SEQ ID NO: 9244 - protein, 34 aa, Homo sapiens
MGIAEAASKVCFEVYIVKQSLSEENYIKLITTKK

SEQ ID NO: 9245 - DNA, 3667 bp, Homo sapiens
ggaagactacacattttaggtatgtgattagaaaacatacttgtcagaattgtctggctggattaatttgctaatttgaccttcttcatcatttgatgtgatgccagatactaatagcacaatcaatttatcactaagcactcgtgttactttagcattttttatgtccttagtagcttttgctataatgctaggaaatgctttggtcattttagcttttgtggtggacaaaaaccttagacatcgaagtagttatttttttcttaacttggccatctctgacttctttgtgggtgtgatctccattcctttgtacatccctcacacgctgttcgaatgggattttggaaaggaaatctgtgtattttggctcactactgactatctgttatgtacagcatctgtatataacattgtcctcatcagctatgatcgatacctgtcagtctcaaatgctgtgtcttatagaactcaacatactggggtcttgaagattgttactctgatggtggccgtttgggtgctggccttcttagtgaatgggccaatgattctagtttcagagtcttggaaggatgaaggtagtgaatgtgaacctggatttttttcggaatggtacatccttgccatcacatcattcttggaattcgtgatcccagtcatcttagtcgcttatttcaacatgaatatttattggagcctgtggaagcgtgatcatctcagtaggtgccaaagccatcctggactgactgctgtctcttccaacatctgtggacactcattcagaggtagactatcttcaaggagatctctttctgcatcgacagaagttcctgcatcctttcattcagagagacagaggagaaagagtagtctcatgttttcctcaagaaccaagatgaatagcaatacaattgcttccaaaatgggttccttctcccaatcagattctgtagctcttcaccaaagggaacatgttgaactgcttagagccaggagattagccaagtcactggccattctcttaggggtttttgctgtttgctgggctccatattctctgttcacaattgtcctttcattttattcctcagcaacaggtcctaaatcagtttggtatagaattgcattttggcttcagtggttcaattcctttgtcaatcctcttttgtatccattgtgtcacaagcgctttcaaaaggctttcttgaaaatattttgtataaaaaagcaacctctaccatcacaacacagtcggtcagtatcttcttaaagacaattttctcacctctgtaaattttagtctcaatctcacctaaatgaatcaggtctgccctttatcttgcccttttcattctaccaacagatctgcactttgaagtcaatggtaaattactccagtgaataatagcagtataatatgacttgataatatttttgtaaacttgtagtcataatagtactatattcttcttagtcctcacctcttccttgtcttttagatcttaatttcatgctgattacaaaaatccagttttgttttctttctatgttccatgcataatacagtcttaagtgaatttctcttttttaattttatcgtaatagaaacttatccagtttgaaaatcattccctaaagcatgcaataggaaaaagaacctcctggctgggactgcccaactctgttctgatcagtgggtgggtgaggtagggtttgagttggcaagagcagggaacgggcatgtgcccaggtgagctcctgtgtgtgtccagattttatattcctaatcccagtaaggaagaaagcgtagtgtgggagaggagagagctgatgactgcagttctcaaaggtcctcagtgaagttattttggaggccctggtggtcacaggatcagaaggcaagggataggcagtggtcaccaatggttgaaagtatggcttgtcccatttcttcctgttctctttttctagcttccacatcagcttccttttttgagaacatatagaagaagaaggctaagagatggtgaagagactgcatgattaaactagatagacctggtatacagtcactgaactagtagatgtcaataattattatttttaaaaatttttatttgttggccgggcatggtggctcacgcctgaaatcccagcactttgggaggccaaggtgggcggatcatgaggtcaggagatcgagaccatcctggccaacatggtgaaaccccatctgtactaaaatacaaacaagtagctggttgtggcgccgcatgcctgtagtcccagctactcgggaggctgaggcaggggaattgcttgaacccgggaggcggagtttgccagcctggcaacagaacaagactctgtctaaaaagaaaaaaaaatttttttgtttaagacagcatcttgctctgtctcccaggctggagcgtagtaatgcaatcatagctcactgcagcctggaactccttggctcaagcaatcctgctgccttggcctcccaagtatgtaggactacaggtactcgccaccacacctggataattaaaaaattatttctgtagagatgaagtctcactgtgttgcccagcctgggtgtcaataattattttttaaaaaaaatttttaaaaaggttttttgagacagattcttgctctgtcacccaggctggagtgcagtagcatgatcagggatcactgcaacctctgcctcctgggttcaagcgattcttgtgcctaagccacctgagcagctgggattacaggtgcatgccaccatgcctggctaattttggtatttttagtagagatgaggttttgccattttggtcaggctggaatttttttttttttaattttgataagacagggtattgccgtgttggccagactggtctcaaactcctgggctgaaacaatcctcccgccttggcctcccaaagtgctgggattataggcacaagacaccacaataattattgcctgtatgtcaattattattttaaaatattgttgtatttacttaatgtctttaatgcatttgcccaatattttacattgtactgctcagaggtattcctttattatgtggttagcataggttatactttgctgacgattcacattttattagtttggttatgttttgtccttttaaaacattttcttttgagatgggggtcttgctctgttgcccacgcaggagtgcagtggcatgctctcagctcactgcagccctgactgcctaggctccagcaatcttcttacgtcagcctccagagtagctgggaccgcaggcacttgccaccacgccccactaaaaattttttaaattgttgcctttcttgaagtgttctctgcctgtctttgtcacaaaatttcatttttctcatagttaatttcatctctccggtaagattttattggtgtttcttttataactttgcagttcttacaccgtttggtgattttcatgtttcttagaaactttaaacctttaacttcaaacattaaaatacaagtcttttaagtacatgagtgcttagaaatgtacataatgtttatatacacttatgccttacattaaagtccaatatgagaaatacatgtttaacattcaataataattttaaaaatttgagaaataaactctcataaatgc

SEQ ID NO: 9246 - protein, 390 aa, Homo sapiens; identical to SEQ ID NO: 1439

SEQ ID NO: 9247 - DNA, 4860 bp, Homo sapiens
gtctgtgtgtgagtgcaggcaggctgacaatgatttcctcagtgattacgtacagagcgagtccctgcgggttaggggccccctctggagccatcctgatggctttgggggccttgcttccattttccattattatgtggactaccggagcgacagcgcagtccaagaccttgcagaccccaactgtaaacttgaagacaagactgaagatggagaggcactagattgtaagaagaggccggaagacggggaggagttggaagacgaagctgtgcacagctgtgacagctgcctccaggtgtttgaatcgctgagcgatatcacagaacacaagattaatcaatgtcaactgacagatggagtggatgttgaagatgatccgacttgctcttggccagcttcctcaccttctagcaaggatcagacttcccctagccatggagaaggttgcgattttggagaggaagaaggtggccctgggcttccatacccgtgtcaattctgtgacaagtcgtttagccgcctcagctacctaaagcaccatgagcagagtcacagtgacaaactgcctttcaaatgcacctactgcagtaggctgttcaaacacaagcgcagccgagatcgccacataaaactccacaccggggacaagaagtaccactgcagtgaatgtgatgctgcgttttccagaagtgatcacttgaagatccacttaaagactcacacgtccaacaagccatataaatgtgccatttgtcgccgtgggtttctgtcctctagttccttacacggacacatgcaggttcatgagaggaacaaggacggctctcagtccggttccaggatggaggactggaagatgaaggacactcagaagtgcagtcagtgtgaggaaggctttgacttcccggaagacctccaaaaacacattgcagagtgccaccccgaatgctccccaaatgaggaccgagcggccctccagtgtgtctactgccacgagctcttcgtagaggagacctccctcatgaaccacatggagcaggtgcatagcggggagaagaagaactcatgcagcatttgttctgagagtttccacacagttgaggaactgtacagccacatggacagtcaccagcaaccggagtcatgcaatcacagcaacagcccttccctggtcacggtgggctatacctccgtgtccagtacgactccagattccaacctctcagtggacagctcaaccatggtggaagctgccccgccaatcccaaagagtcgagggaggaagagggccgctcaacaaacccctgacatgactggtccctcgagtaaacaagcaaaagttacctacagctgtatttactgcaacaaacaattattttcaagtcttgcagttctgcagattcacctgaaaactatgcacttagataagccagaacaggcccatatttgtcagtattgcttggaggtcctgccctcactctataacctaaatgaacatcttaagcaagtgcatgaagctcaggacccaggtctgattgtttctgccatgcctgccattgtctaccagtgtaacttctgttccgaagttgtcaacgacctcaacactcttcaggaacacatccgatgttctcatggatttgcaaaccctgcagctaaagatagtaatgcattcttttgtccccattgctatatggggtttctcactgactcttccctggaagagcatattagacaggttcattgtgacctcagtggctcccgatttgggtctccagtgcttgggactcccaaagaaccagtagtagaagtctattcttgttcctattgtacaaattcgccaatattcaacagcgttcttaaactgaacaagcatatcaaagagaatcataaaaacattcccttggccctgaattatatccacaatgggaagaaatccagggccttaagccccctatctcctgtggccatagagcagacatctcttaagatgatgcaggcagtaggaggtgcacctgcacgtcccactggagaatatatctgtaatcaatgtggtgctaagtacacatccctagacagctttcagactcacctaaaaactcatctcgacactgtgcttccaaaattgacctgtcctcagtgcaacaaggaattccccaaccaagaatccttgctgaagcatgttaccattcactttatgatcacttcaacgtattacatctgtgagagttgtgacaagcaattcacatcagtggatgaccttcagaaacacctgctggacatgcacacctttgtcttctttcgctgcaccctctgccaggaagtttttgactcaaaagtctccattcagctccacttggctgtgaagcacagtaacgaaaagaaagtctataggtgcacatcttgcaactgggacttccgcaacgaaactgacttgcagctccatgtgaaacacaaccacctggaaaaccaagggaaagtgcataagtgcattttctgcggtgagtcctttggcaccgaggtggagctgcaatgccacatcaccactcacagtaagaagtacaactgcaagttctgtagcaaagccttccatgcgatcattttgttagaaaaacacttgcgagaaaaacactgtgtattcgaaaccaagacacccaactgtggaacaaatggagcttccgagcaagtgcagaaagaggaagtggagctgcagactttgctgaccaacagccaggagtcccacaacagtcacgatgggagcgaagaagacgttgacacctctgagcctatgtacggctgcgacatttgtggggcagcctacactatggaaactttgctgcagaatcaccagctccgagaccacaacatcagacctggagaaagtgccatcgtgaaaaagaaagctgagctcattaaagggaattacaagtgcaacgtgtgctctcgaaccttcttctccgaaaatggcctccgggaacatatgcagacccacctaggccctgtcaaacactacatgtgccctatttgcggagagcggtttccctcccttttaactcttactgaacacaaagtcacgcatagtaagagtcttgatactggaaactgccggatttgcaagatgcctctccagagtgaagaggagtttttagagcattgccaaatgcaccctgacttgaggaattccctgacaggctttcgctgcgtggtgtgcatgcagacagtgacctccaccttggaactcaaaatccatgggacgttccacatgcaaaagacagggaatgggtctgcagttcagaccacagggcggggccagcacgtccaaaaactgtataagtgcgcatcttgcctcaaagaattccgttccaagcaagatctggtgaaacttgatatcaatggcctgccatatggtctgtgtgccggctgcgtgaatctcagtaagagcgccagcccaggcattaacgtccctcccggcacgaatagaccaggcttgggccagaatgagaatctgagtgccattgaggggaaaggcaaggtggggggactgaagacacgctgctctagctgcaacgttaagtttgagtctgaaagtgaactccagaaccacatccaaaccatccaccgagagctcgtgccagacagcaacagcacacagttgaaaacgccccaagtatcaccaatgcccagaatcagtccctcccagtcggatgagaagaagacctatcaatgcatcaagtgtcagatggttttctacaatgaatgggatattcaggttcatgttgcaaatcacatgattgatgaaggactgaaccatgaatgcaaactctgcagccagacctttgactctcctgccaaactccagtgccacctgatagagcacagcttcgaagggatgggaggcaccttcaagtgtccagtctgctttacagtatttgttcaagcaaacaagttgcagcagcatattttctctgcccatggacaagaagacaagatctatgactgtacacaatgtccacagaagtttttcttccaaacagagctgcagaatcatacaatgacccaacacagcagttagtgcaagtacagtctctcaaggagaattgattttgtggcacaaaaagggaacatgttttactctttgcacgaaactttcattgttaatgtatattattcagaaacattgtattgtaccataaaacttgtattatcaaactgttggatgttcatgtgtttgaacttttgcgcaccggatagaccccttgtatataaagtgttgcacatgtattatgtcgtctgatactaaaatggtcttataaagacaagtggacttgggccctattcaggcaagattaaaaaaaaaaaaagactatgaccaaaatggcttaagataaagtatttttaaggaagaaagattaaaaacaactgttatacatgagactatggttggacttccttttctttacacttaagcctagaatttctctttaggtatatcagcgcttaaatccaagactattttttattgctgaagattcttgcaaaccatgaagagatgttctcacagaacagaaccccacagctggataaggcccgtatatatatatttgtaagccttgcaatgtgacaggtagcatcactatatatgcaatagttgttatgtagactgtcaaagaatttttttttccctggatacatttgaagctttgagtgttcaaggttttccttaatgatttcacgcagccaaattcttgaatcagttgaactaacctgtatgttactgttattaatgtttactctgcagtctgaacctggagattactggaattgttttccaagaggaaataaattcagtttaccattagg

SEQ ID NO: 9248 - protein, 1091 aa, Homo sapiens
MQVHERNKDGSQSGSRMEDWKMKDTQKCSQCEEGFDFPEDLQKHIAECHPECSPNEDRAALQCVYCHELFVEETSLMNHMEQVHSGEKKNSCSICSESFHTVEELYSHMDSHQQPESCNHSNSPSLVTVGYTSVSSTTPDSNLSVDSSTMVEAAPPIPKSRGRKRAAQQTPDMTGPSSKQAKVTYSCIYCNKQLFSSLAVLQIHLKTMHLDKPEQAHICQYCLEVLPSLYNLNEHLKQVHEAQDPGLIVSAMPAIVYQCNFCSEVVNDLNTLQEHIRCSHGFANPAAKDSNAFFCPHCYMGFLTDSSLEEHIRQVHCDLSGSRFGSPVLGTPKEPVVEVYSCSYCTNSPIFNSVLKLNKHIKENHKNIPLALNYIHNGKKSRALSPLSPVAIEQTSLKMMQAVGGAPARPTGEYICNQCGAKYTSLDSFQTHLKTHLDTVLPKLTCPQCNKEFPNQESLLKHVTIHFMITSTYYICESCDKQFTSVDDLQKHLLDMHTFVFFRCTLCQEVFDSKVSIQLHLAVKHSNEKKVYRCTSCNWDFRNETDLQLHVKHNHLENQGKVHKCIFCGESFGTEVELQCHITTHSKKYNCKFCSKAFHAIILLEKHLREKHCVFETKTPNCGTNGASEQVQKEEVELQTLLTNSQESHNSHDGSEEDVDTSEPMYGCDICGAAYTMETLLQNHQLRDHNIRPGESAIVKKKAELIKGNYKCNVCSRTFFSENGLREHMQTHLGPVKHYMCPICGERFPSLLTLTEHKVTHSKSLDTGNCRICKMPLQSEEEFLEHCQMHPDLRNSLTGFRCVVCMQTVTSTLELKIHGTFHMQKTGNGSAVQTTGRGQHVQKLYKCASCLKEFRSKQDLVKLDINGLPYGLCAGCVNLSKSASPGINVPPGTNRPGLGQNENLSAIEGKGKVGGLKTRCSSCNVKFESESELQNHIQTIHRELVPDSNSTQLKTPQVSPMPRISPSQSDEKKTYQCIKCQMVFYNEWDIQVHVANHMIDEGLNHECKLCSQTFDSPAKLQCHLIEHSFEGMGGTFKCPVCFTVFVQANKLQQHIFSAHGQEDKIYDCTQCPQKFFFQTELQNHTMTQHSS

SEQ ID NO: 9249 - DNA, 4971 bp, Homo sapiens
agtccgggtcttggcgggccccctcctccctcccgctccccgcgctctcgccttttaatcatgcccctctgtctgtgtgtgagtgcaggcaggctgacaatgatttcctcagtgattacgtacagagcgagtccctgcgggttaggggccccctctggagccatcctgatggctttgggggccttgcttccattttccattattatgtggactaccggagcgacagcgcagtccaagaccttgcaggatgtctcgccgcaagcaagcgaaaccgagatccctcaaagaccccaactgtaaacttgaagacaagactgaagatggagaggcactagattgtaagaagaggccggaagacggggaggagttggaagacgaagctgtgcacagctgtgacagctgcctccaggtgtttgaatcgctgagcgatatcacagaacacaagattaatcaatgtcaactgacagatggagtggatgttgaagatgatccgacttgctcttggccagcttcctcaccttctagcaaggatcagacttcccctagccatggagaaggttgcgattttggagaggaagaaggtggccctgggcttccatacccgtgtcaattctgtgacaagtcgtttagccgcctcagctacctaaagcaccatgagcagagtcacagtgacaaactgcctttcaaatgcacctactgcagtaggctgttcaaacacaagcgcagccgagatcgccacataaaactccacaccggggacaagaagtaccactgcagtgaatgtgatgctgcgttttccagaagtgatcacttgaagatccacttaaagactcacacgtccaacaagccatataaatgtgccatttgtcgccgtgggtttctgtcctctagttccttacacggacacatgcaggttcatgagaggaacaaggacggctctcagtccggttccaggatggaggactggaagatgaaggacactcagaagtgcagtcagtgtgaggaaggctttgacttcccggaagacctccaaaaacacattgcagagtgccaccccgaatgctccccaaatgaggaccgagcggccctccagtgtgtctactgccacgagctcttcgtagaggagacctccctcatgaaccacatggagcaggtgcatagcggggagaagaagaactcatgcagcatttgttctgagagtttccacacagttgaggaactgtacagccacatggacagtcaccagcaaccggagtcatgcaatcacagcaacagcccttccctggtcacggtgggctatacctccgtgtccagtacgactccagattccaacctctcagtggacagctcaaccatggtggaagctgccccgccaatcccaaagagtcgagggaggaagagggccgctcaacaaacccctgacatgactggtccctcgagtaaacaagcaaaagttacctacagctgtatttactgcaacaaacaattattttcaagtcttgcagttctgcagattcacctgaaaactatgcacttagataagccagaacaggcccatatttgtcagtattgcttggaggtcctgccctcactctataacctaaatgaacatcttaagcaagtgcatgaagctcaggacccaggtctgattgtttctgccatgcctgccattgtctaccagtgtaacttctgttccgaagttgtcaacgacctcaacactcttcaggaacacatccgatgttctcatggatttgcaaaccctgcagctaaagatagtaatgcattcttttgtccccattgctatatggggtttctcactgactcttccctggaagagcatattagacaggttcattgtgacctcagtggctcccgatttgggtctccagtgcttgggactcccaaagaaccagtagtagaagtctattcttgttcctattgtacaaattcgccaatattcaacagcgttcttaaactgaacaagcatatcaaagagaatcataaaaacattcccttggccctgaattatatccacaatgggaagaaatccagggccttaagccccctatctcctgtggccatagagcagacatctcttaagatgatgcaggcagtaggaggtgcacctgcacgtcccactggagaatatatctgtaatcaatgtggtgctaagtacacatccctagacagctttcagactcacctaaaaactcatctcgacactgtgcttccaaaattgacctgtcctcagtgcaacaaggaattccccaaccaagaatccttgctgaagcatgttaccattcactttatgatcacttcaacgtattacatctgtgagagttgtgacaagcaattcacatcagtggatgaccttcagaaacacctgctggacatgcacacctttgtcttctttcgctgcaccctctgccaggaagtttttgactcaaaagtctccattcagctccacttggctgtgaagcacagtaacgaaaagaaagtctataggtgcacatcttgcaactgggacttccgcaacgaaactgacttgcagctccatgtgaaacacaaccacctggaaaaccaagggaaagtgcataagtgcattttctgcggtgagtcctttggcaccgaggtggagctgcaatgccacatcaccactcacagtaagaagtacaactgcaagttctgtagcaaagccttccatgcgatcattttgttagaaaaacacttgcgagaaaaacactgtgtattcgaaaccaagacacccaactgtggaacaaatggagcttccgagcaagtgcagaaagaggaagtggagctgcagactttgctgaccaacagccaggagtcccacaacagtcacgatgggagcgaagaagacgttgacacctctgagcctatgtacggctgcgacatttgtggggcagcctacactatggaaactttgctgcagaatcaccagctccgagaccacaacatcagacctggagaaagtgccatcgtgaaaaagaaagctgagctcattaaagggaattacaagtgcaacgtgtgctctcgaaccttcttctccgaaaatggcctccgggaacatatgcagacccacctaggccctgtcaaacactacatgtgccctatttgcggagagcggtttccctcccttttaactcttactgaacacaaagtcacgcatagtaagagtcttgatactggaaactgccggatttgcaagatgcctctccagagtgaagaggagtttttagagcattgccaaatgcaccctgacttgaggaattccctgacaggctttcgctgcgtggtgtgcatgcagacagtgacctccaccttggaactcaaaatccatgggacgttccacatgcaaaagacagggaatgggtctgcagttcagaccacagggcggggccagcacgtccaaaaactgtataagtgcgcatcttgcctcaaagaattccgttccaagcaagatctggtgaaacttgatatcaatggcctgccatatggtctgtgtgccggctgcgtgaatctcagtaagagcgccagcccaggcattaacgtccctcccggcacgaatagaccaggcttgggccagaatgagaatctgagtgccattgaggggaaaggcaaggtggggggactgaagacacgctgctctagctgcaacgttaagtttgagtctgaaagtgaactccagaaccacatccaaaccatccaccgagagctcgtgccagacagcaacagcacacagttgaaaacgccccaagtatcaccaatgcccagaatcagtccctcccagtcggatgagaagaagacctatcaatgcatcaagtgtcagatggttttctacaatgaatgggatattcaggttcatgttgcaaatcacatgattgatgaaggactgaaccatgaatgcaaactctgcagccagacctttgactctcctgccaaactccagtgccacctgatagagcacagcttcgaagggatgggaggcaccttcaagtgtccagtctgctttacagtatttgttcaagcaaacaagttgcagcagcatattttctctgcccatggacaagaagacaagatctatgactgtacacaatgtccacagaagtttttcttccaaacagagctgcagaatcatacaatgacccaacacagcagttagtgcaagtacagtctctcaaggagaattgattttgtggcacaaaaagggaacatgttttactctttgcacgaaactttcattgttaatgtatattattcagaaacattgtattgtaccataaaacttgtattatcaaactgttggatgttcatgtgtttgaacttttgcgcaccggatagaccccttgtatataaagtgttgcacatgtattatgtcgtctgatactaaaatggtcttataaagacaagtggacttgggccctattcaggcaagattaaaaaaaaaaaaagactatgaccaaaatggcttaagataaagtatttttaaggaagaaagattaaaaacaactgttatacatgagactatggttggacttccttttctttacacttaagcctagaatttctctttaggtatatcagcgcttaaatccaagactattttttattgctgaagattcttgcaaaccatgaagagatgttctcacagaacagaaccccacagctggataaggcccgtatatatatatttgtaagccttgcaatgtgacaggtagcatcactatatatgcaatagttgttatgtagactgtcaaagaatttttttttccctggatacatttgaagctttgagtgttcaaggttttccttaatgatttcacgcagccaaattcttgaatcagttgaactaacctgtatgttactgttattaatgtttactctgcagtctgaacctggagattactggaattgttttccaagaggaaataaattcagtttaccattagg

SEQ ID NO: 9250 - protein, 1311 aa, Homo sapiens; identical to SEQ ID NO: 1441

SEQ ID NO: 9251 - DNA, 2512 bp, Homo sapiens
aatgatttcctcagtgattacgtacagagcgagtccctgcgggttaggggccccctctggagccatcctgatggctttgggggccttgcttccattttccattattatgtggactaccggagcgacagcgcagtccaagaccttgcaggatgtctcgccgcaagcaagcgaaaccgagatccctcaaagttacctacagctgtatttactgcaacaaacaattattttcaagtcttgcagttctgcagattcacctgaaaactatgcacttagataagccagaacaggcccatatttgtcagtattgcttggaggtcctgccctcactctataacctaaatgaacatcttaagcaagtgcatgaagctcaggacccaggtctgattgtttctgccatgcctgccattgtctaccagtgtaacttctgttccgaagttgtcaacgacctcaacactcttcaggaacacatccgatgttctcatggatttgcaaaccctgcagctaaagatagtaatgcattcttttgtccccattgctatatggggtttctcactgactcttccctggaagagcatattagacaggttcattgtgacctcagtggctcccgatttgggtctccagtgcttgggactcccaaagaaccagtagtagaagtctattcttgttcctattgtacaaattcgccaatattcaacagcgttcttaaactgaacaagcatatcaaagagaatcataaaaacattcccttggccctgaattatatccacaatgggaagaaatccagggccttaagccccctatctcctgtggccatagagcagacatctcttaagatgatgcaggcagtaggaggtgcacctgcacgtcccactggagaatatatctgtaatcaatgtggtgctaagtacacatccctagacagctttcagactcacctaaaaactcatctcgacactgtgcttccaaaattgacctgtcctcagtgcaacaaggaattccccaaccaagaatccttgctgaagcatgttaccattcactttatgatcacttcaacgtattacatctgtgagagttgtgacaagcaattcacatcagtggatgaccttcagaaacacctgctggacatgcacacctttgtcttctttcgctgcaccctctgccaggaagtttttgactcaaaagtctccattcagctccacttggctgtgaagcacagtaacgaaaagaaagtctataggtgcacatcttgcaactgggacttccgcaacgaaactgacttgcagctccatgtgaaacacaaccacctggaaaaccaagggaaagtgcataagtgcattttctgcggtgagtcctttggcaccgaggtggagctgcaatgccacatcaccactcacagtaagaagtacaactgcaagttctgtagcaaagccttccatgcgatcattttgttagaaaaacacttgcgagaaaaacactgtgtattcgaaaccaagacacccaactgtggaacaaatggagcttccgagcaagtgcagaaagaggaagtggagctgcagactttgctgaccaacagccaggagtcccacaacagtcacgatgggagcgaagaagacgttgacacctctgagcctatgtacggctgcgacatttgtggggcagcctacactatggaaactttgctgcagaatcaccagctccgagaccacaacatcagacctggagaaagtgccatcgtgaaaaagaaagctgagctcattaaagggaattacaagtgcaacgtgtgctctcgaaccttcttctccgaaaatggcctccgggaacatatgcagacccacctaggccctgtcaaacactacatgtgccctatttgcggagagcggtttccctcccttttaactcttactgaacacaaagtcacgcatagtaagagtcttgatactggaaactgccggatttgcaagatgcctctccagagtgaagaggagtttttagagcattgccaaatgcaccctgacttgaggaattccctgacaggctttcgctgcgtggtgtgcatgcagacagtgacctccaccttggaactcaaaatccatgggacgttccacatgcaaaagacagggaatgggtctgcagttcagaccacagggcggggccagcacgtccaaaaactgtataagtgcgcatcttgcctcaaagaattccgttccaagcaagatctggtgaaacttgatatcaatggcctgccatatggtctgtgtgccggctgcgtgaatctcagtaagagcgccagcccaggcattaacgtccctcccggcacgaatagaccaggcttgggccagaatgagaatctgagtgccattgaggggaaaggcaaggtggggggactgaagacacgctgctctagctgcaacgttaagtttgagtctgaaagtgaactccagaaccacatccaaaccatccaccgagagctcgtgccagacagcaacagcacacagttgaaaacgcccca

SEQ ID NO: 9252 - protein, 786 aa, Homo sapiens
MSRRKQAKPRSLKVTYSCIYCNKQLFSSLAVLQIHLKTMHLDKPEQAHICQYCLEVLPSLYNLNEHLKQVHEAQDPGLIVSAMPAIVYQCNFCSEVVNDLNTLQEHIRCSHGFANPAAKDSNAFFCPHCYMGFLTDSSLEEHIRQVHCDLSGSRFGSPVLGTPKEPVVEVYSCSYCTNSPIFNSVLKLNKHIKENHKNIPLALNYIHNGKKSRALSPLSPVAIEQTSLKMMQAVGGAPARPTGEYICNQCGAKYTSLDSFQTHLKTHLDTVLPKLTCPQCNKEFPNQESLLKHVTIHFMITSTYYICESCDKQFTSVDDLQKHLLDMHTFVFFRCTLCQEVFDSKVSIQLHLAVKHSNEKKVYRCTSCNWDFRNETDLQLHVKHNHLENQGKVHKCIFCGESFGTEVELQCHITTHSKKYNCKFCSKAFHAIILLEKHLREKHCVFETKTPNCGTNGASEQVQKEEVELQTLLTNSQESHNSHDGSEEDVDTSEPMYGCDICGAAYTMETLLQNHQLRDHNIRPGESAIVKKKAELIKGNYKCNVCSRTFFSENGLREHMQTHLGPVKHYMCPICGERFPSLLTLTEHKVTHSKSLDTGNCRICKMPLQSEEEFLEHCQMHPDLRNSLTGFRCVVCMQTVTSTLELKIHGTFHMQKTGNGSAVQTTGRGQHVQKLYKCASCLKEFRSKQDLVKLDINGLPYGLCAGCVNLSKSASPGINVPPGTNRPGLGQNENLSAIEGKGKVGGLKTRCSSCNVKFESESELQNHIQTIHRELVPDSNSTQLKT

SEQ ID NO: 9253 - DNA, 388 bp, Homo sapiens
ccccacaaatgtcgcagccgtacataggctcagaggtgtcaacgtcttatccactccatctgcaacaagaagcaatgacaaatttcatctgacatgttgagattcaagagtgagtttaccgtagcatttcaaccagcacgcagagttgggccctcttgaatctttcaagaaaaaacaaaatgaaaagagagaatatttgagtgagacattttcaaatctgagcccaaagcagttattctgcatttactttttgttgagttgtaaaatataagaggatattaaatagttctatgtctaaattacccttttattactttttatcattcttccttagaagcaaggtatatattacacattgacaattttattaaaatgcagattttaatat

SEQ ID NO: 9254 - protein, 32 aa, Homo sapiens [sequence omitted]

SEQ ID NO: 9255 - DNA, 999 bp, Homo sapiens
tcgatgagtattcacgggctgtccgtgatgtgaaaaccgactggaatgaagaatgcaagagccccaagaagggtcggtgctctggccacaaccacgtgcccaattcgctcagctacgcccgcgatgagctcacccagtccttccaccgactctcggtctgtgtgtatggcaacaatctccatggcaacagtgaggtgaaccttcatggttgcagggacctggggggagattgggctccctttcctcatgacatcctgccctatcaggactctggagatagtgggagcgactaccttttcccagaagctagtgaagaatcagcaggcatcccgggaaagtcagaacttccctacgaagagctgtggctggaggaaggcaagcccagccatcagcctctcactcgctctctgagcgagaagaacagatgtgatcagtttagaggttctgtccgatccaaatgtgcgacttctcctcttcccatccctgggactctgggagcagcagtgaagtcttcagatactgccctacctccacctccagtgcctcccaaatctgaagccagacagggttttatcacattgcccagactggtctcaaagtcctgagctcaagccatccgctcgcctcggcctcccaaagtgctgagattacaggtattttcacctacagcaatctacctgactagatctacttgtctgccatctacagagcaagtaactgaggcctcaatagacaggttgtgctactgcgcaggaatgagttcccggttcatctttcattacttcactcttctccagactgtgctatattacctcacactatgcatctccctttttataatgagagttactgcaattttaaatatctcattttgcttcacagtcatcaatcctttgttgacaaaaatctaccttactgataatgccccaaccaaatataaatcaactactttctcttgcatacatgaagtgaaataaatagaacagcatgttttattct

SEQ ID NO: 9256 - protein, 73 aa, Homo sapiens
MSSRFIFHYFTLLQTVLYYLTLCISLFIMRVTAILNISFCFTVINPLLTKIYLTDNAPTKYKSTTFSCIHEVK

SEQ ID NO: 9257 - DNA, 3084 bp, Homo sapiens
cagaatgactccaaagattctcagaaccctgtctcttgaagctcaatcttatttgggttcatcactgaaaacttagaacaaatcagtaaagaatcctgtattgaagaattaagtttgagtttaagcccactcaccgcagggctggtttttgcatgtaatactcccatgatgtctggggaaatgacagtttctgttgaattataattctccggtttaagggtctccttcccctggtgtctgatggtgagaggtctgaagagcatttgtcagagtacattaggcattctcaacctacttcatgctttacgagagctgagaaatcagacgcaccggcctttattattatatatgctacatctgttgagtatttttaaaataccaataagaggacttgtttatttcataaaccacttcttccctctctttcaaagaaaatacattattaccatacttttacattagtctgagaatttttgctaaatatgattaagtattccaaaatataatggcgtcattattcttgacttttttagagaatatacatcttaagactgtattagttctcagagcaaggcatcatctactcccctgcacctgagagtctggccccagattccagatgtgcggacagcccatgaccgaggtgcacacagtgccctcttgaataggaaggtcagccagtgaggcggcagcataacttgcaggatggacttatatcttaccatctcttcctgctaccaaaataaaaaaataaattgaaagacaagacccaccagtttagcactcggacacaattctcaaactcaggaagaaggaacagggttggtttgggtttactataaaggttgcctcacataaacaactgactccttttagcgttttttttctttttgtaaaaactttacacaaaatagggttttaaattctttttgcttgttttggacttggtgtatttttgtcaagtttatattgattggcaacgcagagactccttgagggcagggactgtggcctttgattcacttatgctacagtctagtatcactacagtgctgagtaaaagacacagcccctgccctcttggagatcatattgtttatatttgaaatctcagttgctaagagtatgtatgtgtgagtaagaaagacgtgaagtcctatgggcagctgggtatatggagaattacgtgtgtcctgtctttaaaacgtcagcctctattaaggggtacagaacaccccaagatcactaaaacttggaatgtgttggaggcagaaagtatctctctcattgcctagtgttgttgtttttttgttttttgttttttgttttttttactgacctggaattcttttaattgtaataaatatcttctgtcacaaataaatgccacaaataaatgaaattgccattcctaagctgagcacctgtctgtgaaggaccttggtgtcctgactggacagagcattcatagctccaagagaatcatgacaagatatgcaaagcagggataataaggagaaagcccttccctttcgagaagcccttccctttcacagcccttccctgcgattctgcagtgaaaagtgatgcccagagatccacacacagaacccttctaaccagccaggtcaagacttatcatcttatctcctctggcaggtcccctgtaatcaaaagagaggaagtgtctatctaaacaagacccttttgggtccttagattcatggcaaaaatcatcatggcccccatcagaaaagaaaatcagcaataaaccaagccaagcaactaaaatgtataatgtggacctgactcatgttgggaggcagaattcagacactcacagatcaatcttgcaagttttctcttctttaagttgagctgctcaactttatgaactgtgaaatttacttacattctttcaacccacatatatcattgcagtttatgaagttgcagtgaactgcccattcagctaaattgcagtgtttattcttgtctcatgtcgaaatacaacaatcttatgggaaatattatgacagtccgttccaactgttctcagacacatgcataaacagtctctgctcacattccacagccacctgcatgttatccatacagctccctgagaagtccagggatgggaggtggggtgtggaaggatggagggtccttcattttctaaacactttgtataagtcactactcatcgtgcctagcaagtataagattaacattttgaataacaaactggaaaacaaataatccttcaaagaacctagcgaactgttcaaaggaaattttaatttcagtctaccagaaaagttaaatctgttgttggacgtagggggctttcagaaacatgcctcttatatcaatttccactatctttcaagttacctaaaggcaccaggctgcttgagcaagaagaataaaaggcctagagtgcaaattatgtgaagtagagtttttagattgtgggattgtaataatacgggattctcatggttacatcatgttaaatcacactgttcagtctttaaaacttggtgttttaaaatttgtctcattgtgatagccagaaacaaggaataaacgtgatttcagtttaaactatatacaaatatcttctgtaattttgctgctctaatttttaggctataaattttgtaatagagcttatcagatcgcaaatttcctttgtttacaatctcatgtagtagggctcagataatttcttagctataaaccttttctcccactctcatattgtttcatttaaaatatttaagctaagcctaaaaattgaaatcagttaagaatttggagagtttatcttaaatggaaatggtgtattcttttcaaagaattttgtaaccatctttacagtttctttgcttggaaaacttgggttgttaactaccagttaacaatggcattactttccaaaacgttatctaatgggcccaatgtgtacctcaagataaacacagtatgttatgtctaaaaatttccttgtctgttgatttaaatggttctgaaatgtctgtaataaagaaattttcaaagttgcttttcttgcagttg

SEQ ID NO: 9258 - protein, 73 aa, Homo sapiens
MVRGLKSICQSTLGILNLLHALRELRNQTHRPLLLYMLHLLSIFKIPIRGLVYFINHFFPLFQRKYIITILLH

SEQ ID NO: 9259 - DNA, 7048 bp, Homo sapiens
gcgggtggtgccggtggcggcggcgggggagcgcgggacaggaggcttcggggaagatggacccggcgccctcgctgggctgcagcctcaaggatgtgaagtggagctcggtggccgtgccgctcgacctcctggtcagcacttaccggctgccccagatcgcgcgcctggacaacggagagtgcgtagaagggctgcgggaaaatgactatctgctgattcattcctgccgccagtggaccaccatcactgcccacagcttggaggagggtcactatgtcattgggccaaagatagagattccggtacattatgcagggcaattcaagctgctggaacaagaccgagatataaaggagccagtgcaatatttcaacagtgtggaggaggtggctaaggcatttcctgaacgcgtgtacgtcatggaggatatcacattcaacgtgaaggttgcttcaggtgaatgcaatgaagacactgaagtttacaacatcaccctgtgtactggggatgaactcactctaatggggcaggcagaaatcctttatgcaaagacattcaaggaaaagtcacgactcaacacaatcttcaaaaagattgggaagctcaattccatcagcaagctgggaaaaggcaaaatgccgtgcctcatttgtatgaatcaccggaccaacgaaagcattagccttccattccagtgcaagggcagatttagcacccgaagtcccctggaacttcagatgcaagagggcgaacacaccatccgcaacattgtggagaaaaccaggcttcctgtgaatgtgactgtgccaagccctccaccgagaaacccatacgacctccacttcatccgtgaggggcaccgctataagtttgtgaacatccagaccaagacggtggtggtttgctgtgtgctgcggaacaacaagatcctccccatgcactttcctttgcacttgactgtccccaagttcagcctcccagaacacctggtgaagggagagagctggcccgaaaccctggtccatcactggctaggtatctgccaagaacagttcgacatcgatgagtattcacgggctgtccgtgatgtgaaaaccgactggaatgaagaatgcaagagccccaagaagggtcggtgctctggccacaaccacgtgcccaattcgctcagctacgcccgcgatgagctcacccagtccttccaccgactctcggtctgtgtgtatggcaacaatctccatggcaacagtgaggtgaaccttcatggttgcagggacctggggggagattgggctccctttcctcatgacatcctgccctatcaggactctggagatagtgggagcgactaccttttcccagaagctagtgaagaatcagcaggcatcccgggaaagtcagaacttccctacgaagagctgtggctggaggaaggcaagcccagccatcagcctctcactcgctctctgagcgagaagaacagatgtgatcagtttagaggttctgtccgatccaaatgtgcgacttctcctcttcccatccctgggactctgggagcagcagtgaagtcttcagatactgccctacctccacctccagtgcctcccaaatctgaagccgtcagagaagaatgccggctcctgaacgccccacctgttccaccccgaagcgcaaagcctttgtccaccagtccctccatccctcctcgcacagtcaagccagcgcggcaacagactcgctctcccagccccaccttgtcctactattcttcagggctacacaacatcgtcactaaaactgacacaaatccttctgaaagcactcctgtttcctgctatccatgtaaccgagtgaaaactgattctgtggacctgaaatccccgtttggaagtccttctgctgaagctgtgtcctctcggctctcatggcctaaccattattcaggagcatcagaaagccagaccaggagtgacttcctgctggatccaagcaggagttatagttaccctagacaaaagacgccaggcacaccaaagagaaactgcccagcaccttttgattttgatggctgtgagctcctggccagccccactagcccagtcactgcagaattcagtagcagcgtctctggttgtcccaagtcagccagctactctctggagagcacagatgtgaaatctcttgcagctggtgtgacaaagcagagtacgtcatgccctgccttaccccccagggctccaaaactagtggaagagaaggtcgcctccgaaacatctcctttgcctctgaaaattgatggtgctgaggaagaccccaagtctgggtcaccagatctctcggaggaccagtattttgttaaaaagggcatgcaggacatcttctctgcctcctaccctttctcatctccgctccatctccagctggcccccagatcctgtggcgacggttccccatggcagccacctgctgacctatcaggactctctatagaggaagtgtccaagtcactacggttcattggtttgtccgaagatgtcatatcattctttgttactgaaaagattgatgggaacctgcttgttcagctaacggaagaaatcctctcagaggatttcaaattgagcaaattgcaggtgaagaagataatgcaattcattaatggctggaggcccaaaatatagccaaataacccccggccagcatggaacaaaactgatcaatgcgtgtgctagaaggggtgggctgggacacaatttcatgtttttgcactaaaaaccttctctgtaaatagggataagagaaactcttactatgcagattacgtttttgaatggtgaacaggctattttgtacatcaataaaaatgctgtacagaacacttggaggtgtgccttgtacgtcactcaacaaacactcagcagctgctaaaagaaaaaaaggcatgtgcagagaaatcattcttacccaagtaggtttatgtgagaaggtatgatatttattacaaaatagccaaagctggaagacataaaaatctttaaaaaaaaaaaaaaaacacttttgaacaagtcccttctttcaggagggttgactttagacaattaactgtgttctgtgctctgtcattcagattgcttcttgctaattgttttactcttgtgcctgaaaatgttagtgatacgaattgacactttaatgttgtatgcttggtggggatctttttatcacaaggcattttccaagagtcatatgttgataaagggatatatgttgtccttagaaatcacacaaatcatgaccacaataatttatctgtaactgctgctaattttattgagcagagaaaaaagaatatacatatataaacatgtataggtgcatacacaatacacccggatatgttttacacataattttgattctgatattttagataacatctgttcacttttaaacaatctgttgaggttttgggactgttatctacattgattctcttaggaatagtggacagaatgactccaaagattctcagaaccctgtctcttgaagctcaatcttatttgggttcatcactgaaaacttagaacaaatcagtaaagaatcctgtattgaagaattaagtttgagtttaagcccactcaccgcagggctggtttttgcatgtaatactcccatgatgtctggggaaatgacagtttctgttgaattataattctccggtttaagggtctccttcccctggtgtctgatggtgagaggtctgaagagcatttgtcagagtacattaggcattctcaacctacttcatgctttacgagagctgagaaatcagacgcaccggcctttattattatatatgctacatctgttgagtatttttaaaataccaataagaggacttgtttatttcataaaccacttcttccctctctttcaaagaaaatacattattaccatacttttacattagtctgagaatttttgctaaatatgattaagtattccaaaatataatggcgtcattattcttgacttttttagagaatatacatcttaagactgtattagttctcagagcaaggcatcatctactcccctgcacctgagagtctggccccagattccagatgtgcggacagcccatgaccgaggtgcacacagtgccctcttgaataggaaggtcagccagtgaggcggcagcataacttgcaggatggacttatatcttaccatctcttcctgctaccaaaataaaaaaataaattgaaagacaagacccaccagtctagttttgtagacctgtgaaatgtgtctttatttcttggcattagaagaaagatatttttaatccatatcgtggttttagagttgaagtgaattgatacccaattttccatcttagatctcctttatcaaaaaaaaaagcattttttttctcctaacgtgtctcccaaaatgtaaatactataggcaaaaagagtaccctgtaaaattctcacactggagcacctcttcaaaagtcacagataactcaatgaggaagtgctggtactgcactcacaggacatgagacctatgaagctttcgtgttttgaaagcatccttctgtgtgagggggactgcctcccttagtaaagtaaacctctcagaacttctttttaaaataaaaacagacaagatgcagttactaagctgcaagttttcattggcaaacctagctgaatccgttttaaaatacttagcactcggacacaattctcaaactcaggaagaaggaacagggttggtttgggtttactataaaggttgcctcacataaacaactgactccttttagcgttttttttctttttgtaaaaactttacacaaaatagggttttaaattctttttgcttgttttggacttggtgtatttttgtcaagtttatattgattggcaacgcagagactccttgagggcagggactgtggcctttgattcacttatgctacagtctagtatcactacagtgctgagtaaaagacacagcccctgccctcttggagatcatattgtttatatttgaaatctcagttgctaagagtatgtatgtgtgagtaagaaagacgtgaagtcctatgggcagctgggtatatggagaattacgtgtgtcctgtctttaaaacgtcagcctctattaaggggtacagaacaccccaagatcactaaaacttggaatgtgttggaggcagaaagtatctctctcattgcctagtgttgttgtttttttgttttttgttttttgttttttttactgacctggaattcttttaattgtaataaatatcttctgtcacaaataaatgccacaaataaatgaaattgccattcctaagctgagcacctgtctgtgaaggaccttggtgtcctgactggacagagcattcatagctccaagagaatcatgacaagatatgcaaagcagggataataaggagaaagcccttccctttcgagaagcccttccctttcacagcccttccctgcgattctgcagtgaaaagtgatgcccagagatccacacacagaacccttctaaccagccaggtcaagacttatcatcttatctcctctggcaggtcccctgtaatcaaaagagaggaagtgtctatctaaacaagacccttttgggtccttagattcatggcaaaaatcatcatggcccccatcagaaaagaaaatcagcaataaaccaagccaagcaactaaaatgtataatgtggacctgactcatgttgggaggcagaattcagacactcacagatcaatcttgcaagttttctcttctttaagttgagctgctcaactttatgaactgtgaaatttacttacattctttcaacccacatatatcattgcagtttatgaagttgcagtgaactgcccattcagctaaattgcagtgtttattcttgtctcatgtcgaaatacaacaatcttatgggaaatattatgacagtccgttccaactgttctcagacacatgcataaacagtctctgctcacattccacagccacctgcatgttatccatacagctccctgagaagtccagggatgggaggtggggtgtggaaggatggagggtccttcattttctaaacactttgtataagtcactactcatcgtgcctagcaagtataagattaacattttgaataacaaactggaaaacaaataatccttcaaagaacctagcgaactgttcaaaggaaattttaatttcagtctaccagaaaagttaaatctgttgttggacgtagggggctttcagaaacatgcctcttatatcaatttccactatctttcaagttacctaaaggcaccaggctgcttgagcaagaagaataaaaggcctagagtgcaaattatgtgaagtagagtttttagattgtgggattgtaataatacgggattctcatggttacatcatgttaaatcacactgttcagtctttaaaacttggtgttttaaaatttgtctcattgtgatagccagaaacaaggaataaacgtgatttcagtttaaactatatacaaatatcttctgtaattttgctgctctaatttttaggctataaattttgtaatagagcttatcagatcgcaaatttcctttgtttacaatctcatgtagtagggctcagataatttcttagctataaaccttttctcccactctcatattgtttcatttaaaatatttaagctaagcctaaaaattgaaatcagttaagaatttggagagtttatcttaaatggaaatggtgtattcttttcaaagaattttgtaaccatctttacagtttctttgcttggaaaacttgggttgttaactaccagttaacaatggcattactttccaaaacgttatctaatgggcccaatgtgtacctcaagataaacacagtatgttatgtctaaaaatttccttgtctgttgatttaaatggttctgaaatgtctgtaataaagaaattttcaaagttgcttttcttgcagttg

SEQ ID NO: 9260 - protein, 875 aa, Homo sapiens; identical to SEQ ID NO: 1443

SEQ ID NO: 9261 - DNA, 2880 bp, Homo sapiens
gcgggtggtgccggtggcggcggcgggggagcgcgggacaggaggcttcggggaagatggacccggcgccctcgctgggctgcagcctcaaggatgtgaagtggagctcggtggccgtgccgctcgacctcctggtcagcacttaccggctgccccagatcgcgcgcctggacaacggagagtgcgtagaagggctgcgggaaaatgactatctgctgattcattcctgccgccagtggaccaccatcactgcccacagcttggaggagggtcactatgtcattgggccaaagatagagattccggtacattatgcagggcaattcaagctgctggaacaagaccgagatataaaggagccagtgcaatatttcaacagtgtggaggaggtggctaaggcatttcctgaacgcgtgtacgtcatggaggatatcacattcaacgtgaaggttgcttcaggtgaatgcaatgaagacactgaagtttacaacatcaccctgtgtactggggatgaactcactctaatggggcaggcagaaatcctttatgcaaagacattcaaggaaaagtcacgactcaacacaatcttcaaaaagattgggaagctcaattccatcagcaagctgggaaaaggcaaaatgccgtgcctcatttgtatgaatcaccggaccaacgaaagcattagccttccattccagtgcaagggcagatttagcacccgaagtcccctggaacttcagatgcaagagggcgaacacaccatccgcaacattgtggagaaaaccaggcttcctgtgaatgtgactgtgccaagccctccaccgagaaacccatacgacctccacttcatccgtgaggggcaccgctataagtttgtgaacatccagaccaagacggtggtggtttgctgtgtgctgcggaacaacaagatcctccccatgcactttcctttgcacttgactgtccccaagttcagcctcccagaacacctggtgaagggagagagctggcccgaaaccctggtccatcactggctaggtatctgccaagaacagttcgacatcgatgagtattcacgggctgtccgtgatgtgaaaaccgactggaatgaagaatgcaagagccccaagaagggtcggtgctctggccacaaccacgtgcccaattcgctcagctacgcccgcgatgagctcacccagtccttccaccgactctcggtctgtgtgtatggcaacaatctccatggcaacagtgaggtgaaccttcatggttgcagggacctggggggagattgggctccctttcctcatgacatcctgccctatcaggactctggagatagtgggagcgactaccttttcccagaagctagtgaagaatcagcaggcatcccgggaaagtcagaacttccctacgaagagctgtggctggaggaaggcaagcccagccatcagcctctcactcgctctctgagcgagaagaacagatgtgatcagtttagaggttctgtccgatccaaatgtgcgacttctcctcttcccatccctgggactctgggagcagcagtgaagtcttcagatactgccctacctccacctccagtgcctcccaaatctgaagccgtcagagaagaatgccggctcctgaacgccccacctgttccaccccgaagcgcaaagcctttgtccaccagtccctccatccctcctcgcacagtcaagccagcgcggcaacagactcgctctcccagccccaccttgtcctactattcttcagggctacacaacatcgtcactaaaactgacacaaatccttctgaaagcactcctgtttcctgctatccatgtaaccgagtgaaaactgattctgtggacctgaaatccccgtttggaagtccttctgctgaagctgtgtcctctcggctctcatggcctaaccattattcaggagcatcagaaagccagaccaggagtgacttcctgctggatccaagcaggagttatagttaccctagacaaaagacgccaggcacaccaaagagaaactgcccagcaccttttgattttgatggctgtgagctcctggccagccccactagcccagtcactgcagaattcagtagcagcgtctctggttgtcccaagtcagccagctactctctggagagcacagatgtgaaatctcttgcagctggtgtgacaaagcagagtacgtcatgccctgccttaccccccagggctccaaaactagtggaagagaaggtcgcctccgaaacatctcctttgcctctgaaaattgatggtgctgaggaagaccccaagtctgggtcaccagatctctcggaggaccagtattttgttaaaaagggcatgcaggacatcttctctgcctcctaccctttctcatctccgctccatctccagctggcccccagatcctgtggcgacggttccccatggcagccacctgctgacctatcaggactctctatagaggaagtgtccaagtcactacggttcattggtttgtccgaagatgtcatatcattctttgttactgaaaagattgatgggaacctgcttgttcagctaacggaagaaatcctctcagaggatttcaaattgagcaaattgcaggtgaagaagataatgcaattcattaatggctggaggcccaaaatatagccaaataacccccggccagcatggaacaaaactgatcaatgcgtgtgctagaaggggtgggctgggacacaatttcatgtttttgcactaaaaaccttctctgtaaatagggataagagaaactcttactatgcagattacgtttttgaatggtgaacaggctattttgtacatcaataaaaatgctgtacagaac

SEQ ID NO: 9262 - protein, 875 aa, Homo sapiens; identical to SEQ ID NO: 1443

SEQ ID NO: 9263 - DNA, 1338 bp, Homo sapiens
ctgtgaatgtgactgtgccaagccctccaccgagaaacccatacgacctccacttcatccgtgaggggcaccgctataagtttgtgaacatccagaccaagacggtggtggtttgctgtgtgctgcggaacaacaagatcctccccatgcactttcctttgcacttgactgtccccaagttcagcctcccagaacacctggtgaagggagagagctggcccgaaaccctggtccatcactggctaggtatctgccaagaacagttcgacatcgatgagtattcacgggctgtccgtgatgtgaaaaccgactggaatgaagaatgcaagagccccaagaagggtcggtgctctggccacaaccacgtgcccaattcgctcagctacgcccgcgatgagctcacccagtccttccaccgactctcggtctgtgtgtatggcaacaatctccatggcaacagtgaggtgaaccttcatggttgcagggacctggggggagattgggctccctttcctcatgacatcctgccctatcaggactctggagatagtgggagcgactaccttttcccagaagctagtgaagaatcagcaggcatcccgggaaagtcagaacttccctacgaagagctgtggctggaggaaggcaagcccagccatcagcctctcactcgctctctgagcgagaagaacagatgtgatcagtttagaggttctgtccgatccaaatgtgcgacttctcctcttcccatccctgggactctgggagcagcagtgaagtcttcagatactgccctacctccacctccagtgcctcccaaatctgaagccgtcagagaagaatgccggctcctgaacgccccacctgttccaccccgaagcgcaaagcctttgtccaccagtccctccatccctcctcgcacagtcaagccagcgcggcaacagactcgctctcccagccccaccttgtcctactattcttcagggctacacaacataatggaagagccaatgtcttgggaagaaaagatgccacaccagtctgagaaattcagaggtaaaggccaactagattctcctggaaacaacccgggggctgccatcagttctcacaagtcagcatctggttctttccactttgacacgagcagacagcaccttcaagcagacaacaccttcgaccaggacctaaaatggaaagggtcccattggctatctactctgaatttccatccagacaggagtccccttttgaccatcactgttgagtggtcatttccttttgtctggatacttccagtgctctgagatcattcttctgcaacacagctcattccat

SEQ ID NO: 9264 - protein, 386 aa, Homo sapiens
MHFPLHLTVPKFSLPEHLVKGESWPETLVHHWLGICQEQFDIDEYSRAVRDVKTDWNEECKSPKKGRCSGHNHVPNSLSYARDELTQSFHRLSVCVYGNNLHGNSEVNLHGCRDLGGDWAPFPHDILPYQDSGDSGSDYLFPEASEESAGIPGKSELPYEELWLEEGKPSHQPLTRSLSEKNRCDQFRGSVRSKCATSPLPIPGTLGAAVKSSDTALPPPPVPPKSEAVREECRLLNAPPVPPRSAKPLSTSPSIPPRTVKPARQQTRSPSPTLSYYSSGLHNIMEEPMSWEEKMPHQSEKFRGKGQLDSPGNNPGAAISSHKSASGSFHFDTSRQHLQADNTFDQDLKWKGSHWLSTLNFHPDRSPLLTITVEWSFPFVWILPVL

SEQ ID NO: 9265 - DNA, 1163 bp, Homo sapiens
ttacggcttcagatttgggaggcactggaggtggaggtagggcagtatctgaagacttcactgctgctcccagagtcccagggatgggaagaggagaagtcgcacatttggatcggacagaacctctaaactgatcacatctgttcttctcgctcagagagcgagtgagaggctgatggctgggcttgccttcctccagccacagctcttcgtagggaagttctgactttcccgggatgcctgctgattcttcactagcttctgggaaaaggtagtcgctcccactatctccagagtcctgatagggcaggatgtcatgaggaaagggagcccaatctccccccaggtccctgcaaccatgaaggttcacctcactgttgccatggagattgttgccatacacacagaccgagagtcggtggaaggactgggtgagctcatcgcgggcgtagctgagcgaattgggcacgtggttgtggccagagcaccgacccttcttggggctcttgcattcttcattccagtcggttttcacatcacggacagcccgtgaatactcatcgatgtcgaactgttcttggcagatacctagccagtgatggaccagggtttcgggccagctctctcccttcaccaggtgttctgggaggctgaacttggggacagtcaagtgcaaaggaaagtgcatggggaggatcttgttgttccgcagcacacagcaaaccaccaccgtcttggtctggatgttcacaaacttatagcggtgcccctcacggatgaagtggaggtcgtatgggtttctcggtggagggcttggcacagtcacattcacaggaagcctggttttctccacaatgttgcggatggtgtgttcgccctcttgcatctgaagttccaggggacttcgggtgctaaatctgcccttgcactggaatggaaggctaatgctttcgttggtccggtgattcatacaaatgaggcacggcattttgccttttcccagcttgctgatggaattgagcttcccaatctttttgaagattgtgttgagtcgtgacttttccttgaatgtctttgcataaaggatttctgcctgccccattagaatctgataacaaaagccctgacttgtgtttattctgactcaaaaagtatgtggatgg

SEQ ID NO: 9266 - protein, 152 aa, Homo sapiens [sequence omitted]

SEQ ID NO: 9267 - DNA, 1586 bp, Homo sapiens
cctttctgcccgtggacgccgccgaagaagcatcgttaaagtctctcttcaccctgccgtcatgtctaagtcagagtctcctaaagagcccgaacagctgaggaagctcttcattggagggttgagctttgaaacaactgatgagagcctgaggagccattttgagcaatggggaacgctcacggactgtgtgattctcaaagaccaggtgcccacttaactgtgaaaaagatatttgttggtggcattaaagaagacactgaagaacatcacctaagagattattttgaacagtatggaaaaattgaagtgattgaaatcatgactgaccgaggcagtggcaagaaaaggggctttgcctttgtaacctttgacgaccatgactccgtggataagattgtcattcagaaataccatactgtgaatggccacaactgtgaagttagaaaagccctgtcaaagcaagagatggctagtgcttcatccagccaaagaggtcgaagtggttctggaaactttggtggtggtcgtggaggtggtttcggtgggaatgacaacttcggtcatggaggaaacttcagtggtcgtggtggctttggtggcagccgtgctggtggtagatatggtggcagtggggatggctctaatggatttggtaatgatggaagcaattttggaggtggtggaagctacaatgattttggcaattacaacaatcagtcttcaaattttggacccatgaagggaggaaattttggaggcagaaactctggcccctatggcggtggaggccagtactttgcaaaaccacgaaaccaaggtggctatggcggttccagcagcagcagtagctgtgtcagtggcagaagattttaattaggaaacaaagcttagcaggagaggagagccagagaagtgacagggaagccacaggttacaacagatttgtgaactcagccaagcacagtggtggcagggcctagctgctacaaagaagacatgttttagacaaatactcatgtgtatgggcaaaaaactcgaggactgtgtttgtgactaattgtataacaggttattttagtttctgttctgtggaaagtgtaaagcattccaacaaagcgttttaatgtagattttttttttttgcacccatgctgttgattgctaaatgtaatagtctgatcgtgacgctgaataaatgtctttttttttttaatgtgctgtgtaaagttagtctactctgaagccatcttggtaaatttccccaacagtgtgaagttagaattccttcagggtgatgccaggttctatttggaatttatatacaacctgcttgggtggagaagccattgtcttcggaaaccttggtgtagttgaactgatagttactgttgtgacctgaagttcaccattaaaagggattacccaaacaaagtcatggaatggttataaaagtgattgttggcacatcctatgcaatatatctaaattgaataatggtaccagataaaattatagatgggaatgaagcttgtgtatcatccattatcatgtgtaatcaataaacaatttaattctcttgaatg

SEQ ID NO: 9268 - protein, 235 aa, Homo sapiens
MGNAHGLCDSQRPGAHLTVKKIFVGGIKEDTEEHHLRDYFEQYGKIEVIEIMTDRGSGKKRGFAFVTFDDHDSVDKIVIQKYHTVNGHNCEVRKALSKQEMASASSSQRGRSGSGNFGGGRGGGFGGNDNFGHGGNFSGRGGFGGSRAGGRYGGSGDGSNGFGNDGSNFGGGGSYNDFGNYNNQSSNFGPMKGGNFGGRNSGPYGGGGQYFAKPRNQGGYGGSSSSSSCVSGRRF

SEQ ID NO: 9269 - DNA, 1290 bp, Homo sapiens
ggcctttctgcccgtggacgccgccgaagaagcatcgttaaagtctctcttcaccctgccgtcatgtctaagtcagagtctcctaaagagcccgaacagctgaggaagctcttcattggagggttgagctttgaaacaactgatgagagcctgaggagccattttgagcaatggggaacgctcacggactgtgtggtaatgagagatccaaacaccaagcgctccaggggctttgggtttgtcacatatgccactgtggaggaggtggatgcagctatgaatgcaaggccacacaaggtggatggaagagttgtggaaccaaagagagctgtctccagagaagattctcaaagaccaggtgcccacttaactgtgaaaaagatatttgttggtggcactacaatgattttggcaattacaacaatcagtcttcaaattttggacccatgaagggaggaaattttggaggcagaaactctggcccctatggcggtggaggccagtactttgcaaaaccacgaaaccaaggtggctatggcggttccagcagcagcagtagctgtgtcagtggcagaagattttaattaggaaacaaagcttagcaggagaggagagccagagaagtgacagggaagccacaggttacaacagatttgtgaactcagccaagcacagtggtggcagggcctagctgctacaaagaagacatgttttagacaaatactcatgtgtatgggcaaaaaactcgaggactgtgtttgtgactaattgtataacaggttattttagtttctgttctgtggaaagtgtaaagcattccaacaaagcgttttaatgtagattttttttttttgcacccatgctgttgattgctaaatgtaatagtctgatcgtgacgctgaataaatgtctttttttttttaatgtgctgtgtaaagttagtctactctgaagccatcttggtaaatttccccaacagtgtgaagttagaattccttcagggtgatgccaggttctatttggaatttatatacaacctgcttgggtggagaagccattgtcttcggaaaccttggtgtagttgaactgatagttactgttgtgacctgaagttcaccattaaaagggattacccaaacaaagtcatggaatggttataaaagtgattgttggcacatcctatgcaatatatctaaattgaataatggtaccagataaaattatagatgggaatgaagcttgtgtatcatccattatcatgtgtaatcaataaacaatttaattctcttg

SEQ ID NO: 9270 - protein, 137 aa, Homo sapiens
MGNAHGLCGNERSKHQALQGLWVCHICHCGGGGCSYECKATQGGWKSCGTKESCLQRRFSKTRCPLNCEKDICWWHYNDFGNYNNQSSNFGPMKGGNFGGRNSGPYGGGGQYFAKPRNQGGYGGSSSSSSCVSGRRF

SEQ ID NO: 9271 - DNA, 749 bp, Homo sapiens
ctggcctttctgcccgtggacgccgccgaagaagcatcgttaaagtctctcttcaccctgccgtcatgtctaagtcagagtctcctaaagagcccgaacagctgaggaagctcttcattggagggttgagctttgaaacaactgatgagagcctgaggagccattttgagcaatggggaacgctcacggactgtgtggtaatgagagatccaaacaccaagcgctccaggggctttgggtttgtcacatatgccactgtggaggaggtggatgcagctatgaatgcaaggccacacaaggtggatggaagagttgtggaaccaaagagagctgtctccagagaagattctcaaagaccaggtgcccacttaactgtgaaaaagatatttgttggtggcattaaagaagacactgaagaacatcacctaagagattattttgaacagtatggaaaaattgaagtgattgaaatcatgactgaccgaggcagtggcaagaaaaggggctttgcctttgtaacctttgacgaccatgactccgtggataagattgtcattcagaaataccatactgtgaatggccacaactgtgaagttagaaaagccctgtcaaagcaagagatggctagtgcttcatccagccaaagaggtcgaagtggttctggaaacttaagctacaatgattttggcaattacaacaatcagtcttcaaattttggacccatgaagggaggaaattttggaggcaga

SEQ ID NO: 9272 - protein, 227 aa, Homo sapiens
MSKSESPKEPEQLRKLFIGGLSFETTDESLRSHFEQWGTLTDCVVMRDPNTKRSRGFGFVTYATVEEVDAAMNARPHKVDGRVVEPKRAVSREDSQRPGAHLTVKKIFVGGIKEDTEEHHLRDYFEQYGKIEVIEIMTDRGSGKKRGFAFVTFDDHDSVDKIVIQKYHTVNGHNCEVRKALSKQEMASASSSQRGRSGSGNLSYNDFGNYNNQSSNFGPMKGGNFGG

SEQ ID NO: 9273 - DNA, 564 bp, Homo sapiens
ggcctttctgcccgtggacgccgccgaagaagcatcgttaaagtctctcttcaccctgccgtcatgtctaagtcagagtctcctaaagagcccgaacagctgaggaagctcttcattggagggttgagctttgaaacaactgatgagagcctgaggagccattttgagcaatggggaacgctcacggactgtgtggtaatgagagatccaaacaccaagcgctccaggggctttgggtttgtcacatatgccactgtggaggaggtggatgcagctatgaatgcaaggccacacaaggtggatggaagagttgtggaaccaaagagagctgtctccagagaagattctcaaagaccaggtgcccacttaactgtgaaaaagatatttgttggtggcattaaagaagacactgaagaacatcacctaagagattattttgaacagtatggaaaaattgaagtgattgaaatcatgacacaactgtgaagttagaaaagccctgtcaaagcaagagatggctagtgcttcatccagccaaagaggtcgaagtggttctggaaactt

SEQ ID NO: 9274 - protein, 140 aa, Homo sapiens
MSKSESPKEPEQLRKLFIGGLSFETTDESLRSHFEQWGTLTDCVVMRDPNTKRSRGFGFVTYATVEEVDAAMNARPHKVDGRVVEPKRAVSREDSQRPGAHLTVKKIFVGGIKEDTEEHHLRDYFEQYGKIEVIEIMTQL

SEQ ID NO: 9275 - DNA, 4157 bp, Homo sapiens
agcctgcgagtccgcgagccagcgagctgcggctgcggcctcccctgcgcgcagctacccgggcgtcccggcccgcggccccgctaaccccggggcccgcgcccccgcggcagggatgcatcatggccacgctggcttgccgggtgcagttcttggacgacacggaccctttcaacagcaccaacttccccgagcccagccggccgccgctgttcacgttccgcgaggacctcgcgctcggcacccagctggcgggggtccataggctgctgcaggcgccgcacaagctggatgactgtactctgcagctctctcacaatggcgcctacctggatttggaggccaccctggcagagcagcgggatgagttggaaggcttccaggatgacgccgggcggggcaagaagcacagcatcatcctaaggacgcagctgtctgtgagggtccatgcctgcatcgaaaaactatacaactccagcggacgagatttgagaagggccctcttctccctgaagcagatatttcaggatgacaaggatttggtgcatgaatttgtagtggctgaaggtctgacatgtttgatcaaggtgggagctgaggctgatcagaactatcagaactacatcttaagggctttgggccagattatgttgtatgtggatggaatgaatggagtaataaaccgcaatgaaaccattcagtggctgtacactctcattgggtcaaagttccgcctggtggtgaagacagccctgaagctgctgctcgtctttgtagagtactcggagtccaacgcacctctcctaattcaggctgtcactgctgttgacacgaaaagaggggtcaaaccttggtcaaatatcatggaaatcctggaggaaaaagatggagttgatacggagctactggtttatgcaatgactttggtgaacaagacgttatcaggactaccagaccaagacaccttctacgacgtcgtggactgcctggaggagctgggcattgctgctgtgtcccagaggcacttgaacaagaaagggactgacctggacttagtggagcaactcaacatttatgaggtggcgctcaggcacgaggatggcgatgagaccacggagccaccccccagtgggtgccgggaccggaggagggccagcgtgtgttccagtggcggaggcgagcaccggggcctggaccgcagaaggagccgcaggcactcggtgcagagcatcaagagcaccctgtcggcccccaccagtccctgctcccagtcagctcccagcttcaagcccaaccaagtgcgagatctgcgtgaaaaatacagcaattttggcaataactcttatcactcctcaagaccctcatctggatccagtgtgcccaccacccccacatcatccgtctcacccccacaggaggccaggttggaaaggtcatcaccgagtggtcttctcacatcatccttcaggcagcaccaagagtcactggcagcagagagagagaggcggcggcaggagagagaagaaaggttgcagagaatagagcgggaagaaagaaacaaattcagatacaaatacttggaacagttggcagctgaggagcacgagaaggagctgagaagccggagtgtgagccggggcagagccgacctctccttggacctgacctcgccagcagccccagcctgcctggctcctctgagccatagcccctcatcttcagactctcaagaggctctcacggtgtctgcctcctccccaggaacccctcaccatccccaagcaagtgccggggatcctgaacccgaatcagaggcagaaccggaagcagaggcaggggcggggcaggttgctgatgaagctggccaggacatagcctctgcccacgagggtgcagagactgaagtggagcaggcactagagcaagagccggaagaaagagcctccctcagtgaaaaagagaggcagaacgagggggtgaacgagagggacaactgctctgcctccagcgtctcgtcctccagcagcacgttggagagggaggagaaggaggacaagctctccagggacaggacaactggtaaatgaagccccttgtttcagtcggcatgtgccagggaggcctggggtgcaggggctggttctctaagagcttgtccacaggctggcctctgaggtgacctgggtcaacccactcatgtggctgtgtcacccagtgtctggggacaaggagtgtggccacgctggcagccagccagcagccttctgccctgtagaaagacagcccccaaactgtctgccacaccatcacattcatcacctccacacctggggaaaagggccccgataaggagggcttttcctgaggaataagccccagaagagaaacctctcacttccccctgactgttccattgtgaataatagtaaggttgataatagtaaggctttttccgtttttgatataagtttagaaactgtcacattgtcatctattcctttaaaaatgtgtttactgaagtgtgttaatcattttgactggacatttcagactgggaaagatttgtttaaatggattgaatgagtatttccaaaaaattgtacacagtttactgaggtcaatttgatgtactggaatatagataatttgttttctatattacactcataactattcttttctttgtataaagtatatgcttttccttatggaagtatatctttttgatgttacacttaatactcattcagttctcctatgaatggtaactttagaattagggaccaaatggaatgttagattataggtttggtttagcctgaaagaacctcaccaaggacttgagaagggtgccacagagggttataggaatcgtgaataattcatatgatctgtgacaccacaggattacttttcctacccatgacttgtgtgctatcaaggtggtagaatgcctccttcctcaacaaacactcctaaccagtggagtcatgtcttatgggccagcctttcttaagctacatatgagtggcacccactcgagtcgatgtcttaggcccaaagggcaatatgacacctctacaaaggcctgccaaccagtgccatgacccatgaatggcttattcattcctagattaaaaatacattgtctcagaagcatggatgaacgaatgaatgaaaccagaatgtcttccaatagacctgtcagtcaatggcgtagtctaaaatagttactatttggattttttcccagttagaatatactactagattttatgctttatattgctggtcactatgatgcagtaaaaacaagaagataaaagactttattagtttacatcttaggaattattgcattgaaaatccagtgtcttcatttggttgaatatgtatgtgccaagaggtattatatatactgatatttacttaatttctttcaaagtcagattacagttagtcccccaaattcttcttatcattcatattaatgtaattattgtcataatactgggtgtagggtaagtcttattgatcagattggtcttaaatcatgttttatttattaggaatagctttaagaattattaatcataactgggtttagcaggcctaaaacatatcaagaaattggattagtaaaaatataccaggcgacagggctttcttggatcagattgtccaatattcttccaaagaaggacaattttccaaaagtggaaaccgttcccagtgaagaaccactgactttctaccaaagtgggcaatgtccaagtatttagaagcagaaattagggctttgcaatgatttttctgctttgcttcagtgctgttatgagagttggtcatgtttatttactgtagcttattggttcctaaaaaatctcactgctcacaggcatcatcagccactgtggagtccgggcagctatgtcattatagctcttgcttttcagagtgctgtcaaatcacagagcaaccttagagataaaaaattattctcaaacgtatttctaatgattatgtcaaaaatgaatttgtaggacttgaaaaagtctcattccagttatgtggtttaatttttctttgtttaatgtgttctactttagggcatgcatgtgagaagctttatcataacatacattttacttttttgt

SEQ ID NO: 9276 - protein, 654 aa, Homo sapiens
MATLACRVQFLDDTDPFNSTNFPEPSRPPLFTFREDLALGTQLAGVHRLLQAPHKLDDCTLQLSHNGAYLDLEATLAEQRDELEGFQDDAGRGKKHSIILRTQLSVRVHACIEKLYNSSGRDLRRALFSLKQIFQDDKDLVHEFVVAEGLTCLIKVGAEADQNYQNYILRALGQIMLYVDGMNGVINRNETIQWLYTLIGSKFRLVVKTALKLLLVFVEYSESNAPLLIQAVTAVDTKRGVKPWSNIMEILEEKDGVDTELLVYAMTLVNKTLSGLPDQDTFYDVVDCLEELGIAAVSQRHLNKKGTDLDLVEQLNIYEVALRHEDGDETTEPPPSGCRDRRRASVCSSGGGEHRGLDRRRSRRHSVQSIKSTLSAPTSPCSQSAPSFKPNQVRDLREKYSNFGNNSYHSSRPSSGSSVPTTPTSSVSPPQEARLERSSPSGLLTSSFRQHQESLAAERERRRQEREERLQRIEREERNKFRYKYLEQLAAEEHEKELRSRSVSRGRADLSLDLTSPAAPACLAPLSHSPSSSDSQEALTVSASSPGTPHHPQASAGDPEPESEAEPEAEAGAGQVADEAGQDIASAHEGAETEVEQALEQEPEERASLSEKERQNEGVNERDNCSASSVSSSSSTLEREEKEDKLSRDRTTGK

SEQ ID NO: 9277 - DNA, 4969 bp, Homo sapiens
agcctgcgagtccgcgagccagcgagctgcggctgcggcctcccctgcgcgcagctacccgggcgtcccggcccgcggccccgctaaccccggggcccgcgcccccgcggcagggatgcatcatggccacgctggcttgccgggtgcagttcttggacgacacggaccctttcaacagcaccaacttccccgagcccagccggccgccgctgttcacgttccgcgaggacctcgcgctcggcacccagctggcgggggtccataggctgctgcaggcgccgcacaagctggatgactgtactctgcagctctctcacaatggcgcctacctggatttggaggccaccctggcagagcagcgggatgagttggaaggcttccaggatgacgccgggcggggcaagaagcacagcatcatcctaaggacgcagctgtctgtgagggtccatgcctgcatcgaaaaactatacaactccagcggacgagatttgagaagggccctcttctccctgaagcagatatttcaggatgacaaggatttggtgcatgaatttgtagtggctgaaggtctgacatgtttgatcaaggtgggagctgaggctgatcagaactatcagaactacatcttaagggctttgggccagattatgttgtatgtggatggaatgaatggagtaataaaccgcaatgaaaccattcagtggctgtacactctcattgggtcaaagttccgcctggtggtgaagacagccctgaagctgctgctcgtctttgtagagtactcggagtccaacgcacctctcctaattcaggctgtcactgctgttgacacgaaaagaggggtcaaaccttggtcaaatatcatggaaatcctggaggaaaaagatggagttgatacggagctactggtttatgcaatgactttggtgaacaagacgttatcaggactaccagaccaagacaccttctacgacgtcgtggactgcctggaggagctgggcattgctgctgtgtcccagaggcacttgaacaagaaagggactgacctggacttagtggagcaactcaacatttatgaggtggcgctcaggcacgaggatggcgatgagaccacggagccaccccccagtgggtgccgggaccggaggagggccagcgtgtgttccagtggcggaggcgagcaccggggcctggaccgcagaaggagccgcaggcactcggtgcagagcatcaagagcaccctgtcggcccccaccagtccctgctcccagtcagctcccagcttcaagcccaaccaagtgcgagatctgcgtgaaaaatacagcaattttggcaataactcttatcactcctcaagaccctcatctggatccagtgtgcccaccacccccacatcatccgtctcacccccacaggaggccaggttggaaaggtcatcaccgagtggtcttctcacatcatccttcaggcagcaccaagagtcactggcagcagagagagagaggcggcggcaggagagagaagaaaggttgcagagaatagagcgggaagaaagaaacaaattcagccgagattatttagacaaaagagaggagcaaaggcaagcaagagaagaaagatacaaatacttggaacagttggcagctgaggagcacgagaaggagctgagaagccggagtgtgagccggggcagagccgacctctccttggacctgacctcgccagcagccccagcctgcctggctcctctgagccatagcccctcatcttcagactctcaagaggctctcacggtgtctgcctcctccccaggaacccctcaccatccccaagcaagtgccggggatcctgaacccgaatcagaggcagaaccggaagcagaggcaggggcggggcaggttgctgatgaagctggccaggacatagcctctgcccacgagggtgcagagactgaagtggagcaggcactagagcaagagccggaagaaagagcctccctcagtgaaaaagagaggcagaacgagggggtgaacgagagggacaactgctctgcctccagcgtctcgtcctccagcagcacgttggagagggaggagaaggaggacaagctctccagggacaggacaactggtttgtggcccgcaggtgtccaggatgcaggtgtaaatggacagtgtggcgacatcctcaccaacaaacggttcatgcttgacatgctgtatgcccataacaggaagtctccggatgatgaggagaagggggatggggaggctgggaggacccagcaggaggcagaggcggtagccagccttgctaccaggatatccaccctgcaggccaactctcagacccaggatgagagtgtcaggagggtggatgtcggctgtttggacaatcggggcagtgtgaaagcatttgctgagaaattcaacagtggggacctggggagaggttccatctcccctgatgctgagcccaatgacaaggtcccagaaacagcgccggtgcagccgaagacagagtctgattacatctgggaccagctcatggccaatccaagagagctcagaatccaagacatggatttcactgacctgggggaggaggatgacattgatgtcctagatgtggacctgggtcacagggaggcccctgggccacctcccccacccccacccacctttctgggtttgccgcccccaccccctccgcccctgttggacagcattcctccccctcctgtccctggtaatttattggttcctcctcctccagtgttcaacgctcctcagggcttagggtggtcccaggtacccaggggtcagcccacattcactaagaaaaagaagaccatccgtttgttctggaatgaagttcggccttttgactggccatgtaaaaacaaccgacgctgcagagaattcctgtggtcaaaactggaacccattaaggtggacacttccagactggagcacctgtttgagtctaaatccaaggaactgtctgtctcaaagaaaactgctgcagatggaaaaaggcaagagatcattgttctggattccaagaggagtaacgccatcaatattggtctgacggtgctgccccctccaaggacgattaagatcgccattttgaattttgatgagtatgccttaaacaaagaaggaatcgagaaaattctaacgatgattcccaccgatgaggagaagcagaaaatccaggaagctcagctggccaaccctgaaatccccctgggcagtgcagagcagttcctcctcaccctgtcctccatcagcgagctctctgcacgacttcacctctgggcattcaaaatggattatgaaactacagaaaaggaagtagcagaaccactcctggacctgaaggaaggaatagaccagttggagaacaataaaaccttgggctttatcctgtctactctcttagccattgggaactttctaaatggaactaatgccaaagcgtttgagttaagctacctcgagaaggttccagaagtcaaagacacagtgcacaagcagtcgcttctccaccatgtgtgcaccatggtggtagaaaacttcccagacagctccgatctgtactcggagatcggggccatcaccaggtcagccaaggttgactttgatcaacttcaggataatttatgtcagatggagagaagatgcaaagcttcatgggatcacctcaaggcaattgcaaaacatgaaatgaaaccagttttaaaacaacggatgtcagagttcctgaaagactgtgcagagcgaattataattttaaagattgtccatagaaggataatcaacagattccactcctttttactctttatgggccatccaccttatgcaattcgggaagtgaacataaacaaattctgcaggattattagtgaatttgcactagagtatcgcacaaccagggaaagggttttgcagcagaaacagaaacgggccaaccacagagagagaaataagaccagagggaagatgatcaccgattctggcaagttctccggcagttctccggcgcccccaagccagccgcagggtctgagctatgcggaggacgcggctgagcacgagaacatgaaggctgtgctgaaaacctcgtccccctccgtggaggacgccacccccgcgctgggcgtccgcacacgcagccgagcaagccgaggatccactagttcctggactatgggaactgatgactcgcccaatgtcacagatgatgcagctgatgagatcatggaccgcatcgtcaagtcagccacccaagtgcccagtcagcgagtggtgccgagggagaggaaacgatcccgggccaaccggaaatctttgcgaagaaccctgaagagcggcctgaccccagaagaagccagagccctgggcttggttggcacctcggagttgcagctgtgacactcataggttactcccaggagtgtgctgagcagaaggcaagctcttgctggatgaaacccctccaggtggggttggggagacttgatattcacatccaacagtttgaaaagggagagctcaattcccagcgtcaccccatggcttgtgttgcctgctacgcattgacttggatctccaggagtcccctgcacataccttctccatcgtgtcagctgtgtttctcttgattccgtgacacccggtttattagttcaaaagtgtgacaccttttctgggcaaggaacagcccctttaaggagcaaatcacttctgtcacagttattatggtaatatgaggcaatctgattagcttcacagactgagtctccacaacaccaaaatatccagatgtaaaccccaaacttgtacacaaaagaaagcacagattgtttacctgttgtggattttagatgtaacaaatgtttatacaaatacatacatgtacaccatgtttcaaatactaaataaatagagtttaatgccat

SEQ ID NO: 9278 - protein, 1439 aa, Homo sapiens; identical to SEQ ID NO: 1445

SEQ ID NO: 9279 - DNA, 4918 bp, Homo sapiens
agcctgcgagtccgcgagccagcgagctgcggctgcggcctcccctgcgcgcagctacccgggcgtcccggcccgcggccccgctaaccccggggcccgcgcccccgcggcagggatgcatcatggccacgctggcttgccgggtgcagttcttggacgacacggaccctttcaacagcaccaacttccccgagcccagccggccgccgctgttcacgttccgcgaggacctcgcgctcggcacccagctggcgggggtccataggctgctgcaggcgccgcacaagctggatgactgtactctgcagctctctcacaatggcgcctacctggatttggaggccaccctggcagagcagcgggatgagttggaaggcttccaggatgacgccgggcggggcaagaagcacagcatcatcctaaggacgcagctgtctgtgagggtccatgcctgcatcgaaaaactatacaactccagcggacgagatttgagaagggccctcttctccctgaagcagatatttcaggatgacaaggatttggtgcatgaatttgtagtggctgaaggtctgacatgtttgatcaaggtgggagctgaggctgatcagaactatcagaactacatcttaagggctttgggccagattatgttgtatgtggatggaatgaatggagtaataaaccgcaatgaaaccattcagtggctgtacactctcattgggtcaaagttccgcctggtggtgaagacagccctgaagctgctgctcgtctttgtagagtactcggagtccaacgcacctctcctaattcaggctgtcactgctgttgacacgaaaagaggggtcaaaccttggtcaaatatcatggaaatcctggaggaaaaagatggagttgatacggagctactggtttatgcaatgactttggtgaacaagacgttatcaggactaccagaccaagacaccttctacgacgtcgtggactgcctggaggagctgggcattgctgctgtgtcccagaggcacttgaacaagaaagggactgacctggacttagtggagcaactcaacatttatgaggtggcgctcaggcacgaggatggcgatgagaccacggagccaccccccagtgggtgccgggaccggaggagggccagcgtgtgttccagtggcggaggcgagcaccggggcctggaccgcagaaggagccgcaggcactcggtgcagagcatcaagagcaccctgtcggcccccaccagtccctgctcccagtcagctcccagcttcaagcccaaccaagtgcgagatctgcgtgaaaaatacagcaattttggcaataactcttatcactcctcaagaccctcatctggatccagtgtgcccaccacccccacatcatccgtctcacccccacaggaggccaggttggaaaggtcatcaccgagtggtcttctcacatcatccttcaggcagcaccaagagtcactggcagcagagagagagaggcggcggcaggagagagaagaaaggttgcagagaatagagcgggaagaaagaaacaaattcagatacaaatacttggaacagttggcagctgaggagcacgagaaggagctgagaagccggagtgtgagccggggcagagccgacctctccttggacctgacctcgccagcagccccagcctgcctggctcctctgagccatagcccctcatcttcagactctcaagaggctctcacggtgtctgcctcctccccaggaacccctcaccatccccaagcaagtgccggggatcctgaacccgaatcagaggcagaaccggaagcagaggcaggggcggggcaggttgctgatgaagctggccaggacatagcctctgcccacgagggtgcagagactgaagtggagcaggcactagagcaagagccggaagaaagagcctccctcagtgaaaaagagaggcagaacgagggggtgaacgagagggacaactgctctgcctccagcgtctcgtcctccagcagcacgttggagagggaggagaaggaggacaagctctccagggacaggacaactggtttgtggcccgcaggtgtccaggatgcaggtgtaaatggacagtgtggcgacatcctcaccaacaaacggttcatgcttgacatgctgtatgcccataacaggaagtctccggatgatgaggagaagggggatggggaggctgggaggacccagcaggaggcagaggcggtagccagccttgctaccaggatatccaccctgcaggccaactctcagacccaggatgagagtgtcaggagggtggatgtcggctgtttggacaatcggggcagtgtgaaagcatttgctgagaaattcaacagtggggacctggggagaggttccatctcccctgatgctgagcccaatgacaaggtcccagaaacagcgccggtgcagccgaagacagagtctgattacatctgggaccagctcatggccaatccaagagagctcagaatccaagacatggatttcactgacctgggggaggaggatgacattgatgtcctagatgtggacctgggtcacagggaggcccctgggccacctcccccacccccacccacctttctgggtttgccgcccccaccccctccgcccctgttggacagcattcctccccctcctgtccctggtaatttattggttcctcctcctccagtgttcaacgctcctcagggcttagggtggtcccaggtacccaggggtcagcccacattcactaagaaaaagaagaccatccgtttgttctggaatgaagttcggccttttgactggccatgtaaaaacaaccgacgctgcagagaattcctgtggtcaaaactggaacccattaaggtggacacttccagactggagcacctgtttgagtctaaatccaaggaactgtctgtctcaaagaaaactgctgcagatggaaaaaggcaagagatcattgttctggattccaagaggagtaacgccatcaatattggtctgacggtgctgccccctccaaggacgattaagatcgccattttgaattttgatgagtatgccttaaacaaagaaggaatcgagaaaattctaacgatgattcccaccgatgaggagaagcagaaaatccaggaagctcagctggccaaccctgaaatccccctgggcagtgcagagcagttcctcctcaccctgtcctccatcagcgagctctctgcacgacttcacctctgggcattcaaaatggattatgaaactacagaaaaggaagtagcagaaccactcctggacctgaaggaaggaatagaccagttggagaacaataaaaccttgggctttatcctgtctactctcttagccattgggaactttctaaatggaactaatgccaaagcgtttgagttaagctacctcgagaaggttccagaagtcaaagacacagtgcacaagcagtcgcttctccaccatgtgtgcaccatggtggtagaaaacttcccagacagctccgatctgtactcggagatcggggccatcaccaggtcagccaaggttgactttgatcaacttcaggataatttatgtcagatggagagaagatgcaaagcttcatgggatcacctcaaggcaattgcaaaacatgaaatgaaaccagttttaaaacaacggatgtcagagttcctgaaagactgtgcagagcgaattataattttaaagattgtccatagaaggataatcaacagattccactcctttttactctttatgggccatccaccttatgcaattcgggaagtgaacataaacaaattctgcaggattattagtgaatttgcactagagtatcgcacaaccagggaaagggttttgcagcagaaacagaaacgggccaaccacagagagagaaataagaccagagggaagatgatcaccgattctggcaagttctccggcagttctccggcgcccccaagccagccgcagggtctgagctatgcggaggacgcggctgagcacgagaacatgaaggctgtgctgaaaacctcgtccccctccgtggaggacgccacccccgcgctgggcgtccgcacacgcagccgagcaagccgaggatccactagttcctggactatgggaactgatgactcgcccaatgtcacagatgatgcagctgatgagatcatggaccgcatcgtcaagtcagccacccaagtgcccagtcagcgagtggtgccgagggagaggaaacgatcccgggccaaccggaaatctttgcgaagaaccctgaagagcggcctgaccccagaagaagccagagccctgggcttggttggcacctcggagttgcagctgtgacactcataggttactcccaggagtgtgctgagcagaaggcaagctcttgctggatgaaacccctccaggtggggttggggagacttgatattcacatccaacagtttgaaaagggagagctcaattcccagcgtcaccccatggcttgtgttgcctgctacgcattgacttggatctccaggagtcccctgcacataccttctccatcgtgtcagctgtgtttctcttgattccgtgacacccggtttattagttcaaaagtgtgacaccttttctgggcaaggaacagcccctttaaggagcaaatcacttctgtcacagttattatggtaatatgaggcaatctgattagcttcacagactgagtctccacaacaccaaaatatccagatgtaaaccccaaacttgtacacaaaagaaagcacagattgtttacctgttgtggattttagatgtaacaaatgtttatacaaatacatacatgtacaccatgtttcaaatactaaataaatagagtttaatgccat

SEQ ID NO: 9280 - protein, 1422 aa, Homo sapiens
MATLACRVQFLDDTDPFNSTNFPEPSRPPLFTFREDLALGTQLAGVHRLLQAPHKLDDCTLQLSHNGAYLDLEATLAEQRDELEGFQDDAGRGKKHSIILRTQLSVRVHACIEKLYNSSGRDLRRALFSLKQIFQDDKDLVHEFVVAEGLTCLIKVGAEADQNYQNYILRALGQIMLYVDGMNGVINRNETIQWLYTLIGSKFRLVVKTALKLLLVFVEYSESNAPLLIQAVTAVDTKRGVKPWSNIMEILEEKDGVDTELLVYAMTLVNKTLSGLPDQDTFYDVVDCLEELGIAAVSQRHLNKKGTDLDLVEQLNIYEVALRHEDGDETTEPPPSGCRDRRRASVCSSGGGEHRGLDRRRSRRHSVQSIKSTLSAPTSPCSQSAPSFKPNQVRDLREKYSNFGNNSYHSSRPSSGSSVPTTPTSSVSPPQEARLERSSPSGLLTSSFRQHQESLAAERERRRQEREERLQRIEREERNKFRYKYLEQLAAEEHEKELRSRSVSRGRADLSLDLTSPAAPACLAPLSHSPSSSDSQEALTVSASSPGTPHHPQASAGDPEPESEAEPEAEAGAGQVADEAGQDIASAHEGAETEVEQALEQEPEERASLSEKERQNEGVNERDNCSASSVSSSSSTLEREEKEDKLSRDRTTGLWPAGVQDAGVNGQCGDILTNKRFMLDMLYAHNRKSPDDEEKGDGEAGRTQQEAEAVASLATRISTLQANSQTQDESVRRVDVGCLDNRGSVKAFAEKFNSGDLGRGSISPDAEPNDKVPETAPVQPKTESDYIWDQLMANPRELRIQDMDFTDLGEEDDIDVLDVDLGHREAPGPPPPPPPTFLGLPPPPPPPLLDSIPPPPVPGNLLVPPPPVFNAPQGLGWSQVPRGQPTFTKKKKTIRLFWNEVRPFDWPCKNNRRCREFLWSKLEPIKVDTSRLEHLFESKSKELSVSKKTAADGKRQEIIVLDSKRSNAINIGLTVLPPPRTIKIAILNFDEYALNKEGIEKILTMIPTDEEKQKIQEAQLANPEIPLGSAEQFLLTLSSISELSARLHLWAFKMDYETTEKEVAEPLLDLKEGIDQLENNKTLGFILSTLLAIGNFLNGTNAKAFELSYLEKVPEVKDTVHKQSLLHHVCTMVVENFPDSSDLYSEIGAITRSAKVDFDQLQDNLCQMERRCKASWDHLKAIAKHEMKPVLKQRMSEFLKDCAERIIILKIVHRRIINRFHSFLLFMGHPPYAIREVNINKFCRIISEFALEYRTTRERVLQQKQKRANHRERNKTRGKMITDSGKFSGSSPAPPSQPQGLSYAEDAAEHENMKAVLKTSSPSVEDATPALGVRTRSRASRGSTSSWTMGTDDSPNVTDDAADEIMDRIVKSATQVPSQRVVPRERKRSRANRKSLRRTLKSGLTPEEARALGLVGTSELQL

SEQ ID NO: 9281 - DNA, 5130 bp, Homo sapiens
agcctgcgagtccgcgagccagcgagctgcggctgcggcctcccctgcgcgcagctacccgggcgtcccggcccgcggccccgctaaccccggggcccgcgcccccgcggcagggatgcatcatggccacgctggcttgccgggtgcagttcttggacgacacggaccctttcaacagcaccaacttccccgagcccagccggccgccgctgttcacgttccgcgaggacctcgcgctcggcacccagctggcgggggtccataggctgctgcaggcgccgcacaagctggatgactgtactctgcagctctctcacaatggcgcctacctggatttggaggccaccctggcagagcagcgggatgagttggaaggcttccaggatgacgccgggcggggcaagaagcacagcatcatcctaaggacgcagctgtctgtgagggtccatgcctgcatcgaaaaactatacaactccagcggacgagatttgagaagggccctcttctccctgaagcagatatttcaggatgacaaggatttggtgcatgaatttgtagtggctgaaggtctgacatgtttgatcaaggtgggagctgaggctgatcagaactatcagaactacatcttaagggctttgggccagattatgttgtatgtggatggaatgaatggagtaataaaccgcaatgaaaccattcagtggctgtacactctcattgggtcaaagttccgcctggtggtgaagacagccctgaagctgctgctcgtctttgtagagtactcggagtccaacgcacctctcctaattcaggctgtcactgctgttgacacgaaaagaggggtcaaaccttggtcaaatatcatggaaatcctggaggaaaaagatggagttgatacggagctactggtttatgcaatgactttggtgaacaagacgttatcaggactaccagaccaagacaccttctacgacgtcgtggactgcctggaggagctgggcattgctgctgtgtcccagaggcacttgaacaagaaagggactgacctggacttagtggagcaactcaacatttatgaggtggcgctcaggcacgaggatggcgatgagaccacggagccaccccccagtgggtgccgggaccggaggagggccagcgtgtgttccagtggcggaggcgagcaccggggcctggaccgcagaaggagccgcaggcactcggtgcagagcatcaagagcaccctgtcggcccccaccagtccctgctcccagtcagctcccagcttcaagcccaaccaagtgcgagatctgcgtgaaaaatacagcaattttggcaataactcttatcactcctcaagaccctcatctggatccagtgtgcccaccacccccacatcatccgtctcacccccacaggaggccaggttggaaaggtcatcaccgagtggtcttctcacatcatccttcaggcagcaccaagagtcactggcagcagagagagagaggcggcggcaggagagagaagaaaggttgcagagaatagagcgggaagaaagaaacaaattcagccgagattatttagacaaaagagaggagcaaaggcaagcaagagaagaaagatacaaatacttggaacagttggcagctgaggagcacgagaaggagctgagaagccggagtgtgagccggggcagagccgacctctccttggacctgacctcgccagcagccccagcctgcctggctcctctgagccatagcccctcatcttcagactctcaagaggctctcacggtgtctgcctcctccccaggaacccctcaccatccccaagcaagtgccggggatcctgaacccgaatcagaggcagaaccggaagcagaggcaggggcggggcaggttgctgatgaagctggccaggacatagcctctgcccacgagggtgcagagactgaagtggagcaggcactagagcaagagccggaagaaagagcctccctcagtgaaaaagagaggcagaacgagggggtgaacgagagggacaactgctctgcctccagcgtctcgtcctccagcagcacgttggagagggaggagaaggaggacaagctctccagggacaggacaactggtttgtggcccgcaggtgtccaggatgcaggtgtaaatggacagtgtggcgacatcctcaccaacaaacggttcatgcttgacatgctgtatgcccataacaggaagtctccggatgatgaggagaagggggatggggaggctgggaggacccagcaggaggcagaggcggtagccagccttgctaccaggatatccaccctgcaggccaactctcagacccaggatgagagtgtcaggagggtggatgtcggctgtttggacaatcggggcagtgtgaaagcatttgctgagaaattcaacagtggggacctggggagaggttccatctcccctgatgctgagcccaatgacaaggtcccagaaacagcgccggtgcagccgaagacagagtctgattacatctgggaccagctcatggccaatccaagagagctcagaatccaagacatggatttcactgacctgggggaggaggatgacattgatgtcctagatgtggacctgggtcacagggaggcccctgggccacctcccccacccccacccacctttctgggtttgccgcccccaccccctccgcccctgttggacagcattcctccccctcctgtccctggtaatttattggttcctcctcctccagtgttcaacgctcctcagggcttagggtggtcccaggtacccaggggtcagcccacattcactaagaaaaagaagaccatccgtttgttctggaatgaagttcggccttttgactggccatgtaaaaacaaccgacgctgcagagaattcctgtggtcaaaactggaacccattaaggtggacacttccagactggagcacctgtttgagtctaaatccaaggaactgtctgtctcaaagaaaactgctgcagatggaaaaaggcaagagatcattgttctggattccaagaggagtaacgccatcaatattggtctgacggtgctgccccctccaaggacgattaagatcgccattttgaattttgatgagtatgccttaaacaaagaaggaatcgagaaaattctaacgatgattcccaccgatgaggagaagcagaaaatccaggaagctcagctggccaaccctgaaatccccctgggcagtgcagagcagttcctcctcaccctgtcctccatcagcgagctctctgcacgacttcacctctgggcattcaaaatggattatgaaactacagaaaaggaagtagcagaaccactcctggacctgaaggaaggaatagaccagttggagaacaataaaaccttgggctttatcctgtctactctcttagccattgggaactttctaaatggaactaatgccaaagcgtttgagttaagctacctcgagaaggttccagaagtcaaagacacagtgcacaagcagtcgcttctccaccatgtgtgcaccatggtggtagaaaacttcccagacagctccgatctgtactcggagatcggggccatcaccaggtcagccaaggttgactttgatcaacttcaggataatttatgtcagatggagagaagatgcaaagcttcatgggatcacctcaaggcaattgcaaaacatgaaatgaaaccagttttaaaacaacggatgtcagagttcctgaaagactgtgcagagcgaattataattttaaagattgtccatagaaggataatcaacagattccactcctttttactctttatgggccatccaccttatgcaattcgggaagtgaacataaacaaattctgcaggattattagtgaatttgcactagagtatcgcacaaccagggaaagggttttgcagcagaaacagaaacgggccaaccacagagagagaaataagaccagagggaagatgatcaccgattctggcaagttctccggcagttctccggcgcccccaagccagccgcagggtctgagctatgcggaggacgcggctgagcacgagaacatgaaggctgtgctgaaaacctcgtccccctccgtggaggacgccacccccgcgctgggcgtccgcacacgcagccgagcaagccgaggatccactagttcctggactatgggaactgatgactcgcccaatgtcacagatgatgcagctgatgagatcatggaccgcatcgtcaagtcagccacccaagtgcccagtcagcgagtggtgccgagggagaggaaacgatcccgggccaaccggaaatctttgcgaagaaccctgaagagcggcctgaccccagaagaagccagagccctgggcttggttggcacctcggagttgcagctgtgacactcataggttactcccaggagtgtgctgagcagaaggcaagctcttgctggatgaaacccctccaggtggggttggggagacttgatattcacatccaacagtttgaaaagggagagctcaattcccagcgtcaccccatggcttgtgttgcctgctacgcattgacttggatctccaggagtcccctgcacataccttctccatcgtgtcagctgtgtttctcttgattccgtgacacccggtttattagttcaaaagtgtgacaccttttctgggcaaggaacagcccctttaaggagcaaatcacttctgtcacagttattatggtaatatgaggcaatctgattagcttcacagactgagtctccacaacaccaaaatatccagatgtaaaccccaaacttgtacacaaaagaaagcacagattgtttacctgttgtggattttagatgtaacaaatgtttatacaaatacatacatgtacaccatgtttcaaatactaaataaatagagtttaatgccataatgagaaacttttattcttctgggaacaggaccttaaacagttccacaggctcgcctcttcagaatggcaaaactcttctcagtgtcctcagaagcaccctcgcttggaacggccttcagatcctttgggctgtattttgttaatagagtgagtaacatc

SEQ ID NO: 9282 - protein, 1439 aa, Homo sapiens; identical to SEQ ID NO: 1445

SEQ ID NO: 9283 - DNA, 5079 bp, Homo sapiens
agcctgcgagtccgcgagccagcgagctgcggctgcggcctcccctgcgcgcagctacccgggcgtcccggcccgcggccccgctaaccccggggcccgcgcccccgcggcagggatgcatcatggccacgctggcttgccgggtgcagttcttggacgacacggaccctttcaacagcaccaacttccccgagcccagccggccgccgctgttcacgttccgcgaggacctcgcgctcggcacccagctggcgggggtccataggctgctgcaggcgccgcacaagctggatgactgtactctgcagctctctcacaatggcgcctacctggatttggaggccaccctggcagagcagcgggatgagttggaaggcttccaggatgacgccgggcggggcaagaagcacagcatcatcctaaggacgcagctgtctgtgagggtccatgcctgcatcgaaaaactatacaactccagcggacgagatttgagaagggccctcttctccctgaagcagatatttcaggatgacaaggatttggtgcatgaatttgtagtggctgaaggtctgacatgtttgatcaaggtgggagctgaggctgatcagaactatcagaactacatcttaagggctttgggccagattatgttgtatgtggatggaatgaatggagtaataaaccgcaatgaaaccattcagtggctgtacactctcattgggtcaaagttccgcctggtggtgaagacagccctgaagctgctgctcgtctttgtagagtactcggagtccaacgcacctctcctaattcaggctgtcactgctgttgacacgaaaagaggggtcaaaccttggtcaaatatcatggaaatcctggaggaaaaagatggagttgatacggagctactggtttatgcaatgactttggtgaacaagacgttatcaggactaccagaccaagacaccttctacgacgtcgtggactgcctggaggagctgggcattgctgctgtgtcccagaggcacttgaacaagaaagggactgacctggacttagtggagcaactcaacatttatgaggtggcgctcaggcacgaggatggcgatgagaccacggagccaccccccagtgggtgccgggaccggaggagggccagcgtgtgttccagtggcggaggcgagcaccggggcctggaccgcagaaggagccgcaggcactcggtgcagagcatcaagagcaccctgtcggcccccaccagtccctgctcccagtcagctcccagcttcaagcccaaccaagtgcgagatctgcgtgaaaaatacagcaattttggcaataactcttatcactcctcaagaccctcatctggatccagtgtgcccaccacccccacatcatccgtctcacccccacaggaggccaggttggaaaggtcatcaccgagtggtcttctcacatcatccttcaggcagcaccaagagtcactggcagcagagagagagaggcggcggcaggagagagaagaaaggttgcagagaatagagcgggaagaaagaaacaaattcagatacaaatacttggaacagttggcagctgaggagcacgagaaggagctgagaagccggagtgtgagccggggcagagccgacctctccttggacctgacctcgccagcagccccagcctgcctggctcctctgagccatagcccctcatcttcagactctcaagaggctctcacggtgtctgcctcctccccaggaacccctcaccatccccaagcaagtgccggggatcctgaacccgaatcagaggcagaaccggaagcagaggcaggggcggggcaggttgctgatgaagctggccaggacatagcctctgcccacgagggtgcagagactgaagtggagcaggcactagagcaagagccggaagaaagagcctccctcagtgaaaaagagaggcagaacgagggggtgaacgagagggacaactgctctgcctccagcgtctcgtcctccagcagcacgttggagagggaggagaaggaggacaagctctccagggacaggacaactggtttgtggcccgcaggtgtccaggatgcaggtgtaaatggacagtgtggcgacatcctcaccaacaaacggttcatgcttgacatgctgtatgcccataacaggaagtctccggatgatgaggagaagggggatggggaggctgggaggacccagcaggaggcagaggcggtagccagccttgctaccaggatatccaccctgcaggccaactctcagacccaggatgagagtgtcaggagggtggatgtcggctgtttggacaatcggggcagtgtgaaagcatttgctgagaaattcaacagtggggacctggggagaggttccatctcccctgatgctgagcccaatgacaaggtcccagaaacagcgccggtgcagccgaagacagagtctgattacatctgggaccagctcatggccaatccaagagagctcagaatccaagacatggatttcactgacctgggggaggaggatgacattgatgtcctagatgtggacctgggtcacagggaggcccctgggccacctcccccacccccacccacctttctgggtttgccgcccccaccccctccgcccctgttggacagcattcctccccctcctgtccctggtaatttattggttcctcctcctccagtgttcaacgctcctcagggcttagggtggtcccaggtacccaggggtcagcccacattcactaagaaaaagaagaccatccgtttgttctggaatgaagttcggccttttgactggccatgtaaaaacaaccgacgctgcagagaattcctgtggtcaaaactggaacccattaaggtggacacttccagactggagcacctgtttgagtctaaatccaaggaactgtctgtctcaaagaaaactgctgcagatggaaaaaggcaagagatcattgttctggattccaagaggagtaacgccatcaatattggtctgacggtgctgccccctccaaggacgattaagatcgccattttgaattttgatgagtatgccttaaacaaagaaggaatcgagaaaattctaacgatgattcccaccgatgaggagaagcagaaaatccaggaagctcagctggccaaccctgaaatccccctgggcagtgcagagcagttcctcctcaccctgtcctccatcagcgagctctctgcacgacttcacctctgggcattcaaaatggattatgaaactacagaaaaggaagtagcagaaccactcctggacctgaaggaaggaatagaccagttggagaacaataaaaccttgggctttatcctgtctactctcttagccattgggaactttctaaatggaactaatgccaaagcgtttgagttaagctacctcgagaaggttccagaagtcaaagacacagtgcacaagcagtcgcttctccaccatgtgtgcaccatggtggtagaaaacttcccagacagctccgatctgtactcggagatcggggccatcaccaggtcagccaaggttgactttgatcaacttcaggataatttatgtcagatggagagaagatgcaaagcttcatgggatcacctcaaggcaattgcaaaacatgaaatgaaaccagttttaaaacaacggatgtcagagttcctgaaagactgtgcagagcgaattataattttaaagattgtccatagaaggataatcaacagattccactcctttttactctttatgggccatccaccttatgcaattcgggaagtgaacataaacaaattctgcaggattattagtgaatttgcactagagtatcgcacaaccagggaaagggttttgcagcagaaacagaaacgggccaaccacagagagagaaataagaccagagggaagatgatcaccgattctggcaagttctccggcagttctccggcgcccccaagccagccgcagggtctgagctatgcggaggacgcggctgagcacgagaacatgaaggctgtgctgaaaacctcgtccccctccgtggaggacgccacccccgcgctgggcgtccgcacacgcagccgagcaagccgaggatccactagttcctggactatgggaactgatgactcgcccaatgtcacagatgatgcagctgatgagatcatggaccgcatcgtcaagtcagccacccaagtgcccagtcagcgagtggtgccgagggagaggaaacgatcccgggccaaccggaaatctttgcgaagaaccctgaagagcggcctgaccccagaagaagccagagccctgggcttggttggcacctcggagttgcagctgtgacactcataggttactcccaggagtgtgctgagcagaaggcaagctcttgctggatgaaacccctccaggtggggttggggagacttgatattcacatccaacagtttgaaaagggagagctcaattcccagcgtcaccccatggcttgtgttgcctgctacgcattgacttggatctccaggagtcccctgcacataccttctccatcgtgtcagctgtgtttctcttgattccgtgacacccggtttattagttcaaaagtgtgacaccttttctgggcaaggaacagcccctttaaggagcaaatcacttctgtcacagttattatggtaatatgaggcaatctgattagcttcacagactgagtctccacaacaccaaaatatccagatgtaaaccccaaacttgtacacaaaagaaagcacagattgtttacctgttgtggattttagatgtaacaaatgtttatacaaatacatacatgtacaccatgtttcaaatactaaataaatagagtttaatgccataatgagaaacttttattcttctgggaacaggaccttaaacagttccacaggctcgcctcttcagaatggcaaaactcttctcagtgtcctcagaagcaccctcgcttggaacggccttcagatcctttgggctgtattttgttaatagagtgagtaacatc

SEQ ID NO: 9284 - protein, 1422 aa, Homo sapiens; identical to SEQ ID NO: 9280

SEQ ID NO: 9285 - DNA, 2233 bp, Homo sapiens
gtacgccccctccccccgtccctatcggcagaaccggaggccaaccttcgcgatcccttgctgcgggcccggagatcaaacgtggcccgcccccggcagggcacagcgcgctgggcaaccgcgatccggcgccggactggaggggtcgatgcgcggcgcgctggggcgcacaggggacggagcccgggtcttgctccccattggccgccacctcggcgggaggggccgcctccggctcgtggcacctggcgtctcccctccgcggggaaatcggcggctacccggcaccggcgcctgcctgaccgcaccgtgaggcgccaagtcggccgcgcgccccccggggccccggaaccccgcgagtcattgcctggccgccccgtaccccgcgcccgcggcgcccggtagccaggatgcgctacgcggacccctcggccaaccgggatttgttggggagccgaactttgctcttcatcttcatctgcgcctttgccttggtgaccttgctcaacgcccctgcctttctcttcaccacccagaagaacactcccctggggacaaagctcaagtatgaggtggacaccagtggcatctaccacatcaaccaggagatcttccgcatgtttcccaaggacatgccctactaccggtcccagtttaagaagtgtgctgtagtgggcaacggaggcatcttgaagaacagccgctgcgggagggagatcaacagcgccgacttcgtcttccggtgcaacctgccccccatctcagagaagtacaccatggatgtgggggtgaagacggatgtggtcactgtgaaccccagcatcatcacagagaggttccacaagctggagaagtggcggcggccgttctatcgcgtgctgcaggtgtacgagaacgcgtcggtgctgctgcctgccttctacaacacgcgcaacaccgacgtgtccatccgcgtcaagtacgtgctggacgacttcgaatcgccgcaagctgtctactacttccatccgcagtacctggtcaacgtgtcgcgctactggctcagcctgggggtgcgcgccaagcgcatcagcaccggcctcattctggtcactgcggcgctggagctctgtgaggaggtgcacctctttggcttctgggccttccccatgaacccctcgggcctctacatcactcaccactactatgacaacgtcaagccgcgtcccggcttccacgccatgccctctgagatcttcaacttcctgcacttgcacagccgaggcatcctccgcgtgcacacgggcacctgcagctgctgctgatggctgccagccaggctgcccggcaagcggcgccccctctcctgctgtccctcctggtggaactgggagccccgaaccgggcagcgtggggtcctggcgttcaggctgtctctccctccattgttcagctctgtacttggatcctggggtagggaggcagggttaggaaccggggcagagtcagctctgtgctgagcctcctggcctggcccccaccggtgcatccgcccagtgcgtccacctgccctggctagcatgctgctgggccacaccccaagatcaggggccctggggacggcaagtgaataaagcacatttccacccaattttgtcatccgagagagagcacaaactgcaggcccttgttgcagctgaaggaagaccctacagagaatggaattgagagtggagacaggacacttcacaggacacttgagcacagtcaagattttattcacacttttggttcctgtgttttatatcgaagacttagctatgaattgctatctaaatctcagagcttagaagccaacccagtgactagaccttccagtgaagaaagtgatctcaagaggtccagggacttaacagccaagccacaccacccgacaggttcttctgtgacaccgagagatctaacccaaggcctgggttatgtcttagtcgagacatcatcatctgagaagcaccacatcctttcagacacatcctcggacacacatgcggtcttggtgcccccaggttcaatcctgcgttagctcttttgatgagaaggaaataaaccaaaccagccacttgcactatggcttccaagccaatgttattgactcaataagtgcttagcaattggcttcctcttttgtcttcctattttcagctccatttaaaccaggagttatttataaagacctcttcctctcatgtctctg

SEQ ID NO: 9286 - protein, 297 aa, Homo sapiens
MRYADPSANRDLLGSRTLLFIFICAFALVTLLNAPAFLFTTQKNTPLGTKLKYEVDTSGIYHINQEIFRMFPKDMPYYRSQFKKCAVVGNGGILKNSRCGREINSADFVFRCNLPPISEKYTMDVGVKTDVVTVNPSIITERFHKLEKWRRPFYRVLQVYENASVLLPAFYNTRNTDVSIRVKYVLDDFESPQAVYYFHPQYLVNVSRYWLSLGVRAKRISTGLILVTAALELCEEVHLFGFWAFPMNPSGLYITHHYYDNVKPRPGFHAMPSEIFNFLHLHSRGILRVHTGTCSCC

SEQ ID NO: 9287 - DNA, 2717 bp, Homo sapiens
aattccaagattcaaacccggcgttttgcgctccgcccctccccctccccacggcccgcctatcattagccagactgcgcgggtgttttgtacgccccctccccccgtccctatcggcagaaccggaggccaaccttcgcgatcccttgctgcgggcccggagatcaaacgtggcccgcccccggcagggcacagcgcgctgggcaaccgcgatccggcgccggactggaggggtcgatgcgcggcgcgctggggcgcacaggggacggagcccgggtcttgctccccattggccgccacctcggcgggaggggccgcctccggctcgtggcacctggcgtctcccctccgcggggaaatcggcggctacccggcaccggcgcctggaggtaaaggtacccgggggtggggaaggcccctggccgcggcagagctccctgccaccggccctgtcctgcttgccgccccagcgcctgcgacgcttggatgcccccagctccggccgcgccaaccagaaactttgcccctcgaagtcccccgcctgcctgaccgcaccgtgaggcgccaagtcggccgcgcgccccccggggccccggaaccccgcgagtcattgcctggccgccccgtaccccgcgcccgcggcgcccggtagccaggatgcgctacgcggacccctcggccaaccgggatttgttggggagccgaactttgctcttcatcttcatctgcgcctttgccttggtgaccttgctgcaacagatcctgtatggcaggaactacattaagaggtactttgaattttatgaggggccttttgaatataactccacaagatgcctggagctgaggcacgaaatattggaagtgaaggtgctgtccatggtgaagcagtcagagctgttcgacaggtggaagagcctccagatgtgcaaatgggcgatgaacatctctgaggccaaccagttcaagtctactctgtccaggtgctgcaacgcccctgcctttctcttcaccacccagaagaacactcccctggggacaaagctcaagtatgaggtggacaccagtggcatctaccacatcaaccaggagatcttccgcatgtttcccaaggacatgccctactaccggtcccagtttaagaagtgtgctgtagtgggcaacggaggcatcttgaagaacagccgctgcgggagggagatcaacagcgccgacttcgtcttccggtgcaacctgccccccatctcagagaagtacaccatggatgtgggggtgaagacggatgtggtcactgtgaaccccagcatcatcacagagaggttccacaagctggagaagtggcggcggccgttctatcgcgtgctgcaggtgtacgagaacgcgtcggtgctgctgcctgccttctacaacacgcgcaacaccgacgtgtccatccgcgtcaagtacgtgctggacgacttcgaatcgccgcaagctgtctactacttccatccgcagtacctggtcaacgtgtcgcgctactggctcagcctgggggtgcgcgccaagcgcatcagcaccggcctcattctggtcactgcggcgctggagctctgtgaggaggtgcacctctttggcttctgggccttccccatgaacccctcgggcctctacatcactcaccactactatgacaacgtcaagccgcgtcccggcttccacgccatgccctctgagatcttcaacttcctgcacttgcacagccgaggcatcctccgcgtgcacacgggcacctgcagctgctgctgatggctgccagccaggctgcccggcaagcggcgccccctctcctgctgtccctcctggtggaactgggagccccgaaccgggcagcgtggggtcctggcgttcaggctgtctctccctccattgttcagctctgtacttggatcctggggtagggaggcagggttaggaaccggggcagagtcagctctgtgctgagcctcctggcctggcccccaccggtgcatccgcccagtgcgtccacctgccctggctagcatgctgctgggccacaccccaagatcaggggccctggggacggcaagtgaataaagcacatttccacccaattttgtcatccgagagagagcacaaactgcaggcccttgttgcagctgaaggaagaccctacagagaatggaattgagagtggagacaggacacttcacaggacacttgagcacagtcaagattttattcacacttttggttcctgtgttttatatcgaagacttagctatgaattgctatctaaatctcagagcttagaagccaacccagtgactagaccttccagtgaagaaagtgatctcaagaggtccagggacttaacagccaagccacaccacccgacaggttcttctgtgacaccgagagatctaacccaaggcctgggttatgtcttagtcgagacatcatcatctgagaagcaccacatcctttcagacacatcctcggacacacatgcggtcttggtgcccccaggttcaatcctgcgttagctcttttgatgagaaggaaataaaccaaaccagccacttgcactatggcttccaagccaatgttattgactcaataagtgcttagcaattggcttcctcttttgtcttcctattttcagctccatttaaaccaggagttatttataaagacctcttcctctcatgtctctg

SEQ ID NO: 9288 - protein, 376 aa, Homo sapiens; identical to SEQ ID NO: 1447

SEQ ID NO: 9289 - DNA, 2587 bp, Homo sapiens
aattccaagattcaaacccggcgttttgcgctccgcccctccccctccccacggcccgcctatcattagccagactgcgcgggtgttttgtacgccccctccccccgtccctatcggcagaaccggaggccaaccttcgcgatcccttgctgcgggcccggagatcaaacgtggcccgcccccggcagggcacagcgcgctgggcaaccgcgatccggcgccggactggaggggtcgatgcgcggcgcgctggggcgcacaggggacggagcccgggtcttgctccccattggccgccacctcggcgggaggggccgcctccggctcgtggcacctggcgtctcccctccgcggggaaatcggcggctacccggcaccggcgcctggaggtaaaggtacccgggggtggggaaggcccctggccgcggcagagctccctgccaccggccctgtcctgcttgccgccccagcgcctgcgacgcttggatgcccccagctccggccgcgccaaccagaaactttgcccctcgaagtcccccgcctgcctgaccgcaccgtgaggcgccaagtcggccgcgcgccccccggggccccggaaccccgcgagtcattgcctggccgccccgtaccccgcgcccgcggcgcccggtagccaggatgcgctacgcggacccctcggccaaccgggatttgttggggagccgaactttgctcttcatcttcatctgcgcctttgccttggtgaccttgctgcaacagatcctgtatggcaggaactacattaagaggtactttgaattttatgaggggccttttgaatataactccacaagatgcctggagctgaggcacgaaatattggaagtgaaggtgctgtccatggtgaagcagtcagagctgttcgacaggtggaagagcctccagatgtgcaaatgggcgatgaacatctctgaggccaaccagttcaagtctactctgtccaggtgctgcaacgcccctgcctttctcttcaccacccagaagaacactcccctggggacaaagctcaagtatgaggtggacaccagtggcatctaccacatcaaccaggagatcttccgcatgtttcccaaggacatgccctactaccggtcccagtttaagaagtgtgctgtagtgggcaacggaggcatcttgaagaacagccgctgcgggagggagatcaacagcgccgacttcgtcttccggtgcaacctgccccccatctcagagaagtacaccatggatgtgggggtgaagacggatgtggtcactgtgaaccccagcatcatcacagagaggttccacaagctggagaagtggcggcggccgttctatcgcgtgctgcaggtgtacgagaacgcgtcggtgctgctgcctgccttctacaacacgcgcaacaccgacgtgtccatccgcgtcaagtacgtgctggacgacttcgaatcgccgcaagctgtctactacttccatccgcagtacctggtcaacgtgtcgcgctactggctcagcctgggggtgcgcgccaagcgcatcagcaccggcctcattctggtcactgcggcgctggagctctgtgaggaggtgcacctctttggcttctgggccttccccatgaacccctcgggcctctacatcactcaccactactatgacaacgtcaagccgcgtcccggcttccacgccatgccctctgagatcttcaacttcctgcacttgcacagccgaggcatcctccgcgtgcacacgggcacctgcagctgctgctgatggctgccagccaggctgcccggcaagcggcgccccctctcctgctgtccctcctggtggaactgggagccccgaaccgggcagcgtggggtcctggcgttcaggctgtctctccctccattgttcagctctgtacttggatcctggggtagggaggcagggttaggaaccggggcagagtcagctctgtgctgagcctcctggcctggcccccaccggtgcatccgcccagtgcgtccacctgccctggctagcatgctgctgggccacaccccaagatcaggggccctggggacggcaagtgaataaagcacatttccacccaattttgtcatccgagagagagcacaaactgcaggcccttgttgcagctgaaggaagaccctacagagaatggaattgagagtggagacaggacacttcacaggacacttgagcacagtcaagattttattcacacttttggttcctgtgttttatatcgaagacttagctatgaattgctatctaaatctcagagcttagaagccaacccagtgactagaccttccagtgaagaaagtgatctcaagaggtccagggacttaacagccaagccacaccacccgacaggttcttctgtgacaccgagagatctaacccaaggcctgggttatgtcttagtcgagacatcatcatctgagaagcaccacatcctttcagacacatcctcggacacacatgcggtcttggtgcccccaggttcaatcctgcgttagctcttttgatgagaaggaaataaaccaaaccagccacttgc

SEQ ID NO: 9290 - protein, 376 aa, Homo sapiens; identical to SEQ ID NO: 1447

SEQ ID NO: 9291 - DNA, 941 bp, Homo sapiens
aattccaagattcaaacccggcgttttgcgctccgcccctccccctccccacggcccgcctatcattagccagactgcgcgggtgttttgtacgccccctccccccgtccctatcggcagaaccggaggccaaccttcgcgatcccttgctgcgggcccggagatcaaacgtggcccgcccccggcagggcacagcgcgctgggcaaccgcgatccggcgccggactggaggggtcgatgcgcggcgcgctggggcgcacaggggacggagcccgggtcttgctccccattggccgccacctcggcgggaggggccgcctccggctcgtggcacctggcgtctcccctccgcggggaaatcggcggctacccggcaccggcgcctggaggtaaaggtacccgggggtggggaaggcccctggccgcggcagagctccctgccaccggccctgtcctgcttgccgccccagcgcctgcgacgcttggatgcccccagctccggccgcgccaaccagaaactttgcccctcgaagtcccccgcctgcctgaccgcaccgtgaggcgccaagtcggccgcgcgccccccggggccccggaaccccgcgagtcattgcctggccgccccgtaccccgcgcccgcggcgcccggtagccaggatgcgctacgcggacccctcggccaaccgggatttgttggggagccgaactttgctcttcatcttcatctgcgcctttgccttggtgaccttgctgcaacagatcctgtatggcaggaactacattaagagaggcctccagtttggttggcagagtggtgaccagctgaccaattggacggggctctttaatgtcacggatgatccagcagtgcagagcggcagtgactccagctccaggtactttgaattttatgaggggccttttgaatataactccacaag

SEQ ID NO: 9292 - protein, 93 aa, Homo sapiens
MRYADPSANRDLLGSRTLLFIFICAFALVTLLQQILYGRNYIKRGLQFGWQSGDQLTNWTGLFNVTDDPAVQSGSDSSSRYFEFYEGPFEYNS

SEQ ID NO: 9293 - DNA, 752 bp, Homo sapiens
cctggttccttttggcttactgctctgccagtcccgggacatgttttctgtccttatggtctaaggtagcagcattcacaaaccaagcagcaggatggaggaagggaggaaaaggagggacaaaggctaatcctcctcagaaaggttcctgtaagttgcaaattgatgcctacctctcattggcaggaacttagccctgtggtctcagcagctgtaagggaggctgggaaatgcagtcttttttctggattgccatgtgccatgctcacattctcctgctttataagatgggggaaaaggagtgtaggaggctcttcattgaatttgtcactttcagacaatgtctattatctgtgttcctggacaggtaagctcctgagagagggactttgctgtgttccttccaggagtcttagcatctagagcagcacctggcatgtagctggtgcttgattgtcgttgaatatgttttcatcccattatccacatccttcagcttgccagctcttacctttctgattccaatttggccatcctttcctctaggacagtggttctcattaattgtgcaccgtgacaaccagtcagaaatgcatatttttggttcccaccccagacctatggaactagaacctctgggggtgacctagcagtctgggtctcagtatgctttatatacagcgatctgtattttaagcaaccctgaaaggatcctgatgcctgtttaagcttcagaaccactgctcagactt

SEQ ID NO: 9294 - protein, 85 aa, Homo sapiens
MPTSHWQELSPVVSAAVREAGKCSLFSGLPCAMLTFSCFIRWGKRSVGGSSLNLSLSDNVYYLCSWTGKLLREGLCCVPSRSLSI

SEQ ID NO: 9295 - DNA, 424 bp, Homo sapiens
tgacgaagaggaagaccctcctgccaaaaggaaatgcatctttatgtcagaaacacaaagcagcccaaccaaaggggttctcatgtatcagccatcttctgtaagggtgcccagtgtgacttcggttgatcctgctgctattccgccttcattaacagactactcagtaccattccaccatacgccaatatcaagcatgtcatcagatttgccaggtttggattttctttcccttattccagttgatccccagttctacatgaatgtggtgaaacaggtagaagaaaattaagcatttctctgcttttggagtctaatgttcctgcctagtgactggtttgtaacacccccctcacccctactttgttaggaacctgcaattcctaaaagaaataaataaagctgtacccaatgtccattcttt

SEQ ID NO: 9296 - protein, 82 aa, Homo sapiens
MSETQSSPTKGVLMYQPSSVRVPSVTSVDPAAIPPSLTDYSVPFHHTPISSMSSDLPGLDFLSLIPVDPQFYMNVVKQVEEN

SEQ ID NO: 9297 - DNA, 2800 bp, Homo sapiens
gaggaagaccctcctgccaaaaggaaatgcatctttatgtcagaaacacaaagcagcccaaccaaaggggttctcatgtatcagccatcttctgtaagggtgcccagtgtgacttcggttgatcctgctgctattccgccttcattaacagactactcagtaccattccaccatacgccaatatcaagcatgtcatcagatttgccaggtttggattttctttcccttattccagttgatccccagtactgtcctcctatgtttttggatagtctcacctcacccttaacagcaagcagtacgtctgtcaccaccaccagctcccatgaaagcagtactcatgttagttcatccagcagcaggagtgagacaggggtcataaccagcagtggaagtaacattcctgacatcatctcattggactaaaggaggactcacttgattctgggaatcattcatcagaactgctttttcttggatctctagtctgtggaaacgttcttttttttttttttttaataatttggtatttattgaaagtcagatggattcttttgctttctgaggggtgaacacagaagactgcaacaagaaccaaatgacatgcaaggatttttcttaattatgctgtactctcagcatcagatacattcaaccataactgtatcttcctgagagatggatttcactttcatacgttaatggatggagtctacaaatcagtgaaaaaagtttttgttaaaataaagagcaataaaattatgtaaatattcaagtaaccttttttctaattaaaaaaaaaattgtaatcactgattctagaatgacagcaacttctgtttaaccttacgtgaaggaaaaaaaatatatggaaagaacttaatgtttgctgaatgagtcctttccatggagatttgctctgtttcattgaagtaatgaagtttcagtacgtggccaaagcttggattccacttttcgtcctgcatttccacttttcttcgtgattgcatcaaagaaaaatggcattcgtgttacttggtttttttcctgcttatcatttacactttgacgttgtttgctaatgagtgctgtgtgaagttctgggatttggctactcttcattggtgattatgtttaaaagcactatgcagattctgccctgacataaagtgtgttattatgtttttagtaattgtacatttttcattctagagttttctataaatttgaggcttgccttctcaaaaaagaaactatgcagccattgaatgaaatgtctttggggtacggtgtgactggaatgtttgttagaaatttgttcacactatcaaatattgatatcttggagccagcagaagagcagattttgggaggtggtaataacaaaatttaatttcttcccaacaacttaattttctcatttattttacagaatagtagtgaaatatttgatgaaactttgtattttggtagcactacatagaaaatgtgttttagatttatgatgatcatatttctcaccaatgtaatttcagtctcagcagtgattttcaaacttagggaaagggacagcattagattttttttttttttcatttttttaaaatgatatcttacctgaaactacaaacgacaaaagagaattagaaatgtttgaattaaagtgaagaagggttgggggagatgggcctgaacccacttcctgtctcaatccatgctaccccaaacactccagggaacctctgaggttttattgggtgcactttgaaaatttctcttctatagtgtgtttgtttgattttaaatcacagagaaaactgggttttactcttagagaaacattttcatccagttttttagtttgcttcatttgacttcctaaatcatttttgagttcacaaggatttggtacttttctgtttagctttctctctctaagctttatctaccttaaaaacaaagtcctttttttaatggccagtccaaccaattgatttctcaaactgaagtgcccaggtgtggactcatcaatttccgttagaatagggacatcctacttaagagttggtgcagctccaaggagctgacttgtccttgcttggggttttttttttttttctttcaccttctcaagtttccatggcctttgtgtgttctttttatgttgatttaaattcatatggttttccacaaatcccttctttggctacattgtctccttattcaatggattatccctttgtgggggctgcttattttaaagatgttgggggggaaacaaacccaaatctacgagcagtagttgcacatagttgccagttttaccttcttagtcattagatttccaaaccatgttgcagttttttggtccagatatagtatttctttctaataaagttttatgttgctgctctaaatacagatgcaatatttattgactctgtaatcagatagaaaaaacttaacttggtttgtgtggtatgacttataaagaaatgatgtatatttgttattttgttaccctttagattgtcagagactcccccaatttaatcaacaaagttttataaagtaaatgaaaatattaatagaaattagtttatttacttggttcttataactgatatctctgtgcttttataattgtgatttgtttttttgtttttttttctattttctgtgaacagttttaatgttcggttttggtgttttacactgaaattacatataaatttttaatttatttcatacaggcaacttgcattttaaaaaatacactttgaagtttatcatcttgaaa

SEQ ID NO: 9298 - protein, 129 aa, Homo sapiens
MSETQSSPTKGVLMYQPSSVRVPSVTSVDPAAIPPSLTDYSVPFHHTPISSMSSDLPGLDFLSLIPVDPQYCPPMFLDSLTSPLTASSTSVTTTSSHESSTHVSSSSSRSETGVITSSGSNIPDIISLD

SEQ ID NO: 9299 - DNA, 4761 bp, Homo sapiens
cggctttctccgtccataggcaccgcgtgaagggcaccgtaagaatcttcccgaatgctcctgtcacgcgtcccggccgcctcttcttcctccccgccacttcccgaggccaggcccgcggataacgcctcagttgcgacccagctctaggcagtccgcaggggcctccgccggggagggaaggcacgacctggggccgagcggggccaagccgcggggcagcacgccggggcaggcgcgggcgggcgctgtcgccgcgcggactgaaggcgcgggcggaaggcggtcgcgcgggtgggcagggggcaccgctaggggcggggcttcggcgcgtcggaggcggagctcccgcgccgttcacgtgacgggcccggctgtagcggcggcggccgcggcgtcttaagcggcgcccagtgcaggatggtgctggaggcggcggcggccgtggtggcggcagcgtcgttggcggcagcgggagtgggtgcggcggcagcggcggcggcgcccgcgggtggtataaaatggcggatttcgaagagttgaggaatatggtttctagttttagggtttctgaactacaagtattactaggctttgctggacggaataaaagtggacgcaagcatgacctcctgatgagggcgctgcatttattgaagagcggctgcagccctgcggttcagattaaaatccgagaattgtatagacgccgatatccacgaactcttgaaggactttctgatttatccacaatcaaatcatcggttttcagtttggatggtggctcatcacctgtagaacctgacttggccgtggctggaatccactcgttgccttccacttcagttacacctcactcaccatcctctcctgttggttctgtgctgcttcaagatactaagcccacatttgagatgcagcagccatctcccccaattcctcctgtccatcctgatgtgcagttaaaaaatctgcccttttatgatgtccttgatgttctcatcaagcccacgagtttagttcaaagcagtattcagcgatttcaagagaagttttttatttttgctttgacacctcaacaagttagagagatatgcatatccagggattttttgccaggtggtaggagagattatacagtccaagttcagttgagactttgcctggcagagacaagttgccctcaagaagataactatccaaatagtctatgtataaaagtaaatgggaagctatttcctttgcctggctatgcaccaccgcctaaaaatgggattgaacagaagcgccctggacgccccttgaatattacatctttagttaggttatcttcagctgtgccaaaccaaatttccatttcttgggcatcagaaattgggaagaattactctatgtctgtatatcttgtacggcagcttacatcagccatgttattacagagattaaaaatgaaaggtattagaaaccctgatcattccagagcactaattaaagaaaaacttactgcagatcctgatagtgaaattgctacaactagccttcgggtatccttgatgtgccctttaggaaaaatgaggctgacaatcccatgccgtgcagtgacttgtacacatctgcagtgttttgatgctgccctctatctacaaatgaatgagaaaaagcccacctggatttgtcctgtgtgtgacaaaaaagctgcctatgaaagtctaatattagatgggctttttatggaaattctcaatgactgttctgatgtagatgagatcaaattccaagaagatggttcttggtgtccaatgagaccgaagaaagaagctatgaaagtatccagccaaccgtgtacaaaaatagaaagttcaagcgtcctcagtaagccttgttcagtgactgtagccagtgaggcaagcaagaagaaagtagatgttattgatcttacaatagaaagctcttctgacgaagaggaagaccctcctgccaaaaggaaatgcatctttatgtcagaaacacaaagcagcccaaccaaaggggttctcatgtatcagccatcttctgtaagggtgcccagtgtgacttcggttgatcctgctgctattccgccttcattaacagactactcagtaccattccaccatacgccaatatcaagcatgtcatcagatttgccaggtttggattttctttcccttattccagttgatccccagtactgtcctcctatgtttttggatagtctcacctcacccttaacagcaagcagtacgtctgtcaccaccaccagctcccatgaaagcagtactcatgttagttcatccagcagcaggagtgagacaggggtcataaccagcagtggaagtaacattcctgacatcatctcattggactaaaggaggactcacttgattctgggaatcattcatcagaactgctttttcttggatctctagtctgtggaaacgttcttttttttttttttttaataatttggtatttattgaaagtcagatggattcttttgctttctgaggggtgaacacagaagactgcaacaagaaccaaatgacatgcaaggatttttcttaattatgctgtactctcagcatcagatacattcaaccataactgtatcttcctgagagatggatttcactttcatacgttaatggatggagtctacaaatcagtgaaaaaagtttttgttaaaataaagagcaataaaattatgtaaatattcaagtaaccttttttctaattaaaaaaaaaattgtaatcactgattctagaatgacagcaacttctgtttaaccttacgtgaaggaaaaaaaatatatggaaagaacttaatgtttgctgaatgagtcctttccatggagatttgctctgtttcattgaagtaatgaagtttcagtacgtggccaaagcttggattccacttttcgtcctgcatttccacttttcttcgtgattgcatcaaagaaaaatggcattcgtgttacttggtttttttcctgcttatcatttacactttgacgttgtttgctaatgagtgctgtgtgaagttctgggatttggctactcttcattggtgattatgtttaaaagcactatgcagattctgccctgacataaagtgtgttattatgtttttagtaattgtacatttttcattctagagttttctataaatttgaggcttgccttctcaaaaaagaaactatgcagccattgaatgaaatgtctttggggtacggtgtgactggaatgtttgttagaaatttgttcacactatcaaatattgatatcttggagccagcagaagagcagattttgggaggtggtaataacaaaatttaatttcttcccaacaacttaattttctcatttattttacagaatagtagtgaaatatttgatgaaactttgtattttggtagcactacatagaaaatgtgttttagatttatgatgatcatatttctcaccaatgtaatttcagtctcagcagtgattttcaaacttagggaaagggacagcattagattttttttttttttcatttttttaaaatgatatcttacctgaaactacaaacgacaaaagagaattagaaatgtttgaattaaagtgaagaagggttgggggagatgggcctgaacccacttcctgtctcaatccatgctaccccaaacactccagggaacctctgaggttttattgggtgcactttgaaaatttctcttctatagtgtgtttgtttgattttaaatcacagagaaaactgggttttactcttagagaaacattttcatccagttttttagtttgcttcatttgacttcctaaatcatttttgagttcacaaggatttggtacttttctgtttagctttctctctctaagctttatctaccttaaaaacaaagtcctttttttaatggccagtccaaccaattgatttctcaaactgaagtgcccaggtgtggactcatcaatttccgttagaatagggacatcctacttaagagttggtgcagctccaaggagctgacttgtccttgcttggggttttttttttttttctttcaccttctcaagtttccatggcctttgtgtgttctttttatgttgatttaaattcatatggttttccacaaatcccttctttggctacattgtctccttattcaatggattatccctttgtgggggctgcttattttaaagatgttgggggggaaacaaacccaaatctacgagcagtagttgcacatagttgccagttttaccttcttagtcattagatttccaaaccatgttgcagttttttggtccagatatagtatttctttctaataaagttttatgttgctgctctaaatacagatgcaatatttattgactctgtaatcagatagaaaaaacttaacttggtttgtgtggtatgacttataaagaaatgatgtatatttgttattttgttaccctttagattgtcagagactcccccaatttaatcaacaaagttttataaagtaaatgaaaatattaatagaaattagtttatttacttggttcttataactgatatctctgtgcttttataattgtgatttgtttttttgtttttttttctattttctgtgaacagttttaatgttcggttttggtgttttacactgaaattacatataaatttttaatttatttcatacaggcaacttgcattttaaaaaatacactttgaagtttatcatcttgaaa

SEQ ID NO: 9300 - protein, 621 aa, Homo sapiens; identical to SEQ ID NO: 1449

SEQ ID NO: 9301 - DNA, 2414 bp, Homo sapiens
gaggaagaccctcctgccaaaaggaaatgcatctttatgtcagaaacacaaagcagcccaaccaaaggggttctcatgtatcagccatcttctgtaagggtgcccagtgtgacttcggttgatcctgctgctattccgccttcattaacagactactcagtaccattccaccatacgccaatatcaagcatgtcatcagatttgccaggtttggattttctttcccttattccagttgatccccagtactgtcctcctatgtttttggatagtctcacctcacccttaacagcaagcagtacgtctgtcaccaccaccagctcccatgaaagcagtactcatgttagttcatccagcagcaggagtgagacaggggtcataaccagcagtggaagtaacattcctgacatcatctcattggactaaaggaggactcacttgattctgggaatcattcatcagaactgctttttcttggatctctagtctgtggaaacgttcttttttttttttttttaataatttggtatttattgaaagtcagatggattcttttgctttctgaggggtgaacacagaagactgcaacaagaaccaaatgacatgcaaggatttttcttaattatgctgtactctcagcatcagatacattcaaccataactgtatcttcctgagagatggatttcactttcatacgttaatggatggagtctacaaatcagtgaaaaaagtttttgttaaaataaagagcaataaaattatgtaaatattcaagtaaccttttttctaattaaaaaaaaaattgtaatcactgattctagaatgacagcaacttctgtttaaccttacgtgaaggaaaaaaaatatatggaaagaacttaatgtttgctgaatgagtcctttccatggagatttgctctgtttcattgaagtaatgaagtttcagtacgtggccaaagcttggattccacttttcgtcctgcatttccacttttcttcgtgattgcatcaaagaaaaatggcattcgtgttacttggtttttttcctgcttatcatttacactttgacgttgtttgctaatgagtgctgtgtgaagttctgggatttggctactcttcattggtgattatgtttaaaagcactatgcagattctgccctgacataaagtgtgttattatgtttttagtaattgtacatttttcattctagagttttctataaatttgaggcttgccttctcaaaaaagaaactatgcagccattgaatgaaatgtctttggggtacggtgtgactggaatgtttgttagaaatttgttcacactatcaaatattgatatcttggagccagcagaagagcagattttgggaggtggtaataacaaaatttaatttcttcccaacaacttaattttctcatttattttacagaatagtagtgaaatatttgatgaaactttgtattttggtagcactacatagaaaatgtgttttagatttatgatgatcatatttctcaccaatgtaatttcagtctcagcagtgattttcaaacttagggaaagggacagcattagattttttttttttttcatttttttaaaatgatatcttacctgaaactacaaacgacaaaagagaattagaaatgtttgaattaaagtgaagaagggttgggggagatgggcctgaacccacttcctgtctcaatccatgctaccccaaacactccagggaacctctgaggttttattgggtgcactttgaaaatttctcttctatagtgtgtttgtttgattttaaatcacagagaaaactgggttttactcttagagaaacattttcatccagttttttagtttgcttcatttgacttcctaaatcatttttgagttcacaaggatttggtacttttctgtttagctttctctctctaagctttatctaccttaaaaacaaagtcctttttttaatggccagtccaaccaattgatttctcaaactgaagtgcccaggtgtggactcatcaatttccgttagaatagggacatcctacttaagagttggtgcagctccaaggagctgacttgtccttgcttggggttttttttttttttctttcaccttctcaagtttccatggcctttgtgtgttctttttatgttgatttaaattcatatggttttccacaaatcccttctttggctacattgtctccttattcaatggattatccctttgtgggggctgcttattttaaagatgttgggggggaaacaaacccaaatctacgagcagtagttgcacatagttgccagttttaccttcttagtcattagatttccaaaccatgttgcagttttttggtccagatatagtatttctttctaataaagttttatgttgctgctct

SEQ ID NO: 9302 - protein, 129 aa, Homo sapiens; identical to SEQ ID NO: 9298

SEQ ID NO: 9303 - DNA, 4375 bp, Homo sapiens
cggctttctccgtccataggcaccgcgtgaagggcaccgtaagaatcttcccgaatgctcctgtcacgcgtcccggccgcctcttcttcctccccgccacttcccgaggccaggcccgcggataacgcctcagttgcgacccagctctaggcagtccgcaggggcctccgccggggagggaaggcacgacctggggccgagcggggccaagccgcggggcagcacgccggggcaggcgcgggcgggcgctgtcgccgcgcggactgaaggcgcgggcggaaggcggtcgcgcgggtgggcagggggcaccgctaggggcggggcttcggcgcgtcggaggcggagctcccgcgccgttcacgtgacgggcccggctgtagcggcggcggccgcggcgtcttaagcggcgcccagtgcaggatggtgctggaggcggcggcggccgtggtggcggcagcgtcgttggcggcagcgggagtgggtgcggcggcagcggcggcggcgcccgcgggtggtataaaatggcggatttcgaagagttgaggaatatggtttctagttttagggtttctgaactacaagtattactaggctttgctggacggaataaaagtggacgcaagcatgacctcctgatgagggcgctgcatttattgaagagcggctgcagccctgcggttcagattaaaatccgagaattgtatagacgccgatatccacgaactcttgaaggactttctgatttatccacaatcaaatcatcggttttcagtttggatggtggctcatcacctgtagaacctgacttggccgtggctggaatccactcgttgccttccacttcagttacacctcactcaccatcctctcctgttggttctgtgctgcttcaagatactaagcccacatttgagatgcagcagccatctcccccaattcctcctgtccatcctgatgtgcagttaaaaaatctgcccttttatgatgtccttgatgttctcatcaagcccacgagtttagttcaaagcagtattcagcgatttcaagagaagttttttatttttgctttgacacctcaacaagttagagagatatgcatatccagggattttttgccaggtggtaggagagattatacagtccaagttcagttgagactttgcctggcagagacaagttgccctcaagaagataactatccaaatagtctatgtataaaagtaaatgggaagctatttcctttgcctggctatgcaccaccgcctaaaaatgggattgaacagaagcgccctggacgccccttgaatattacatctttagttaggttatcttcagctgtgccaaaccaaatttccatttcttgggcatcagaaattgggaagaattactctatgtctgtatatcttgtacggcagcttacatcagccatgttattacagagattaaaaatgaaaggtattagaaaccctgatcattccagagcactaattaaagaaaaacttactgcagatcctgatagtgaaattgctacaactagccttcgggtatccttgatgtgccctttaggaaaaatgaggctgacaatcccatgccgtgcagtgacttgtacacatctgcagtgttttgatgctgccctctatctacaaatgaatgagaaaaagcccacctggatttgtcctgtgtgtgacaaaaaagctgcctatgaaagtctaatattagatgggctttttatggaaattctcaatgactgttctgatgtagatgagatcaaattccaagaagatggttcttggtgtccaatgagaccgaagaaagaagctatgaaagtatccagccaaccgtgtacaaaaatagaaagttcaagcgtcctcagtaagccttgttcagtgactgtagccagtgaggcaagcaagaagaaagtagatgttattgatcttacaatagaaagctcttctgacgaagaggaagaccctcctgccaaaaggaaatgcatctttatgtcagaaacacaaagcagcccaaccaaaggggttctcatgtatcagccatcttctgtaagggtgcccagtgtgacttcggttgatcctgctgctattccgccttcattaacagactactcagtaccattccaccatacgccaatatcaagcatgtcatcagatttgccaggtttggattttctttcccttattccagttgatccccagtactgtcctcctatgtttttggatagtctcacctcacccttaacagcaagcagtacgtctgtcaccaccaccagctcccatgaaagcagtactcatgttagttcatccagcagcaggagtgagacaggggtcataaccagcagtggaagtaacattcctgacatcatctcattggactaaaggaggactcacttgattctgggaatcattcatcagaactgctttttcttggatctctagtctgtggaaacgttcttttttttttttttttaataatttggtatttattgaaagtcagatggattcttttgctttctgaggggtgaacacagaagactgcaacaagaaccaaatgacatgcaaggatttttcttaattatgctgtactctcagcatcagatacattcaaccataactgtatcttcctgagagatggatttcactttcatacgttaatggatggagtctacaaatcagtgaaaaaagtttttgttaaaataaagagcaataaaattatgtaaatattcaagtaaccttttttctaattaaaaaaaaaattgtaatcactgattctagaatgacagcaacttctgtttaaccttacgtgaaggaaaaaaaatatatggaaagaacttaatgtttgctgaatgagtcctttccatggagatttgctctgtttcattgaagtaatgaagtttcagtacgtggccaaagcttggattccacttttcgtcctgcatttccacttttcttcgtgattgcatcaaagaaaaatggcattcgtgttacttggtttttttcctgcttatcatttacactttgacgttgtttgctaatgagtgctgtgtgaagttctgggatttggctactcttcattggtgattatgtttaaaagcactatgcagattctgccctgacataaagtgtgttattatgtttttagtaattgtacatttttcattctagagttttctataaatttgaggcttgccttctcaaaaaagaaactatgcagccattgaatgaaatgtctttggggtacggtgtgactggaatgtttgttagaaatttgttcacactatcaaatattgatatcttggagccagcagaagagcagattttgggaggtggtaataacaaaatttaatttcttcccaacaacttaattttctcatttattttacagaatagtagtgaaatatttgatgaaactttgtattttggtagcactacatagaaaatgtgttttagatttatgatgatcatatttctcaccaatgtaatttcagtctcagcagtgattttcaaacttagggaaagggacagcattagattttttttttttttcatttttttaaaatgatatcttacctgaaactacaaacgacaaaagagaattagaaatgtttgaattaaagtgaagaagggttgggggagatgggcctgaacccacttcctgtctcaatccatgctaccccaaacactccagggaacctctgaggttttattgggtgcactttgaaaatttctcttctatagtgtgtttgtttgattttaaatcacagagaaaactgggttttactcttagagaaacattttcatccagttttttagtttgcttcatttgacttcctaaatcatttttgagttcacaaggatttggtacttttctgtttagctttctctctctaagctttatctaccttaaaaacaaagtcctttttttaatggccagtccaaccaattgatttctcaaactgaagtgcccaggtgtggactcatcaatttccgttagaatagggacatcctacttaagagttggtgcagctccaaggagctgacttgtccttgcttggggttttttttttttttctttcaccttctcaagtttccatggcctttgtgtgttctttttatgttgatttaaattcatatggttttccacaaatcccttctttggctacattgtctccttattcaatggattatccctttgtgggggctgcttattttaaagatgttgggggggaaacaaacccaaatctacgagcagtagttgcacatagttgccagttttaccttcttagtcattagatttccaaaccatgttgcagttttttggtccagatatagtatttctttctaataaagttttatgttgctgctct

SEQ ID NO: 9304 - protein, 621 aa, Homo sapiens; identical to SEQ ID NO: 1449

SEQ ID NO: 9305 - DNA, 773 bp, Homo sapiens
gaggaagaccctcctgccaaaaggaaatgcatctttatgtcagaaacacaaagcagcccaaccaaaggggttctcatgtatcagccatcttctgtaagggtgcccagtgtgacttcggttgatcctgctgctattccgccttcattaacagactactcagtaccattccaccatacgccaatatcaagcatgtcatcagatttgccaggtttggattttctttcccttattccagttgatccccagtactgtcctcctatgtttttggatagtctcacctcacccttaacagcaagcagtacgtctgtcaccaccaccagctcccatgaaagcagtactcatgttagttcatccagcagcaggagtgagacaggggtcataaccagcagtggaagtaacattcctgacatcatctcattggactaaaggaggactcacttgattctgggaatcattcatcagaactgctttttcttggatctctagtctgtggaaacgttcttttttttttttttttaataatttggtatttattgaaagtcagatggattcttttgctttctgaggggtgaacacagaagactgcaacaagaaccaaatgacatgcaaggatttttcttaattatgctgtactctcagcatcagatacattcaaccataactgtatcttcctgagagatggatttcactttcatacgttaatggatggagtctacaaatcagtgaaaaaagtttttgttaaaataaagagcaataaaattatgtaaatattc

SEQ ID NO: 9306 - protein, 129 aa, Homo sapiens; identical to SEQ ID NO: 9298

SEQ ID NO: 9307 - DNA, 2734 bp, Homo sapiens
cggctttctccgtccataggcaccgcgtgaagggcaccgtaagaatcttcccgaatgctcctgtcacgcgtcccggccgcctcttcttcctccccgccacttcccgaggccaggcccgcggataacgcctcagttgcgacccagctctaggcagtccgcaggggcctccgccggggagggaaggcacgacctggggccgagcggggccaagccgcggggcagcacgccggggcaggcgcgggcgggcgctgtcgccgcgcggactgaaggcgcgggcggaaggcggtcgcgcgggtgggcagggggcaccgctaggggcggggcttcggcgcgtcggaggcggagctcccgcgccgttcacgtgacgggcccggctgtagcggcggcggccgcggcgtcttaagcggcgcccagtgcaggatggtgctggaggcggcggcggccgtggtggcggcagcgtcgttggcggcagcgggagtgggtgcggcggcagcggcggcggcgcccgcgggtggtataaaatggcggatttcgaagagttgaggaatatggtttctagttttagggtttctgaactacaagtattactaggctttgctggacggaataaaagtggacgcaagcatgacctcctgatgagggcgctgcatttattgaagagcggctgcagccctgcggttcagattaaaatccgagaattgtatagacgccgatatccacgaactcttgaaggactttctgatttatccacaatcaaatcatcggttttcagtttggatggtggctcatcacctgtagaacctgacttggccgtggctggaatccactcgttgccttccacttcagttacacctcactcaccatcctctcctgttggttctgtgctgcttcaagatactaagcccacatttgagatgcagcagccatctcccccaattcctcctgtccatcctgatgtgcagttaaaaaatctgcccttttatgatgtccttgatgttctcatcaagcccacgagtttagttcaaagcagtattcagcgatttcaagagaagttttttatttttgctttgacacctcaacaagttagagagatatgcatatccagggattttttgccaggtggtaggagagattatacagtccaagttcagttgagactttgcctggcagagacaagttgccctcaagaagataactatccaaatagtctatgtataaaagtaaatgggaagctatttcctttgcctggctatgcaccaccgcctaaaaatgggattgaacagaagcgccctggacgccccttgaatattacatctttagttaggttatcttcagctgtgccaaaccaaatttccatttcttgggcatcagaaattgggaagaattactctatgtctgtatatcttgtacggcagcttacatcagccatgttattacagagattaaaaatgaaaggtattagaaaccctgatcattccagagcactaattaaagaaaaacttactgcagatcctgatagtgaaattgctacaactagccttcgggtatccttgatgtgccctttaggaaaaatgaggctgacaatcccatgccgtgcagtgacttgtacacatctgcagtgttttgatgctgccctctatctacaaatgaatgagaaaaagcccacctggatttgtcctgtgtgtgacaaaaaagctgcctatgaaagtctaatattagatgggctttttatggaaattctcaatgactgttctgatgtagatgagatcaaattccaagaagatggttcttggtgtccaatgagaccgaagaaagaagctatgaaagtatccagccaaccgtgtacaaaaatagaaagttcaagcgtcctcagtaagccttgttcagtgactgtagccagtgaggcaagcaagaagaaagtagatgttattgatcttacaatagaaagctcttctgacgaagaggaagaccctcctgccaaaaggaaatgcatctttatgtcagaaacacaaagcagcccaaccaaaggggttctcatgtatcagccatcttctgtaagggtgcccagtgtgacttcggttgatcctgctgctattccgccttcattaacagactactcagtaccattccaccatacgccaatatcaagcatgtcatcagatttgccaggtttggattttctttcccttattccagttgatccccagtactgtcctcctatgtttttggatagtctcacctcacccttaacagcaagcagtacgtctgtcaccaccaccagctcccatgaaagcagtactcatgttagttcatccagcagcaggagtgagacaggggtcataaccagcagtggaagtaacattcctgacatcatctcattggactaaaggaggactcacttgattctgggaatcattcatcagaactgctttttcttggatctctagtctgtggaaacgttcttttttttttttttttaataatttggtatttattgaaagtcagatggattcttttgctttctgaggggtgaacacagaagactgcaacaagaaccaaatgacatgcaaggatttttcttaattatgctgtactctcagcatcagatacattcaaccataactgtatcttcctgagagatggatttcactttcatacgttaatggatggagtctacaaatcagtgaaaaaagtttttgttaaaataaagagcaataaaattatgtaaatattc

SEQ ID NO: 9308 - protein, 621 aa, Homo sapiens; identical to SEQ ID NO: 1449

SEQ ID NO: 9309 - DNA, 621 bp, Homo sapiens
caatagaaagctcttctgacgaagaggaagaccctcctgccaaaaggaaatgcatctttatgtcagaaacacaaagcagcccaaccaaaggggttctcatgtatcagccatcttctgtaagggtgcccagtgtgacttcggttgatcctgctgctattccgccttcattaacagactactcagtaccattccaccatacgccaatatcaagcatgtcatcagatttgccaggagaacaaagaagaaatgatattaataatgaactgaagcttggaacatcttctgatactgtgcaacagtgaatacaaaataaaacaaataatttgtatttatggagtggaaaacagcttatttcaaggaaaaatatgactgccttattattgctagtgccatattgtcaggtgcgaatggtgctcaaaagttgtatcattaaaatttgaaagtgctaaacatttacatatttaatcatgtagcagttatgttttgttaaaagtttatgactcaaataaggaaaatgtgttgtcatcaatgagaaaaaatctaatgagtcaatttcacagtgaagcacttaaaatttttaaattaaaattttatcagtgttaataaaataatgttaacact

SEQ ID NO: 9310 - protein, 80 aa, Homo sapiens
MSETQSSPTKGVLMYQPSSVRVPSVTSVDPAAIPPSLTDYSVPFHHTPISSMSSDLPGEQRRNDINNELKLGTSSDTVQQ

SEQ ID NO: 9311 - DNA, 827 bp, Homo sapiens
gggtttctgaactacaagtattactaggctttgctggacggaataaaagtggacgcaagcatgacctcctgatgagggcgctgcatttattgaagagcggctgcagccctgcggttcagattaaaatccgagaattgtatagacgccgatatccacgaactcttgaaggactttctgatttatccacaatcaaatcatcggttttcagtttggatggtggctcatcacctgtagaacctgacttggccgtggctggaatccactcgttgccttccacttcagttacacctcactcaccatcctctcctgttggttctgtgctgcttcaagatactaagcccacatttgagatgcagcagccatctcccccaattcctcctgtccatcctgatgtgcagttaaaaaatctgcccttttatgatgtccttgatgttctcatcaagcccacgagtttaggtaagttgaggcaagcaagaagaaagtagatgttattgatcttacaatagaaagctcttctgacgaagaggaagaccctcctgccaaaaggaaatgcatctttatgtcagaaacacaaagcagcccaaccaaaggggttctcatgtatcagccatcttctgtaagggtgcccagtgtgacttcggttgatcctgctgctattccgccttcattaacagactactcagtaccattccaccatacgccaatatcaagcatgtcatcagatttgccaggagaacaaagaagaaatgatattaataatgaactgaagcttggaacatcttctgatactgtgcaacagtgaatacaaaataaaacaaataatttgt

SEQ ID NO: 9312 - protein, 137 aa, Homo sapiens
MRALHLLKSGCSPAVQIKIRELYRRRYPRTLEGLSDLSTIKSSVFSLDGGSSPVEPDLAVAGIHSLPSTSVTPHSPSSPVGSVLLQDTKPTFEMQQPSPPIPPVHPDVQLKNLPFYDVLDVLIKPTSLGKLRQARRK

SEQ ID NO: 9313 - DNA, 2265 bp, Homo sapiens
cggctttctccgtccataggcaccgcgtgaagggcaccgtaagaatcttcccgaatgctcctgtcacgcgtcccggccgcctcttcttcctccccgccacttcccgaggccaggcccgcggataacgcctcagttgcgacccagctctaggcagtccgcaggggcctccgccggggagggaaggcacgacctggggccgagcggggccaagccgcggggcagcacgccggggcaggcgcgggcgggcgctgtcgccgcgcggactgaaggcgcgggcggaaggcggtcgcgcgggtgggcagggggcaccgctaggggcggggcttcggcgcgtcggaggcggagctcccgcgccgttcacgtgacgggcccggctgtagcggcggcggccgcggcgtcttaagcggcgcccagtgcaggatggtgctggaggcggcggcggccgtggtggcggcagcgtcgttggcggcagcgggagtgggtgcggcggcagcggcggcggcgcccgcgggtggtataaaatggcggatttcgaagagttgaggaatatggtttctagttttagggtttctgaactacaagtattactaggctttgctggacggaataaaagtggacgcaagcatgacctcctgatgagggcgctgcatttattgaagagcggctgcagccctgcggttcagattaaaatccgagaattgtatagacgccgatatccacgaactcttgaaggactttctgatttatccacaatcaaatcatcggttttcagtttggatggtggctcatcacctgtagaacctgacttggccgtggctggaatccactcgttgccttccacttcagttacacctcactcaccatcctctcctgttggttctgtgctgcttcaagatactaagcccacatttgagatgcagcagccatctcccccaattcctcctgtccatcctgatgtgcagttaaaaaatctgcccttttatgatgtccttgatgttctcatcaagcccacgagtttagttcaaagcagtattcagcgatttcaagagaagttttttatttttgctttgacacctcaacaagttagagagatatgcatatccagggattttttgccaggtggtaggagagattatacagtccaagttcagttgagactttgcctggcagagacaagttgccctcaagaagataactatccaaatagtctatgtataaaagtaaatgggaagctatttcctttgcctggctatgcaccaccgcctaaaaatgggattgaacagaagcgccctggacgccccttgaatattacatctttagttaggttatcttcagctgtgccaaaccaaatttccatttcttgggcatcagaaattgggaagaattactctatgtctgtatatcttgtacggcagcttacatcagccatgttattacagagattaaaaatgaaaggtattagaaaccctgatcattccagagcactaattaaagaaaaacttactgcagatcctgatagtgaaattgctacaactagccttcgggtatccttgatgtgccctttaggaaaaatgaggctgacaatcccatgccgtgcagtgacttgtacacatctgcagtgttttgatgctgccctctatctacaaatgaatgagaaaaagcccacctggatttgtcctgtgtgtgacaaaaaagctgcctatgaaagtctaatattagatgggctttttatggaaattctcaatgactgttctgatgtagatgagatcaaattccaagaagatggttcttggtgtccaatgagaccgaagaaagaagctatgaaagtatccagccaaccgtgtacaaaaatagaaagttcaagcgtcctcagtaagccttgttcagtgactgtagccagtgaggcaagcaagaagaaagtagatgttattgatcttacaatagaaagctcttctgacgaagaggaagaccctcctgccaaaaggaaatgcatctttatgtcagaaacacaaagcagcccaaccaaaggggttctcatgtatcagccatcttctgtaagggtgcccagtgtgacttcggttgatcctgctgctattccgccttcattaacagactactcagtaccattccaccatacgccaatatcaagcatgtcatcagatttgccaggagaacaaagaagaaatgatattaataatgaactgaagcttggaacatcttctgatactgtgcaacagtgaatacaaaataaaacaaataatttgt

SEQ ID NO: 9314 - protein, 572 aa, Homo sapiens; identical to SEQ ID NO: 1451

SEQ ID NO: 9315 - DNA, 2227 bp, Homo sapiens
cggctttctccgtccataggcaccgcgtgaagggcaccgtaagaatcttcccgaatgctcctgtcacgcgtcccggccgcctcttcttcctccccgccacttcccgaggccaggcccgcggataacgcctcagttgcgacccagctctaggcagtccgcaggggcctccgccggggagggaaggcacgacctggggccgagcggggccaagccgcggggcagcacgccggggcaggcgcgggcgggcgctgtcgccgcgcggactgaaggcgcgggcggaaggcggtcgcgcgggtgggcagggggcaccgctaggggcggggcttcggcgcgtcggaggcggagctcccgcgccgttcacgtgacgggcccggctgtagcggcggcggccgcggcgtcttaagcggcgcccagtgcaggatggtgctggaggcggcggcggccgtggtggcggcagcgtcgttggcggcagcgggagtgggtgcggcggcagcggcggcggcgcccgcgggtggtataaaatggcggatttcgaagagttgaggaatatggtttctagttttagggtttctgaactacaagtattactaggctttgctggacggaataaaagtggacgcaagcatgacctcctgatgagggcgctgcatttattgaagagcggctgcagccctgcggttcagattaaaatccgagaattgtatagacgccgatatccacgaactcttgaaggactttctgatttatccacaatcaaatcatcggttttcagtttggatggtggctcatcacctgtagaacctgacttggccgtggctggaatccactcgttgccttccacttcagttacacctcactcaccatcctctcctgttggttctgtgctgcttcaagatactaagcccacatttgagatgcagcagccatctcccccaattcctcctgtccatcctgatgtgcagttaaaaaatctgcccttttatgatgtccttgatgttctcatcaagcccacgagtttagttcaaagcagtattcagcgatttcaagagaagttttttatttttgctttgacacctcaacaagttagagagatatgcatatccagggattttttgccaggtggtaggagagattatacagtccaagttcagttgagactttgcctggcagagacaagttgccctcaagaagataactatccaaatagtctatgtataaaagtaaatgggaagctatttcctttgcctggctatgcaccaccgcctaaaaatgggattgaacagaagcgccctggacgccccttgaatattacatctttagttaggttatcttcagctgtgccaaaccaaatttccatttcttgggcatcagaaattgggaagaattactctatgtctgtatatcttgtacggcagcttacatcagccatgttattacagagattaaaaatgaaaggtattagaaaccctgatcattccagagcactaattaaagaaaaacttactgcagatcctgatagtgaaattgctacaactagccttcgggtatccttgatgtgccctttaggaaaaatgaggctgacaatcccatgccgtgcagtgacttgtacacatctgcagtgttttgatgctgccctctatctacaaatgaatgagaaaaagcccacctggatttgtcctgtgtgtgacaaaaaagctgcctatgaaagtctaatattagatgggctttttatggaaattctcaatgactgttctgatgtagatgagatcaaattccaagaagatggttcttggtgtccaatgagaccgaagaaagaagctatgaaagtatccagccaaccgtgtacaaaaatagaaagttcaagcgtcctcagtaagccttgttcagtgactgtagccagtgaggcaagcaagaagaaagtagatgttattgatcttacaatagaaagctcttctgacgaagaggaagaccctcctgccaaaaggaaatgcatctttatgtcagaaacacaaagcagcccaaccaaagggtttgttaatttatagttcactattgttcattacccttgcaactaattgctcttggatagatttataaatgtctctttgggaaatggcataactgtagaaggctattttaatttgcctttgttgagttgaaatattttcgagtaagcacattgtttataggaagcaaattttgatggagaaaatatttacatctttgg

SEQ ID NO: 9316 - protein, 507 aa, Homo sapiens
MADFEELRNMVSSFRVSELQVLLGFAGRNKSGRKHDLLMRALHLLKSGCSPAVQIKIRELYRRRYPRTLEGLSDLSTIKSSVFSLDGGSSPVEPDLAVAGIHSLPSTSVTPHSPSSPVGSVLLQDTKPTFEMQQPSPPIPPVHPDVQLKNLPFYDVLDVLIKPTSLVQSSIQRFQEKFFIFALTPQQVREICISRDFLPGGRRDYTVQVQLRLCLAETSCPQEDNYPNSLCIKVNGKLFPLPGYAPPPKNGIEQKRPGRPLNITSLVRLSSAVPNQISISWASEIGKNYSMSVYLVRQLTSAMLLQRLKMKGIRNPDHSRALIKEKLTADPDSEIATTSLRVSLMCPLGKMRLTIPCRAVTCTHLQCFDAALYLQMNEKKPTWICPVCDKKAAYESLILDGLFMEILNDCSDVDEIKFQEDGSWCPMRPKKEAMKVSSQPCTKIESSSVLSKPCSVTVASEASKKKVDVIDLTIESSSDEEEDPPAKRKCIFMSETQSSPTKGFVNL

SEQ ID NO: 9317 - DNA, 1398 bp, Homo sapiens
agcacctagaactctttgcagtcaaacctacccaacccatccaggagctgctacacattgaggaaggggcagaatgaatgctgggaagcaactacaaagaacactgcacaatatggtttctagttttagggtttctgaactacaagtattactaggctttgctggacggaataaaagtggacgcaagcatgacctcctgatgagggcgctgcatttattgaagagcggctgcagccctgcggttcagattaaaatccgagaattgtatagacgccgatatccacgaactcttgaaggactttctgatttatccacaatcaaatcatcggttttcagtttggatggtggctcatcacctgtagaacctgacttggccgtggctggaatccactcgttgccttccacttcagttacacctcactcaccatcctctcctgttggttctgtgctgcttcaagatactaagcccacatttgagatgcagcagccatctcccccaattcctcctgtccatcctgatgtgcagttaaaaaatctgcccttttatgatgtccttgatgttctcatcaagcccacgagtttagttcaaagcagtattcagcgatttcaagagaagttttttatttttgctttgacacctcaacaagttagagagatatgcatatccagggattttttgccaggtggtaggagagattatacagtccaagttcagttgagactttgcctggcagagacaagttgccctcaagaagataactatccaaatagtctatgtataaaagtaaatgggaagctatttcctttgcctggctatgcaccaccgcctaaaaatgggattgaacagaagcgccctggacgccccttgaatattacatctttagttaggttatcttcagctgtgccaaaccaaatttccatttcttgggcatcagaaattgggaagaattactctatgtctgtatatcttgtacggcagcttacatcagccatgttattacagagattaaaaatgaaaggtattagaaaccctgatcattccagagcactaattaaagaaaaacttactgcagatcctgatagtgaaattgctacaactagccttcgggtatccttgatgtgccctttaggaaaaatgaggctgacaatcccatgccgtgcagtgacttgtacacatctgcagtgttttgatgctgccctctatctacaaatgaatgagaaaaagcccacctggatttgtcctgtgtgtgacaaaaaagctgcctatgaaagtctaatattagatgggtaagtatatcccttttaacagctgatatggactaatacaacagctgttggcaatgcctttgttcactacaacttactgaactaaattctaaataaattctactctagcat

SEQ ID NO: 9318 - protein, 405 aa, Homo sapiens
MNAGKQLQRTLHNMVSSFRVSELQVLLGFAGRNKSGRKHDLLMRALHLLKSGCSPAVQIKIRELYRRRYPRTLEGLSDLSTIKSSVFSLDGGSSPVEPDLAVAGIHSLPSTSVTPHSPSSPVGSVLLQDTKPTFEMQQPSPPIPPVHPDVQLKNLPFYDVLDVLIKPTSLVQSSIQRFQEKFFIFALTPQQVREICISRDFLPGGRRDYTVQVQLRLCLAETSCPQEDNYPNSLCIKVNGKLFPLPGYAPPPKNGIEQKRPGRPLNITSLVRLSSAVPNQISISWASEIGKNYSMSVYLVRQLTSAMLLQRLKMKGIRNPDHSRALIKEKLTADPDSEIATTSLRVSLMCPLGKMRLTIPCRAVTCTHLQCFDAALYLQMNEKKPTWICPVCDKKAAYESLILDG

SEQ ID NO: 9319 - DNA, 515 bp, Homo sapiens
tgattgaccattccatggaagttattttgaatgttatttttagaaaccagagtttcttaaataagtatttcatgtaaacaaagagaatattatctctcatctttaatgcaggttttttttgtttgtttgtagaattactctatgtctgtatatcttgtacggcagcttacatcagccatgttattacagagattaaaaatgaaaggtattagaaaccctgatcattccagagcactaattaaagaaaaacttactgcagatcctgatagtgaaattgctacaactagccttcgggtatccttgatgtgccctgtaagtaaagcaacaaaacattttggggaatttgactttttataaatgattaactttcctataaaagtaagtgtgggaatgaatgatatattatgaagaatgctgaacttttgtcttttcccattaaggaatcttcatgattaagtcacaattctttgtattatttgggcatgcaaagaatacaaagaagagggaagatagct

SEQ ID NO: 9320 - protein, 71 aa, Homo sapiens
MSVYLVRQLTSAMLLQRLKMKGIRNPDHSRALIKEKLTADPDSEIATTSLRVSLMCPVSKATKHFGEFDFL

SEQ ID NO: 9321 - DNA, 2099 bp, Homo sapiens
gcccccgccgcccccgggccctgatggactgaatgaaggctgcctacaccgcctatcgatgcctcaccaaagacctagaaggctgcgccatgaacccggagctgacaatggaaagtctgggcactttgcacgggccggccggcggcggcagtggcgggggcggcggcgggggcggcgggggcggcggcgggggcccgggccatgagcaggagctgctggccagccccagcccccaccacgcgggccgcggcgccgctggctcgctgcggggccctccgccgcctccaaccgcgcaccaggagctgggcacggcggcagcggcggcagcggcggcgtcgcgctcggccatggtcaccagcatggcctcgatcctggacggcggcgactaccggcccgagctctccatcccgctgcaccacgccatgagcatgtcctgcgactcgtctccgcctggcatgggcatgagcaacacctacaccacgctgacaccgctccagccgctgccacccatctccaccgtgtctgacaagttccaccaccctcacccgcaccaccatccgcaccaccaccaccaccaccaccaccagcgcctgtccggcaacgtcagcggcagcttcaccctcatgcgcgacgagcgcgggctcccggccatgaacaacctctacagtccctacaaggagatgcccggcatgagccagagcctgtccccgctggccgccacgccgctgggcaacgggctaggcggcctccacaacgcgcagcagagtctgcccaactacggtccgccgggccacgacaaaatgctcagccccaacttcgacgcgcaccacactgccatgctgacccgcggtgagcaacacctgtcccgcggcctgggcaccccacctgcggccatgatgtcgcacctgaacggcctgcaccacccgggccacactcagtctcacgggccggtgctggcacccagtcgcgagcggccaccctcgtcctcatcgggctcgcaggtggccacgtcgggccagctggaagaaatcaacaccaaagaggtggcccagcgcatcacagcggagctgaagcgctacagtatcccccaggcgatctttgcgcagagggtgctgtgccggtctcaggggactctctccgacctgctccggaatccaaaaccgtggagtaaactcaaatctggcagggagaccttccgcaggatgtggaagtggcttcaggagcccgagttccagcgcatgtccgccttacgcctggcagcgtgcaaacgcaaagagcaagaaccaaacaaagacaggaacaattcccagaagaagtcccgcctggtgttcactgacctccaacgccgaacactcttcgccatcttcaaggagaacaaacgcccgtcaaaggagatgcagatcaccatttcccagcagctgggcctggagctcacaaccgtcagcaacttcttcatgaacgcccggcgccgcagcctggagaagtggcaagacgatctgagcacagggggctcctcgtccacctccagcacgtgtaccaaagcatgatggaaggactctcacttgggcacaagtcacctccaaatgaggacaacagataccaaaagaaaacaaaggaaaaagacaccggattcctagctggggcccttcactggtgatttgaaagcacaattctcttgcaaagaaacttatattctagctgtaatcataggccaggtgttcttcttttgtttttaatggctatggagtccaagtgcaagctgaaaaattaatctcttagaaccagacactgttctctgagcatgctaagcatcccagaaacccaaatggggccttcctggagcgagttaattccagtatggtgtcaaccaagctcgggattgcttaaaatatcatccatcccacttcaggtcctgtcagcttcttgcagtcagagttcctatgagtaacaataggagtttggcctatgtaaggactctgagtttaggcttccaagatacaacaataagagaagaatctagcaacgagaatgacctcatttgctttccacatgcttagcctcattataccatgttatgtccaagttcacagccacaacat

SEQ ID NO: 9322 - protein, 504 aa, Homo sapiens; identical to SEQ ID NO: 1453

SEQ ID NO: 9323 - DNA, 1924 bp, Homo sapiens
gctgcctacaccgcctatcgatgcctcaccaaagacctagaaggctgcgccatgaacccggagctgacaatggaaagtctgggcactttgcacgggccctccgccgcctccaaccgcgcaccaggagctgggcacggcggcagcggcggcagcggcggcgtcgcgctcggccatggtcaccagcatggcctcgatcctggacggcggcgactaccggcccgagctctccatcccgctgcaccacgccatgagcatgtcctgcgactcgtctccgcctggcatgggcatgagcaacacctacaccacgctgacaccgctccagccgctgccacccatctccaccgtgtctgacaagttccaccaccctcacccgcaccaccatccgcaccaccaccaccaccaccaccaccagcgcctgtccggcaacgtcagcggcagcttcaccctcatgcgcgacgagcgcgggctcccggccatgaacaacctctacagtccctacaaggagatgcccggcatgagccagagcctgtccccgctggccgccacgccgctgggcaacgggctaggcggcctccacaacgcgcagcagagtctgcccaactacggtccgccgggccacgacaaaatgctcagccccaacttcgacgcgcaccacactgccatgctgacccgcggtgagcaacacctgtcccgcggcctgggcaccccacctgcggccatgatgtcgcacctgaacggcctgcaccacccgggccacactcagtctcacgggccggtgctggcacccagtcgcgagcggccaccctcgtcctcatcgggctcgcaggtggccacgtcgggccagctggaagaaatcaacaccaaagaggtggcccagcgcatcacagcggagctgaagcgctacagtatcccccaggcgatctttgcgcagagggtgctgtgccggtctcaggggactctctccgacctgctccggaatccaaaaccgtggagtaaactcaaatctggcagggagaccttccgcaggatgtggaagtggcttcaggagcccgagttccagcgcatgtccgccttacgcctggcagcgtgcaaacgcaaagagcaagaaccaaacaaagacaggaacaattcccagaagaagtcccgcctggtgttcactgacctccaacgccgaacactcttcgccatcttcaaggagaacaaacgcccgtcaaaggagatgcagatcaccatttcccagcagctgggcctggagctcacaaccgtcagcaacttcttcatgaacgcccggcgccgcagcctggagaagtggcaagacgatctgagcacagggggctcctcgtccacctccagcacgtgtaccaaagcatgatggaaggactctcacttgggcacaagtcacctccaaatgaggacaacagataccaaaagaaaacaaaggaaaaagacaccggattcctagctggggcccttcactggtgatttgaaagcacaattctcttgcaaagaaacttatattctagctgtaatcataggccaggtgttcttcttttgtttttaatggctatggagtccaagtgcaagctgaaaaattaatctcttagaaccagacactgttctctgagcatgctaagcatcccagaaacccaaatggggccttcctggagcgagttaattccagtatggtgtcaaccaagctcgggattgcttaaaatatcatccatcccacttcaggtcctgtcagcttcttgcagtcagagttcctatgagtaacaataggagtttggcctatgtaaggactctgagtttaggcttccaagatacaacaataagagaagaatctagcaacgagaatgacctcatttgctttccacatgcttagcctcattataccatgttatgtccaagttcacagccacaacat

SEQ ID NO: 9324 - protein, 399 aa, Homo sapiens
MVTSMASILDGGDYRPELSIPLHHAMSMSCDSSPPGMGMSNTYTTLTPLQPLPPISTVSDKFHHPHPHHHPHHHHHHHHQRLSGNVSGSFTLMRDERGLPAMNNLYSPYKEMPGMSQSLSPLAATPLGNGLGGLHNAQQSLPNYGPPGHDKMLSPNFDAHHTAMLTRGEQHLSRGLGTPPAAMMSHLNGLHHPGHTQSHGPVLAPSRERPPSSSSGSQVATSGQLEEINTKEVAQRITAELKRYSIPQAIFAQRVLCRSQGTLSDLLRNPKPWSKLKSGRETFRRMWKWLQEPEFQRMSALRLAACKRKEQEPNKDRNNSQKKSRLVFTDLQRRTLFAIFKENKRPSKEMQITISQQLGLELTTVSNFFMNARRRSLEKWQDDLSTGGSSSTSSTCTKA

SEQ ID NO: 9325 - DNA, 579 bp, Homo sapiens
aatcacccgctaccaagccctctcccttgacacatggggattacaattcaagatgagatttgggtggagacgcagccaaaccataacactcagaatgtttaacagggaggaaccctatcttctgggagctgcaaaatatgcttgcaccaaaaagtaagccaaggaaacagggaacgaagtaaaaaaccaagcacgtttcatgtgcctgtgagatgcctggattcttcaagatggcgagacccaaggaaagaaaggtcaagttgtcggcaagtcacctcaggacttttctggctactttatggaaataaaatcctgaggctggcccgttagggaactactaaaattgtccaaataagaaatgatagagtgttggatcaaaaggcttcagagttctacatcgtatcctacttacagccctaaatacctgttaactgccaccccctggacagattattacagtgacaacagaaatataagtcacataaggagctgctgaatgcactcaagactcaacaatctccaaagatactggaaggcacgaatggaaatctggactctgacaactgtccttagcatgtt

SEQ ID NO: 9326 - protein, 45 aa, Homo sapiens
MIECWIKRLQSSTSYPTYSPKYLLTATPWTDYYSDNRNISHIRSC

SEQ ID NO: 9327 - DNA, 2720 bp, Homo sapiens
acagaaagagccaggatcccagactgtgctgaagcttcatgagacctctcctcgtctgtgcacgaaagaggagccggacacagagtgtccagccgactctggagcccaggctgttgcttcccggtctggtggtgagtcctccattgtctgatgtgggtaagtccaagaccaaggagccagcagattcagagtccagggagggctgttcctgatttgcagatggcgccttctctttatgtcttcacaagattgtgaagcctgtagcttggaagatacaggacataggtgaaagtgtttgtaccattcatttaaaggcataaatgtccaatggggccatcttgtgatacatgcactgtcacaggaaaagtttccaggaaaagtcaagccagggcttcacagaagatcaaaagaaagagacaaggagaagctaagtgtattagtcaggattctctaagggacagaactaatagaatatatatacacacacaaacacacacacacacacatatatatacatataaataaaagggagtttattaaggagtattaactcacacaatcacaaggtcccacaacaggccgggccatctgtaagctgaggaacaaggaagccagtctgaatcccaaagatgacaaacttggagttcaatgttcaagggcaggaagcatccagcacaggagatagatgtaggctgggaggctaagccagtcaagacttttcacgtttttctgcctgtttcatatcctagctgcaatggcagctgattagatggtgcccacccagattaagggtgggtctgcctttcccagcacactgactcaaatgtttatctcctttggcaacaccctcacagacacactcaggattaatattttgcttccttccatccaatcaagttgacactcagtattaaccatcacactaagcttgttattttatagaaatgcttgaaaaccagagataaatgcagctacaaatgaacgatgactctgcgttttccttgtatatataaagatcaacaataacacttaggtcatgaaacccacctactttacagatcattatggaaataatacactgcttcagcaatggagaaacaatcatccatatttatgcaagaactaaattcaagtttgaaagcttgctttgagcttgaagatataaaacatgattctgtgacagtaaacaatgtataacaaatcttacagaaatttatgtgattactaaaaaaaaatcaattcatcaattcaataaactgagtaccgtattacttttctattgcttctttaccaaataaatacaagctttgcagtttaaaacaacagaaatttaattttttatagttctgagggtcagtaacctaaaactgatcttatgaaataaagttaaatcttggggatatgggtgtggacagggctggtttcttctggggctctgatggtaaaatttgcttccttgccttttctccttctagggagcctgcattccctgcctcctagtggcttcctcccatcactcgaacctctgtttccagcctcaggattcctaatgtgactctgacgtttcatctcctgtttatgaggacgcttctgattgctaagatacatacggtgacactatggaagttaacttgaagattaaaaccctgaaaaatagaaagaatcttctatggtatatcacagagattacaagggcctgaattagagtggtgacattttcatcccttgataatggattaaaaacaattgaatgaagctttggggtgaacttacaggactttatggcaaacttcatatgggagacttacatgaagggaggaagaaatgcgtatgtgtacaaaatcatgtggatagatgtgcatttgtgggtatctgtgaatacaaatacacaattttcagacagaagtagtataagaaaaggaaatcaaacaaagtcaaacattttaagtgtagctcttggtgcactttaaaaaattattaaattgaagctgtagtttattctcatcattgtcatcctatattagtgattttctttagcttttgaaattaaattcataatattacaattctgaattcctatgtatgtatatgttaagaatcctttaatgggactgactttcatatgtgtgtggctgcattctgaaatagttgtctagttgatacataaagcagtgagtgctatttgtaagatatatttatatttaaagtcttcatacagttattaactagctccaatattactgaaatgatttctccaaatatcctatatttaattatcatgctggcaaatttattataactttggtttgaaaaaatatattatgatacatatccactgactaatgccacctatctgctttcctgaattcaaagtttatgattatttccataaatgtatttatcagtataatcaaaaataaaaataacataaataaaatttctgtgagctttacacatctaatgtgcaatgattataaatctggtcttatacacatggtaaaaaacatttaagtcacaaaagtatacttcaggtttaagtataaatctgaaattaaattctcagatttaagtataatttttaaaagctttggtaattgtgtccctactgttaaatttattgtatagttttcactatatcatctgaccttttaatgtttctagaaacttgtgtgaggtctcatacttcatggctaataaagtatttatttttctattcttga

SEQ ID NO: 9328 - protein, 65 aa, Homo sapiens
MGPSCDTCTVTGKVSRKSQARASQKIKRKRQGEAKCISQDSLRDRTNRIYIHTQTHTHTHIYTYK

SEQ ID NO: 9329 - DNA, 3105 bp, Homo sapiens
acagaaagagccaggatcccagactgtgctgaagcttcatgagacctctcctcgtctgtgcacgaaagaggagccggacacagagtgtccagccgactctggagcccaggctgttgcttcccggtctggtggtgagtcctccattgtctgatgtgggtaagtccaagaccaaggagccagcagattcagagtccagggagggctgttcctgatttgcagatggcgccttctctttatgtcttcacaagattgtgaagcctgtagcttggaagatacaggacataggtgaaagtgtttgtaccattcatttaaaggcataaatgtccaatgggtcataaaggtcaaagctaatagacaaaaaaagcttccagcatggatgatgagcaaattagatgcctctctgctcagcatgaggttttttcagctgcaaaagtaaaatgaatcaaccatggaattaccccaatgcactaatagctaccgctgtagtggtagatcgttatatatctgggcaattaaattttaaatgctaactgtgagaccaagtcagcaaattctaattgagacacgttctacaaaacacctgaccactactcctgaaacagtcaaggtcttcagaaataaagaaggtttaaaaaaattattacagtcaagatacacggcaactaaatgtgatgtggtataccgtatgggatacagaaactgaaaaaggacattagggccatcttgtgatacatgcactgtcacaggaaaagtttccaggaaaagtcaagccagggcttcacagaagatcaaaagaaagagacaaggagaagctaagtgtattagtcaggattctctaagggacagaactaatagaatatatatacacacacaaacacacacacacacacatatatatacatataaataaaagggagtttattaaggagtattaactcacacaatcacaaggtcccacaacaggccgggccatctgtaagctgaggaacaaggaagccagtctgaatcccaaagatgacaaacttggagttcaatgttcaagggcaggaagcatccagcacaggagatagatgtaggctgggaggctaagccagtcaagacttttcacgtttttctgcctgtttcatatcctagctgcaatggcagctgattagatggtgcccacccagattaagggtgggtctgcctttcccagcacactgactcaaatgtttatctcctttggcaacaccctcacagacacactcaggattaatattttgcttccttccatccaatcaagttgacactcagtattaaccatcacactaagcttgttattttatagaaatgcttgaaaaccagagataaatgcagctacaaatgaacgatgactctgcgttttccttgtatatataaagatcaacaataacacttaggtcatgaaacccacctactttacagatcattatggaaataatacactgcttcagcaatggagaaacaatcatccatatttatgcaagaactaaattcaagtttgaaagcttgctttgagcttgaagatataaaacatgattctgtgacagtaaacaatgtataacaaatcttacagaaatttatgtgattactaaaaaaaaatcaattcatcaattcaataaactgagtaccgtattacttttctattgcttctttaccaaataaatacaagctttgcagtttaaaacaacagaaatttaattttttatagttctgagggtcagtaacctaaaactgatcttatgaaataaagttaaatcttggggatatgggtgtggacagggctggtttcttctggggctctgatggtaaaatttgcttccttgccttttctccttctagggagcctgcattccctgcctcctagtggcttcctcccatcactcgaacctctgtttccagcctcaggattcctaatgtgactctgacgtttcatctcctgtttatgaggacgcttctgattgctaagatacatacggtgacactatggaagttaacttgaagattaaaaccctgaaaaatagaaagaatcttctatggtatatcacagagattacaagggcctgaattagagtggtgacattttcatcccttgataatggattaaaaacaattgaatgaagctttggggtgaacttacaggactttatggcaaacttcatatgggagacttacatgaagggaggaagaaatgcgtatgtgtacaaaatcatgtggatagatgtgcatttgtgggtatctgtgaatacaaatacacaattttcagacagaagtagtataagaaaaggaaatcaaacaaagtcaaacattttaagtgtagctcttggtgcactttaaaaaattattaaattgaagctgtagtttattctcatcattgtcatcctatattagtgattttctttagcttttgaaattaaattcataatattacaattctgaattcctatgtatgtatatgttaagaatcctttaatgggactgactttcatatgtgtgtggctgcattctgaaatagttgtctagttgatacataaagcagtgagtgctatttgtaagatatatttatatttaaagtcttcatacagttattaactagctccaatattactgaaatgatttctccaaatatcctatatttaattatcatgctggcaaatttattataactttggtttgaaaaaatatattatgatacatatccactgactaatgccacctatctgctttcctgaattcaaagtttatgattatttccataaatgtatttatcagtataatcaaaaataaaaataacataaataaaatttctgtgagctttacacatctaatgtgcaatgattataaatctggtcttatacacatggtaaaaaacatttaagtcacaaaagtatacttcaggtttaagtataaatctgaaattaaattctcagatttaagtataatttttaaaagctttggtaattgtgtccctactgttaaatttattgtatagttttcactatatcatctgaccttttaatgtttctagaaacttgtgtgaggtctcatacttcatggctaataaagtatttatttttctattcttga

SEQ ID NO: 9330 - protein, 59 aa, Homo sapiens
MLTVRPSQQILIETRSTKHLTTTPETVKVFRNKEGLKKLLQSRYTATKCDVVYRMGYRN

SEQ ID NO: 9331 - DNA, 2728 bp, Homo sapiens
tgacggaccccttcttcctgccttcaatgcctcagcggaagatccccaagggctggagcgaggagcgctgccgctggacatcctcccggggaggctgctccgacctgctgcgcggcgcgtctgagactggggactgagccaccccgccgccgccggcgccgccgccgccgcccgctccgtcgctgccgtcggtctggactggcccccacctcgctgcgccctctccccggccccggccccggctcggggcgtcccggggctcgccctgcgaccgccgcctcccgcgcgccgcgtcctcccgaccccgcggcggcgacgatgcccgggaggagggtcctgacggcggcggcgcggatggtggcggccggcgcccgggtgtgatgcgagcgtcacggtggggatgctgctggctgcgcggcgctgagggccagcgagagcgagagcccgcccggggcggaggacggactcatccggatctggctgcagcgtgggctcggagctcccccttcctctcggtctccctctcggcccccctttatttccttcttgctttgcgtctttaacacctctcgaccctgtcctccccccgccactggaagtcttcccgtctctaaatggaattagtggagcccggagcctctggtgtaacgcacagacatgatccatgggcgcagcgtgcttcacattgtagcaagtttaatcatcctccatttgtctggggcaaccaagaaaggaacagaaaagcaaaccacctcagaaacacagaagtcagtgcagtgtggaacttggacaaaacatgcagagggaggtatctttacctctcccaactatcccagcaagtatccccctgaccgggaatgcatctacatcatagaagccgctccaagacagtgcattgaactttactttgatgaaaagtactctattgaaccgtcttgggagtgcaaatttgatcatattgaagttcgagatggaccttttggcttttctccaataattggacgtttctgtggacaacaaaatccacctgtcataaaatccagtggaagatttctatggattaaattttttgctgatggagagctggaatctatgggattttcagctcgatacaatttcacacctgatcctgactttaaggaccttggagctttgaaaccattaccagcgtgtgagtttgagatgggcggttccgaaggaattgtggagtctatacaaattatgaaggaaggcaaagctactgctagcgaggctgttgattgcaagtggtacatccgagcacctccacggtccaagatttacttacgattcttggactatgagatgcagaattcaaatgagtgcaagaggaattttgtggctgtgtatgatggaagcagttccgtggaggatttgaaagctaagttctgtagcactgtggctaatgatgtcatgctacgcacgggtcttggggtgatccgcatgtgggcagatgagggcagtcgaaacagccgatttcagatgctcttcacatcctttcaagaacctccttgtgaaggcaacacattcttctgccatagtaacatgtgtattaataatactttggtctgcaatggactccagaactgtgtgtatccttgggatgaaaatcactgtaaagagaagaggaaaaccagcctgctggaccagctgaccaacaccagtgggactgtcattggcgtgacttcctgcatcgtgatcatcctcattatcatctctgtcatcgtacagatcaaacagcctcgtaaaaagtatgtccaaaggaaatcagactttgaccagacagttttccaggaggtatttgaacctcctcattatgagttatgcactctcagagggacaggagctacagctgactttgcagatgtggcagatgactttgaaaattaccataaactgcggaggtcatcttccaaatgcattcatgaccatcactgtggatcacagctgtccagcactaaaggcagccgcagtaacctcagcacaagagatgcttctatcttgacagagatgcccacacagccaggaaaacccctcatcccacccatgaacagaagaaatatccttgtcatgaaacacagctactcgcaagatgctgcagatgcctgtgacatagatgaaatcgaagaggtgccgaccaccagtcacaggctgtccagacacgataaagccgtccagcggttctgcctcattgggtctctaagcaaacatgaatctgaatacaacacaactagggtctagaaagaaaattcaagatgaggaaactgaagagttttagtaacttttttaagattacacaataaacaatgatgaatcaagctttgaagccaacctcaccaaccacaagatcaaccaacactcttcaccaatgtgtaatataaccacgttaatattcaacatagtacgtactgctgaaagaagttgatacttattcatattaaccccgtagttttgtgtttcctcatctgtaaaagtatgtattataacaccttctctccaccttacagcgtgtgaggttcaaatgaccattcattggaagatattttttatatcctataatgcattataaaaataaatcatttttcctaaatcatgtgtagacttcattttatgatcgacatggaacaaaagtatcatctataaagagtaacaatgtagagtaacccccctcagaacttgtccaccataaaatatatgactttccaaatcc

SEQ ID NO: 9332 - protein, 533 aa, Homo sapiens
MIHGRSVLHIVASLIILHLSGATKKGTEKQTTSETQKSVQCGTWTKHAEGGIFTSPNYPSKYPPDRECIYIIEAAPRQCIELYFDEKYSIEPSWECKFDHIEVRDGPFGFSPIIGRFCGQQNPPVIKSSGRFLWIKFFADGELESMGFSARYNFTPDPDFKDLGALKPLPACEFEMGGSEGIVESIQIMKEGKATASEAVDCKWYIRAPPRSKIYLRFLDYEMQNSNECKRNFVAVYDGSSSVEDLKAKFCSTVANDVMLRTGLGVIRMWADEGSRNSRFQMLFTSFQEPPCEGNTFFCHSNMCINNTLVCNGLQNCVYPWDENHCKEKRKTSLLDQLTNTSGTVIGVTSCIVIILIIISVIVQIKQPRKKYVQRKSDFDQTVFQEVFEPPHYELCTLRGTGATADFADVADDFENYHKLRRSSSKCIHDHHCGSQLSSTKGSRSNLSTRDASILTEMPTQPGKPLIPPMNRRNILVMKHSYSQDAADACDIDEIEEVPTTSHRLSRHDKAVQRFCLIGSLSKHESEYNTTRV

SEQ ID NO: 9333 - DNA, 2738 bp, Homo sapiens
acagccacactgcagtatgtcaggaacagtcatggagctgttctcattgtttgcctctccttttcctcctttttaccttctggcccctctcttcattcagagatgctggcagagccattccctaaggttgtagcaagtttaatcatcctccatttgtctggggcaaccaagaaaggaacagaaaagcaaaccacctcagaaacacagaagtcagtgcagtgtggaacttggacaaaacatgcagagggaggtatctttacctctcccaactatcccagcaagtatccccctgaccgggaatgcatctacatcatagaagccgctccaagacagtgcattgaactttactttgatgaaaagtactctattgaaccgtcttgggagtgcaaatttgatcatattgaagttcgagatggaccttttggcttttctccaataattggacgtttctgtggacaacaaaatccacctgtcataaaatccagtggaagatttctatggattaaattttttgctgatggagagctggaatctatgggattttcagctcgatacaatttcacacctgatcctgactttaaggaccttggagctttgaaaccattaccagcgtgtgagtttgagatgggcggttccgaaggaattgtggagtctatacaaattatgaaggaaggcaaagctactgctagcgaggctgttgattgcaagtggtacatccgagcacctccacggtccaagatttacttacgattcttggactatgagatgcagaattcaaatgagtgcaagaggaattttgtggctgtgtatgatggaagcagttccgtggaggatttgaaagctaagttctgtagcactgtggctaatgatgtcatgctacgcacgggtcttggggtgatccgcatgtgggcagatgagggcagtcgaaacagccgatttcagatgctcttcacatcctttcaagaacctccttgtgaaggcaacacattcttctgccatagtaacatgtgtattaataatactttggtctgcaatggactccagaactgtgtgtatccttgggatgaaaatcactgtaaagagaagaggaaaaccagcctgctggaccagctgaccaacaccagtgggactgtcattggcgtgacttcctgcatcgtgatcatcctcattatcatctctgtcatcgtacagatcaaacagcctcgtaaaaagtatgtccaaaggaaatcagactttgaccagacagttttccaggaggtatttgaacctcctcattatgagttatgcactctcagagggacaggagctacagctgactttgcagatgtggcagatgactttgaaaattaccataaactgcggaggtcatcttccaaatgcattcatgaccatcactgtggatcacagctgtccagcactaaaggcagccgcagtaacctcagcacaagagatgcttctatcttgacagagatgcccacacagccaggaaaacccctcatcccacccatgaacagaagaaatatccttgtcatgaaacacagctactcgcaagatgctgcagatgcctgtgacatagatgaaatcgaagaggtgccgaccaccagtcacaggctgtccagacacgataaagccgtccagcggttctgcctcattgggtctctaagcaaacatgaatctgaatacaacacaactagggtctagaaagaaaattcaagagaagaactatttatacaaacatggggactgtgaaaagaaaattctatagtgaattgtgaaaagtggacatatttctaaattcattccactgcctttatccaaacttaagaattacagacatttgttattccttcggcaagacatccccgctgcacactgatatgttcatttcgtaatttggttgctggccaccaagtgctccttagtttttaaatacattttgagattaactggaaacttgaagaagaaattagttcccgattaagactatcccaactttatttttattgtcagtttcacttttgtttctatgttgttttatgtctttgttatataattgtacattgtgtgatatgtgaaaaaaaaacacgaatttggatgaaccttgtgttacatgtacattgttttcattatatagacagcttgagaatagtgcgttcctgaatgattttgaacatgctacagtgaaaagtgacagtgtggaccatggaatcaccagctagaggttatggactatacacacctattattatattctgattaaatacaggaaaaagtaacaagtaaaattactagattgcaataaaaaaattcattttttggtctttcctgtatacccctgatttcctttttgttttatatcaaagaaagtactgagtttcagaaatcctttttgaagtcaggtattttaccattcatactctacagtagaaatgtttttgattaagcactcagcaatatgaccaaattgacagtttgagaaaataccctgcatgtcagtactggatatttgagttgggaaaatatcctttttgttagacacattgtgaaaagcatgcattgtcaaatactgttgttactcttccatttctttatgtcatatgcttgctacttacgactttttatataaatatatataaaatgtataataatttcctaatttgagttaagagaaatgttttcttccattagagtgattaaaaaactgactcacataaatacacattttatgtcaactcttt

SEQ ID NO: 9334 - protein, 532 aa, Homo sapiens
MLAEPFPKVVASLIILHLSGATKKGTEKQTTSETQKSVQCGTWTKHAEGGIFTSPNYPSKYPPDRECIYIIEAAPRQCIELYFDEKYSIEPSWECKFDHIEVRDGPFGFSPIIGRFCGQQNPPVIKSSGRFLWIKFFADGELESMGFSARYNFTPDPDFKDLGALKPLPACEFEMGGSEGIVESIQIMKEGKATASEAVDCKWYIRAPPRSKIYLRFLDYEMQNSNECKRNFVAVYDGSSSVEDLKAKFCSTVANDVMLRTGLGVIRMWADEGSRNSRFQMLFTSFQEPPCEGNTFFCHSNMCINNTLVCNGLQNCVYPWDENHCKEKRKTSLLDQLTNTSGTVIGVTSCIVIILIIISVIVQIKQPRKKYVQRKSDFDQTVFQEVFEPPHYELCTLRGTGATADFADVADDFENYHKLRRSSSKCIHDHHCGSQLSSTKGSRSNLSTRDASILTEMPTQPGKPLIPPMNRRNILVMKHSYSQDAADACDIDEIEEVPTTSHRLSRHDKAVQRFCLIGSLSKHESEYNTTRV

SEQ ID NO: 9335 - DNA, 3296 bp, Homo sapiens
tgacggaccccttcttcctgccttcaatgcctcagcggaagatccccaagggctggagcgaggagcgctgccgctggacatcctcccggggaggctgctccgacctgctgcgcggcgcgtctgagactggggactgagccaccccgccgccgccggcgccgccgccgccgcccgctccgtcgctgccgtcggtctggactggcccccacctcgctgcgccctctccccggccccggccccggctcggggcgtcccggggctcgccctgcgaccgccgcctcccgcgcgccgcgtcctcccgaccccgcggcggcgacgatgcccgggaggagggtcctgacggcggcggcgcggatggtggcggccggcgcccgggtgtgatgcgagcgtcacggtggggatgctgctggctgcgcggcgctgagggccagcgagagcgagagcccgcccggggcggaggacggactcatccggatctggctgcagcgtgggctcggagctcccccttcctctcggtctccctctcggcccccctttatttccttcttgctttgcgtctttaacacctctcgaccctgtcctccccccgccactggaagtcttcccgtctctaaatggaattagtggagcccggagcctctggtgtaacgcacagacatgatccatgggcgcagcgtgcttcacattgtagcaagtttaatcatcctccatttgtctggggcaaccaagaaaggaacagaaaagcaaaccacctcagaaacacagaagtcagtgcagtgtggaacttggacaaaacatgcagagggaggtatctttacctctcccaactatcccagcaagtatccccctgaccgggaatgcatctacatcatagaagccgctccaagacagtgcattgaactttactttgatgaaaagtactctattgaaccgtcttgggagtgcaaatttgatcatattgaagttcgagatggaccttttggcttttctccaataattggacgtttctgtggacaacaaaatccacctgtcataaaatccagtggaagatttctatggattaaattttttgctgatggagagctggaatctatgggattttcagctcgatacaatttcacacctgatcctgactttaaggaccttggagctttgaaaccattaccagcgtgtgagtttgagatgggcggttccgaaggaattgtggagtctatacaaattatgaaggaaggcaaagctactgctagcgaggctgttgattgcaagtggtacatccgagcacctccacggtccaagatttacttacgattcttggactatgagatgcagaattcaaatgagtgcaagaggaattttgtggctgtgtatgatggaagcagttccgtggaggatttgaaagctaagttctgtagcactgtggctaatgatgtcatgctacgcacgggtcttggggtgatccgcatgtgggcagatgagggcagtcgaaacagccgatttcagatgctcttcacatcctttcaagaacctccttgtgaaggcaacacattcttctgccatagtaacatgtgtattaataatactttggtctgcaatggactccagaactgtgtgtatccttgggatgaaaatcactgtaaagagaagaggaaaaccagcctgctggaccagctgaccaacaccagtgggactgtcattggcgtgacttcctgcatcgtgatcatcctcattatcatctctgtcatcgtacagatcaaacagcctcgtaaaaagtatgtccaaaggaaatcagactttgaccagacagttttccaggaggtatttgaacctcctcattatgagttatgcactctcagagggacaggagctacagctgactttgcagatgtggcagatgactttgaaaattaccataaactgcggaggtcatcttccaaatgcattcatgaccatcactgtggatcacagctgtccagcactaaaggcagccgcagtaacctcagcacaagagatgcttctatcttgacagagatgcccacacagccaggaaaacccctcatcccacccatgaacagaagaaatatccttgtcatgaaacacagctactcgcaagatgctgcagatgcctgtgacatagatgaaatcgaagaggtgccgaccaccagtcacaggctgtccagacacgataaagccgtccagcggttctgcctcattgggtctctaagcaaacatgaatctgaatacaacacaactagggtctagaaagaaaattcaagagaagaactatttatacaaacatggggactgtgaaaagaaaattctatagtgaattgtgaaaagtggacatatttctaaattcattccactgcctttatccaaacttaagaattacagacatttgttattccttcggcaagacatccccgctgcacactgatatgttcatttcgtaatttggttgctggccaccaagtgctccttagtttttaaatacattttgagattaactggaaacttgaagaagaaattagttcccgattaagactatcccaactttatttttattgtcagtttcacttttgtttctatgttgttttatgtctttgttatataattgtacattgtgtgatatgtgaaaaaaaaacacgaatttggatgaaccttgtgttacatgtacattgttttcattatatagacagcttgagaatagtgcgttcctgaatgattttgaacatgctacagtgaaaagtgacagtgtggaccatggaatcaccagctagaggttatggactatacacacctattattatattctgattaaatacaggaaaaagtaacaagtaaaattactagattgcaataaaaaaattcattttttggtctttcctgtatacccctgatttcctttttgttttatatcaaagaaagtactgagtttcagaaatcctttttgaagtcaggtattttaccattcatactctacagtagaaatgtttttgattaagcactcagcaatatgaccaaattgacagtttgagaaaataccctgcatgtcagtactggatatttgagttgggaaaatatcctttttgttagacacattgtgaaaagcatgcattgtcaaatactgttgttactcttccatttctttatgtcatatgcttgctacttacgactttttatataaatatatataaaatgtataataatttcctaatttgagttaagagaaatgttttcttccattagagtgattaaaaaactgactcacataaatacacattttatgtcaactcttt

SEQ ID NO: 9336 - protein, 533 aa, Homo sapiens; identical to SEQ ID NO: 9332

SEQ ID NO: 9337 - DNA, 1849 bp, Homo sapiens; identical to SEQ ID NO: 1456

SEQ ID NO: 9338 - protein, 156 aa, Homo sapiens; identical to SEQ ID NO: 1457

SEQ ID NO: 9339 - DNA, 745 bp, Homo sapiens
ccaagccatgactaaggagcccatttgatagcagaggtggcgcgcagcccggcgagccgatgacggaccccttcttcctgccttcaatgcctcagcggaagatccccaagggctggagcgaggagcgctgccgctggacatcctcccggggaggctgctccgacctgctgcgcggcgcgtctgagactggggactgagccaccccgccgccgccggcgccgccgccgccgcccgctccgtcgctgccgtcggtctggactggcccccacctcgctgcgccctctccccggccccggccccggctcggggcgtcccggggctcgccctgcgaccgccgcctcccgcgcgccgcgtcctcccgaccccgcggcggcgacgatgcccgggaggagggtcctgacggcggcggcgcggatggtggcggccggcgcccgggtgtgatgcgagcgtcacggtggggatgctgctggctgcgcggcgctgagggccagcgagagcgagagcccgcccggggcggaggacggactcatccggatctggctgcagcgtgggctcggagctcccccttcctctcggtctccctctcggcccccctttatttccttcttgctttgcgtctttaacacctctcgaccctgtcctccccccgccactggaagtcttcccgtctctaaatggaattagtggagcccggagcctctggtgtaacgcacagacatgatccatgggcgcagcgtgcttcaca

SEQ ID NO: 9340 - protein, 60 aa, Homo sapiens
MRASRWGCCWLRGAEGQREREPARGGGRTHPDLAAAWARSSPFLSVSLSAPLYFLLALRL

SEQ ID NO: 9341 - DNA, 782 bp, Homo sapiens
atggggccgcggcggcggcagcaaggacatcccagccgcgcggatctgggggaggggcggggagggggtgaggacccggctgggatccgcggctcggcccgccagggcgcagagagaggatgcagccgcaaatcccgagccggatcctcgtgccggacggaaggcgtggaagcgggaggggccttcgtcgccgggaagggctggagcgcgcgggggtgcagggagtccctccctgggcgccgcaacggcacctcctccctttcccggctccgtcccgccctccctcggcctctgcggacgcgacccacgcagaccacagccgagcccgccggaccccgggactacggaagccatcccgtccggccacccacacccgcgccgcggctggggcttgggttggggactgtggcggcgaagaagccgggggagggagttctcacaagatctgatggtttaagcgtggcagtttcccctgagctctccttcctgctggtatgtaaggcgtgctttgcttcctcttcaccttccgccatgattgtacatttcctgaggcctccccagccatgcagaactgcatacaacttaggattcataactacatatatacggatagaagtgcatgaacagaaaatctgcccttctggaataccaaatgcaaaattaaagtgactacaagcagaatttggagaaaaaaataaaagatgcaatatagtttttaaaatcattgttaaaatataatgagtctgtactttgcttaaacaataaaaaagtcttcgatttat

SEQ ID NO: 9342 - protein, 222 aa, Homo sapiens
MGPRRRQQGHPSRADLGEGRGGGEDPAGIRGSARQGAERGCSRKSRAGSSCRTEGVEAGGAFVAGKGWSARGCRESLPGRRNGTSSLSRLRPALPRPLRTRPTQTTAEPAGPRDYGSHPVRPPTPAPRLGLGLGTVAAKKPGEGVLTRSDGLSVAVSPELSFLLVCKACFASSSPSAMIVHFLRPPQPCRTAYNLGFITTYIRIEVHEQKICPSGIPNAKLK

SEQ ID NO: 9343 - DNA, 284 bp, Homo sapiens
ggacggaaggcgtggaagcgggaggggccttcgtgtgaaaatcccttgtggggtttggtgtttcactttttaaaggcatacaacttaggattcataactacatatatacggatagaagtgcatgaacagaaaatctgcccttctggaataccaaatgcaaaattaaagtgactacaagcagaatttggagaaaaaaataaaagatgcaatatagtttttaaaatcattgttaaaatataatgagtctgtactttgcttaaacaataaaaaagtcttcgatttat

SEQ ID NO: 9344 - protein, 56 aa, Homo sapiens
GRKAWKREGPSCENPLWGLVFHFLKAYNLGFITTYIRIEVHEQKICPSGIPNAKLK

SEQ ID NO: 9345 - DNA, 3980 bp, Homo sapiens
agaccacatgaaggaaaagcacaatatgcattttctttgcaccccttgtaatctgttctttttgtctgaaaaagatgtggaagaacacaaagccaccgagaagcatattaattcattggttcaaccaaagactttgcaatcatctaacagtgatttggttttacagactttacctttgagtactttagaatcagaaaacgcaaaagagtctatggatgactcaggaaaagcatctcaggaagaacctctgaagtccagggtaagccatggtaatgaagtgaggcattccagtaagcctcagtttcagtgtaagaagtgtttttataaaacaagatcttctactgttctcacgagacatataaagcttcggcatggtcaagactatcattttctttgtaaagcttgtaatctttattcattgagcaaagaaggaatggagaaacacattaaaagaagcaagcatcttgaaaatgctaagaaaaataatattggcttaagctttgaagaatgtattgaaagggtatgtataggtgcaaatgataaaaaagaagagtttgatgtttccggaaatggaaggattgaaggccatataggtgtgcaattacaagagcattcctatcttgagaagggcatgctggcgtctgaggaactgtcacagtctggtggtagcaccaaagatgatgaattagcttcaaccactactccaaagagagggagacctaaaggtaacatctcacggacgtgttcacactgtggccttttggcctctagtattacaaacttgactgttcacattagacgaaaacacagtcaccagtatagttatttatgcaaagtgtgtaagtattacactgtaactaagggagatatggaacgtcattgtgccaccaagaaacataaaggacgggtagaaatagaagcaagtggaaaacacagttcagatatcattgttggccctgaagggggtagccttgaagctggtaaaaagaatgctggctcagcagtgaccatgtcagatgaacatgctaacaaaccagctgagtcacccacctccgttttagagaagccagatcgtggaaactcaattgaagctgaagttgaaaatgtatttcattctctagatggagaagttaacagccatcttcttgataaaaaggagcaaatatcttcagagccagaggacttcgcccagccgggggatgtgtactcccagagagatgttacaggcacaggtgagaataagtgtttgcactgtgagtttagtgctcactcctctgcttctctagagctgcatgtaaaacggaaacatacaaaagagtttgagttttattgcatggcatgcgattactacgcggtgactcgtcgcgagatgaccaggcatgcagcaacagagaagcacaaaatgaaaaggcagtcttatctcaactctgctaatgtagaagctggttctgcagacatgtccaaaaacatcattatgcctgaagaagagcatcaacaaaattctgaggaatttcaaataatttcaggtcaaccatctgatactcttaaatctagaaatgctgcagattgctctattttaaatgagaatactaatttagatatgtctaaagtgctctgcgctgctgactctgtagaagttgagactgaagaagaatctaatttcaatgaagaccattccttttgtgagactttccaacaggctcctgtcaaggataaagttaggaaacctgaggagatgatgtcacttactatgtcctcaaactatggctccccaagcagatttcaaaatgaaaattcaggaagctctgccttaaattgtgagacagcaaagaaaaaccatgagatatcgaatgatgcaggtgagctgcgtgtccattgtgagggtgaaggaggaaacgcaggagacggtggaggtgttgtcccccacagacacctgtgccctgtgacgctcgatggggagcgctcggctgaaagccctgtgctcgttgtgacaagaataaccagagaacagggaaatctggagagcgggggtcagaacagagttgcacgtgggcatggtttggaagacttgaaaggtgtccaagaagatcccgttctggggaataaggaaattctgatgaattcacaacatgaaacagaatttattttggaggaggatggcccagcttctgatagcacagttgaaagtagtgatgtctatgaaactataattagtattgatgataaagggcaggccatgtacagttttggtcgatttgactcctccataataagaataaagaaccctgaagatggtgagttgatagaccagtctgaagagggcttgatagcaacgggagtgagaattagtgagctgcccttgaaagactgtgctcaaggtgtgaaaaagaagaaatctgagggcagttccattggtgagtctacacgaattcgctgtgatgattgtggcttcttagcagatggactgagtggactgaatgttcacatagccatgaagcatcctacaaaagagaagcacttccattgtttactctgtggaaagtcgttctataccgaaagcaaccttcaccagcatctggctagtgccggccacatgagaaatgagcaggccagtgtggaggagcttccggagggaggggccacctttaaatgtgtcaagtgcacagagccctttgattctgaacagaatttatttttacatattaaaggacagcatgaggaattgctgcgggaggtgaataagtatatagtggaagacactgagcaaatcaaccgcgagagggaggaaaaccagggaaacgtctgcaagtattgtgggaagatgtgtcgaagcagcaactcgatggccttcctggcacacattcgcactcacacaggatcaaaaccattcaagtgcaagatatgccattttgcaacagctcagcttggagatgccagaaaccatgtgaaaaggcaccttgggatgagggaatacaagtgtcatgtctgtggggttgcttttgtaatgaagaagcacttaaatactcatctactaggcaagcatggagttggcaccccaaaagaaaggaaatttacatgccacttatgtgatagaagtttcacagagaagtgggccctgaacaaccacatgaaactccacacgggagaaaagccgtttaaatgtacctggcccacgtgccattactcattcctcacagcctccgcaatgaaagaccactacaggacgcacacaggcgagaagtcgtttctgtgtgacctctgcggctttgccggcgggacccgccacgccctcaccaagcatcgcagacagcacacaggagaaaaacctttcaagtgcgatgagtgtaactttgcctccacaactcagtcccatttgactcggcataaacgtgtccacactggagaaaagccctacagatgcccctggtgtgactacaggtcaaactgtgctgaaaatatccgcaaacacattctgcatactggcaaacatgaaggagtcaagatgtacaactgtcccaagtgtgactacgggaccaacgtcccggtggagttccggaaccatttgaaggaacagcatcctgacatcgaaaacccggacctcgcttacctgcatgctggtaagggacagaaactgtgaaaacttgtttctaacaggatttcatgtgatcacagcagttataatgctatttgtacattaccatgatttattgtaatggagtagagtatgtgatagtatctgcttcaagacctatagaaaagtacattccagtttgatcccactcaactatgaaaacaggacttttcaactgtattttatcaaaaaaggaaatctgacagagtaattatttgatgactgtaaagttaataatagtaaatatttaaagcatagttgacctgaaatgagagtagttgttaaatcttcatatgttgactaattgctaaaattttaattttttttcttaaaaaatgcttgtgatttg

SEQ ID NO: 9346 - protein, 1209 aa, Homo sapiens
MKEKHNMHFLCTPCNLFFLSEKDVEEHKATEKHINSLVQPKTLQSSNSDLVLQTLPLSTLESENAKESMDDSGKASQEEPLKSRVSHGNEVRHSSKPQFQCKKCFYKTRSSTVLTRHIKLRHGQDYHFLCKACNLYSLSKEGMEKHIKRSKHLENAKKNNIGLSFEECIERVCIGANDKKEEFDVSGNGRIEGHIGVQLQEHSYLEKGMLASEELSQSGGSTKDDELASTTTPKRGRPKGNISRTCSHCGLLASSITNLTVHIRRKHSHQYSYLCKVCKYYTVTKGDMERHCATKKHKGRVEIEASGKHSSDIIVGPEGGSLEAGKKNAGSAVTMSDEHANKPAESPTSVLEKPDRGNSIEAEVENVFHSLDGEVNSHLLDKKEQISSEPEDFAQPGDVYSQRDVTGTGENKCLHCEFSAHSSASLELHVKRKHTKEFEFYCMACDYYAVTRREMTRHAATEKHKMKRQSYLNSANVEAGSADMSKNIIMPEEEHQQNSEEFQIISGQPSDTLKSRNAADCSILNENTNLDMSKVLCAADSVEVETEEESNFNEDHSFCETFQQAPVKDKVRKPEEMMSLTMSSNYGSPSRFQNENSGSSALNCETAKKNHEISNDAGELRVHCEGEGGNAGDGGGVVPHRHLCPVTLDGERSAESPVLVVTRITREQGNLESGGQNRVARGHGLEDLKGVQEDPVLGNKEILMNSQHETEFILEEDGPASDSTVESSDVYETIISIDDKGQAMYSFGRFDSSIIRIKNPEDGELIDQSEEGLIATGVRISELPLKDCAQGVKKKKSEGSSIGESTRIRCDDCGFLADGLSGLNVHIAMKHPTKEKHFHCLLCGKSFYTESNLHQHLASAGHMRNEQASVEELPEGGATFKCVKCTEPFDSEQNLFLHIKGQHEELLREVNKYIVEDTEQINREREENQGNVCKYCGKMCRSSNSMAFLAHIRTHTGSKPFKCKICHFATAQLGDARNHVKRHLGMREYKCHVCGVAFVMKKHLNTHLLGKHGVGTPKERKFTCHLCDRSFTEKWALNNHMKLHTGEKPFKCTWPTCHYSFLTASAMKDHYRTHTGEKSFLCDLCGFAGGTRHALTKHRRQHTGEKPFKCDECNFASTTQSHLTRHKRVHTGEKPYRCPWCDYRSNCAENIRKHILHTGKHEGVKMYNCPKCDYGTNVPVEFRNHLKEQHPDIENPDLAYLHAGKGQKL

SEQ ID NO: 9347 - DNA, 2528 bp, Homo sapiens
gcgaagactgaagcgagaagggcagcgcgaggtgggcgactaccagagcgaagcgagcggcgtgtaagcggggtgaagacaacgccaggttaaaaattttgcagttatttatcttgtggatattacagaagtgcctgacttcaacaaaatgtatgagttatacgatccatgtactgtcatgtttttcttcaggaacaagcacatcatgattgacttggggactggcaacaacaacaagattaactgggccatggaggacaagcaggagatggtggacatcatcgagacggtgtaccgcggggcccgcaaaggccgcggcctggtggtgtcccccaaggactactccaccaagtaccgctactgaggcgccctcagtctgcgcggataaatgtcgtggagccctttttgtatggaaacgttttaagctatttaaagcctttggaaaatacaggaagctccagggctggagcacctctgagatggaattgataacatggtcttaactcaccgaaataaacaagcacgtggtgagaggagcaggcctacttgtttgttctcaggaaacttaatgaatagattactgattttcctagtcaaagttaattcttacccttggagtaaaacgaaggtgtttatcctgtgagcctgtgcgttttgcatactgggttggtttgctggggctgcggtgacagcatatgccgcgagctgggctttaacagagatgtgtgctctcacagctttgcaggcgggggtctgagatcagggtgtcgcgggtggggggtcactgctgaggccgtgaggggaatctgctcaggcctgtccctggcttctgggggctgctggtggtattttcagttccttggtgtgtggatacttcgccccatctctgccttcacctgtgtcctccctgtgtgggtgctggtgtccaaaatttccccttttcgtagtgacaccagctgtgttggattggggcccaccctgctccagcatggcctaatcttaactaattacatttgcaaggatcttatgtccacaaaagtcacagtctgaggtgctgggggttaggacttcaatatataaattttgcggttacacaattcaatccatgacagaatccaaaggtttactctggttataaaaacagtacaataaaatattgtttatagccttccctgtaaggaataggagagctattttttattcttcccaagattgtatttgatgtaaacatattttctgtagaagccatggcccttcagttcatatagttagaaaatttccttattggccaggcacggtggctcacacctgtaatcccagcactttgggaggccgaggtgggcagatcacgaagtcaggtgttcgagaccagcctggccaacatggtgaaatcccgtctctactaaaaatacaaaaattagctgggcatggtggcgcgtgcctgtaatcccagctacttggaaggctgaggcaggagaattgcttgaacccgggaggtggaggtttcagtgagccgagatcacaccactgcactccagcctgggcaacagagcaagactccgtctcaaaaaaagaaaagaaaatgtccttattacagtctcaggtttctcttgccctctgtcatcctagcagtgtggatggttggttgggatcttcgtgtcccgtctcagcacactcgagctctgaagtgaaagtgaggaagggcagggatgggggcacttgagcacaccgtgggccctctgacctcagacccaggctctgccccaccaagtgaccttgggcagggtaccttctctgagctttgtttcctccttggtaaaggcggataatagtgtctgccctgcacacagatgtggacgcagaagcacgtggtgcctgccgggcacaggagtggtgcacagggctcgctgctgtcgggagattgattgctgttgtggaaacgggagggtacttacagaatgaagcacattttttacatacagtacaaatgagtgtgtgctttttaaatggatttaaaattcaaatgcaaatctgcagtttaatctcccaagtgctgatttttctatgtataaagtaggagagtgcaacagcgtatcggaatgaggggctagggagaacgtgtatgtgacctcgagtacctggcatgtaacagacactcagtattacactcctgctatttctccagagcaggtgaaacagacggccaggaagcacacgaagagacactcagcatcactgcttgttaaggaaggtgcaaatcaaaaccacagtgagacgccacttcacacctacaagttcggctagatacaaaaagatcgcaacaagcgtttgcaaggatgtggagaaattggagccctcacacactgctggtggcaaagtggtaacacaggcaggcaggtcgtcaaaaagttaaacatgggccgggtgcaggtgtctcaagcctgtaatcccagcactttggaaggctgagacaggcagattgcttgagcccaggagttcacgaccagcctgggcaacctggtgagacc

SEQ ID NO: 9348 - protein, 71 aa, Homo sapiens
MYELYDPCTVMFFFRNKHIMIDLGTGNNNKINWAMEDKQEMVDIIETVYRGARKGRGLVVSPKDYSTKYRY

SEQ ID NO: 9349 - DNA, 642 bp, Homo sapiens
gcgaagactgaagcgagaagggcagcgcgaggtgggcgactaccagagcgaagcgagcggcgtgtaagcggggtgaagacaacgccaggttaaaaattttgcagttatttatcttgtggatattacagaagtgcctgacttcaacaaaatgtatgagttatacgatccatgtactgtcatgtttttcttcaggaacaagcacatcatgattgacttggggactggcaacaacaacaagattaactgggccatggaggacaagcaggagatggtggacatcatcgagacggtgtaccgcggggcccgcaaaggccgcggcctggtggtgtcccccaaggactactccaccaagtaccgctactgaggcgccctcagtctgcgcggataaatgtcgtggagccctttttgtatggaaacgttttaagctatttaaagcctttggaaaatacaggaagctccagggctggagcacctctgagatggaattgataacatggtcttaactcaccgaaataaacaagcacgtggtgagaggagcaggcctacttgtttgttctcaggaaacttaatgaatagattactgattttcctagtcaaagttaattcttacccttggagtaaaacgaaggtgtttatcctgtg

SEQ ID NO: 9350 - protein, 71 aa, Homo sapiens; identical to SEQ ID NO: 9348

SEQ ID NO: 9351 - DNA, 599 bp, Homo sapiens
gcgaagactgaagcgagaagggcagcgcgaggtgggcgactaccagagcgaagcgagcggcgtgtaagcggggtgaagacaacgccaggttaaaaattttgcagttatttatcttgtggatattacagaagtgcctgacttcaacaaaatgtatgagttatacgatccatgtactgtcatgtttttcttcaggaacaagcacatcatgattgacttggggactggcaacaacaacaagattaactgggccatggaggacaagcaggagatggtggacatcatcgagacggtgtaccgcggggcccgcaaaggccgcggcctggtggtgtcccccaaggactactccaccaagtaccgctactgaggcgccctcagtctgcgcggataaatgtcgtggagccctttttgtatggaaacgttttaagctatttaaagcctttggaaaatacaggaagctccagggctggagcacctctgagatggaattgataacatggtcttaactcaccgaaataaacaagcacgtggtgagaggagcaggcctacttgtttgttctcaggaaacttaatgaatagattactgattttcctagtcaaag

SEQ ID NO: 9352 - protein, 71 aa, Homo sapiens; identical to SEQ ID NO: 9348

SEQ ID NO: 9353 - DNA, 545 bp, Homo sapiens
gcgaagcgagcggcgtgtaagcggggtgaagacaacgccagtcctgaccttggaaggaggatacccaccactggaggctggagccactggaaagaggcgttaaaaattttgcagttatttatcttgtggatattacagaagtgcctgacttcaacaaaatgtatgagttatacgatccatgtactgtcatgtttttcttcaggaacaagcacatcatgattgacttggggactggcaacaacaacaagattaactgggccatggaggacaagcaggagatggtggacatcatcgagacggtgtaccgcggggcccgcaaaggccgcggcctggtggtgtcccccaaggactactccaccaagtaccgctactgaggcgccctcagtctgcgcggataaatgtcgtggagccctttttgtatggaaacgttttaagctatttaaagcctttggaaaatacaggaagctccagggctggagcacctctgagatggaattgataacatggtcttaactcaccgaaataaacaagcacgtggtgagagg

SEQ ID NO: 9354 - protein, 71 aa, Homo sapiens; identical to SEQ ID NO: 9348

SEQ ID NO: 9355 - DNA, 494 bp, Homo sapiens
accagagcgaagcgagcggcgtgtaagcggggtgaagacaacgccaggttaaaaattttgcagttatttatcttgtggatattacagaagtgcctgacttcaacaaaatgtatgagttatacgatccatgtactgtcatgtttttcttcaggaacaagcacatcatgattgacttggggactggcaacaacaacaagattaactgggccatggaggacaagcaggagatggtggacatcatcgagacggtgtaccgcggggcccgcaaaggccgcggcctggtggtgtcccccaaggactactccaccaagtaccgctactgaggcgccctcagtctgcgcggataaatgtcgtggagccctttttgtatggaaacgttttaagctatttaaagcctttggaaaatacaggaagctccagggctggagcacctctgagatggaattgataacatggtcttaactcaccgaaataaacaagcacgtggtgagagg

SEQ ID NO: 9356 - protein, 71 aa, Homo sapiens; identical to SEQ ID NO: 9348

SEQ ID NO: 9357 - DNA, 1402 bp, Homo sapiens
acacgccgcctgccaggcgtgagtcttcctcccgctctgcgccgtcgccccgcccacacgccgccaccctcgcgtcagttgtcgctccgcgcctgcgcccgttgtctccctgctcgctccgggtcccggcgccgcgccatgtgggctgcggcgggcgggctgtggcgctcccgcgcgggtctccgggccctgttccgtagccgcgatgctgcgctatttccaggctgcgagcggggacttcactgctctgctgtctcctgcaagaactggctcaagaaatttgcctcgaaaaccaaaaaaaaggtttggtatgaaagtccttccttgggttctcactcgacttacaaaccatccaagttggaattcctcatgaggagcacctcaaagaaaaccaggaaggaagaccatgcgcgcctgagggccctgaacggcctcctctataaggcactgacagacctgctgtgtacccctgaagtgagtcaggagctgtatgaccttaacgtggagctctccaaggtttccctgactccagacttctcagcctgccgagcgtactggaagacaacgctctctgctgagcagaacgcacacatggaggctgtcctgcagagaagtgccgcgcacatgaggcaccttttgatgtcccagcagaccctgaggaatgtgccaccgatagtgtttgttcaagacaagggaaatgcagctctagctgagcttgatcagttactggcagtcgcagactttggaccccgggatgaaagagacaactttgtacaaaatgatttcagggaccctgatgccccacaaccctgcggcaccacagagccgaccacaagctccagtctgtgtgggatcgatcatgaggcgctcaacaagcagattatggagtacaaaaggaggaaagataaagggctcgggggcctggtgtggcaggggcaggtggctgagctgacaacgcagatgaaaaagggaaggaagagggccaagccccgcctggagcaggacagctccctcaagagttacctgtcaggcgaggaggttgaagatgacctggacctggttggtgccccggagtacgaatgctatgccccggacacagaggagttggaggcagagagaggaggtggcagaacagaggatggccacagctgcggagcaagcagggagtagatggagaggctctgcccatcccacatttgcagggaaaagcattggcacgcaacgcagcatgtggcttcattgaggcagttgatggagttaaaccatctgctcttctgctacttcaacattttctagcttttccgtgtatctaaacacaatttgctacacaagtcactgtttttttttccatgcactgtgtgtaatttaaaaattaaatggccatcttatcacagattctcac

SEQ ID NO: 9358 - protein, 343 aa, Homo sapiens
MWAAAGGLWRSRAGLRALFRSRDAALFPGCERGLHCSAVSCKNWLKKFASKTKKKVWYESPSLGSHSTYKPSKLEFLMRSTSKKTRKEDHARLRALNGLLYKALTDLLCTPEVSQELYDLNVELSKVSLTPDFSACRAYWKTTLSAEQNAHMEAVLQRSAAHMRHLLMSQQTLRNVPPIVFVQDKGNAALAELDQLLAVADFGPRDERDNFVQNDFRDPDAPQPCGTTEPTTSSSLCGIDHEALNKQIMEYKRRKDKGLGGLVWQGQVAELTTQMKKGRKRAKPRLEQDSSLKSYLSGEEVEDDLDLVGAPEYECYAPDTEELEAERGGGRTEDGHSCGASRE

SEQ ID NO: 9359 - DNA, 1317 bp, Homo sapiens
acacgccgcctgccaggcgtgagtcttcctcccgctctgcgccgtcgccccgcccacacgccgccaccctcgcgtcagttgtcgctccgcgcctgcgcccgttgtctccctgctcgctccgggtcccggcgccgcgccatgtgggctgcggcgggcgggctgtggcgctcccgcgcgggtctccgggccctgttccgtagccgcgatgctgcgctatttccaggctgcgagcggggacttcactgctctgctgtctcctgcaagaactggctcaagaaatttgcctcgaaaaccaaaaaaaaggtttggtatgaaagtccttccttgggttctcactcgacttacaaaccatccaagttggaattcctcatgaggagcacctcaaagaaaaccaggaaggaagaccatgcgcgcctgagggccctgaacggcctcctctataaggcactgacagacctgctgtgtacccctgaagtgagtcaggagctgtatgaccttaacgtggagctctccaaggtttccctgactccagacttctcagcctgccgagcgtactggaagacaacgctctctgctgagcagaacgcacacatggaggctgtcctgcagagaagtgccgcgcacatgagcttgatcagttactggcagtcgcagactttggaccccgggatgaaagagacaactttgtacaaaatgatttcagggaccctgatgccccacaaccctgcggcaccacagagccgaccacaagctccagtctgtgtgggatcgatcatgaggcgctcaacaagcagattatggagtacaaaaggaggaaagataaagggctcgggggcctggtgtggcaggggcaggtggctgagctgacaacgcagatgaaaaagggaaggaagagggccaagccccgcctggagcaggacagctccctcaagagttacctgtcaggcgaggaggttgaagatgacctggacctggttggtgccccggagtacgaatgctatgccccggacacagaggagttggaggcagagagaggaggtggcagaacagaggatggccacagctgcggagcaagcagggagtagatggagaggctctgcccatcccacatttgcagggaaaagcattggcacgcaacgcagcatgtggcttcattgaggcagttgatggagttaaaccatctgctcttctgctacttcaacattttctagcttttccgtgtatctaaacacaatttgctacacaagtcactgtttttttttccatgcactgtgtgtaatttaaaaattaaatggccatcttatcacagattctcac

SEQ ID NO: 9360 - protein, 242 aa, Homo sapiens
MWAAAGGLWRSRAGLRALFRSRDAALFPGCERGLHCSAVSCKNWLKKFASKTKKKVWYESPSLGSHSTYKPSKLEFLMRSTSKKTRKEDHARLRALNGLLYKALTDLLCTPEVSQELYDLNVELSKVSLTPDFSACRAYWKTTLSAEQNAHMEAVLQRSAAHMSLISYWQSQTLDPGMKETTLYKMISGTLMPHNPAAPQSRPQAPVCVGSIMRRSTSRLWSTKGGKIKGSGAWCGRGRWLS

SEQ ID NO: 9361 - DNA, 1487 bp, Homo sapiens
acacgccgcctgccaggcgtgagtcttcctcccgctctgcgccgtcgccccgcccacacgccgccaccctcgcgtcagttgtcgctccgcgcctgcgcccgttgtctccctgctcgctccgggtcccggcgccgcgccatgtgggctgcggcgggcgggctgtggcgctcccgcgcgggtctccgggccctgttccgtagccgcgatgctgcgctatttccaggctgcgagcggggacttcactgctctgctgtctcctgcaagaactggctcaagaaatttgcctcgaaaaccaaaaaaaaggtttggtatgaaagtccttccttgggttctcactcgacttacaaaccatccaagttggaattcctcatgaggagcacctcaaagaaaaccaggaaggaagaccatgcgcgcctgagggccctgaacggcctcctctataaggcactgacagacctgctgtgtacccctgaagtgagtcaggagctgtatgaccttaacgtggagctctccaaggtttccctgactccagacttctcagcctgccgagcgtactggaagacaacgctctctgctgagcagaacgcacacatggaggctgtcctgcagagaagtgccgcgcacatgaggcaccttttgatgtcccagcagaccctgaggaatgtgccaccgatagtgtttgttcaagacaagggaaatgcagctctagctgagcttgatcagttactggcagtcgcagactttggaccccgggatgaaagagacaactttgtacaaaatgatttcagggaccctgatgccccacaaccctgcggcaccacagagccgaccacaagctccagtctgtgtgggatcgatcatgaggcgctcaacaagcagattatggagtacaaaaggaggaaagataaagggctcgggggcctggtgtggcaggggcaggtggctgagctgacaacgcagatgaaaaagggaaggaagagggccaagccccgcctggagcaggacagctccctcaagagttacctgtcaggcgaggaggttgaagatgacctggacctggttggtgccccggagtacgaatgctatgccccggacacagaggagttggaggcagagagaggaggtggcagaacagaggatggccacagctgcggagcaagcagggagtagatggagaggctctgcccatcccacatttgcagggaaaagcattggcacgcaacgcagcatgtggcttcattgaggcagttgatggagttaaaccatctgctcttctgctacttcaacattttctagcttttccgtgtatctaaacacaatttgctacacaagtcactgtttttttttccatgcactgtgtgtaatttaaaaattaaatggccatcttatcacagattctcacaaaaagaaaatggtaaaatagtgtctctgagatgctggcatggccacctccacctgcagagccctgccaggtgccagtgagtgct

SEQ ID NO: 9362 - protein, 343 aa, Homo sapiens; identical to SEQ ID NO: 9358

SEQ ID NO: 9363 - DNA, 566 bp, Homo sapiens
ccgctctgcgccgtcgccccgcccacacgccgccaccctcgcgtcagttgtcgctccgcgcctgcgcccgttgtctccctgctcgctccgggtcccggcgccgcgccatgtgggctgcggcgggcgggctgtggcgctcccgcgcgggtctccgggccctgttccgtagccgcgatgctgcgctatttccaggctgcgagcggggacttcactgctctgctgtctcctgcaagaactggctcaagaaatttgcctcgaaaaccaaaaaaaaggtttggtatgaaagtccttccttgggttctcactcgccctcccccagcccctgctgtgtgacttggtgagtttggagttgtaacgctgcccttggggtgtgctcttcttcctgatggagacttacaaaccatccaagttggaattcctcatgaggagcacctcaaagaaaaccaggaaggaagaccatgcgcgcctgagggccctgaacggcctcctctataaggcactgacagacctgctgtgtacccctgaagtgagtcaggagctgtatgaccttaacgtggagctctcca

SEQ ID NO: 9364 - protein, 77 aa, Homo sapiens
MWAAAGGLWRSRAGLRALFRSRDAALFPGCERGLHCSAVSCKNWLKKFASKTKKKVWYESPSLGSHSPSPSPCCVTW

SEQ ID NO: 9365 - DNA, 1058 bp, Homo sapiens
cgccgccaccctcgcgtcagttgtcgctccgcgcctgcgcccgttgtctccctgctcgctccgggtcccggcgccgcgccatgtgggctgcggcgggcgggctgtggcgctcccgcgcgggtctccgggccctgttccgtagccgcgatgctgcgctatttccaggctgcgagcggggacttcactgctctgctgtctcctgcaagaactggctcaagaaatttgcctcgaaaaccaaaaaaaaggtttggtatgaaagtccttccttgggttctcactcgacttacaaaccatccaagttggaattcctcatgaggagcacctcaaagaaaaccaggaaggaagaccatgcgcgcctgagggccctgaacggcctcctctataaggcactgacagacctgctgtgtacccctgaaacttctcagcctgccgagcgtactggaagacaacgctctctgctgagcagaacgcacacatggaggctgtcctgcagagaagtgccgcgcacatgaggtgatgacctttgctttctgaatgtacttgctttttgctcataccctaaatttctcagctgtttcacttgtaggtggacttgaacttttcattgagtatttttgcttttaaagaaaattttggaggcattttcttgaagttcatagtataatttgcatttttgtataagctataatgtaggttagcatttattaaagtgtgccaggatcactagggatctggagatcctgtcagggagttcattagggtaagacgttatttcacctctcctgctgtgttgacatttgcactgagggtacagaaaccatgagggaagactgctggtgccatgctgccagccagtgctgtaggggcgccatgccacatgcctagagtaaaagacaatgttacttttacttaagaatatcccagatgaggctggacatggtgcctctcacctgtaatccccgcaactcgggatgccgaggcgggaggatcacttgaggccaggagttcaggaccagtctgggcaagatggcgagaccctgtctctacaaaaaattaaa

SEQ ID NO: 9366 - protein, 143 aa, Homo sapiens
MWAAAGGLWRSRAGLRALFRSRDAALFPGCERGLHCSAVSCKNWLKKFASKTKKKVWYESPSLGSHSTYKPSKLEFLMRSTSKKTRKEDHARLRALNGLLYKALTDLLCTPETSQPAERTGRQRSLLSRTHTWRLSCREVPRT

SEQ ID NO: 9367 - DNA, 567 bp, Homo sapiens
cgttgtctccctgctcgctccgggtcccggcgccgcgccatgtgggctgcggcgggcgggctgtggcgctcccgcgcgggtctccgggccctgttccgtagccgcgatgctgcgctatttccaggctgcgagcggggacttcactgctctgctgtctcctgcaagaaagctccctcaagagttacctgtcaggcgaggaggttgaagatgacctggacctggttggtgccccggagtacgaatgctatgccccggacacagaggagttggaggcagagagaggaggtggcagaacagaggatggccacagctgcggagcaagcagggagtagatggagaggctctgcccatcccacatttgcagggaaaagcattggcacgcaacgcagcatgtggcttcattgaggcagttgatggagttaaaccatctgctcttctgctacttcaacattttctagcttttccgtgtatctaaacacaatttgctacacaagtcactgtttttttttccatgcactgtgtgtaatttaaaaattaaatggccatcttatcacagattctcacaaa

SEQ ID NO: 9368 - protein, 121 aa, Homo sapiens [sequence omitted]

SEQ ID NO: 9369 - DNA, 2160 bp, Homo sapiens
tgtgggctgcggcgggcgggctgtggcgctcccgcgcgggtctccgggccctgttccgtagccgcgatgctgcgctatttccaggctgcgagcggggacttcactgctctgctgtctcctgcaagaactggctcaagaaatttgcctcgaaaaccaagtggatgaagacctgatcattgaagttcaccagttatttttctcaagaatgtgaataacaatgggatttgcactcattatatttttagaatggcttcgcataattttcatgcatcctgtggacgatgaacacaaatgcagctgtggccgtgcctggcctgtgtgtgttgaacgcgttcctgccgtgcgggagccacctacccagcggagcctcagagtctgagttctcaatgagtcaacattttgggtgtgtatgccaagaggtgacacgaaacagaagttgggatcactgtggttaacctgagcatgttggagaccaaggagaggctgatgttaatgttggatttttgtgaaaatgattcctttcaaagaaagacctgtgacagttgagcgtgtgctgcatctgagatgctggctggggagcccaggcagtcgaggggagaggagcgctcactgtcttactggaaacaagctgtttggagaacaacctgtttttactctccttttgcaagcaaaacactcccactgagcaatagcgtttatggcagcatttagcggacacagaagcacatctgaaagtggagagagacgcgtttccccattgctggccgagtcccaccactttgctcagctatgaacacctgacatctcgtttcattttcatgcaaaatctggagataattattatccacaattctaaggccttaggcccctccgcatgagcctgccattaccacttcattcccttgcacctgaaagactccagagccccttgaaagaacaggtcctccaagaggagcatcgccagccagcccctgaatctcctgaggaaactctcatgcacatatcttgacctgagcacagaccggacgccagcggagggcaggagcaagcaggacacactgtggctgaggaggggaccctgggcttgtgggcctcggagaggcagagcaggggaggcagatgagactgcacacagctttttgtttgacatatcctaagccccctgcacacgccactcaaggtcttctctgtgccccatctggtgcaggaggcctgtctgtctgtgaaattgcttttagcaatagctgtggatcaccactgagagggtgaatatacaaatgaacaatgggcagaccgtctatgatggcaaaacttggacctccaaccttgaggccaaagcacatcatgtgcggcctctggcgggactcaggtctgggaagcgactgcagcttccctattttctagctctgcttccaactaagaaagtcagatattctccccaaaccaaccccataggatgcctgctgccaggtggcccacccccagcttccccctgacaacagcctccacccagggcatacccaaccagagccttcccatcttctaatgggaagcttcccctccccaccccaccttcaaggctctgccacgcgcagggacagtgtagccttcttggctacagcttcgagtgagcagcctctgccatcctcgctgatgtccccggttaccgtgaaggctcctccaggacactgtctgcactgcctgtcgtccagaccccacctctgcccaggcaccctggccttaatgctgcagcccacagggcacccagctggtgactgaggcctgttctgagcccctcgctggcacattcctggacttctcagtttggtgccagggcctcattcctgcttcccatttgctctgttacaggggaattagtcccttcctttactcttttgtgctgtgctttctaaacgtggtgtttgtcataataagaagcatgaggggcacatggatcagcctcacagacaggtgagtctgtagctcttaccagacccttgttcacatccatgaacttggctgtggatcaccagggaaactgggtgaggttctgccatccaggggttttgtcctgagaacttggcttttagaacattctctctggttttttgcttgggggtgggggtctggtgcagggtgctgggtctgtgtttggaggag

SEQ ID NO: 9370 - protein, 57 aa, Homo sapiens [sequence omitted]

SEQ ID NO: 9371 - DNA, 2050 bp, Homo sapiens
aatgtaaaggatcctgggaccaacaattttgggaattgctgagctggatgataataaagaaattattcagtttcctcctcagttttaaaaaatgcagaaatccaaatccagctcactgtccagctctctcagaactggaattcctcctttctgcctcccttctcatcatgccccatgtttagggtggggacagacgtagaaaaggtggccgtgtgtgggcttcgttccaggcaccctgcctggcttccctgcatcattaccacacacgatgatgcccaggggtctgtgaaactgcatatcagagaatgcttatttcttactgtttaacaaaagcaagaaaatgagagattattgacaagtgttgaaacagcattgttttctgatttttaggtatcagaaaattcagttgagctgaatgtccctcttcccaactcctgcggtcacccaagatttagggtcaccgttttccatagctgtgtaccaaagatctgtggtcacggctttcgctggttatatgtgccgtgcctacattggccctaggtctgtattatgtgatgtgcatgatacaaatatcacttctgtgtctaatatctgggaacctgagggttgtgtcgtgccagggcgtgtccactgggcacaggaggacaggctgttagtgcacagaccctggagcccaaggctacggcgatgagttcagatcaggttatttgtacagatcgcacaagttgcgttgagaaaagtcaaggcaattgcagttatgatgcattttgcatcccttttttgatgtggtagttgactaaagatgactcttctgggctgaggttttcatttttgagtaatacgataaatctcactcctgcctcttttttttttttttctttttttttgagaccgagtcttgttctttcacccaggccggagtgtagtggcactatcttggctcactgcaagttccgcctcccgggttcaggccattcttctgcctcagcctcccgagtagctgggactacaggtgcctgccgccacgcctggctaattttttgtatttttagtagagacggggtttcaccatgttagccaggatggtctcgatctcctgacctcgtgatccgcccgcctcggcctcccaaagtgctgggattacaggcgtgagccaccgcgcccggcctctcactcctgcctcttggttacatcttgaatcatatgttcagcactgtcacgcctctccactgagtgtcacggcacagctgtgagggtctgtgcgttctgtctcctaggcaccttttgatgtcccagcagaccctgaggaatgtgccaccgatagtgtttgttcaagacaagggaaatgcagctctagctgagcttgatcagttactggcagtcgcagactttggaccccgggatgaaagagacaactttgtacaaaatgatttcagggaccctgatgccccacaaccctgcggcaccacagagccgaccacaagctccagtctgtgtgggatcgatcatgaggcgctcaacaagcagattatggagtacaaaaggaggaaagataaagggctcgggggcctggtgtggcaggggcaggtggctgagctgacaacgcagatgaaaaagggaaggaagagggccaagccccgcctggagcaggacagctccctcaagagttacctgtcaggcgaggaggttgaagatgacctggacctggttggtgccccggagtacgaatgctatgccccggacacagaggagttggaggcagagagaggaggtggcagaacagaggatggccacagctgcggagcaagcagggagtagatggagaggctctgcccatcccacatttgcagggaaaagcattggcacgcaacgcagcatgtggcttcattgaggcagttgatggagttaaaccatctgctcttctgctacttcaacattttctagcttttccgtgtatctaaacacaatttgctacacaagtcactgtttttttttccatgcactgtgtgtaatttaaaaattaaatggccatcttatcacagattctcac

SEQ ID NO: 9372 - protein, 176 aa, Homo sapiens [sequence omitted]

SEQ ID NO: 9373 - DNA, 2135 bp, Homo sapiens
aatgtaaaggatcctgggaccaacaattttgggaattgctgagctggatgataataaagaaattattcagtttcctcctcagttttaaaaaatgcagaaatccaaatccagctcactgtccagctctctcagaactggaattcctcctttctgcctcccttctcatcatgccccatgtttagggtggggacagacgtagaaaaggtggccgtgtgtgggcttcgttccaggcaccctgcctggcttccctgcatcattaccacacacgatgatgcccaggggtctgtgaaactgcatatcagagaatgcttatttcttactgtttaacaaaagcaagaaaatgagagattattgacaagtgttgaaacagcattgttttctgatttttaggtatcagaaaattcagttgagctgaatgtccctcttcccaactcctgcggtcacccaagatttagggtcaccgttttccatagctgtgtaccaaagatctgtggtcacggctttcgctggttatatgtgccgtgcctacattggccctaggtctgtattatgtgatgtgcatgatacaaatatcacttctgtgtctaatatctgggaacctgagggttgtgtcgtgccagggcgtgtccactgggcacaggaggacaggctgttagtgcacagaccctggagcccaaggctacggcgatgagttcagatcaggttatttgtacagatcgcacaagttgcgttgagaaaagtcaaggcaattgcagttatgatgcattttgcatcccttttttgatgtggtagttgactaaagatgactcttctgggctgaggttttcatttttgagtaatacgataaatctcactcctgcctcttttttttttttttctttttttttgagaccgagtcttgttctttcacccaggccggagtgtagtggcactatcttggctcactgcaagttccgcctcccgggttcaggccattcttctgcctcagcctcccgagtagctgggactacaggtgcctgccgccacgcctggctaattttttgtatttttagtagagacggggtttcaccatgttagccaggatggtctcgatctcctgacctcgtgatccgcccgcctcggcctcccaaagtgctgggattacaggcgtgagccaccgcgcccggcctctcactcctgcctcttggttacatcttgaatcatatgttcagcactgtcacgcctctccactgagtgtcacggcacagctgtgagggtctgtgcgttctgtctcctaggcaccttttgatgtcccagcagaccctgaggaatgtgccaccgatagtgtttgttcaagacaagggaaatgcagctctagctgagcttgatcagttactggcagtcgcagactttggaccccgggatgaaagagacaactttgtacaaaatgatttcagggaccctgatgccccacaaccctgcggcaccacagagccgaccacaagctccagtctgtgtgggatcgatcatgaggcgctcaacaagcagattatggagtacaaaaggaggaaagataaagggctcgggggcctggtgtggcaggggcaggtggctgagctgacaacgcagatgaaaaagggaaggaagagggccaagccccgcctggagcaggacagctccctcaagagttacctgtcaggcgaggaggttgaagatgacctggacctggttggtgccccggagtacgaatgctatgccccggacacagaggagttggaggcagagagaggaggtggcagaacagaggatggccacagctgcggagcaagcagggagtagatggagaggctctgcccatcccacatttgcagggaaaagcattggcacgcaacgcagcatgtggcttcattgaggcagttgatggagttaaaccatctgctcttctgctacttcaacattttctagcttttccgtgtatctaaacacaatttgctacacaagtcactgtttttttttccatgcactgtgtgtaatttaaaaattaaatggccatcttatcacagattctcacaaaaagaaaatggtaaaatagtgtctctgagatgctggcatggccacctccacctgcagagccctgccaggtgccagtgagtgct

SEQ ID NO: 9374 - protein, 176 aa, Homo sapiens [sequence omitted]

SEQ ID NO: 9375 - DNA, 1346 bp, Homo sapiens
tgcgactctgagtcatactgaattctttgtgtcacctccgacgcaaagattcgttttgctgtttatcagaagagaaaacacagattccataccttgtcagctcctatttagttcggcttccctcttaatgtcccagcccctgtgagctgtcaggttctaaattcagaattctctcaattctgtcaggttctgcactacgagtcagtgtcatccctccaagccctggctctctgccagtgcagcagggctgtgagaatcaagacggcacagggaaggcatctgtcccagcatttgcacatgacaggtgcccacggtgcaggagtagaatctgtggaagcagcagtggctttagttgctgtgccctgccacctcctccccaaaaaggagaagtgtccaagggatagcagacccgtagcactgagcggcctgccgtgctgaccactggatccaggccacgtgctgcagacagcggctgtgggcgagtgatgaggccactacccagaaagctgcatgtgcactgtgtgggcaagataacttcaggttacaaggctctggtacttgaccatgatgactccatgagaaaacagcagaacgccagctttgcaggtggatgaagacctgatcattgaagttcaccagttatttttctcaagaatgtgaataacaatgggatttgcactcattatatttttagaatggcttcgcataattttcatgcatcctgtggacgatgaacacaaatgcagctgtggccgtgcctggcctgtgtgtgttgaacgcgttcctgccgtgcgggagccacctacccagcggagcctcagagtctgagttctcaatgagtcaacattttgggtgtgtatgccaagaggtgacacgaaacagaagttgggatcactgtggttaacctgagcatgttggagaccaaggagaggctgatgttaatgttggatttttgtgaaaatgattcctttcaaagaaagacctgtgacagttggtaattgcagctaatgtgtttccacaaacagccattttgtgttggcaatcacaccgtccaccatcagggttgctgacaggagcagtgttcaggagtctcagacagtggattgtgctgcttcaggcgcctgctggctggagggtttgcaggctgccaggggcctcagctgaagacctggacccacaggacccacagaggcaaattgttcagttgactgtacagtgtgagaatgaaacattaattccccttctccacctcatatgagaaatgtgaattgtcttttttaaatttgggaatctgggttatagtatgtgtgagtcaattttttcaacaatgactttttttttggctc

SEQ ID NO: 9376 - protein, 57 aa, Homo sapiens
MNTNAAVAVPGLCVLNAFLPCGSHLPSGASESEFSMSQHFGCVCQEVTRNRSWDHCG

SEQ ID NO: 9377 - DNA, 5186 bp, Homo sapiens
ttctaatgtcacaacttccaaagctgtcggaaacctgcatttaagtgcacctgtcaaagtcctatggttgattataaaaccaccttttaaagaggaccaaaacaagacaattgtctgtggatgacaaaagtcttaggccagccactattaaagtcaaaattgataatgaaatttggttatttctgtggcatataacaatgttatgtaacaattttcactattaataacatacactaagtcatatcagaattatagaactttcttataattttggaacacataccaataacatatttattcaaatacagcccaaagttagccaaacattatttcatatttgacaatgcttcctgtatgatttttataccaaataagccaaatctcacctttacattagtgtactattaatgctaaaccctaatcttaataaaaccttatagacaaatgtatttaatcttaatcagtttgaccataaggtaagattctttttttgagacagagttttgctcttgttgcccagactggagtgcagtggcacaatcttggctcactgcaacctctgcctcctgggttcaagcaattctcctgcctcagtctcctgaatagctgggattgcaggtgcccaccaccatgcccagctaatttttgtatttttagtagagacagggtttcaccatgttggccaggctgttcttgaactcctgacctcaggtgatccacctgcctgggcctcccaaagtgctgggcttacaggcatgagccaccatgcccggcccctaaggtaagattcttataccttttataaccctttacaatttttttttgttaaagagtggattataagcaggattttgctttaagaaaaacctgttatgtttttattcctatgtttaatttacaggaaaactgaataatacccctttaactttagccaatgtccatacacagaatttcttttacaattaattttttacaaaccttccacaacttgttcaaacctttagcttgatcctaacttaaaacaatactttaaccctttaatctaggcagaaacatccacattcccatgacttcttataatctttaccaaaagtatattctactttccttttcgccttgggtgtggaactatttcttgcgtagtctcaaatacagtgttagcttttagcaccttttgcttttggtgaaaatcttggtaagtcagggatttttcattatgtgccaggtgtggggcctagcctgggacccaccagacagaagtgcagatgagggcagaccctcccgcatggctagggtgtggctctccacatgtccccaggccttagctagaatctaatgtccccaagctaggtaaattggacaattttcaaaagtcaaataagcagtttatgaccttaaagcattgagtaaacttcatatcctacctgcataatttagaccaaatgtctttattttaccaataatctttaaaactttttatttcccaaagattacttcagtcacatgagctaaataaaagttattacactatttacttttctgacaaaatatttgatttaagctgttattgtaattaaaccaattaatcaaaactcttttatattacacacacaacacatataaatagaagacgaaggactcatcccctaagacaggaattgggccctaaacacgggccgccattgtgaaaaaagaaagcacaaccacatggttacaagttcaagctcccagggacctacaagacaagagggaaacctcatccagtttcgtttttttttcagggacctgtagcaacgtttataactgaccagtttgctggggcatcttgaacagtgggcttataggagtcccgctctccgtggtggttcccacatccactcaggggtgtctgggttctcagggacacctgcttcttgctgggcaccgtggcctggacttaccacctggcctccagggttcaggccgtggacatctgccctgaagtagcctgtggggactgtcacgccacagttaatgtcctgggtccttggcatcaagtctgtaaagctgtctttgctttctcaacagcactgtgtgggagttggctgggcctcggcgactgttgcctgtctctgtcgtcactaggatgttagcgggaaatggtggcgttctctccacgcagttgctgctttgcctgtggatcatgtttttcttctccctattgatcagcacacatcacagatttgatttgagacggagtcttgctctgtcacccaggctagagtgcagtggcgcgatctcggctcactgcaacctctgcctcccgggttcaagtgattctcctgcctcacctcccgagtagctgggattacaggcacccgccaccgcacccggctaacttttgtattttcactagagacagagtttcaccatcttggcccggctggtctcgaacccctgacctcgtgattcacctgcctcagcctcccaaagtgctgggattacaggcgtgagccactgggcccaggctattttttaattaagttaatagtaagttataaacaacacattataaataatataaattacaaataatacattaataaattaataatacaatttttttaattttaatttttaacatgttaggcattgaggtaagtacagtggataaacacccatcacgcacagaaaaaaggaatgaggaaggcacgtttgccacacatctgctccctgctctgggagccctccctgttccttgtggtttaatcttctagaactctgatggcggcattactgtgagttttgcttctccagaaggcttcttcttaaagctttctgagcactggtactcacaaaactctcccctggtgaaatgaaaacacacacaggcgggaagtgagccagttctcaacttgagtggcttctccccaatgcatgctttttaaaacttccagcgttttctaatcagatctgggcaatattgtggcatcacctcctgcatccgcctttaccctcctcatcctgttctttgtcctaaaaaaggctgtgggaccagccggtctcagagcccaggtggagcctcagctcccctgcgacctgtgcttttccgagggtgccgcctggcagggcctgcgtcagggtcaccctggcaggaccagaggtcaaaggtcaccctggccagaccagagcctcggaggtccctgggctgcagtgagggagatcagaggtcgtgggctggggccagccaagaagagttgggggcagcagggagcacagtctggcccttgacattcccacctgcttgtctgctccacaggacagtggtcaggagggcccgggagtgagtgtgcagggtcctgggtgggctccacatgcatctcatggggcagcaggaccccgatgagggcacccacagggtgggagggtggagagctctgctaaccaagatggggaggcccgggtcagggccagctctgcctccgaggctatatccagcagccttcggccttgccatgtgagctcgtggaagcccatgcagtgtgtgcccctctggttgtatctggtgaggccttgtacagggatgagctcggacctgagtttcagtcagcagaaaaataagtttctggaggacttgattcttttcagggcattcagttctgtgtttcccctgtacccaagatgagatttctaatacagtgatgtgtttaaaattaaccatatctccagggcagcatccagctgtgagccttggtgaagaaggtcctggagacgggagtgaatggggtggggccatccttggacacacaggaggttcctgggccctggggatgtgtccgtgggtgctgaggagatgaggggtgcatgctgtctgggttcttttctctccgctccatctcttgcaaggtgaggaggggtctgctgttgattcctgtcctgcctgtggtgctgaagctcccctcaagctgggctttctcagcagggagagtttcttcattgcttgtagaagtttatgcttccctgctttagtctgggcaaattgctccccaaaggacatgagagctgaggctgtgtttttagagatagggagcagctacagggacttagcttcttaatgaattaattcacaaatctcagcagctcctggcgataagatatgcagagctgatggcagggaggacacgaggtggctcaaagggaactaagctttgcgtgtgaatttagggtgaggctaagagccctccaggcaggcagaggagggtgctggagggaggagaggccggtataggaccttcgccttgaagaaagcacccaggtaaggctgggcagtgttgggagagagctttagttgatctttttgtttttggatgttttctgatggtcctctatggctttggaaaatggagagaagacagagaggcgtaggcactgaaggctgcagctgtgattgaggatcacgacgcctgttggggctgctcacctgcctaggcctgggtgaggaggtgctggggcctggctgcacacacgttcctgccccagaactcagttgggggctcggagcaggagaagctgcacacggtggatgaagacctgatcattgaagttcaccagttatttttctcaagaatgtgaataacaatgggatttgcactcattatatttttagaatggcttcgcataattttcagttgggcgtggtggctcacgtctgaaatcccagcactgtgggaggcagaggcgggcagatcacgaggtcaggagttcgagaccagcctgaccaacatggtgaaaccccgtctctactaaaaatacaaaaattagccaggtgtggtggtgggtgcctgtaatcccagctactcaggaggctgaggcaggagaattgtttgaacccaggaggcggaggttgcagtgagccaagatcatgccactgcactccagcctgggtaacagagtgagactctgtctcaaaaaaataaaaataaataaaaataaacaaattaattaattttaaaaaagaaatgacctatttggaaaccaaattttctttttggaaggcccccattttgtgttcagtgaaaaattagttggcaagacatggacttctaatcaagttatttttgtagttgtgctcagaatatctgtggaatattagctgacgcagagtagatttttcacgttagatattggaataaagagagttgctcctt

SEQ ID NO: 9378 - protein, 55 aa, Homo sapiens
MGFALIIFLEWLRIIFSWAWWLTSEIPALWEAEAGRSRGQEFETSLTNMVKPRLY

SEQ ID NO: 9379 - DNA, 742 bp, Homo sapiens
cgttcctgccccagaactcagttgggggctcggagcaggagaagctgcacacggtggatgaagacctgatcattgaagttcaccagttatttttctcaagaatgtgaataacaatgggatttgcactcattatatttttagaatggcttcgcataattttcatgcatcctgtggacgatgaacacaaatgcagctgtggccgtgcctggcctgtgtgtgttgaacgcgttcctgccgtgcgggagccacctacccagcggagcctcagagtctgagttctcaatgagtcaacattttgggtgtgtatgccaagaggtgacacgaaacagaagttgggatcactgtggttaacctgagcatgttggagaccaaggagaggctgatgttaatgttggatttttgtgaaaatgattcctttcaaagaaagacctgtgacagttggtaattgcagctaatgtgtttccacaaacagccattttgtgttggcaatcacaccgtccaccatcagggttgctgacaggagcagtgttcaggagtctcagacagtggattgtgctgcttcaggcgcctgctggctggagggtttgcaggctgccaggggcctcagctgaagacctggacccacaggacccacagaggcaaattgttcagttgactgtacagtgtgagaatgaaacattaattccccttctccacctcatatgagaaatgtgaattgtcttttttaaatttgggaatctgg

SEQ ID NO: 9380 - protein, 57 aa, Homo sapiens; identical to SEQ ID NO: 9376

SEQ ID NO: 9381 - DNA, 793 bp, Homo sapiens
cgttcctgccccagaactcagttgggggctcggagcaggagaagctgcacacggtggatgaagacctgatcattgaagttcaccagttatttttctcaagaatgtgaataacaatgggatttgcactcattatatttttagaatggcttcgcataattttcatgcatcctgtggacgatgaacacaaatgcagctgtggccgtgcctggcctgtgtgtgttgaacgcgttcctgccgtgcgggagccacctacccagcggagcctcagagtctgagttctcaatgagtcaacattttgggtgtgtatgccaagaggtgacacgaaacagaagttgggatcactgtggttaacctgagcatgttggagaccaaggagaggctgatgttaatgttggatttttgtgaaaatgattcctttcaaagaaagacctgtgacagttggtaattgcagctaatgtgtttccacaaacagccattttgtgttggcaatcacaccgtccaccatcagggttgctgacaggagcagtgttcaggagtctcagacagtggattgtgctgcttcaggcgcctgctggctggagggtttgcaggctgccaggggcctcagctgaagacctggacccacaggacccacagaggcaaattgttcagttgactgtacagtgtgagaatgaaacattaattccccttctccacctcatatgagaaatgtgaattgtcttttttaaatttgggaatctgggttatagtatgtgtgagtcaattttttcaacaatgactttttttttggctc

SEQ ID NO: 9382 - protein, 57 aa, Homo sapiens; identical to SEQ ID NO: 9376

SEQ ID NO: 9383 - DNA, 1057 bp, Homo sapiens
cgttcctgccccagaactcagttgggggctcggagcaggagaagctgcacacggtggatgaagacctgatcattgaagttcaccagttatttttctcaagaatgtgaataacaatgggatttgcactcattatatttttagaatggcttcgcataattttcatgcatcctgtggacgatgaacacaaatgcagctgtggccgtgcctggcctgtgtgtgttgaacgcgttcctgccgtgcgggagccacctacccagcggagcctcagagtctgagttctcaatgagtcaacattttgggtgtgtatgccaagaggtgacacgaaacagaagttgggatcactgtggttaacctgagcatgttggagaccaaggagaggctgatgttaatgttggatttttgtgaaaatgattcctttcaaagaaagacctgtgacagttggtaattgcagctaatgtgtttccacaaacagccattttgtgttggcaatcacaccgtccaccatcagggttgctgacaggagcagtgttcaggagtctcagacagtggattgtgctgcttcaggcgcctgctggctggagggtttgcaggctgccaggggcctcagctgaagacctggacccacaggacccacagaggcaaattgttcagttgactgtacagtgtgagaatgaaacattaattccccttctccacctcatatgagaaatgtgaattgtcttttttaaatttgggaatctgggttatagtatgtgtgagtcaattttttcaacaatgactttttttttggctcaaaatgttttattttgttttgttttgttttgttttgttttgttttgtggtagaggtgacgtcttgcttgctatgttgcccaggctggtctcaaactgctggactcgagaaatcccccttccttggcctcccaaaatgctgagcctacaggtgtattcaccttaaaaaaaatttaaagaccactaggaggtcagcaatctcaaatgtttcactagttcttcatcaaggtgggaatgaatctgattaaaacaacttagaagacttt

SEQ ID NO: 9384 - protein, 57 aa, Homo sapiens; identical to SEQ ID NO: 9376

SEQ ID NO: 9385 - DNA, 456 bp, Homo sapiens
gtcaaaatctacctggaggtgaaagctgggtggatgggggtccattcctctgtgaactggggatggcaacgcagtctccaaagggtaagagcaaacggacaggcctggagggcgcagctcagatgcacccgttggcaaatggacaggcctggagggcgcagctcagatgcacccgttggcaaatggacaggcactgtctgcactgcctgtcgtccagaccccacctctgcccaggcaccctggccttaatgctgcagcccacagggcacccagctggtgactgaggcctgttctgagcccctcgctggcacattcctggacttctcagtttggtgccagggcctcattcctgcttcccatttgctctgttacaggggaattagtcccttcctttactcttttgtgctgtgctttctaaacgtggtgtttgtcataataagaagcatgaggggcaca

SEQ ID NO: 9386 - protein, 73 aa, Homo sapiens
MATQSPKGKSKRTGLEGAAQMHPLANGQAWRAQLRCTRWQMDRHCLHCLSSRPHLCPGTLALMLQPTGHPAGD

SEQ ID NO: 9387 - DNA, 2099 bp, Homo sapiens
tcatcaaccaatcaatacataaccttgcttatgcatgttcctgtttaaagacacctttttgaatagacattggtgatcccattaacactgagtccatggccaacagcactggaactcacacctgagtaaagctatctcacatttctctgtgaggcacatcacagcctcttgctcttaggacgctagacagtacatcagtactgggcttggggtcattttaaacagcaaaatcactaacaaaaatcacagaaatgtgaagaatatggtgctatgtgggccgtgaaaagagcacttgttggtggcatgagctgaaatgaaatggtggggcgtcacctgtgtgacctcagccaggcccatggcctgtggctgactctggggtggcaccgtgctggcaggtggggcacactcaaagatgagctgttattatcaaagggtgtgaaatttccagacaaccactgacttgatgaatcctcttgggcaccagagcgtgtgctgcatctgagatgctggctggggagcccaggcagtcgaggggagaggagcgctcactgtcttactggaaacaagctgtttggagaacaacctgtttttactctccttttgcaagcaaaacactcccactgagcaatagcgtttatggcagcatttagcggacacagaagcacatctgaaagtggagagagacgcgtttccccattgctggccgagtcccaccactttgctcagctatgaacacctgacatctcgtttcattttcatgcaaaatctggagataattattatccacaattctaaggccttaggcccctccgcatgagcctgccattaccacttcattcccttgcacctgaaagactccagagccccttgaaagaacaggtcctccaagaggagcatcgccagccagcccctgaatctcctgaggaaactctcatgcacatatcttgacctgagcacagaccggacgccagcggagggcaggagcaagcaggacacactgtggctgaggaggggaccctgggcttgtgggcctcggagaggcagagcaggggaggcagatgagactgcacacagctttttgtttgacatatcctaagccccctgcacacgccactcaaggtcttctctgtgccccatctggtgcaggaggcctgtctgtctgtgaaattgcttttagcaatagctgtggatcaccactgagagggtgaatatacaaatgaacaatgggcagaccgtctatgatggcaaaacttggacctccaaccttgaggccaaagcacatcatgtgcggcctctggcgggactcaggtctgggaagcgactgcagcttccctattttctagctctgcttccaactaagaaagtcagatattctccccaaaccaaccccataggatgcctgctgccaggtggcccacccccagcttccccctgacaacagcctccacccagggcatacccaaccagagccttcccatcttctaatgggaagcttcccctccccaccccaccttcaaggctctgccacgcgcagggacagtgtagccttcttggctacagcttcgagtgagcagcctctgccatcctcgctgatgtccccggttaccgtgaaggctcctccaggacactgtctgcactgcctgtcgtccagaccccacctctgcccaggcaccctggccttaatgctgcagcccacagggcacccagctggtgactgaggcctgttctgagcccctcgctggcacattcctggacttctcagtttggtgccagggcctcattcctgcttcccatttgctctgttacaggggaattagtcccttcctttactcttttgtgctgtgctttctaaacgtggtgtttgtcataataagaagcatgaggggcacatggatcagcctcacagacaggtgagtctgtagctcttaccagacccttgttcacatccatgaacttggctgtggatcaccagggaaactgggtgaggttctgccatccaggggttttgtcctgagaacttggcttttagaacattctctctggttttttgcttgggggtgggggtctggtgcagggtgctgggtctgtgtttggaggag

SEQ ID NO: 9388 - protein, 48 aa, Homo sapiens [sequence omitted]

SEQ ID NO: 9389 - DNA, 5389 bp, Homo sapiens
acgagagtttgcacagatgtggaaaggagctggcagggcagttccctgggacagaagggagtcagggggtccaacaggggccccccactgccaccccagagcctccagtccagctttaggcaggggccccggggggcctgtgggaagtgccaggggcccccaagcacactctgctctcattggctggctgcgcctacatgcaaatgagggccaacgtcacttcctgaggccaatcgagcgccattttctctttctggctgcgcgggaggaggggaccagtcgcgctgggggtgggcgcgcgctgaggcgggggtcccgccgcgcggggcggaggcgcgggcgggcgcaggcggccccacgggacgcggctgcgctcggcggaagacgcggcagccctgcgagaggcagcagcggagacgcggtgctcctcgggcgccaagcggaaaatttcaaaaatgtttcaaattcctgtggaaaatcttgacaacatcagaaaggtgcgaaaaaaggtgaaaggtattcttgtggatattgggcttgacagctgcaaggagttactgaaggaccttaaaggctttgatccaggagagaaatactttcataacacatcatggggtgatgtttctctctgggaaccttctggaaagaaagtgagatatcgaacaaagccatactgttgtggcctctgtaaatactctacaaaggtgcttacttcattcaagaatcatttacatcgttaccatgaagatgaaattgaccaagagctggtgatcccttgcccaaactgtgtatttgcatctcagcccaaagttgtgggaaggcacttcagaatgttccatgcacctgtccggaaagtccagaactacacagtgaatattttaggtgaaactaaatcatctaggagcgatgtgataagtttcacatgtctaaaatgtaacttttcaaacactttgtactacagcatgaagaagcatgtgctggtagcccattttcactacttaattaactcctactttggcctaagaactgaggaaatgggtgagcaaccgaaaactaacgatactgtttctatagagaagatcccaccacctgacaaatattactgtaaaaagtgcaacgccaatgccagcagccaggatgcgttaatgtatcacattttgacatcagacatacacagagatttggagaataagcttagatctgtgatttcagaacatattaagaggactggactcttgaagcaaacgcacattgctccaaaaccagcagcacatttggctgcaccagcaaatggcagtgctccaagcgctccagcgcagcctccttgcttccatcttgctttgccacagaacagtccaagcccagccgcaggacagccagtgactgtggcccagggtgcccctggaagcctcactcattccccccctgctgctggccaatcccacatgactctggtctccagccctctgcctgtgggccagaacagcctcaccctgcagcccccagcacctcagcccgtctttctttctcacggggttccacttcatcagtctgtgaatcctcctgtgttgcccttgagtcagccagtcggacctgtcaataagtctgttggaactagtgtcctccccataaatcagactgttcgccctggggttttacccctcacccagcctgtgggacccataaacagacctgttgggcctggtgttcttcctgtgagcccctctgtcacccctggggtcctgcaggctgtctcgccaggggtgctttctgtgagtcgggcggtcccgtctggagtccttcctgcaggccagatgactcctgcaggccagatgactcctgcaggggttatccctgggcaaacagcaacttctggggttcttcctactggccagatggtccagtcaggagttctccctgtgggccagacagctccgtcacgggttcttcccccaggccagacagccccattgagggttatctctgcaggccaggtggtcccgtctgggcttctttctcccaaccagacagtctcctcctcagctgttgtgcctgtaaaccagggtgtgaattctggtgttctgcagcttagtcagcctgttgtgtcgggagttcttcctgtgggccagccagtgaggcctggggtcttgcaactcaaccagactgtgggcaccaacattctgcctgtgaatcagccagtgagacctggtgcttcgcagaacaccaccttcctgacatcaggctctattctcagacagctcatccctacagggaaacaagtgaatgggattccaacctacacgctggcccccgtgtctgtcactctgccggttccccctggaggccttgcgactgtcgctccgccccagatgcccatccagctcctgccgtcaggtgcagctgcaccaatggccggttccatgcccggcatgccctctcctccagtgctggtgaatgctgctcagagcgtgtttgttcaggcctcctcctctgcagcagacacaaaccaggtgctcaaacaggccaagcagtggaagacctgccctgtctgcaacgagctctttccgtccaacgtctaccaggtccacatggaggtagcgcataagcacagcgagtccaagtctggtgagaaacttgagcctgaaaaactggcagcgtgtgcaccatttctaaagtggatgagagagaaaacggtgcgatgtctgtcttgtaagtgcttggtctctgaggaagagcttatacaccacttgctgatgcatggcttggggtgcttgttctgtccatgcaccttccatgatatcaaaggtctttcagagcacagcaggaataggcacctggggaagaagaagttgcctatggattatagcaacagaggttttcaattagatgtcgatgccaatggcaacctgctctttccccaccttgatttcatcaccatattgccaaaggagaagcttggggagcgggaagtctacttggcaatcctggctgggatacactccaagtcactggtgcctgtgtatgtgaaggtgaggcctcaggctgagggcacccccgggagcaccggcaagcgagtgtccacctgccccttttgctttggcccctttgtgacaactgaggcctatgagctgcatttgaaggagaggcaccacatcatgcccacagtccacacggtcctgaagtctcccgccttcaagtgcatccactgctgtggggtctacacgggaaatatgaccctggctgccatcgccgtccatttggtgcgctgcagaagtgctcccaaggacagcagctcagacctgcaggcccagccgggttttattcacaacagtgaactgcttttagtcagtggtgaagtgatgcatgattccagtttttctgttaagagaaagctgcctgacggccacttaggggccgaagaccagcggcatggggaggagcagcctcccatcctaaatgccgatgcagccccgggtccagaaaaggtgacgagtgttgtgccttttaaaagacaaaggaatgaaagcagaacagagggacctattgtcaaggacgaggctcttcagattttagcattagatcctaaaaaatatgaaggccgttcttatgaagaaaagaagcaatttcttaaagattatttccataagaaaccatatcctagtaaaaaggaaatagaactgttgtcctcactcttttgggtgtggaaaattgatgtggcttcattttttggaaaaagaaggtatatttgcatgaaagcaataaaaaatcacaagccttctgtacttttaggctttgatatgtctgaacttaaaaatgtgaaacatagattgaactttgaatatgaaccataaaacttgcaaaaaaaaaaaaaagtaactctaaagtagtaggtagatttttttcagttgaaatttcacagtgttgtcctcactgtgttggtgaatcaacctcagtggtcactgtgctgctctgcagagttacttcaggtgctggagagacccctgttaccaggaagccagtagttatttcacatctattgtttcctgcagtttgatttgtaacagaacagttgttttcaggtttttttctctgtcatgtaaatgaaatcttttgatatttcatgcacgccttgttttcccactagtgtcagtatcgtatgataagaaactgaaatctataaataatttgctttttcattaaggacatttcagcctttttcagaatacttgatttaactgcgagtggaagcatcgatctccttcagctttccctgtagcagcagatggtacagtgagtgttcagagacgtgggtacaaaccctgtgatgtatgtataaggctccctgaggatgcactgcattaacttacgctgacttctttgtaagatctttgcttatagattataatttagatctgtatttttttaggtttatcctaatagctgtttttttttttaaccataactcatagaaaatcaaatgtttttatttgttaaaagtagactgaatttgacatctggtatgctggtatgtagctcatacatcaagagttattttacaaataaatttattctgtagatgcagaaatatttttcagtgtagattttcccttttgatatgctaagtcatttctccgttcagaggtaaaacaataaatttttagtgcctttagaataaacattgaaagaatacaccccaaaactcttctcctaacttaactactcataaactagtgaaagggaaggtctatgatactcaggaataagattattgcccctgagtgtgaaaactaacttaaatttcagcatagggtttcaggggacatggcgaagtttacagactgagatctcagtctccatggttggtacagtaagtctttcaccacattttctgaaggtcatgtttagtggagaaacgggcttttctctagctggtttaggctggaagctgtgtccgggtcgatgggatggcatattgttaaagaatctccattgtcgtcactgtcctgtggatgttaaacctcgtttttttccccacacgatattaaaacttaaagcaccagaaccagtcatggagaccagccagtttagatggtaagtcatatttctggtggtacacagcagaggaaccccttcactctatctttaggtagaaatatttggaggatgtgacagcctctgagaaacataatgttactatgtggattttaaaaaatataatacttgcatgtaattgctataatgttcatatttgaggcagttgtgaaactggtttatgattgttggtgtactctgttgtaaattcaaagagagcttgttgaacattttttttttttacctattgttttcagagtgtctattttgaattaaaatttgttacaccgctgcaaat

SEQ ID NO: 9390 - protein, 1131 aa, Homo sapiens; identical to SEQ ID NO: 1465

SEQ ID NO: 9391 - DNA, 5068 bp, Homo sapiens
ctctttctggctgcgcgggaggaggggaccagtcgcgctgggggcggctgcgctcggcggaagacgcggcagccctgcgagaggcagcagcggagacgcggtgctcctcgggcgccaagcggaaaatttcaaaaatgtttcaaattcctgtggaaaatcttgacaacatcagaaaggtgcgaaaaaaggtgaaaggtattcttgtggatattgggcttgacagctgcaaggagttactgaaggaccttaaaggctttgatccaggagagaaatactttcataacacatcatggggtgatgtttctctctgggaaccttctggaaagaaagtgagatatcgaacaaagccatactgttgtggcctctgtaaatactctacaaaggtgcttacttcattcaagaatcatttacatcgttaccatgaagatgaaattgaccaagagctggtgatcccttgcccaaactgtgtatttgcatctcagcccaaagttgtgggaaggcacttcagaatgttccatgcacctgtccggaaagtccagaactacacagtgaatattttaggtgaaactaaatcatctaggagcgatgtgataagtttcacatgtctaaaatgtaacttttcaaacactttgtactacagcatgaagaagcatgtgctggtagcccattttcactacttaattaactcctactttggcctaagaactgaggaaatgggtgagcaaccgaaaactaacgatactgtttctatagagaagatcccaccacctgacaaatattactgtaaaaagtgcaacgccaatgccagcagccaggatgcgttaatgtatcacattttgacatcagacatacacagagatttggagaataagcttagatctgtgatttcagaacatattaagaggactggactcttgaagcaaacgcacattgctccaaaaccagcagcacatttggctgcaccagcaaatggcagtgctccaagcgctccagcgcagcctccttgcttccatcttgctttgccacagaacagtccaagcccagccgcaggacagccagtgactgtggcccagggtgcccctggaagcctcactcattccccccctgctgctggccaatcccacatgactctggtctccagccctctgcctgtgggccagaacagcctcaccctgcagcccccagcacctcagcccgtctttctttctcacggggttccacttcatcagtctgtgaatcctcctgtgttgcccttgagtcagccagtcggacctgtcaataagtctgttggaactagtgtcctccccataaatcagactgttcgccctggggttttacccctcacccagcctgtgggacccataaacagacctgttgggcctggtgttcttcctgtgagcccctctgtcacccctggggtcctgcaggctgtctcgccaggggtgctttctgtgagtcgggcggtcccgtctggagtccttcctgcaggccagatgactcctgcaggccagatgactcctgcaggggttatccctgggcaaacagcaacttctggggttcttcctactggccagatggtccagtcaggagttctccctgtgggccagacagctccgtcacgggttcttcccccaggccagacagccccattgagggttatctctgcaggccaggtggtcccgtctgggcttctttctcccaaccagacagtctcctcctcagctgttgtgcctgtaaaccagggtgtgaattctggtgttctgcagcttagtcagcctgttgtgtcgggagttcttcctgtgggccagccagtgaggcctggggtcttgcaactcaaccagactgtgggcaccaacattctgcctgtgaatcagccagtgagacctggtgcttcgcagaacaccaccttcctgacatcaggctctattctcagacagctcatccctacagggaaacaagtgaatgggattccaacctacacgctggcccccgtgtctgtcactctgccggttccccctggaggccttgcgactgtcgctccgccccagatgcccatccagctcctgccgtcaggtgcagctgcaccaatggccggttccatgcccggcatgccctctcctccagtgctggtgaatgctgctcagagcgtgtttgttcaggcctcctcctctgcagcagacacaaaccaggtgctcaaacaggccaagcagtggaagacctgccctgtctgcaacgagctctttccgtccaacgtctaccaggtccacatggaggtagcgcataagcacagcgagtccaagtctggtgagaaacttgagcctgaaaaactggcagcgtgtgcaccatttctaaagtggatgagagagaaaacggtgcgatgtctgtcttgtaagtgcttggtctctgaggaagagcttatacaccacttgctgatgcatggcttggggtgcttgttctgtccatgcaccttccatgatatcaaaggtctttcagagcacagcaggaataggcacctggggaagaagaagttgcctatggattatagcaacagaggttttcaattagatgtcgatgccaatggcaacctgctctttccccaccttgatttcatcaccatattgccaaaggagaagcttggggagcgggaagtctacttggcaatcctggctgggatacactccaagtcactggtgcctgtgtatgtgaaggtgaggcctcaggctgagggcacccccgggagcaccggcaagcgagtgtccacctgccccttttgctttggcccctttgtgacaactgaggcctatgagctgcatttgaaggagaggcaccacatcatgcccacagtccacacggtcctgaagtctcccgccttcaagtgcatccactgctgtggggtctacacgggaaatatgaccctggctgccatcgccgtccatttggtgcgctgcagaagtgctcccaaggacagcagctcagacctgcaggcccagccgggttttattcacaacagtgaactgcttttagtcagtggtgaagtgatgcatgattccagtttttctgttaagagaaagctgcctgacggccacttaggggccgaagaccagcggcatggggaggagcagcctcccatcctaaatgccgatgcagccccgggtccagaaaaggtgacgagtgttgtgccttttaaaagacaaaggaatgaaagcagaacagagggacctattgtcaaggacgaggctcttcagattttagcattagatcctaaaaaatatgaaggccgttcttatgaagaaaagaagcaatttcttaaagattatttccataagaaaccatatcctagtaaaaaggaaatagaactgttgtcctcactcttttgggtgtggaaaattgatgtggcttcattttttggaaaaagaaggtatatttgcatgaaagcaataaaaaatcacaagccttctgtacttttaggctttgatatgtctgaacttaaaaatgtgaaacatagattgaactttgaatatgaaccataaaacttgcaaaaaaaaaaaaaagtaactctaaagtagtaggtagatttttttcagttgaaatttcacagtgttgtcctcactgtgttggtgaatcaacctcagtggtcactgtgctgctctgcagagttacttcaggtgctggagagacccctgttaccaggaagccagtagttatttcacatctattgtttcctgcagtttgatttgtaacagaacagttgttttcaggtttttttctctgtcatgtaaatgaaatcttttgatatttcatgcacgccttgttttcccactagtgtcagtatcgtatgataagaaactgaaatctataaataatttgctttttcattaaggacatttcagcctttttcagaatacttgatttaactgcgagtggaagcatcgatctccttcagctttccctgtagcagcagatggtacagtgagtgttcagagacgtgggtacaaaccctgtgatgtatgtataaggctccctgaggatgcactgcattaacttacgctgacttctttgtaagatctttgcttatagattataatttagatctgtatttttttaggtttatcctaatagctgtttttttttttaaccataactcatagaaaatcaaatgtttttatttgttaaaagtagactgaatttgacatctggtatgctggtatgtagctcatacatcaagagttattttacaaataaatttattctgtagatgcagaaatatttttcagtgtagattttcccttttgatatgctaagtcatttctccgttcagaggtaaaacaataaatttttagtgcctttagaataaacattgaaagaatacaccccaaaactcttctcctaacttaactactcataaactagtgaaagggaaggtctatgatactcaggaataagattattgcccctgagtgtgaaaactaacttaaatttcagcatagggtttcaggggacatggcgaagtttacagactgagatctcagtctccatggttggtacagtaagtctttcaccacattttctgaaggtcatgtttagtggagaaacgggcttttctctagctggtttaggctggaagctgtgtccgggtcgatgggatggcatattgttaaagaatctccattgtcgtcactgtcctgtggatgttaaacctcgtttttttccccacacgatattaaaacttaaagcaccagaaccagtcatggagaccagccagtttagatggtaagtcatatttctggtggtacacagcagaggaaccccttcactctatctttaggtagaaatatttggaggatgtgacagcctctgagaaacataatgttactatgtggattttaaaaaatataatacttgcatgtaattgctataatgttcatatttgaggcagttgtgaaactggtttatgattgttggtgtactctgttgtaaattcaaagagagcttgttgaacattttttttttttacctattgttttcagagtgtctattttgaattaaaatttgttacaccgctgcaaat

SEQ ID NO: 9392 - protein, 1131 aa, Homo sapiens; identical to SEQ ID NO: 1465

SEQ ID NO: 9393 - DNA, 4916 bp, Homo sapiens
acgggacgcggctgcgctcggcggaagacgcggcagccctgcgagaggcagcagcggagacgcggtgctcctcgggcgccaagcggaaaggaccttaaaggctttgatccaggagagaaatactttcataacacatcatggggtgatgtttctctctgggaaccttctggaaagaaagtgagatatcgaacaaagccatactgttgtggcctctgtaaatactctacaaaggtgcttacttcattcaagaatcatttacatcgttaccatgaagatgaaattgaccaagagctggtgatcccttgcccaaactgtgtatttgcatctcagcccaaagttgtgggaaggcacttcagaatgttccatgcacctgtccggaaagtccagaactacacagtgaatattttaggtgaaactaaatcatctaggagcgatgtgataagtttcacatgtctaaaatgtaacttttcaaacactttgtactacagcatgaagaagcatgtgctggtagcccattttcactacttaattaactcctactttggcctaagaactgaggaaatgggtgagcaaccgaaaactaacgatactgtttctatagagaagatcccaccacctgacaaatattactgtaaaaagtgcaacgccaatgccagcagccaggatgcgttaatgtatcacattttgacatcagacatacacagagatttggagaataagcttagatctgtgatttcagaacatattaagaggactggactcttgaagcaaacgcacattgctccaaaaccagcagcacatttggctgcaccagcaaatggcagtgctccaagcgctccagcgcagcctccttgcttccatcttgctttgccacagaacagtccaagcccagccgcaggacagccagtgactgtggcccagggtgcccctggaagcctcactcattccccccctgctgctggccaatcccacatgactctggtctccagccctctgcctgtgggccagaacagcctcaccctgcagcccccagcacctcagcccgtctttctttctcacggggttccacttcatcagtctgtgaatcctcctgtgttgcccttgagtcagccagtcggacctgtcaataagtctgttggaactagtgtcctccccataaatcagactgttcgccctggggttttacccctcacccagcctgtgggacccataaacagacctgttgggcctggtgttcttcctgtgagcccctctgtcacccctggggtcctgcaggctgtctcgccaggggtgctttctgtgagtcgggcggtcccgtctggagtccttcctgcaggccagatgactcctgcaggccagatgactcctgcaggggttatccctgggcaaacagcaacttctggggttcttcctactggccagatggtccagtcaggagttctccctgtgggccagacagctccgtcacgggttcttcccccaggccagacagccccattgagggttatctctgcaggccaggtggtcccgtctgggcttctttctcccaaccagacagtctcctcctcagctgttgtgcctgtaaaccagggtgtgaattctggtgttctgcagcttagtcagcctgttgtgtcgggagttcttcctgtgggccagccagtgaggcctggggtcttgcaactcaaccagactgtgggcaccaacattctgcctgtgaatcagccagtgagacctggtgcttcgcagaacaccaccttcctgacatcaggctctattctcagacagctcatccctacagggaaacaagtgaatgggattccaacctacacgctggcccccgtgtctgtcactctgccggttccccctggaggccttgcgactgtcgctccgccccagatgcccatccagctcctgccgtcaggtgcagctgcaccaatggccggttccatgcccggcatgccctctcctccagtgctggtgaatgctgctcagagcgtgtttgttcaggcctcctcctctgcagcagacacaaaccaggtgctcaaacaggccaagcagtggaagacctgccctgtctgcaacgagctctttccgtccaacgtctaccaggtccacatggaggtagcgcataagcacagcgagtccaagtctggtgagaaacttgagcctgaaaaactggcagcgtgtgcaccatttctaaagtggatgagagagaaaacggtgcgatgtctgtcttgtaagtgcttggtctctgaggaagagcttatacaccacttgctgatgcatggcttggggtgcttgttctgtccatgcaccttccatgatatcaaaggtctttcagagcacagcaggaataggcacctggggaagaagaagttgcctatggattatagcaacagaggttttcaattagatgtcgatgccaatggcaacctgctctttccccaccttgatttcatcaccatattgccaaaggagaagcttggggagcgggaagtctacttggcaatcctggctgggatacactccaagtcactggtgcctgtgtatgtgaaggtgaggcctcaggctgagggcacccccgggagcaccggcaagcgagtgtccacctgccccttttgctttggcccctttgtgacaactgaggcctatgagctgcatttgaaggagaggcaccacatcatgcccacagtccacacggtcctgaagtctcccgccttcaagtgcatccactgctgtggggtctacacgggaaatatgaccctggctgccatcgccgtccatttggtgcgctgcagaagtgctcccaaggacagcagctcagacctgcaggcccagccgggttttattcacaacagtgaactgcttttagtcagtggtgaagtgatgcatgattccagtttttctgttaagagaaagctgcctgacggccacttaggggccgaagaccagcggcatggggaggagcagcctcccatcctaaatgccgatgcagccccgggtccagaaaaggtgacgagtgttgtgccttttaaaagacaaaggaatgaaagcagaacagagggacctattgtcaaggacgaggctcttcagattttagcattagatcctaaaaaatatgaaggccgttcttatgaagaaaagaagcaatttcttaaagattatttccataagaaaccatatcctagtaaaaaggaaatagaactgttgtcctcactcttttgggtgtggaaaattgatgtggcttcattttttggaaaaagaaggtatatttgcatgaaagcaataaaaaatcacaagccttctgtacttttaggctttgatatgtctgaacttaaaaatgtgaaacatagattgaactttgaatatgaaccataaaacttgcaaaaaaaaaaaaaagtaactctaaagtagtaggtagatttttttcagttgaaatttcacagtgttgtcctcactgtgttggtgaatcaacctcagtggtcactgtgctgctctgcagagttacttcaggtgctggagagacccctgttaccaggaagccagtagttatttcacatctattgtttcctgcagtttgatttgtaacagaacagttgttttcaggtttttttctctgtcatgtaaatgaaatcttttgatatttcatgcacgccttgttttcccactagtgtcagtatcgtatgataagaaactgaaatctataaataatttgctttttcattaaggacatttcagcctttttcagaatacttgatttaactgcgagtggaagcatcgatctccttcagctttccctgtagcagcagatggtacagtgagtgttcagagacgtgggtacaaaccctgtgatgtatgtataaggctccctgaggatgcactgcattaacttacgctgacttctttgtaagatctttgcttatagattataatttagatctgtatttttttaggtttatcctaatagctgtttttttttttaaccataactcatagaaaatcaaatgtttttatttgttaaaagtagactgaatttgacatctggtatgctggtatgtagctcatacatcaagagttattttacaaataaatttattctgtagatgcagaaatatttttcagtgtagattttcccttttgatatgctaagtcatttctccgttcagaggtaaaacaataaatttttagtgcctttagaataaacattgaaagaatacaccccaaaactcttctcctaacttaactactcataaactagtgaaagggaaggtctatgatactcaggaataagattattgcccctgagtgtgaaaactaacttaaatttcagcatagggtttcaggggacatggcgaagtttacagactgagatctcagtctccatggttggtacagtaagtctttcaccacattttctgaaggtcatgtttagtggagaaacgggcttttctctagctggtttaggctggaagctgtgtccgggtcgatgggatggcatattgttaaagaatctccattgtcgtcactgtcctgtggatgttaaacctcgtttttttccccacacgatattaaaacttaaagcaccagaaccagtcatggagaccagccagtttagatggtaagtcatatttctggtggtacacagcagaggaaccccttcactctatctttaggtagaaatatttggaggatgtgacagcctctgagaaacataatgttactatgtggattttaaaaaatataatacttgcatgtaattgctataatgttcatatttgaggcagttgtgaaactggtttatgattgttggtgtactctgttgtaaattcaaagagagcttgttgaacattttttttttttacctattgttttcagagtgtctattttgaattaaaatttgttacaccgctgcaaat

SEQ ID NO: 9394 - protein, 1006 aa, Homo sapiens
MFHAPVRKVQNYTVNILGETKSSRSDVISFTCLKCNFSNTLYYSMKKHVLVAHFHYLINSYFGLRTEEMGEQPKTNDTVSIEKIPPPDKYYCKKCNANASSQDALMYHILTSDIHRDLENKLRSVISEHIKRTGLLKQTHIAPKPAAHLAAPANGSAPSAPAQPPCFHLALPQNSPSPAAGQPVTVAQGAPGSLTHSPPAAGQSHMTLVSSPLPVGQNSLTLQPPAPQPVFLSHGVPLHQSVNPPVLPLSQPVGPVNKSVGTSVLPINQTVRPGVLPLTQPVGPINRPVGPGVLPVSPSVTPGVLQAVSPGVLSVSRAVPSGVLPAGQMTPAGQMTPAGVIPGQTATSGVLPTGQMVQSGVLPVGQTAPSRVLPPGQTAPLRVISAGQVVPSGLLSPNQTVSSSAVVPVNQGVNSGVLQLSQPVVSGVLPVGQPVRPGVLQLNQTVGTNILPVNQPVRPGASQNTTFLTSGSILRQLIPTGKQVNGIPTYTLAPVSVTLPVPPGGLATVAPPQMPIQLLPSGAAAPMAGSMPGMPSPPVLVNAAQSVFVQASSSAADTNQVLKQAKQWKTCPVCNELFPSNVYQVHMEVAHKHSESKSGEKLEPEKLAACAPFLKWMREKTVRCLSCKCLVSEEELIHHLLMHGLGCLFCPCTFHDIKGLSEHSRNRHLGKKKLPMDYSNRGFQLDVDANGNLLFPHLDFITILPKEKLGEREVYLAILAGIHSKSLVPVYVKVRPQAEGTPGSTGKRVSTCPFCFGPFVTTEAYELHLKERHHIMPTVHTVLKSPAFKCIHCCGVYTGNMTLAAIAVHLVRCRSAPKDSSSDLQAQPGFIHNSELLLVSGEVMHDSSFSVKRKLPDGHLGAEDQRHGEEQPPILNADAAPGPEKVTSVVPFKRQRNESRTEGPIVKDEALQILALDPKKYEGRSYEEKKQFLKDYFHKKPYPSKKEIELLSSLFWVWKIDVASFFGKRRYICMKAIKNHKPSVLLGFDMSELKNVKHRLNFEYEP

SEQ ID NO: 9395 - DNA, 5243 bp, Homo sapiens
acgtgggagcgggggccgccccgggagggcggagaaggggatggggacctgaggggagagtaggaataggggaaagacgaggacggggaccgagggagagaggggggctggtgaagggagcgaggagtagagggagagggaacggggatggagaagaagagagggggcaaggagctgtggcgacccctgtaaggactccagaaacgccccgcccgctggcccgcccgccgcatccccgagaccgggttctcctggaagcttctctctggaggagccttgagtgacggcagatgtaggaaaatttcaaaaatgtttcaaattcctgtggaaaatcttgacaacatcagaaaggtgcgaaaaaaggtgaaaggtattcttgtggatattgggcttgacagctgcaaggagttactgaaggaccttaaaggctttgatccaggagagaaatactttcataacacatcatggggtgatgtttctctctgggaaccttctggaaagaaagtgagatatcgaacaaagccatactgttgtggcctctgtaaatactctacaaaggtgcttacttcattcaagaatcatttacatcgttaccatgaagatgaaattgaccaagagctggtgatcccttgcccaaactgtgtatttgcatctcagcccaaagttgtgggaaggcacttcagaatgttccatgcacctgtccggaaagtccagaactacacagtgaatattttaggtgaaactaaatcatctaggagcgatgtgataagtttcacatgtctaaaatgtaacttttcaaacactttgtactacagcatgaagaagcatgtgctggtagcccattttcactacttaattaactcctactttggcctaagaactgaggaaatgggtgagcaaccgaaaactaacgatactgtttctatagagaagatcccaccacctgacaaatattactgtaaaaagtgcaacgccaatgccagcagccaggatgcgttaatgtatcacattttgacatcagacatacacagagatttggagaataagcttagatctgtgatttcagaacatattaagaggactggactcttgaagcaaacgcacattgctccaaaaccagcagcacatttggctgcaccagcaaatggcagtgctccaagcgctccagcgcagcctccttgcttccatcttgctttgccacagaacagtccaagcccagccgcaggacagccagtgactgtggcccagggtgcccctggaagcctcactcattccccccctgctgctggccaatcccacatgactctggtctccagccctctgcctgtgggccagaacagcctcaccctgcagcccccagcacctcagcccgtctttctttctcacggggttccacttcatcagtctgtgaatcctcctgtgttgcccttgagtcagccagtcggacctgtcaataagtctgttggaactagtgtcctccccataaatcagactgttcgccctggggttttacccctcacccagcctgtgggacccataaacagacctgttgggcctggtgttcttcctgtgagcccctctgtcacccctggggtcctgcaggctgtctcgccaggggtgctttctgtgagtcgggcggtcccgtctggagtccttcctgcaggccagatgactcctgcaggccagatgactcctgcaggggttatccctgggcaaacagcaacttctggggttcttcctactggccagatggtccagtcaggagttctccctgtgggccagacagctccgtcacgggttcttcccccaggccagacagccccattgagggttatctctgcaggccaggtggtcccgtctgggcttctttctcccaaccagacagtctcctcctcagctgttgtgcctgtaaaccagggtgtgaattctggtgttctgcagcttagtcagcctgttgtgtcgggagttcttcctgtgggccagccagtgaggcctggggtcttgcaactcaaccagactgtgggcaccaacattctgcctgtgaatcagccagtgagacctggtgcttcgcagaacaccaccttcctgacatcaggctctattctcagacagctcatccctacagggaaacaagtgaatgggattccaacctacacgctggcccccgtgtctgtcactctgccggttccccctggaggccttgcgactgtcgctccgccccagatgcccatccagctcctgccgtcaggtgcagctgcaccaatggccggttccatgcccggcatgccctctcctccagtgctggtgaatgctgctcagagcgtgtttgttcaggcctcctcctctgcagcagacacaaaccaggtgctcaaacaggccaagcagtggaagacctgccctgtctgcaacgagctctttccgtccaacgtctaccaggtccacatggaggtagcgcataagcacagcgagtccaagtctggtgagaaacttgagcctgaaaaactggcagcgtgtgcaccatttctaaagtggatgagagagaaaacggtgcgatgtctgtcttgtaagtgcttggtctctgaggaagagcttatacaccacttgctgatgcatggcttggggtgcttgttctgtccatgcaccttccatgatatcaaaggtctttcagagcacagcaggaataggcacctggggaagaagaagttgcctatggattatagcaacagaggttttcaattagatgtcgatgccaatggcaacctgctctttccccaccttgatttcatcaccatattgccaaaggagaagcttggggagcgggaagtctacttggcaatcctggctgggatacactccaagtcactggtgcctgtgtatgtgaaggtgaggcctcaggctgagggcacccccgggagcaccggcaagcgagtgtccacctgccccttttgctttggcccctttgtgacaactgaggcctatgagctgcatttgaaggagaggcaccacatcatgcccacagtccacacggtcctgaagtctcccgccttcaagtgcatccactgctgtggggtctacacgggaaatatgaccctggctgccatcgccgtccatttggtgcgctgcagaagtgctcccaaggacagcagctcagacctgcaggcccagccgggttttattcacaacagtgaactgcttttagtcagtggtgaagtgatgcatgattccagtttttctgttaagagaaagctgcctgacggccacttaggggccgaagaccagcggcatggggaggagcagcctcccatcctaaatgccgatgcagccccgggtccagaaaaggtgacgagtgttgtgccttttaaaagacaaaggaatgaaagcagaacagagggacctattgtcaaggacgaggctcttcagattttagcattagatcctaaaaaatatgaaggccgttcttatgaagaaaagaagcaatttcttaaagattatttccataagaaaccatatcctagtaaaaaggaaatagaactgttgtcctcactcttttgggtgtggaaaattgatgtggcttcattttttggaaaaagaaggtatatttgcatgaaagcaataaaaaatcacaagccttctgtacttttaggctttgatatgtctgaacttaaaaatgtgaaacatagattgaactttgaatatgaaccataaaacttgcaaaaaaaaaaaaaagtaactctaaagtagtaggtagatttttttcagttgaaatttcacagtgttgtcctcactgtgttggtgaatcaacctcagtggtcactgtgctgctctgcagagttacttcaggtgctggagagacccctgttaccaggaagccagtagttatttcacatctattgtttcctgcagtttgatttgtaacagaacagttgttttcaggtttttttctctgtcatgtaaatgaaatcttttgatatttcatgcacgccttgttttcccactagtgtcagtatcgtatgataagaaactgaaatctataaataatttgctttttcattaaggacatttcagcctttttcagaatacttgatttaactgcgagtggaagcatcgatctccttcagctttccctgtagcagcagatggtacagtgagtgttcagagacgtgggtacaaaccctgtgatgtatgtataaggctccctgaggatgcactgcattaacttacgctgacttctttgtaagatctttgcttatagattataatttagatctgtatttttttaggtttatcctaatagctgtttttttttttaaccataactcatagaaaatcaaatgtttttatttgttaaaagtagactgaatttgacatctggtatgctggtatgtagctcatacatcaagagttattttacaaataaatttattctgtagatgcagaaatatttttcagtgtagattttcccttttgatatgctaagtcatttctccgttcagaggtaaaacaataaatttttagtgcctttagaataaacattgaaagaatacaccccaaaactcttctcctaacttaactactcataaactagtgaaagggaaggtctatgatactcaggaataagattattgcccctgagtgtgaaaactaacttaaatttcagcatagggtttcaggggacatggcgaagtttacagactgagatctcagtctccatggttggtacagtaagtctttcaccacattttctgaaggtcatgtttagtggagaaacgggcttttctctagctggtttaggctggaagctgtgtccgggtcgatgggatggcatattgttaaagaatctccattgtcgtcactgtcctgtggatgttaaacctcgtttttttccccacacgatattaaaacttaaagcaccagaaccagtcatggagaccagccagtttagatggtaagtcatatttctggtggtacacagcagaggaaccccttcactctatctttaggtagaaatatttggaggatgtgacagcctctgagaaacataatgttactatgtggattttaaaaaatataatacttgcatgtaattgctataatgttcatatttgaggcagttgtgaaactggtttatgattgttggtgtactctgttgtaaattcaaagagagcttgttgaacattttttttttttacctattgttttcagagtgtctattttgaattaaaatttgttacaccgctgcaaat

SEQ ID NO: 9396 - protein, 1131 aa, Homo sapiens; identical to SEQ ID NO: 1465

SEQ ID NO: 9397 - DNA, 584 bp, Homo sapiens
ctttccatggcaacaccctgatggccgaaagttactacccttattccagaaatctctgcataatctgtcggtttgcatataattaacagtggctataaatgtgagtgcagccctgtcctgtcctcagctgctgccctgggcgcactgccttgcgggtcactgtggctgctcctgtgcttcagcgggactagaagctgccgcccacgggcagcggggaagaaatctgggcaaagccatgagccctccgaggctgagctccagtttaggggctcacctgccttgcatcgttccgagtcctgtactggactgcatcaggccgcgtctcctcaggaaatgggatcttggttcctggccagcacccggcctctctgcacctcatagacactgcaaatccttactcagtgacttcagggatacaggtttccagggtccttctctcggatggagcctgtccaactgcactctggggaagggagagaaacaggaaggcgtcgccttcacgctccggtcactcaggaaggtggctgtgcatgcctgagagcttgcaccggggtggaggtagccacggtcccgagacacgccct

SEQ ID NO: 9398 - protein, 100 aa, Homo sapiens
MSPPRLSSSLGAHLPCIVPSPVLDCIRPRLLRKWDLGSWPAPGLSAPHRHCKSLLSDFRDTGFQGPSLGWSLSNCTLGKGEKQEGVAFTLRSLRKVAVHA

SEQ ID NO: 9399 - DNA, 3330 bp, Homo sapiens
ccatggcaacaccctgatggccgaaagttactacccttattccagaaatctctgcataatctgtcggtttgcatataattaacagtggctataaatgtgagtgcagccctgtcctgtcctcagctgctgccctgggcgcactgccttgcgggtcactgtggctgctcctgtgcttcagcgggactagaagctgccgcccacgggcagcggggaagaaatctgggcaaagccatgagccctccgaggctgagctccagtttaggggctcacctgccttgcatcgttccgagtcctgtactggactgcatcaggccgcgtctcctcaggaaatgggatcttggttcctggccagcacccggcctctctgcacctcatagacactgcaaatccttactcagtgacttcagggatacagtatccgtaacaagaggggaaattgaagtctggtcctatgaagctctcacggttacaagttttcaaactaaagattttctaagaaatattttcttacaaataaccccttctgttacataagggcttgacctgatttattaaaactatcctgactctctggcgaggaagggtgggaactgctgaaggtgcctcttccaaaggtttccagggtccttctctcggatggagcctgtccaactgcactctggggaagggagagaaacaggaaggcgtcgccttcacgctccggtcactcaggaaggtggctgtgcatgcctgagagcttgcaccggggtggaggtagccacggtcccgagacacgccctctgcccacacctccctaccagcctggccagacgcctggggtgcccagtcgtcttcatggtggcagctgcagaagtaatgacaactcatgggcatttggagaacgcaccaggcccacgctcaacattgcatttgattcctgcgagcgctcaacaagggaagcaccagacagatgctgaaatttaggcatggcagcactgctttgcctcccttggcagcacagggctgcagaaggactcagaattgcggggaaccctctgcctcaaggcgctccaccaggacacagacaccccctcagcggcccctctgctttttcttcagaatctgatacatctggcctggacgggagatggtgccctcgggcgccagagtgtggggtcctcttcacagccactcccaccccaattcctgatcttccgagtttcctggctcacagtgttccttgttctcaaaccgctcgcttcactgcttccgattcaacttcattacctaaagtgagagatacagcttctttctttccctctcaggatcaatgactcggttttaggtcaccatggagaggggattcagagctcacgcatccgccacacttgatttcaggagatgagtggctgcgagtcaccctgctgtgagccgccatggtcccctggtgaattgcccaggccaaacgccatggcctcacctgctcacgggcaaagcagctgccagcttaaatggtaagaaattagtaaaggaaggaaggaaggagggaagaagccggaagggagagcacgtctccgtccctcgatgacggcatcaggacacaccacgtcggagacttcagctgccagatgagcacggcctattagggcctcgtccggtccccgcttatccaagggtggttaagaccaaattccttccccataattaaacagcatgtagacacatacaaaaataccgcagaagaactacaccactgggtcaaaacacatgccagaacaatatttcattttaaaagacaacataaatgtcaacatttaaaaagcctgccacataaggtgaaaaacaaaacctgttgtgtactgactagtctcagaactccttggcagttttatcttttccagaaaactctgtcttcaaaccccaagacctgtctccttgtggcatcctccacaggcttggtctacagcatgcatcctcaggggattcttccaggcttacctggccacgatccccagcacagaacagctcaagatcaccgtctacccccatctgccagagcaaatctattttccaccaagagcaggactgtcggctgtcagtcaccaaggacacccaggttgatagttggaggcgaccagcacattctgatgaagtaggtgatggtgcctgccccaggacctgtgtgcactgcaacaggcagcctgcagggcgtgtgccagaggccagggcctgagcaacagacacagcgctgcccagtgggccctgcacccttgcagtgaggggcagcctcaaccaacgaaaacaccacacactaagtcctagtttccatctaagaagtgttttctggaactttaagcaacattttatttccacagatgtggggaaaagggaaccctatggtgcataattattaacttactttagggtcctgtttctggactcagtggactcaagtgtagccaggtccaatctgtgcacttgcctctggaatgttctgccaacaccctttccccagttttgctggggaaggctgcaggcaaggagaggaggctattcctggccctgacccaggaggagagacgggaaaggaatgagcagacttgagcttaaattttcattggaagtatttaagaaacacctcatgttggtcctggttctctattatttctctctattaaaaataccaccccaagtaatctgtactcactatagaaaaactggaagtaaaagtaataattaaaaaaatccctgaagccataactcactcttctattactatagtcagcatttgctgtgcctcgtccaacaagctggggtcgcctcaggaaagaagactctaccgtgcccactgccctccctccaagtcctcctcctgtggcgtccctcgtcgggtagtgctgccttttgggaagtcactctgggtgggggtctccaccctcctgggaagtctccggaacagaaagcaggagacaccggcgcatccaggccccatccctccccgaattcacgggcagccagcagggggcgccacagcagcgcagcaacaggcacccggttgccggcatcaccggcccacgctcgttccctgtgcattttgtttaaaatttttgagagaaaatttacataacataaaattaaccattttaaagtgtacaactcagtagctttagcgtgttcacaatagagtggaaccattaccgctaattacagcacatttccatcaccctaaaagaaaaagtccgtttctcccaatgccttcctctcctcagccccacacccattaatctactttctgtctctgtggattttcctgccctggacacttcatataaatggaatcttacaacacgt

SEQ ID NO: 9400 - protein, 100 aa, Homo sapiens
MSPPRLSSSLGAHLPCIVPSPVLDCIRPRLLRKWDLGSWPAPGLSAPHRHCKSLLSDFRDTVSVTRGEIEVWSYEALTVTSFQTKDFLRNIFLQITPSVT

SEQ ID NO: 9401 - DNA, 647 bp, Homo sapiens
agtggctataaatgtgagtgcagccctgtcctgtcctcagctgctgccctgggcgcactgccttgcgggtcactgtggctgctcctgtgcttcagcgggactagaagctgccgcccacgggcagcggggaagaaatctgggcaaagccatgagccctccgaggctgagctccagtttaggggctcacctgccttgcatcgttccgagtcctgtactggactgcatcaggccgcgtctcctcagggtggtacctctaaatccaaaaactccaaatgtccaccagctccagtcacattggagatacagctgtggtttgctcctaagacccacccagcacacgtgagatggggagacctggattgcatccccatgtctgtcccagtggagatatcattggaaaagctgcagtgatctctataaaaatctcaaccacccgctcccagtaggttcagtgctgcactctaagaggagaacaggtctgactcctcaaggagatgcctctggtccaggctttgtaaacttgggccttccagccagattcctccgagctcagtgtccgctgctgctgggctgaggggaaccccactccttcaccaccgactcctgctcctggctgcacctgcccttccaacagtgtctcctctcaa

SEQ ID NO: 9402 - protein, 64 aa, Homo sapiens
MSPPRLSSSLGAHLPCIVPSPVLDCIRPRLLRVVPLNPKTPNVHQLQSHWRYSCGLLLRPTQHT

SEQ ID NO: 9403 - DNA, 1057 bp, Homo sapiens
agctgctgccctgggcgcactgccttgcgggtcactgtggctgctcctgtgcttcagcgggactagaagctgccgcccacgggcagcggggaagaaatctgggcaaagccatgagccctccgaggctgagctccagtttaggggctcacctgccttgcatcgttccgagtcctgtactggactgcatcaggccgcgtctcctcaggaaaggaaaggggatgcccctgaggagactcggtgctccccacagaactccccagcgatcccagatgggagaagctgagctgcgcgggcgctgccctcactccgggggtgaaacgtggctgtgatttccacaggtgacagaaaccaggcagtgattcaactcgtatttgactttcacattctccagcaatgttcttcaatctgggaagggtagaaaattaaagaaaggtaaggagagttaaaaaatgagatcatttcaaagtagatgcagtcttgaagcccaaatgaattacgagatccagtttgaaagctgctgcagaagtgatttcagaatcgcgcggtggctccggaatggggaactgctgctgaaagaggtcggaaagggtggggactgaatttcgggtaagaggacgccagtggttctggagcacgcggccttcagccatgcctgcgttcacaagtacattatttcagactcactccaagtttacatctctaagcccatccaagccatggcagcgcgaacctctccctcccccagctcaaggcctctgggcccccaggacagaggacagaagagccagcccctcctggctcagggttgccgggaccccgtgatggctgctgtgcctctcctgaggtgccaggtgagagctgagacttctgctcccgctgcaccagctccgtttgtctccaggcgcagtgtcagtctcgttctttaagcgcttctgaggtcccatcagcacaggtctcgtcttacctggaaaggcttgttgccttgtgcctgggactttttattctgtgcttttcttctggatattaaatttcatatccacgcttgcttgtcactcag

SEQ ID NO: 9404 - protein, 72 aa, Homo sapiens
MSPPRLSSSLGAHLPCIVPSPVLDCIRPRLLRKGKGMPLRRLGAPHRTPQRSQMGEAELRGRCPHSGGETWL

SEQ ID NO: 9405 - DNA, 525 bp, Homo sapiens
agctgctgccctgggcgcactgccttgcgggtcactgtggctgctcctgtgcttcagcgggactagaagctgccgcccacgggcagcggggaagaaatctgggcaaagccatgagccctccgaggctgagctccagtttaggggctcacctgccttgcatcgttccgagtcctgtactggactgcatcaggccgcgtctcctcaggtatccgtaacaagaggggaaattgaagtctggtcctatgaagctctcacggttacaagttttcaaactaaagattttctaagaaatattttcttacaaataaccccttctgttacataagggcttgacctgatttattaaaactatcctgactctctggcgaggaagggtgggaactgctgaaggtgcctcttccaaaggtttccagggtccttctctcggatggagcctgtccaactgcactctggggaagggagagaaacaggaaggcgtcgccttcacgctccggtcactcaggaaggtggctgtgcatgcctgag

SEQ ID NO: 9406 - protein, 34 aa, Homo sapiens
MSPPRLSSSLGAHLPCIVPSPVLDCIRPRLLRYP

SEQ ID NO: 9407 - DNA, 3144 bp, Homo sapiens
cgctcctcccgcgcgcggcccctggagtccctgaggcgcgcggccagcccagctcgggcccgcagcaccgggagcagcccgccggccaagcgagcgcgggccggggccggggccggggcctgggggcgccgcccccgggagtctttctgcggcccctgaggagcgagggcgacggcgaggctgaccggggccgaaaccatgaaccgaagttttcacaagtctcagaccttgcgattctacgattgcagcgcagtggaagtcaagagcaagtttggggcggaattccgaaggttctctctggaccgtcataagcctgggaagtttgaagatttctacaagctggttgtgcacacccaccatatctccaacagtgatgtaactattggctatgcagatgtgcacggagacctgctgcccatcaacaatgatgacaacttctgcaaggcggtttctagtgcaaatcccctgctcagggtcttcatccagaaacgagaggaggccgagcgtggcagcctcggcgcgggctcgctgtgcaggcggaggcgggcgctgggcgcgctgcgtgatgaaggaccccggcggcgtgcacacctggacatcggcctcccgcgcgacttccgccccgtatcatccatcatcgatgtggacctggtccccgagacgcaccggcgagtgcggctgcaccggcacggctgcgagaagccgctgggcttctacatccgcgatggcgccagcgtgcgcgtgaccccgcacgggctggagaaggtgcccggcatcttcatctcgcgcatggtacccgggggcctggcggagagcaccgggctgctggctgtgaatgacgaggtcctggaggtgaacggcattgaggtggccgggaagacgctggaccaggtcacggacatgatgatcgccaacagccacaacctcatcgtcaccgtcaagcccgccaaccagcgcaacaacgtggtgcgcggcggccgcgcgttgggcagctcgggaccgccctcggacggcaccgcgggcttcgtgggtccccccgccccgcgcgtcctgcagaacttccaccccgacgaggcggagagcgatgaggacaacgacgtcgtcatcgagggcacactggagcctgcacgtcccccccagaccccgggcgcgcccgcaggcagcctctcccgggtcaatggcgcgggcctggcgcagcggctgcagcgggacctggccctggacggcggcctccagcggctgctcagctccctgcgggccgacccccgtcacagcctggcgctgccgccaggcggcgtggaggagcacgggcccgcggtcacgctctagactcccgagaggcccccaaatcctagctccagttccccggtaaggacagggacaggacctgcagactgcatccgctcattttttgttgtttttgtgaccacaaaaacaacgctgctctttgtttcaacttccggatataaaaacacaagtattgcctatttttatagaatttcgccacagaacttaaaatgaacgcctgtagagacactctataccaggcctgagtgcaggtcttggcgcctttgcaaagtgatagaaaagatctgaccaagtgcaaaaaaatgctttttaaaatttttacaaatactttgtttttaaagtgaagctttaaaattacttttttaaaatagtcaaattcatgtttttaagtaagttggcccatgcaacatatctcagcattcttgctgtgctctctgctgacttgcaggcgaggccgactgtgctgatgtacgtgacaagaggctggtttttaataacgaatgcaggggctatttttgtgacccacataggtggcccattcagcctcaaggggaaatccagggtaggaagcagcagctctgctggactgggctcagcagtcccatttgggatgtaagcctctattgcctctaagatgacccttttcctgtgggttgactgactctgagggcgatttcggaaatgttttcagcagaaatgaaggataagcatcgcacatgtccagcaatgtctttgagaatgcagtcatttgcacgtgagttctcatctttgttttctgaaacagacgtttcttttagtaagtcacaatacatgctaattttcatttctagaatggtcactggcagttctcacttttaactataagaagtcacgtggaacttagtgatttttaacaaatactaaattcatcctcactttatgttgatcttccagcaacgtttatatatttagtaattttaaaaattcctatttgatacaattaaattttatataatgtgttttgcttgaataaaatgttacatttatactttgagaactctgaccaaatctttcatacagatacaggtaaagaaatatttttctaggttgtcggagctgcgtacctcccgctgcttctccttgtggtccagcaccacctgctggtcagtggcagaactgtcctgacttcgtgaacatggaactgctaagagggaaaactgcatctcagcattttcattttttctgaatattaagtgaaaagcaagttctatttttaagaaatagcttttgctgaggagttgtgaattcctgcacctgtgtttgatgttatttgtatgcaatggattgctggccctttgttcctaagcaagagaagaccaaagatgcttccccatgacctctccggtgaggatccgcaccccccggacttgctctctgatgaagggcatgtcgttcagtgccccagcagtcagaagcagtttttgtggaactaaaactaataatgttaccctcacaaaggaaatgttcttttactaagttattgctgattcttgaatgtctgttatataactgggtcggctatcaagaaggaaggttatatttcttatcacattttaagttgttaagcaaatgtgagtttttttttaagaaatgaggctttcactgagatttgtgtgctattcataattttaggaattactgcttagaacagctgcttgggtgtatttttctacacaggtctgtacttctgccactttctccttttaaaaaaacaaaactatgcatattatgtattaaagttttcttggttttatatatcagagaataaaaacttttttgacttttgagtaaacaaaa

SEQ ID NO: 9408 - protein, 376 aa, Homo sapiens; identical to SEQ ID NO: 1467

SEQ ID NO: 9409 - DNA, 891 bp, Homo sapiens
atgatgacaacttctgcaaggcggtttctagtgcaaatcccctgctcagggtcttcatccagaaacgagatgacggagccctgcgaccaggaacctgactcttcagctcaaatcttggtttgaaagggggacttctctgtgcccctgttgtcggcatgccatggtagagaatggatggcccacgcagctggcccctcatgagaccccagccatctcattccactgggagccacgtcaggacgaaggaggactgggaggggcgtctggctgcgtggtgtggggcctgcagtgttgtggcacacgcagcttcagccaaacatctagccctgtacctagaactaagaaataaaactataacatcagatttaaaagttctctgggaacatttgtcctgcccaaaatagtaacttgtcatttttaaaagaataaaacagagctttgataagccccgtggatgcacctgacacgagagaatcaatggtgcaggtggatttgggctcaaggtggttttcaacacccaggtgatgtctaggtgactggaaagggtgtctgttggacttgcaccttttttccctgtggaagctatttttatgcagttttgtatttgttctcagaacaaattggccaaaaacactacctttaagtgtgacttgatttttagtgtacattttcagatgttatgggaaatgcattcacagttgaggtgtcaaagcaggggaagatggcttccttggcaataacaagcaaaggcaaacatgtttatttttgtatctgtaaaagctggtcgctctttaagtgtagttccagcatctaaagtggacacagaacctgttcttcagggcctgtcacaccctcactgtccatgtgagagtttgtccctccttgtggata

SEQ ID NO: 9410 - protein, 40 aa, Homo sapiens
MMTTSARRFLVQIPCSGSSSRNEMTEPCDQEPDSSAQILV

SEQ ID NO: 9411 - DNA, 1049 bp, Homo sapiens
tttgaagatttctacaagctggttgtgcacacccaccatatctccaacagtgatgtaactattggctatgcagatgtgcacggagacctgctgcccatcaacaatgatgacaacttctgcaaggcggtttctagtgcaaatcccctgctcagggtcttcatccagaaacgaggtggtgaacactgaccacctcaaggaaccaagcagccagtggtgacagttgcaagatgacggagccctgcgaccaggaacctgactcttcagctcaaatcttggtttgaaagggggacttctctgtgcccctgttgtcggcatgccatggtagagaatggatggcccacgcagctggcccctcatgagaccccagccatctcattccactgggagccacgtcaggacgaaggaggactgggaggggcgtctggctgcgtggtgtggggcctgcagtgttgtggcacacgcagcttcagccaaacatctagccctgtacctagaactaagaaataaaactataacatcagatttaaaagttctctgggaacatttgtcctgcccaaaatagtaacttgtcatttttaaaagaataaaacagagctttgataagccccgtggatgcacctgacacgagagaatcaatggtgcaggtggatttgggctcaaggtggttttcaacacccaggtgatgtctaggtgactggaaagggtgtctgttggacttgcaccttttttccctgtggaagctatttttatgcagttttgtatttgttctcagaacaaattggccaaaaacactacctttaagtgtgacttgatttttagtgtacattttcagatgttatgggaaatgcattcacagttgaggtgtcaaagcaggggaagatggcttccttggcaataacaagcaaaggcaaacatgtttatttttgtatctgtaaaagctggtcgctctttaagtgtagttccagcatctaaagtggacacagaacctgttcttcagggcctgtcacaccctcactgtccatgtgagagtttgtccctccttgtggata

SEQ ID NO: 9412 - protein, 49 aa, Homo sapiens
MQMCTETCCPSTMMTTSARRFLVQIPCSGSSSRNEVVNTDHLKEPSSQW

SEQ ID NO: 9413 - DNA, 2379 bp, Homo sapiens
aaccaccagcatccgtcttcttcctttccagccagacaactctccctggccctaatgggtttcaggcagagatggtttcctgagggcagcaccagtcagaatgggtggagcaggccccagagcttctaatggtcccagctgagtcccccaaggctcagcacgtgatcctgccggtcgtacacacagccccagctcgagcactgtgcggccactctctctccaagtactctctgcccgggagcccacttcatcctgcttcatcagtctctgaagctgagagaacacccttgtttgtttctgcagacattcctttgcttcagcactcaccgctccccagaccacaaaggtgtatggacttagcaaaaccagtcataatgatttttctatatcaaaaccagccctaacaatttttatacaacttttaaataaaaacagtggaaaatacaataaataagtcctctaaataaagctgtggtatgaagtttaaatgccccaagtcagaagtcaattggatgtctctgtctgagctgagagcacatgacatacaacgaaaccacatggacagacacaaccccgaatgccaattccagtgtcctgtgcagtgatgaccacactgttagaagcattttaactcttgtttttacaaactttctttttacatatatgttagcggtcaaagaactctgtttttcttggtccaaaccagaggaaatttattgtccaaaccagacccaccccaatgcatttgcctctgatgtgagaaagaaacactagggcttcaaccagatgaggggcgtttaggaaaacccacagctgaagtcacattcaatgcggaacactgggcacctccccctaaggtcaggaacaagacgagggtgtccgctcttattcctttcagcctcggcactgatggtcctagggcaactctatgttgacgcctctgaggaactgccgggctgcagtgaatccaggtgacctcacagaaacttgtatgtgagcattcgcagcggcatcattcacagtggccaggaggtggaaacaaccccgatgtccatcaactgatgaaccaaccgatgaacacagggtgacctgtccatacagtggggtctcagccacagagggagcaaggccgtgaaacctgcagcgggagcaaggcggtgaaacccgcagagggagcaaggccgtgaaacccgcagcgggagcaaggcagtgaaaccctcagagggagcaaggccgtgaaacccgcagcgggagcgaggcgcggaaacaggccatgacacggacgagccacaccatggatgaccccacggacacgccaccaaagcaccatcatgctgagtgacagaagccaggcacccagaccatgcaccgtatgattcctttcacgtgaaatttccagaacagggaaatgcagagcgacagaaagcagggtcaggccccgttcggagagattgccatggttctgagaaacgcatcatttggtgactggtcatcatgcaaacatccttgagcgcactcacacaacctggaggatgtagctcactggatgcccaggctacgtggagtagcccattgctctggggctacacacccatacatcgtgttactgtgctgaatacactaggcaactgtgatacaatggagatcacagaaggccaacaaagaggcctggggcacgtcaacgtggtcctcatcggactggccaatggttccttcctaactcaaccaagggccactgcgccaccgcagctgtgggaccgtatctctggatgataagctgagtccaacacaaacacaacagaacccaaaagaatgcccagaatgccaagaacagtgaacagccatacgcaaacgggcaatactgatgttagctttaaaagtaaggagttcagagtgctctgtgctgaacatctttcggtgtaattaagccttcatattcctgaggaggagctactaagacaccctaccaagtcctgggctgtgcctggaggttagaaaacgaaccacatagtcctgtaatgacagaaaaaattgaaaactgtattttaaaaatgatttctcaacaagaccagccggccactcaaccacttcagtacctcgtttctggatgaagaccctgagcaggggatttgcactagaaaccgccttgcagaagttgtcatcattgttgatgggcagcaggtctccgtgcacatctgcatagccaatagttacatcactgttggagatatggtgggtgtgcacaaccagcttgtagaaatcttcaaacttcccaggcttatgacggtccagagagaaccttcggaattccgccccaaactacaatgcaagagacggggtggggggaggggcattaataaataccagagaaatatccag

SEQ ID NO: 9414 - protein, 92 aa, Homo sapiens
MQTSLSALTQPGGCSSLDAQATWSSPLLWGYTPIHRVTVLNTLGNCDTMEITEGQQRGLGHVNVVLIGLANGSFLTQPRATAPPQLWDRISG

SEQ ID NO: 9415 - DNA, 1723 bp, Homo sapiens
acccgcggaaaaggagggggagcggctggtcagctgcgccctgcgggtcgagaatgtcatcagcagggatggcggcgctttgagtgctgagcgcggccccgaccgggaccccctacccttgacccaccctcgcaggccgagccccgactcccgacccgccgtcgcagcccgcggccccgacctctgacccgccctcgcagcccgcggccccgacctctgacccgccctcccagccagaccctctacgcccgacccgccctcgcagcccatggcccatcggcccggcagtggacgcagagcctcggccccgttccctccccggaccccccggacccgctctccgtcctccctgcagagccgagggccttggcccagccccgcatcctccccgaccgtgctcgatccagcccgggtgtgctgcacccgaaacaggctcccgggggccgtcgggcctgtgggtgaccgtgcaggccaggatctcccccttcccagtcgtgacaaccacagatggccccagatgccacgttagggttagtgcctcctgggggcgggattgcggccgggggagaaccaccctcccaacccgttaggaactgcagggacggagagcgcgctcgggatgtccagcactcagcgcgggttgggtggcgaatggagagcgagtcgtcctcagaggccgccggcctgcaggcgagaaccctcccagccaggaggctgcggctctgcctgaaccccgacccagggcgaacacccacatttggcccctgcccggtgctgagagaggccagagcggcgtccccagaagcggagcgggagccccacgtccggcggccacgatagaaagaagaaaagaaatgggtggtatcctgcacagcccgacctccccggagcctcccgacaccacctccccggagtctcccgacaccacctccccggagtctcccgacaccacctcccaggagcctcccgacaccacctccccggagcctcccgacaagacctccccggagcccgccccccagcagggctccacacacacccccaggagcccaggctccaccaggactcgccgccctgagatctcccaggctgggcccacgcagggagaagtgatcccaacaggctcgtccaaacctgcgggtgaccagctgcccgcggctctgtggaccagcagtgcggtgctgggactgctgctcctggccttgcccacctatcacctctggaaacgctgccggcacctggctgaggacgacacccacccaccagcttctctgaggcttctgccccaggtgtcggcctgggctgggttaagggggaccggccaggtcgggatcagcccctcctgagtggccagcctttccccctgtgaaagcaaaatagcttggaccccttcaagttgagaactggtcagggcaaacctgcctcccattctactcaaagtcatccctctgttcacagagatggatgcatgttctgattgcctctttggagaagctcatcagaaactcaaaagaaggccactgtttgtctcacctacccatgacctgaagcccctccctgagtggtccccacctttctggacggaaccacgtactttttacatacattgattcatgtctcacgtctccctaaaaatgcgtaagaccaagctgtgccctgaccaccctgggcccctgtcgtcaggacctcctgaggctttggcaaataaacctcctaaaatgat

SEQ ID NO: 9416 - protein, 163 aa, Homo sapiens
MGGILHSPTSPEPPDTTSPESPDTTSPESPDTTSQEPPDTTSPEPPDKTSPEPAPQQGSTHTPRSPGSTRTRRPEISQAGPTQGEVIPTGSSKPAGDQLPAALWTSSAVLGLLLLALPTYHLWKRCRHLAEDDTHPPASLRLLPQVSAWAGLRGTGQVGISPS

SEQ ID NO: 9417 - DNA, 876 bp, Homo sapiens
cctctgggagtggtgggccaggcgaaggtgccatagcgcgcggcccaggcgctgctgctgcagcaggagctggcccgggggctccccggcgccgccgtttacaggcgagcgcaggcccatgttctcgaagtagtgagccaggaaggcgatcggctcctcgggccgcgcctccagcaccttcagcagggccgcacgtagcatttccgtcacgccgacctgccgcaggaagtcctcctcgctctcggccgcccccgccgcccgggataccgactggcggccgctgtccgtgaaaccggccggcggtggtaccgcttgccgccgcttctccactgccgccatcttcgctgagggcagcgggaccggaagcaccgccatattccactgtgcgctagagcccccccaaggcggccatcttgattaagggcagagggcaccggtatcccgctgggagactttgggaagtgacaagggcttgcctctcctgcctcaatctccgcatctggatgaagggcttggaccagaacccctccaagccccttccctggaccactctgctggagtttcactcttgtcgcccaggctggagtacagtggtgctatctcggctcactgcaacctccacctcacgggttcaagtgattctactgtgacggccttccaagtaggtgggaccacaggcatgcgccaccacgcccggctaatttttgtatttttagtagagacgaggttttgccatgttggccaggctggtctcaaactcctgacctcaggtgatccacctgcctcggcctcccacagtgctgggattacaggcgtgagccaacgcgcccggccttgttttatgtttcatacgatttattttacttactaccaccc

SEQ ID NO: 9418 - protein, 48 aa, Homo sapiens
MKGLDQNPSKPLPWTTLLEFHSCRPGWSTVVLSRLTATSTSRVQVILL

SEQ ID NO: 9419 - DNA, 1275 bp, Homo sapiens
gggactgagcatggatttcggactggccctcctgctggcggggcttctggggctcctcctcggccagtccctccaggtgaagcccctgcaggtggagcccccggagccggtggtggccgtggccttgggcgcctcgcgccagctcacctgccgcctggcctgcgcggaccgcggggcctcggtgcagtggcggggcctggacaccagcctgggcgcggtgcagtcggacacgggccgcagcgtcctcaccgtgcgcaacgcctcgctgtcggcggccgggacccgcgtgtgcgtgggctcctgcgggggccgcaccttccagcacaccgtgcagctccttgtgtacgccttcccggaccagctgaccgtctccccagcagccctggtgcctggtgacccggaggtggcctgtacggcccacaaagtcacgcccgtggaccccaacgcgctctccttctccctgctcgtcgggggccaggaactggagggggcgcaagccctgggcccggaggtgcaggaggaggaggaggagccccagggggacgaggacgtgctgttcagggtgacagagcgctggcggctgccgcccctggggacccctgtcccgcccgccctctactgccaggccacgatgaggctgcctggcttggagctcagccaccgccaggccatccccgcgtccaaacctgcgggtgaccagctgcccgcggctctgtggaccagcagtgcggtgctgggactgctgctcctggccttgcccacctatcacctctggaaacgctgccggcacctggctgaggacgacacccacccaccagcttctctgaggcttctgccccaggtgtcggcctgggctgggttaagggggaccggccaggtcgggatcagcccctcctgagtggccagcctttccccctgtgaaagcaaaatagcttggaccccttcaagttgagaactggtcagggcaaacctgcctcccattctactcaaagtcatccctctgttcacagagatggatgcatgttctgattgcctctttggagaagctcatcagaaactcaaaagaaggccactgtttgtctcacctacccatgacctgaagcccctccctgagtggtccccacctttctggacggaaccacgtactttttacatacattgattcatgtctcacgtctccctaaaaatgcgtaagaccaagctgtgccctgaccaccctgggcccctgtcgtcaggacctcctgaggctttggcaaataaacctcctaaaatgat

SEQ ID NO: 9420 - protein, 295 aa, Homo sapiens; identical to SEQ ID NO: 1471

SEQ ID NO: 9421 - DNA, 1536 bp, Homo sapiens
gggactgagcatggatttcggactggccctcctgctggcggggcttctggggctcctcctcggccagtccctccaggtgaagcccctgcaggtggagcccccggagccggtggtggccgtggccttgggcgcctcgcgccagctcacctgccgcctggcctgcgcggaccgcggggcctcggtgcagtggcggggcctggacaccagcctgggcgcggtgcagtcggacacgggccgcagcgtcctcaccgtgcgcaacgcctcgctgtcggcggccgggacccgcgtgtgcgtgggctcctgcgggggccgcaccttccagcacaccgtgcagctccttgtgtacgccttcccggaccagctgaccgtctccccagcagccctggtgcctggtgacccggaggtggcctgtacggcccacaaagtcacgcccgtggaccccaacgcgctctccttctccctgctcgtcgggggccaggaactggagggggcgcaagccctgggcccggaggtgcaggaggaggaggaggagccccagggggacgaggacgtgctgttcagggtgacagagcgctggcggctgccgcccctggggacccctgtcccgcccgccctctactgccaggccacgatgaggctgcctggcttggagctcagccaccgccaggccatccccgtcctgcacagcccgacctccccggagcctcccgacaccacctccccggagtctcccgacaccacctccccggagtctcccgacaccacctcccaggagcctcccgacaccacctccccggagcctcccgacaagacctccccggagcccgccccccagcagggctccacacacacccccaggagcccaggctccaccaggactcgccgccctgagatctcccaggctgggcccacgcagggagaagtgatcccaacaggctcgtccaaacctgcgggtgaccagctgcccgcggctctgtggaccagcagtgcggtgctgggactgctgctcctggccttgcccacctatcacctctggaaacgctgccggcacctggctgaggacgacacccacccaccagcttctctgaggcttctgccccaggtgtcggcctgggctgggttaagggggaccggccaggtcgggatcagcccctcctgagtggccagcctttccccctgtgaaagcaaaatagcttggaccccttcaagttgagaactggtcagggcaaacctgcctcccattctactcaaagtcatccctctgttcacagagatggatgcatgttctgattgcctctttggagaagctcatcagaaactcaaaagaaggccactgtttgtctcacctacccatgacctgaagcccctccctgagtggtccccacctttctggacggaaccacgtactttttacatacattgattcatgtctcacgtctccctaaaaatgcgtaagaccaagctgtgccctgaccaccctgggcccctgtcgtcaggacctcctgaggctttggcaaataaacctcctaaaatgat

SEQ ID NO: 9422 - protein, 382 aa, Homo sapiens; identical to SEQ ID NO: 1469

SEQ ID NO: 9423 - DNA, 980 bp, Homo sapiens
atggatttcggactggccctcctgctggcggggcttctggggctcctcctcgccttcccggaccagctgaccgtctccccagcagccctggtgcctggtgacccggaggtggcctgtacggcccacaaagtcacgcccgtggaccccaacgcgctctccttctccctgctcgtcgggggccaggaactggagggggcgcaagccctgggcccggaggtgcaggaggaggaggaggagccccagggggacgaggacgtgctgttcagggtgacagagcgctggcggctgccgcccctggggacccctgtcccgcccgccctctactgccaggccacgatgaggctgcctggcttggagctcagccaccgccaggccatccccgcgtccaaacctgcgggtgaccagctgcccgcggctctgtggaccagcagtgcggtgctgggactgctgctcctggccttgcccacctatcacctctggaaacgctgccggcacctggctgaggacgacacccacccaccagcttctctgaggcttctgccccaggtgtcggcctgggctgggttaagggggaccggccaggtcgggatcagcccctcctgagtggccagcctttccccctgtgaaagcaaaatagcttggaccccttcaagttgagaactggtcagggcaaacctgcctcccattctactcaaagtcatccctctgttcacagagatggatgcatgttctgattgcctctttggagaagctcatcagaaactcaaaagaaggccactgtttgtctcacctacccatgacctgaagcccctccctgagtggtccccacctttctggacggaaccacgtactttttacatacattgattcatgtctcacgtctccctaaaaatgcgtaagaccaagctgtgccctgaccaccctgggcccctgtcgtcaggacctcctgaggctttggcaaataaacctcctaaaatgat

SEQ ID NO: 9424 - protein, 200 aa, Homo sapiens
MDFGLALLLAGLLGLLLAFPDQLTVSPAALVPGDPEVACTAHKVTPVDPNALSFSLLVGGQELEGAQALGPEVQEEEEEPQGDEDVLFRVTERWRLPPLGTPVPPALYCQATMRLPGLELSHRQAIPASKPAGDQLPAALWTSSAVLGLLLLALPTYHLWKRCRHLAEDDTHPPASLRLLPQVSAWAGLRGTGQVGISPS

SEQ ID NO: 9425 - DNA, 1311 bp, Homo sapiens
ggagagccaatcaatatacacaaagagggaggagaagagagagtgccaataaggacacaaggaaagtggtagcgtacccttgtcacttcccaaagtctcccagcgggataccggtgccctctgcccttaatcaagatggccgccttgggggggctctagcgcacagtggaatatggcggtgcttccggtcccgctgccctcagcgaagatggcggcagtggagaagcggcggcaagcggtaccaccgccggccggtttcacggacagcggccgccagtcggtatcccgggcggcgggggcggccgagagcgaggaggacttcctgcggcaggtcggcgtgacggaaatgctacgtgcggccctgctgaaggtgctggaggcgcggcccgaggagccgatcgccttcctggctcactacttcgagaacatgggcctgcgctcgcctgtaaacggcggcgccggggagcccccgggccagctcctgctgcagcagcagcgcctgggccgcgcgctatggcaccttcgcctggcccaccactcccagagggccgccttcaacaacaacgtgagcgtggcctacgagtgcctgagcgccggcgggcgcaggaagaggccggggctggacgggcgcacctacagcgagctgctcaggcgcatctgccgggacggccaagcccccgaggaggtggtggcgccgctgctgcgcaaggtgcagtgccgtgaccacgaggcggtgccgctgagcgtcttccgcgcgggcacactcacctgcttcgtgctgctggagttcgtggcgcgcgccggcgcgctcttccagctgctggaggactcggccgccgccgtggccgaccgccgcgtgggccaggccgtgctggacaccctggagggcgcgctgcaggccagcgacgccgccgcgcccgcgcgcttcctggaggccggctcgcgcttggggcccgacagcctggcgctggcgctggaccgcgccgtcggggggcggcggcccagcgcgcccatgacccgcgaggagtttctggagagggccgccgcgctcttcatcgcgaaggtcaagccggtgggctgaggcccgtgggccgcgcggatccgggatctgcgctggggggtccccgcgtgcggggcgcgcggagccttcccttcgccctggtgaggccctgccataaccaggcgcccagccctgcggaggaggccggggctcccaggaagcggacgcccggtccccacacagcgccgcggccgcccctccacccccgcgggagcccctgccccacgctaataaaatgtgttgcgaggctg

SEQ ID NO: 9426 - protein, 302 aa, Homo sapiens [sequence omitted]

SEQ ID NO: 9427 - DNA, 1430 bp, Homo sapiens
ggagagccaatcaatatacacaaagagggaggagaagagagagtgccaataaggacacaaggaaagtggtagcgtacccttgtcacttcccaaagtctcccagcgggataccggtgccctctgcccttaatcaagatggccgccttgggggggctctagcgcacagtggaatatggcggtgcttccggtcccgctgccctcagcgaagatggcggcagtggagaagcggcggcaagcggtaccaccgccggccggtttcacggacagcggccgccagtcggtatcccgggcggcgggggcggccgagagcgaggaggacttcctgcggcaggtcggcgtgacggaaatgctacgtgcggccctgctgaaggtgctggaggcgcggcccgaggagccgatcgccttcctggctcactacttcgagaacatgggcctgcgctcgcctgtaaacggcggcgccggggagcccccgggccagctcctgctgcagcagcagcgcctgggccgcgcgctatggcaccttcgcctggcccaccactcccagagatgccccagacagatgcctgccgttgattcaagacatttactgagcacctactgtgggcagggcagtgttctgggcaccagggctataaccaagacgaacttccggccctggagggcagggccgccttcaacaacaacgtgagcgtggcctacgagtgcctgagcgccggcgggcgcaggaagaggccggggctggacgggcgcacctacagcgagctgctcaggcgcatctgccgggacggccaagcccccgaggaggtggtggcgccgctgctgcgcaaggtgcagtgccgtgaccacgaggcggtgccgctgagcgtcttccgcgcgggcacactcacctgcttcgtgctgctggagttcgtggcgcgcgccggcgcgctcttccagctgctggaggactcggccgccgccgtggccgaccgccgcgtgggccaggccgtgctggacaccctggagggcgcgctgcaggccagcgacgccgccgcgcccgcgcgcttcctggaggccggctcgcgcttggggcccgacagcctggcgctggcgctggaccgcgccgtcggggggcggcggcccagcgcgcccatgacccgcgaggagtttctggagagggccgccgcgctcttcatcgcgaaggtcaagccggtgggctgaggcccgtgggccgcgcggatccgggatctgcgctggggggtccccgcgtgcggggcgcgcggagccttcccttcgccctggtgaggccctgccataaccaggcgcccagccctgcggaggaggccggggctcccaggaagcggacgcccggtccccacacagcgccgcggccgcccctccacccccgcgggagcccctgccccacgctaataaaatgtgttgcgaggctg

SEQ ID NO: 9428 - protein, 171 aa, Homo sapiens
MAVLPVPLPSAKMAAVEKRRQAVPPPAGFTDSGRQSVSRAAGAAESEEDFLRQVGVTEMLRAALLKVLEARPEEPIAFLAHYFENMGLRSPVNGGAGEPPGQLLLQQQRLGRALWHLRLAHHSQRCPRQMPAVDSRHLLSTYCGQGSVLGTRAITKTNFRPWRAGPPSTTT

SEQ ID NO: 9429 - DNA, 2154 bp, Homo sapiens
ggagagccaatcaatatacacaaagagggaggagaagagagagtgccaataaggacacaaggaaagtggtagcgtacccttgtcacttcccaaagtctcccagcgggataccggtgccctctgcccttaatcaagatggccgccttgggggggctctagcgcacagtggaatatggcggtgcttccggtcccgctgccctcagcgaagatggcggcagtggagaagcggcggcaagcggtaccaccgccggccggtttcacggacagcggccgccagtcggtatcccgggcggcgggggcggccgagagcgaggaggacttcctgcggcaggtcggcgtgacggaaatgctacgtgcggccctgctgaaggtgctggaggcgcggcccgaggagccgatcgccttcctggctcactacttcgagaacatgggcctgcgctcgcctgtaaacggcggcgccggggagcccccgggccagctcctgctgcagcagcagcgcctgggccgcgcgctatggcaccttcgcctggcccaccactcccagagggccgccttcaacaacaacgtgagcgtggcctacgagtgcctgagcgccggcgggcgcaggaagaggccggggctggacgggcgcacctacagcgagctgctcaggcgcatctgccgggacggccaagcccccgaggaggtggtggcgccgctgctgcgcaaggtgcagtgccgtgaccacgaggcggtgccgctgagcgtcttccgcgcgggcacactcacctgcttcgtgctgctggagttcgtggcgcgcgccggcgcgctcttccagctgctggaggactcggccgccgccgtggccgaccgccgcgtgggccaggccgtgctggacaccctggagggcgcgctgcaggccagcgacgccgccgcgcccgcgcgcttcctggaggccggctcgcgcttggggcccgacagcctggcgctggcgctggaccgcgccgtcggggggcggcggcccagcgcgcccatgacccgcgaggagtttctggagagggccgccgcgctcttcatcgcgaaggtcaagccggtgggctgaggcccgtgggccgcgcggatccgggatctgcgctggggggtccccgcgtgcggggcgcgcggagccttcccttcgccctggtgaggccctgccataaccaggcgcccagccctgcggaggaggccggggctcccaggaagcggacgcccggtccccacacagcgccgcggccgcccctccacccccgcgggagcccctgccccacgctaataaaatgtgttgcgaggctgacgctggtgtgtatgcgagcgcccgcctcccagccccggtgcccgcagaagacgcttttccccagcaggtcacccacggccccggaaccgcggcgactggaggctggattcgaggccggaaacgccgggacccctggacccggcctggtgggagcagcggagggggacgccccacggggccctgcggagcctgaagccggagagcaggcggctcttctggaacgcagggcccgggccctccagccccgcccggcccaggtatcctccctgagcctcagtctccccagatgtcaaatgaagaggccagctgggcagatggtagtgacattggtgagacaacagccctaacacttcccaggaactgaagtgcctcatgtgattgattcccaggcccaggcagcggaggttacaccctcagcaagggctcagctgggatctgcgcccggcctgctccagaacgcagcccactcgccaccggtggggagggtcgtccggtatcccccagtgcccaccaccaccaaccagaatcacttctcagactgcaagagcgaatccagccgggcgtggtggctcacacctgtaaccccagcactttgggaggctaaggcggcggatcacttgaggtcaggagttcaagatcagcctgaccaacatggtgaaaccctgtctctactaaaaatacgaaaaaaaaaaaaagctgggctgtggtggcaggcgcctgtaatcccagctactcaggaggctgaggcaggagaataacttgaacccaggaggcagaagtggcagtgagccgagattgagccactgcactccaatctgtgcgacagagtgagaccctgtctc

SEQ ID NO: 9430 - protein, 302 aa, Homo sapiens [sequence omitted]

SEQ ID NO: 9431 - DNA, 688 bp, Homo sapiens
cagtaggtactcagtaatgctgggctggtgtgcagtaggtgctcagtaatgctgggctggtgtgcagtaggtgttcagtaatgcagggccggcatgcagtaggtgctcagtaaatgctgggcgggtgcacagtaggtgctcagtaatgctgggccggtgcacggtgggtgcctggtgaacacgtgcctccctggtcatcactgctgctcagttcagggcttagggatggacgtgccatctcagcgagctcgagggtcaaagctctgctatggaggaggaaactgaggcccagaggcaggagggcagcgacctgcaattcaactctaggcccatctggctgtacgctccttttccctcccaagtagtaaaggccccatttgttggcccttataatccgctgggcgcttttaccatccatgaggtcatccccaaaatgcgctgggggcagtcgcagtgtcagcgcggcggcccgagctcccatcacgcctgacctctccgcatgacccagcaggagccgcaccggggcccctctcatcaggatctgctgtgaggccgggcaggctgctgccgcctcacagatcacaccccaaacctagaggcccaaaaccaacaagcatttactattgacacagcgtctcggcggcggctttgctgcgaggctctggcttggggtctcttaggaggttgc

SEQ ID NO: 9432 - protein, 73 aa, Homo sapiens [sequence omitted]

SEQ ID NO: 9433 - DNA, 963 bp, Homo sapiens
ggggcgcgcgggcccggccaaggcaagcgccggtggggcggcggcgccagagctgctggagcgctcggggtccccgggcggcggcggcggcgcagaggaggaggcaggcggcggccccggtggctcccccccggacggtgcgcggcccggcccgtctcgcgaactcgcggtggtcgcgcggccccgcgctgctccgaccccgggcccctccgccgccgccatggctcggccgctagtgcccagctcgcagaaggcgctgctgctggagctcaaggggctgcaggaagagccggtcgagggattccgcgtgacactggtggacgagggcgatctatacaactgggaggtggccatcttcgggccccccaacacctactacgagggcggctacttcaaggcgcgcctcaagttccccatcgactacccatactctccaccagcctttcggttcctgaccaagatgtggcaccctaacatctacgagacgggggacgtgtgtatctccatcctccacccgccggtggacgacccccagagcggggagctgccctcagagaggtggaaccccacgcagaacgtcaggaccattctcctgagtgtgatctccctcctgaacgagcccaacaccttctcgcccgcaaacgtggacgcctccgtgatgtacaggaagtggaaagagagcaaggggaaggatcgggagtacacagacatcatccggaagcaggtcctggggaccaaggtggacgcggagcgtgacggcgtgaaggtgcccaccacgctggccgagtactgcgtgaagaccaaggcgccggcgcccgacgagggctcagacctcttctacgacgactactacgaggacggcgaggtggaggaggaggccgacagctgcttcggggacgatgaggatgactctggcacggaggagtcctgacaccaccagaataaacttgccgagtttacctc

SEQ ID NO: 9434 - protein, 236 aa, Homo sapiens; identical to SEQ ID NO: 1475

SEQ ID NO: 9435 - DNA, 1488 bp, Homo sapiens
ggggcgcgcgggcccggccaaggcaagcgccggtggggcggcggcgccagagctgctggagcgctcggggtccccgggcggcggcggcggcgcagaggaggaggcaggcggcggccccggtggctcccccccggacggtgcgcggcccggcccgtctcgcgaactcgcggtggtcgcgcggccccgcgctgctccgaccccgggcccctccgccgccgccatggctcggccgctagtgcccagctcgcagaaggcgctgctgctggagctcaaggggctgcaggaagagccggtcgagggattccgcgtgacactggtggacgagggcgatctatacaactgggaggtggccatcttcgggccccccaacacctactacgagggcggctacttcaaggcgcgcctcaagttccccatcgactacccatactctccaccagcctttcggttcctgaccaagatgtggcaccctaacatctacgagacgggggacgtgtgtatctccatcctccacccgccggtggacgacccccagagcggggagctgccctcagagaggtggaaccccacgcagaacgtcaggaccattctcctgagtgtgatctccctcctgaacgagcccaacaccttctcgcccgcaaacgtggacgcctccgtgatgtacaggaagtggaaagagagcaaggggaaggatcgggagtacacagacatcatccggaagcaggtcctggggaccaaggtggacgcggagcgtgacggcgtgaaggtgcccaccacgctggccgagtactgcgtgaagaccaaggcgccggcgcccgacgagggctcagacctcttctacgacgactactacgaggacggcgaggtggaggaggaggccgacagctgcttcggggacgatgaggatgactctggcacggaggagtcctgacaccaccagaataaacttgccgagtttacctcactagggccggacccgtggctccttagacgacagactacctcacggaggttttgtgctggtccccgtctcctctggttgtttcgttttggctttttctccctccccatgtctgttctgggttttcacgtgcttcagagaagaggggctgccccaccgccactcacgtcactcggggctcggtggacgggcccagggtgggagcggccggcccacctgtcccctcgggaggggagctgagcccgacttctaccggggtcccccagcttccggactggccgcaccccggaggagccacgggggcgctgctgggaacgtgggcggggggccgtttcctgacactaccagcctgggaggcccaggtgtagcggtccgaggggcccggtcctgcctgtcagctccaggtcctggagccacgtccagcacagagtggacggattcaccgtggccgactcttttccctgctttggtttgtttgaaatctaaataaaactactttatgagaggccagagaagctgtgcttggg

SEQ ID NO: 9436 - protein, 236 aa, Homo sapiens; identical to SEQ ID NO: 1475

SEQ ID NO: 9437 - DNA, 669 bp, Homo sapiens
gggcgcgcgggcccggccaaggcaagcgccggtggggcggcggcgccagagctgctggagcgctcggggtccccgggcggcggcggcggcgcagaggaggaggcaggcggcggccccggtggctcccccccggacggtgcgcggcccggcccgtctcgcgaactcgcggtggtcgcgcggccccgcgctgctccgaccccgggcccctccgccgccgccatggctcggccgctagtgcccagctcgcagaaggcgctgctgctggagctcaaggggctgcaggaagagccggtcgagggattccgcgtgacactggtggacgagggcgatctatacaactgggaggtggccatcttcgggccccccaacacctactacgagggcggctacttcaaggcgcgcctcaagttccccatcgactacccatactctccaccagcctttcggttcctgaccaagatgtggcaccctaacatctacgagacgggggacgtgtgtatctccatcctccacccgccggtggacgacccccagagcggggagctgccctcagagaggtggaaccccacgcagaacgtcaggaccattctcctgagtgtgatctccctcctgaacgagcccaacaccttctcgcccgcaaacgtggacgcctccgtgatgtacaggaag

SEQ ID NO: 9438 - protein, 149 aa, Homo sapiens
MARPLVPSSQKALLLELKGLQEEPVEGFRVTLVDEGDLYNWEVAIFGPPNTYYEGGYFKARLKFPIDYPYSPPAFRFLTKMWHPNIYETGDVCISILHPPVDDPQSGELPSERWNPTQNVRTILLSVISLLNEPNTFSPANVDASVMYR

SEQ ID NO: 9439 - DNA, 1281 bp, Homo sapiens
gcgcgggcccggccaaggcaagcgccggtggggcggcggcgccagagcgctgctgctggagctcaaggggctgcaggaagagccggtcgagggattccgcgtgacactggtggacgagggcgatctatacaactgggaggtggccatcttcgggccccccaacacctactacgagggcggctacttcaaggcgcgcctcaagttccccatcgactacccatactctccaccagcctttcggttcctgaccaagatgtggcaccctaacatctacgagacgggggacgtgtgtatctccatcctccacccgccggtggacgacccccagagcggggagctgccctcagagaggtggaaccccacgcagaacgtcaggaccattctcctgagtgtgatctccctcctgaacgagcccaacaccttctcgcccgcaaacgtggacgcctccgtgatgtacaggaagtggaaagagagcaaggggaaggatcgggagtacacagacatcatccggaagcaggtcctggggaccaaggtggacgcggagcgtgacggcgtgaaggtgcccaccacgctggccgagtactgcgtgaagaccaaggcgccggcgcccgacgagggctcagacctcttctacgacgactactacgaggacggcgaggtggaggaggaggccgacagctgcttcggggacgatgaggatgactctggcacggaggagtcctgacaccaccagaataaacttgccgagtttacctcactagggccggacccgtggctccttagacgacagactacctcacggaggttttgtgctggtccccgtctcctctggttgtttcgttttggctttttctccctccccatgtctgttctgggttttcacgtgcttcagagaagaggggctgccccaccgccactcacgtcactcggggctcggtggacgggcccagggtgggagcggccggcccacctgtcccctcgggaggggagctgagcccgacttctaccggggtcccccagcttccggactggccgcaccccggaggagccacgggggcgctgctgggaacgtgggcggggggccgtttcctgacactaccagcctgggaggcccaggtgtagcggtccgaggggcccggtcctgcctgtcagctccaggtcctggagccacgtccagcacagagtggacggattcaccgtggccgactcttttccctgctttggtttgtttgaaatctaaataaaactactttatgagaggccagagaagctgtgcttggg

SEQ ID NO: 9440 - protein, 156 aa, Homo sapiens [sequence omitted]

SEQ ID NO: 9441 - DNA, 941 bp, Homo sapiens
gccaaggcaagcgccggtggggcggcggcgccagagctgctggagcgctcggggtccccgggcggcggcggcggcgcagaggaggaggcaggcggcggccccggtggctcccccccggacggtgcgcggcccggcccgtctcgcgaactcgcggtggtcgcgcggccccgcgctgctccgaccccgggcccctccgccgccgccatggctcggccgctagtgcccagctcgcagaaggcgctgctgctggagctcaaggggctgcaggaagagccggtcgagggattccgcgtgacactggtggacgagggcgatctatacaactgggaggtggccatcttcgggccccccaacacctactacgagggcggctacttcaaggcgcgcctcaagttccccatcgactacccatactctccaccagcctttcggttcctgaccaagatgtggcaccctaacatctacgagacgggggacgtgtgtatctccatcctccacccgccggtggacgacccccagagcggggagctgccctcagagaggtggaaccccacgcagaacgtcaggtaagccggcccaaccccctgtgtccacccagaacatcaggtaggccgggctccgtcccgtatccacccagaccatcaggtaggccgggctcccccacaggctgtggcgccaaggcctgattcgggacctgccagctggcggtcctgggcctcgctgtacctgcacggtaggtgctttcacggggcctgcggcaccgtgtgtcggtgcagactcccaccaggaccccaggccggccccaccgtctggaaccacctagaggtgtcccgccatcctcagtcctggggccttctccttacccagccgtctctgggttggtcacctcgtgccacgtgtgccgcctgggcctcgtccccaggtacaagcactgggccgtg

SEQ ID NO: 9442 - protein, 121 aa, Homo sapiens
MARPLVPSSQKALLLELKGLQEEPVEGFRVTLVDEGDLYNWEVAIFGPPNTYYEGGYFKARLKFPIDYPYSPPAFRFLTKMWHPNIYETGDVCISILHPPVDDPQSGELPSERWNPTQNVR

SEQ ID NO: 9443 - DNA, 861 bp, Homo sapiens
gcggcggcgccagagctgctggagcgctcggggtccccgggcggcggcggcggcgcagaggaggaggcaggcggcggccccggtggctcccccccggacggtgcgcggcccggcccgtctcgcgaactcgcggtggtcgcgcggccccgcgctgctccgaccccgggcccctccgccgccgccatggctcggccgctagtgcccagctcgcagaaggcgctgctgctggagctcaaggggctgcaggaagagccggtcgagggattccgcgtgacactggtggacgagggcgatctatacaactgggaggtggccatcttcgggccccccaacacctactacgagggcggctacttcaaggcgcgcctcaagttccccatcgactacccatactctccaccagcctttcggttcctgaccaagatgtggcaccctaacatctacgagacgggggacgtgtgtatctccatcctccacccgccggtggacgacccccagagcggggagctgccctcagagaggtggaaccccacgcagaacgtcaggaccattctcctgagtgtgatctccctcctgaacgagcccaacaccttctcgcccgcaaacgtggacgcctccgtgatgtacaggaagtggaaagagagccacgggggcgctgctgggaacgtgggcggggggccgtttcctgacactaccagcctgggaggcccaggtgtagcggtccgaggggcccggtcctgcctgtcagctccaggtcctggagccacgtccagcacagagtggacggattcaccgtggccgactcttttccctgctttggtttgtttgaaatctaaataaaactactttatgagaggccag

SEQ ID NO: 9444 - protein, 218 aa, Homo sapiens
MARPLVPSSQKALLLELKGLQEEPVEGFRVTLVDEGDLYNWEVAIFGPPNTYYEGGYFKARLKFPIDYPYSPPAFRFLTKMWHPNIYETGDVCISILHPPVDDPQSGELPSERWNPTQNVRTILLSVISLLNEPNTFSPANVDASVMYRKWKESHGGAAGNVGGGPFPDTTSLGGPGVAVRGARSCLSAPGPGATSSTEWTDSPWPTLFPALVCLKSK

SEQ ID NO: 9445 - DNA, 1243 bp, Homo sapiens
gcggcggcgccagagctgctggagcgctcggggtccccgggcggcggcggcggcgcagaggaggaggcaggcggcggccccggtggctcccccccggacggtgcgcggcccggcccgtctcgcgaactcgcggtggtcgcgcggccccgcgctgctccgaccccgggcccctccgccgccgccatggctcggccgctagtgcccagctcgcagaaggcgctgctgctggagctcaaggggctgcaggaagagccggtcgagggattccgcgtgacactggtggacgagggcgatctatacaactgggaggtggccatcttcgggccccccaacacctactacgagggcggctacttcaaggcgcgcctcaagttccccatcgactacccatactctccaccagcctttcggttcctgaccaagatgtggcaccctaacatctacgagacgggggacgtgtgtatctccatcctccacccgccggtggacgacccccagagcggggagctgccctcagagaggtggaaccccacgcagaacgtcaggaccattctcctgagtgtgatctccctcctgaacgagcccaacaccttctcgcccgcaaacgtggacgcctccgtgatgtacaggaagccgacagctgcttcggggacgatgaggatgactctggcacggaggagtcctgacaccaccagaataaacttgccgagtttacctcactagggccggacccgtggctccttagacgacagactacctcacggaggttttgtgctggtccccgtctcctctggttgtttcgttttggctttttctccctccccatgtctgttctgggttttcacgtgcttcagagaagaggggctgccccaccgccactcacgtcactcggggctcggtggacgggcccagggtgggagcggccggcccacctgtcccctcgggaggggagctgagcccgacttctaccggggtcccccagcttccggactggccgcaccccggaggagccacgggggcgctgctgggaacgtgggcggggggccgtttcctgacactaccagcctgggaggcccaggtgtagcggtccgaggggcccggtcctgcctgtcagctccaggtcctggagccacgtccagcacagagtggacggattcaccgtggccgactcttttccctgctttggtttgtttgaaatctaaataaaactactttatgagaggccagagaagctgtgcttggg

SEQ ID NO: 9446 - protein, 179 aa, Homo sapiens
MARPLVPSSQKALLLELKGLQEEPVEGFRVTLVDEGDLYNWEVAIFGPPNTYYEGGYFKARLKFPIDYPYSPPAFRFLTKMWHPNIYETGDVCISILHPPVDDPQSGELPSERWNPTQNVRTILLSVISLLNEPNTFSPANVDASVMYRKPTAASGTMRMTLARRSPDTTRINLPSLPH

SEQ ID NO: 9447 - DNA, 383 bp, Homo sapiens
gagcgctcggggtccccgggcggcggcggcggcgcagaggaggaggcaggcggcggccccggtggctccccccccggccggcccacctgtcccctcgggaggggagctgagcccgacttctaccggggtcccccagcttccggactggccgcaccccggaggagccacgggggcgctgctgggaacgtgggcggggggccgtttcctgacactaccagcctgggaggcccaggtgtagcggtccgaggggcccggtcctgcctgtcagctccaggtcctggagccacgtccagcacagagtggacggattcaccgtggccgactcttttccctgctttggtttgtttgaaatctaaataaaactactttatgagaggccagag

SEQ ID NO: 9448 - protein, 119 aa, Homo sapiens
ERSGSPGGGGGAEEEAGGGPGGSPPGRPTCPLGRGAEPDFYRGPPASGLAAPRRSHGGAAGNVGGGPFPDTTSLGGPGVAVRGARSCLSAPGPGATSSTEWTDSPWPTLFPALVCLKSK

SEQ ID NO: 9449 - DNA, 710 bp, Homo sapiens
gcgctgctgctggagctcaaggggctgcaggaagagccggtcgagggattccgcgtgacactggtggacgagggcgatctatacaactgggaggtggccatcttcgggccccccaacacctactacgagggcggctacttcaaggcgcgcctcaagttccccatcgactacccatactctccaccagcctttcggttcctgaccaagatgtggcaccctaacatctacgagacgggggacgtgtgtatctccatcctccacccgccggtggacgacccccagagcggggagctgccctcagagaggtggaaccccacgcagaacgtcaggaccattctcctgagtgtgatctccctcctgaacgagcccaacaccttctcgcccgcaaacgtggacgcctccgtgatgtacaggaagtggaaagagagcaaggggaaggatcgggagtacacagacatcatccggaagcaggtcctggggaccaaggtggacgcggagcgtgacggcgtgaaggtgcccaccacgctggccgagtactgcgtgaagaccaaggcgccggcgcccgacgagggctcagacctcttctacgacgactactacgaggacggcgaggtggaggaggaggccgacagctgcttcggggacgatgaggatgactctggcacggaggagtcctgacaccaccagaataaacttgccgagtttacctc

SEQ ID NO: 9450 - protein, 156 aa, Homo sapiens [sequence omitted]

SEQ ID NO: 9451 - DNA, 968 bp, Homo sapiens
agagaagagccggaaggctggggtgccccgggccgccccactccgacccactctccccacaggaccattctcctgagtgtgatctccctcctgaacgagcccaacaccttctcgcccgcaaacgtggacgcctccgtgatgtacaggaagtggaaagagagcaaggggaaggatcgggagtacacagacatcatccggaagcaggtcctggggaccaaggtggacgcggagcgtgacggcgtgaaggtgcccaccacgctggccgagtactgcgtgaagaccaaggcgccggcgcccgacgagggctcagacctcttctacgacgactactacgaggacggcgaggtggaggaggaggccgacagctgcttcggggacgatgaggatgactctggcacggaggagtcctgacaccaccagaataaacttgccgagtttacctcactagggccggacccgtggctccttagacgacagactacctcacggaggttttgtgctggtccccgtctcctctggttgtttcgttttggctttttctccctccccatgtctgttctgggttttcacgtgcttcagagaagaggggctgccccaccgccactcacgtcactcggggctcggtggacgggcccagggtgggagcggccggcccacctgtcccctcgggaggggagctgagcccgacttctaccggggtcccccagcttccggactggccgcaccccggaggagccacgggggcgctgctgggaacgtgggcggggggccgtttcctgacactaccagcctgggaggcccaggtgtagcggtccgaggggcccggtcctgcctgtcagctccaggtcctggagccacgtccagcacagagtggacggattcaccgtggccgactcttttccctgctttggtttgtttgaaatctaaataaaactactttatgagaggccagagaagctgtgcttggg

SEQ ID NO: 9452 - protein, 90 aa, Homo sapiens [sequence omitted]

SEQ ID NO: 9453 - DNA, 805 bp, Homo sapiens
cacacgccgttttaagagaaacctgagcgttggggaagcaggtcctggggaccaaggtggacgcggagcgtgacggcgtgaaggtgcccaccacgctggccgagtactgcgtgaagaccaaggcgccggcgcccgacgagggctcagacctcttctacgacgactactacgaggacggcgaggtggaggaggaggccgacagctgcttcggggacgatgaggatgactctggcacggaggagtcctgacaccaccagaataaacttgccgagtttacctcactagggccggacccgtggctccttagacgacagactacctcacggaggttttgtgctggtccccgtctcctctggttgtttcgttttggctttttctccctccccatgtctgttctgggttttcacgtgcttcagagaagaggggctgccccaccgccactcacgtcactcggggctcggtggacgggcccagggtgggagcggccggcccacctgtcccctcgggaggggagctgagcccgacttctaccggggtcccccagcttccggactggccgcaccccggaggagccacgggggcgctgctgggaacgtgggcggggggccgtttcctgacactaccagcctgggaggcccaggtgtagcggtccgaggggcccggtcctgcctgtcagctccaggtcctggagccacgtccagcacagagtggacggattcaccgtggccgactcttttccctgctttggtttgtttgaaatctaaataaaactactttatgagaggccagagaagctgtgcttggg

SEQ ID NO: 9454 - protein, 43 aa, Homo sapiens
MSVLGFHVLQRRGAAPPPLTSLGARWTGPGWERPAHLSPREGS

SEQ ID NO: 9455 - DNA, 372 bp, Homo sapiens
caggtcctggggaccaaggtggacgcggagcgtgacggcgtgaaggtgcccaccacgctggccgagtactgcgtgaagaccaaggcgccggcgcccgacgagggctcagacctcttctacgacgactactacgaggacggcgaggtggaggaggaggccgacagctgcttcggggacgatgaggatgactctggcacggaggagtcctgacaccaccagaataaacttgccgagtttacctcactaggcccggtcctgcctgtcagctccaggtcctggagccacgtccagcacagagtggacggattcaccgtggccgactcttttccctgctttggtttgtttgaaatctaaataaaactactttatgag

SEQ ID NO: 9456 - protein, 47 aa, Homo sapiens
HHQNKLAEFTSLGPVLPVSSRSWSHVQHRVDGFTVADSFPCFGLFEI

SEQ ID NO: 9457 - DNA, 290 bp, Homo sapiens
gcttcggggacgatgaggatgactctggcacggaggagtcctgacaccaccagaataaacttgccgagtttacctcactaggggcgctgctgggaacgtgggcggggggccgtttcctgacactaccagcctgggaggcccaggtgtagcggtccgaggggcccggtcctgcctgtcagctccaggtcctggagccacgtccagcacagagtggacggattcaccgtggccgactcttttccctgctttggtttgtttgaaatctaaataaaactactttatgagaggcc

SEQ ID NO: 9458 - protein, 70 aa, Homo sapiens
TCRVYLTRGAAGNVGGGPFPDTTSLGGPGVAVRGARSCLSAPGPGATSSTEWTDSPWPTLFPALVCLKSK

SEQ ID NO: 9459 - DNA, 952 bp, Homo sapiens
ggctcggggccggggccagcacccacactgggtctccacagcggcatggaggcctgcgtgtcttcactgctggtgctggccctgggggccctgtcagtaggcagctcctttgggacccagatcatcgggggccgggaggtgatcccccactcgcgcccgtacatggcctcactgcagagaaatggctcccacctgtgcgggggtgtcctggtgcacccaaagtgggtgctgacggctgcccactgcctggcccagcggatggcccagctgaggctggtgctggggctccacaccctggacagccccggtctcaccttccacatcaaggcagccatccagcaccctcgctacaagcccgtccctgccctggagaacgacctcgcgctgcttcagctggacgggaaagtgaagcccagccggaccatccggccgttggccctgcccagtaagcgccaggtggtggcagcagggactcggtgcagcatggccggctgggggctgacccaccagggcgggcgcctgtcccgggtgctgcgggagctggacctccaagtgctggacacccgcatgtgtaacaacagccgcttctggaacggcagcctctcccccagcatggtctgcctggcggccgactccaaggaccaggctccctgcaagggtgactcgggcgggcccctggtgtgtggcaaaggccgggtgttggccagagtcctgtccttcagctccagggtctgcactgacatcttcaagcctcccgtggccaccgctgtggcgccttacgtgtcctggatcaggaaggtcaccggccgatcggcctgatgccctggggtgatggggaccccctcgctgtctccacaggacccttcccctccaggggtgcagtggggtgggtgaggacgggtgggagggacagggagggaccaataaatcataatgaagaaacgctcagagc

SEQ ID NO: 9460 - protein, 257 aa, Homo sapiens
MEACVSSLLVLALGALSVGSSFGTQIIGGREVIPHSRPYMASLQRNGSHLCGGVLVHPKWVLTAAHCLAQRMAQLRLVLGLHTLDSPGLTFHIKAAIQHPRYKPVPALENDLALLQLDGKVKPSRTIRPLALPSKRQVVAAGTRCSMAGWGLTHQGGRLSRVLRELDLQVLDTRMCNNSRFWNGSLSPSMVCLAADSKDQAPCKGDSGGPLVCGKGRVLARVLSFSSRVCTDIFKPPVATAVAPYVSWIRKVTGRSA

SEQ ID NO: 9461 - DNA, 458 bp, Homo sapiens
aatggtgttttcaaggccttgcctgggggctttgcctgttgctggctttggggcgagtcagctttatacgaaaaagggggaagtagctcttttcctggcaggggtggacacgtagttatgggatgagctcggtggtactcggcctgtccacacgagcgtctctggctttgtcgatattcttgacaaggaggggaagagacaagagtacgaggcggactcccagtatggccagaactactcctaccggcacagtcttcactaccgtagaagaccttggctccaagatactcctcacctgctccttgaatgacagcgccacagaggtcacagggcaccgctggctgaaggggggcgtggtgctgaaggaggacgcgctgcccggccagaaaacggagttcaaggtggactccgacgaccagtggggagagtactcctgcgtcttcctccccgagcccatg

SEQ ID NO: 9462 - protein, 111 aa, Homo sapiens
MSSVVLGLSTRASLALSIFLTRRGRDKSTRRTPSMARTTPTGTVFTTVEDLGSKILLTCSLNDSATEVTGHRWLKGGVVLKEDALPGQKTEFKVDSDDQWGEYSCVFLPEP

SEQ ID NO: 9463 - DNA, 1866 bp, Homo sapiens
catatggagtttctctcttgttgcccaggctggagtgcaatggcacgatctcggctcaccgcaacctccgcctcccaggttcaagcgattctcctgcctcagcctccctagtagctgggattataggcacctgccaccgcgcccggctaattctgtatttttagtagagatggggtttctccatgttggtcaggctggtctccaactcctgacctcaggtgatccgcctgccttagcctcccaaagtgctgggattacaggcctgagccaccacgcccggcgaccggcgaggaataggaatcatggcggctgcgctgttcgtgctgctgggattcgcgctgctgggcacccacggagcctccggggctgccggcacagtcttcactaccgtagaagaccttggctccaagatactcctcacctgctccttgaatgacagcgccacagaggtcacagggcaccgctggctgaaggggggcgtggtgctgaaggaggacgcgctgcccggccagaaaacggagttcaaggtggactccgacgaccagtggggagagtactcctgcgtcttcctccccgagcccatgggcacggccaacatccagctccacgggcctcccagagtgaaggctgtgaagtcgtcagaacacatcaacgagggggagacggccatgctggtctgcaagtcagagtccgtgccacctgtcactgactgggcctggtacaagatcactgactctgaggacaaggccctcatgaacggctccgagagcaggttcttcgtgagttcctcgcagggccggtcagagctacacattgagaacctgaacatggaggccgaccccggccagtaccggtgcaacggcaccagctccaagggctccgaccaggccatcatcacgctccgcgtgcgcagccacctggccgccctctggcccttcctgggcatcgtggctgaggtgctggtgctggtcaccatcatcttcatctacgagaagcgccggaagcccgaggacgtcctggatgatgacgacgccggctctgcacccctgaagagcagcgggcagcaccagaatgacaaaggcaagaacgtccgccagaggaactcttcctgaggcaggtggcccgaggacgctccctgctccacgtctgcgccgccgccggagtccactcccagtgcttgcaagattccaagttctcacctcttaaagaaaacccaccccgtagattcccatcatacacttccttcttttttaaaaaagttgggttttctccattcaggattctgttccttaggtttttttccttctgaagtgtttcacgagagcccgggagctgctgccctgcggccccgtctgtggctttcagcctctgggtctgagtcatggccgggtgggcggcacagccttctccactggccggagtcagtgccaggtccttgccctttgtggaaagtcacaggtcacacgaggggccccgtgtcctgcctgtctgaagccaatgctgtctggttgcgccatttttgtgcttttatgtttaattttatgagggccacgggtctgtgttcgactcagcctcagggacgactctgacctcttggccacagaggactcacttgcccacaccgagggcgaccccgtcacagcctcaagtcactcccaagccccctccttgtctgtgcatccgggggcagctctggagggggtttgctggggaactggcgccatcgccgggactccagaaccgcagaagcctccccagctcacccctggaggacggccggctctctatagcaccagggctcacgtgggaacccccctcccacccaccgccacaataaagatcgcccccacctccaccctcaccctc

SEQ ID NO: 9464 - protein, 269 aa, Homo sapiens; identical to SEQ ID NO: 1481

SEQ ID NO: 9465 - DNA, 544 bp, Homo sapiens
cccgccagtgtagccacattcctgcccctttccagttagcccttcgcgttcggcttagtctgcggtcctcttgcattgcgactccgagtttaacttccaacacacactttcaacctccaagagacgcccccacctgtgtcgccccaatagcgacttttctcaccgtggtcgccgcggaacttcaagggtccttcctacccgcgttgctgagagtctgggtttacgcgtcacctcgggcgggacccgatcctccgctcctgaggcccccacaatgaagcagtcggacgcgtctccccaagaaagccggcacagtcttcactaccgtagaagaccttggctccaagatactcctcacctgctccttgaatgacagcgccacagaggtcacagggcaccgctggctgaaggggggcgtggtgctgaaggaggacgcgctgcccggccagaaaacggagttcaaggtggactccgacgaccagtggggagagtactcctgcgtcttcctccccgagcccatgggcacggccaacatccagctccacgg

SEQ ID NO: 9466 - protein, 32 aa, Homo sapiens
MKQSDASPQESRHSLHYRRRPWLQDTPHLLLE

SEQ ID NO: 9467 - DNA, 782 bp, Homo sapiens
cctgcccctttccagttagcccttcgcgttcggcttagtctgcggtcctcttgcattgcgactccgagtttaacttccaacacacactttcaacctccaagagacgcccccacctgtgtcgccccaatagcgacttttctcaccgtggtcgccgcggaacttcaagggtccttcctacccgcgttgctgagagtctgggtttacgcgtcacctcgggcgggacccgatcctccgctcctgaggcccccacaatgaagcagtcggacgcgtctccccaagaaagggtggactccgacgaccagtggggagagtactcctgcgtcttcctccccgagcccatgggcacggccaacatccagctccacgggcctcccagagtgaaggctgtgaagtcgtcagaacacatcaacgagggggagacggccatgctggtctgcaagtcagagtccgtgccacctgtcactgactgggcctggtacaagatcactgactctgaggacaaggccctcatgaacggctccgagagcaggttcttcgtgagttcctcgcagggccggtcagagctacacattgagaacctgaacatggaggccgaccccggccagtaccggtgcaacggcaccagctccaagggctccgaccaggccatcatcacgctccgcgtgcgcagccacctggccgccctctggcccttcctgggcatcgtggctgaggtgctggtgctggtcaccatcatcttcatctacgagaagcgccggaagcccgaggacgtcctggatggt

SEQ ID NO: 9468 - protein, 176 aa, Homo sapiens
MKQSDASPQERVDSDDQWGEYSCVFLPEPMGTANIQLHGPPRVKAVKSSEHINEGETAMLVCKSESVPPVTDWAWYKITDSEDKALMNGSESRFFVSSSQGRSELHIENLNMEADPGQYRCNGTSSKGSDQAIITLRVRSHLAALWPFLGIVAEVLVLVTIIFIYEKRRKPEDVLD

SEQ ID NO: 9469 - DNA, 928 bp, Homo sapiens
ccagttagcccttcgcgttcggcttagtctgcggtcctcttgcattgcgactccgagtttaacttccaacacacactttcaacctccaagagacgcccccacctgtgtcgccccaatagcgacttttctcaccgtggtcgccgcggaacttcaagggtccttcctacccgcgttgctgagagtctgggtttacgcgtcacctcgggcgggacccgatcctccgctcctgaggcccccacaatgaagcagtcggacgcgtctccccaagaaagccggcacagtcttcactaccgtagaagaccttggctccaagatactcctcacctgctccttgaatgacagcgccacagaggtcacagggcaccgctggctgaaggggggcgtggtgctgaaggaggacgcgctgcccggccagaaaacggagttcaaggtggactccgacgaccagtggggagagtactcctgcgtcttcctccccgagcccatgggcacggccaacatccagctccacgggcctcccagagtgaaggctgtgaagtcgtcagaacacatcaacgagggggagacggccatgctggtctgcaagtcagagtccgtgccacctgtcactgactgggcctggtacaagatcactgactctgaggacaaggccctcatgaacggctccgagagcaggttcttcgtgagttcctcgcagggccggtcagagctacacattgagaacctgaacatggaggccgaccccggccagtaccggtgcaacggcaccagctccaagggctccgaccaggccatcatcacgctccgcgtgcgcagccacctggccgccctctggcccttcctgggcatcgtggctgaggtgctggtgctggtcaccatcatcttcatctacgagaagcgccggaagcccgaggacgtcctggatggt

SEQ ID NO: 9470 - protein, 147 aa, Homo sapiens
MGTANIQLHGPPRVKAVKSSEHINEGETAMLVCKSESVPPVTDWAWYKITDSEDKALMNGSESRFFVSSSQGRSELHIENLNMEADPGQYRCNGTSSKGSDQAIITLRVRSHLAALWPFLGIVAEVLVLVTIIFIYEKRRKPEDVLD

SEQ ID NO: 9471 - DNA, 1182 bp, Homo sapiens
ccagttagcccttcgcgttcggcttagtctgcggtcctcttgcattgcgactccgagtttaacttccaacacacactttcaacctccaagagacgcccccacctgtgtcgccccaatagcgacttttctcaccgtggtcgccgcggaacttcaagggtccttcctacccgcgttgctgagagtctgggtttacgcgtcacctcgggcgggacccgatcctccgctcctgaggcccccacaatgaagcagtcggacgcgtctccccaagaaagccggcacagtcttcactaccgtagaagaccttggctccaagatactcctcacctgctccttgaatgacagcgccacagaggtcacagggcaccgctggctgaaggggggcgtggtgctgaaggaggacgcgctgcccggccagaaaacggagttcaaggtggactccgacgaccagtggggagagtactcctgcgtcttcctccccgagcccatgggcacggccaacatccagctccacgggcctcccagagtgaaggctgtgaagtcgtcagaacacatcaacgagggggagacggccatgctggtctgcaagtcagagtccgtgccacctgtcactgactgggcctggtacaagatcactgactctgaggacaaggccctcatgaacggctccgagagcaggttcttcgtgagttcctcgcagggccggtcagagctacacattgagaacctgaacatggaggccgaccccggccagtaccggtgcaacggcaccagctccaagggctccgaccaggccatcatcacgctccgcgtgcgcagccacctggccgccctctggcccttcctgggcatcgtggctgaggtgctggtgctggtcaccatcatcttcatctacgagaagcgccggaagcccgaggacgtcctggatgatgacgacgccggctctgcacccctgaagagcagcgggcagcaccagaatgacaaaggcaagaacgtccgccagaggaactcttcctgaggcaggtggcccgaggacgctccctgctccacgtctgcgccgccgccggagtccactcccagtgcttgcaagattccaagttctcacctcttaaagaaaacccaccccgtagattcccatcatacacttccttcttttttaaaaaagttgggttttctccattcagg

SEQ ID NO: 9472 - protein, 176 aa, Homo sapiens; identical to SEQ ID NO: 1483

SEQ ID NO: 9473 - DNA, 1769 bp, Homo sapiens
ccagttagcccttcgcgttcggcttagtctgcggtcctcttgcattgcgactccgagtttaacttccaacacacactttcaacctccaagagacgcccccacctgtgtcgccccaatagcgacttttctcaccgtggtcgccgcggaacttcaagggtccttcctacccgcgttgctgagagtctgggtttacgcgtcacctcgggcgggacccgatcctccgctcctgaggcccccacaatgaagcagtcggacgcgtctccccaagaaagccggcacagtcttcactaccgtagaagaccttggctccaagatactcctcacctgctccttgaatgacagcgccacagaggtcacagggcaccgctggctgaaggggggcgtggtgctgaaggaggacgcgctgcccggccagaaaacggagttcaaggtggactccgacgaccagtggggagagtactcctgcgtcttcctccccgagcccatgggcacggccaacatccagctccacgggcctcccagagtgaaggctgtgaagtcgtcagaacacatcaacgagggggagacggccatgctggtctgcaagtcagagtccgtgccacctgtcactgactgggcctggtacaagatcactgactctgaggacaaggccctcatgaacggctccgagagcaggttcttcgtgagttcctcgcagggccggtcagagctacacattgagaacctgaacatggaggccgaccccggccagtaccggtgcaacggcaccagctccaagggctccgaccaggccatcatcacgctccgcgtgcgcagccacctggccgccctctggcccttcctgggcatcgtggctgaggtgctggtgctggtcaccatcatcttcatctacgagaagcgccggaagcccgaggacgtcctggatgatgacgacgccggctctgcacccctgaagagcagcgggcagcaccagaatgacaaaggcaagaacgtccgccagaggaactcttcctgaggcaggtggcccgaggacgctccctgctccacgtctgcgccgccgccggagtccactcccagtgcttgcaagattccaagttctcacctcttaaagaaaacccaccccgtagattcccatcatacacttccttcttttttaaaaaagttgggttttctccattcaggattctgttccttaggtttttttccttctgaagtgtttcacgagagcccgggagctgctgccctgcggccccgtctgtggctttcagcctctgggtctgagtcatggccgggtgggcggcacagccttctccactggccggagtcagtgccaggtccttgccctttgtggaaagtcacaggtcacacgaggggccccgtgtcctgcctgtctgaagccaatgctgtctggttgcgccatttttgtgcttttatgtttaattttatgagggccacgggtctgtgttcgactcagcctcagggacgactctgacctcttggccacagaggactcacttgcccacaccgagggcgaccccgtcacagcctcaagtcactcccaagccccctccttgtctgtgcatccgggggcagctctggagggggtttgctggggaactggcgccatcgccgggactccagaaccgcagaagcctccccagctcacccctggaggacggccggctctctatagcaccagggctcacgtgggaacccccctcccacccaccgccacaataaagatcgcccccacctccaccctcaccctc

SEQ ID NO: 9474 - protein, 176 aa, Homo sapiens; identical to SEQ ID NO: 1483

SEQ ID NO: 9475 - DNA, 1595 bp, Homo sapiens
ttcggcttagtctgcggtcctcttgcattgcgactccgagtttaacttccaacacacactttcaacctccaagagacgcccccacctgtgtcgccccaatagcgacttttctcaccgtggtcgccgcggaacttcaagggtccttcctacccgcgttgctgagagtctgggtttacgcgtcacctcgggcgggacccgatcctccgctcctgaggcccccacaatgaagcagtcggacgcgtctccccaagaaagggtggactccgacgaccagtggggagagtactcctgcgtcttcctccccgagcccatgggcacggccaacatccagctccacgggcctcccagagtgaaggctgtgaagtcgtcagaacacatcaacgagggggagacggccatgctggtctgcaagtcagagtccgtgccacctgtcactgactgggcctggtacaagatcactgactctgaggacaaggccctcatgaacggctccgagagcaggttcttcgtgagttcctcgcagggccggtcagagctacacattgagaacctgaacatggaggccgaccccggccagtaccggtgcaacggcaccagctccaagggctccgaccaggccatcatcacgctccgcgtgcgcagccacctggccgccctctggcccttcctgggcatcgtggctgaggtgctggtgctggtcaccatcatcttcatctacgagaagcgccggaagcccgaggacgtcctggatgatgacgacgccggctctgcacccctgaagagcagcgggcagcaccagaatgacaaaggcaagaacgtccgccagaggaactcttcctgaggcaggtggcccgaggacgctccctgctccacgtctgcgccgccgccggagtccactcccagtgcttgcaagattccaagttctcacctcttaaagaaaacccaccccgtagattcccatcatacacttccttcttttttaaaaaagttgggttttctccattcaggattctgttccttaggtttttttccttctgaagtgtttcacgagagcccgggagctgctgccctgcggccccgtctgtggctttcagcctctgggtctgagtcatggccgggtgggcggcacagccttctccactggccggagtcagtgccaggtccttgccctttgtggaaagtcacaggtcacacgaggggccccgtgtcctgcctgtctgaagccaatgctgtctggttgcgccatttttgtgcttttatgtttaattttatgagggccacgggtctgtgttcgactcagcctcagggacgactctgacctcttggccacagaggactcacttgcccacaccgagggcgaccccgtcacagcctcaagtcactcccaagccccctccttgtctgtgcatccgggggcagctctggagggggtttgctggggaactggcgccatcgccgggactccagaaccgcagaagcctccccagctcacccctggaggacggccggctctctatagcaccagggctcacgtgggaacccccctcccacccaccgccacaataaagatcgcccccacctccaccctcaccctc

SEQ ID NO: 9476 - protein, 205 aa, Homo sapiens; identical to SEQ ID NO: 1485

SEQ ID NO: 9477 - DNA, 1020 bp, Homo sapiens
ctcccgggctcaagcgatcttcccgcctcgacctcccaaggctctgggagtacagacgtgagccacagcggccggcccgtgtttaactcagataaaatctgggtaacacactttcaacgcttcaaccccctcgggcgcaccgctctgcgctcattgcaactttgaaagcaggaaggaagaaatgcgcaggctccagccgcgtccccgcaggccccactcccgtttcctagcaacgccgggtcacgtgcgccgccgcccggattccgtagcgtgagcctgccggagccggcgcgtacatgcgagcgtgtgcgcgcgtgcgcaggcggggcgaccggcgtccccggcgctcgccccgcccccgagatgacgccgtgcgtgcgcgcgcccggtccgcgcctccgccgctttttatagcggccgcgggcggcggcggcagcggttggaggttgtaggaccggcgaggaataggaatcatggcggctgcgctgttcgtgctgctgggattcgcgctgctgggcacccacggagcctccggggctgccggcttcgtccaggcgccgctgtcccagcagaggtgggtggggggcagtgtggagctgcactgcgaggccgtgggcagcccggtgcccgagatccagtggtggtttgaagggcagggtcccaacgacacctgctcccagctctgggacggcgcccggctggaccgcgtccacatccacgccacctaccaccagcacgcggccagcaccatctccatcgacacgctcgtggaggaggacacgggcacttacgagtgccgggccagcaacgacccggatcgcaaccacctgacccgggcgcccagggtcaagtgggtccgcgcccaggcagtcgtgctagtcctggaacccggcacagtcttcactaccgtagaagaccttggctccaagatactcctcacctgctccttgaatgacagcgccacagaggtcacagggcaccgctggctgaaggggggcgtggtgctgaaggaggacgcgc

SEQ ID NO: 9478 - protein, 181 aa, Homo sapiens
MAAALFVLLGFALLGTHGASGAAGFVQAPLSQQRWVGGSVELHCEAVGSPVPEIQWWFEGQGPNDTCSQLWDGARLDRVHIHATYHQHAASTISIDTLVEEDTGTYECRASNDPDRNHLTRAPRVKWVRAQAVVLVLEPGTVFTTVEDLGSKILLTCSLNDSATEVTGHRWLKGGVVLKED

SEQ ID NO: 9479 - DNA, 1015 bp, Homo sapiens
ctcccgggctcaagcgatcttcccgcctcgacctcccaaggctctgggagtacagacgtgagccacagcggccggcccgtgtttaactcagataaaatctgggtaacacactttcaacgcttcaaccccctcgggcgcaccgctctgcgctcattgcaactttgaaagcaggaaggaagaaatgcgcaggctccagccgcgtccccgcaggccccactcccgtttcctagcaacgccgggtcacgtgcgccgccgcccggattccgtagcgtgagcctgccggagccggcgcgtacatgcgagcgtgtgcgcgcgtgcgcaggcggggcgaccggcgtccccggcgctcgccccgcccccgagatgacgccgtgcgtgcgcgcgcccggtccgcgcctccgccgctttttatagcggccgcgggcggcggcggcagcggttggaggttgtaggaccggcgaggaataggaatcatggcggctgcgctgttcgtgctgctgggattcgcgctgctgggcacccacggagcctccggggctgccggcacagtcttcactaccgtagaagaccttggctccaagatactcctcacctgctccttgaatgacagcgccacagaggtcacagggcaccgctggctgaaggggggcgtggtgctgaaggaggacgcgctgcccggccagaaaacggagttcaagtgagtgcctgaccacgccatgccgccacctgccccttctcacggctctcttgccgccagcggcctgtggtccgtgagaacaaaagaccggtcggcaggcttgatccaggcggaagttagggaccagctccgcgcagacccccagagggaaaccccagggaggggtctgaggggcgtccttgtgaggcagggggctccagcagccctggcaggagtccccattgcttgctcctcactaggtcccgggcacgaaagggcgccacactgccaggtcccgggcacgtgtgcgggcctcccaggctctgtgctcctggcaca

SEQ ID NO: 9480 - protein, 75 aa, Homo sapiens
MAAALFVLLGFALLGTHGASGAAGTVFTTVEDLGSKILLTCSLNDSATEVTGHRWLKGGVVLKEDALPGQKTEFK

SEQ ID NO: 9481 - DNA, 783 bp, Homo sapiens
ctcccgggctcaagcgatcttcccgcctcgacctcccaaggctctgggagtacagacgtgagccacagcggccggcccgtgtttaactcagataaaatctgggtaacacactttcaacgcttcaaccccctcgggcgcaccgctctgcgctcattgcaactttgaaagcaggaaggaagaaatgcgcaggctccagccgcgtccccgcaggccccactcccgtttcctagcaacgccgggtcacgtgcgccgccgcccggattccgtagcgtgagcctgccggagccggcgcgtacatgcgagcgtgtgcgcgcgtgcgcaggcggggcgaccggcgtccccggcgctcgccccgcccccgagatgacgccgtgcgtgcgcgcgcccggtccgcgcctccgccgctttttatagcggccgcgggcggcggcggcagcggttggaggttgtaggaccggcgaggaataggaatcatggcggctgcgctgttcgtgctgctgggattcgcgctgctgggcacccacggagcctccggggctgccggcacagtcttcactaccgtagaagaccttggctccaagatactcctcacctgctccttgaatgacagcgccacagaggtcacagggcaccgctggctgaaggggggcgtggtgctgaaggaggacgcgctgcccggccagaaaacggagttcaaggtggactccgacgaccagtggggagagtactcctgcgtcttcctccccgagcccatgggcacggccaacatccagctccacggtg

SEQ ID NO: 9482 - protein, 102 aa, Homo sapiens
MAAALFVLLGFALLGTHGASGAAGTVFTTVEDLGSKILLTCSLNDSATEVTGHRWLKGGVVLKEDALPGQKTEFKVDSDDQWGEYSCVFLPEPMGTANIQLH

SEQ ID NO: 9483 - DNA, 1196 bp, Homo sapiens
ctcccgggctcaagcgatcttcccgcctcgacctcccaaggctctgggagtacagacgtgagccacagcggccggcccgtgtttaactcagataaaatctgggtaacacactttcaacgcttcaaccccctcgggcgcaccgctctgcgctcattgcaactttgaaagcaggaaggaagaaatgcgcaggctccagccgcgtccccgcaggccccactcccgtttcctagcaacgccgggtcacgtgcgccgccgcccggattccgtagcgtgagcctgccggagccggcgcgtacatgcgagcgtgtgcgcgcgtgcgcaggcggggcgaccggcgtccccggcgctcgccccgcccccgagatgacgccgtgcgtgcgcgcgcccggtccgcgcctccgccgctttttatagcggccgcgggcggcggcggcagcggttggaggttgtaggaccggcgaggaataggaatcatggcggctgcgctgttcgtgctgctgggattcgcgctgctgggcacccacggagcctccggggctgccggcacagtcttcactaccgtagaagaccttggctccaagatactcctcacctgctccttgaatgacagcgccacagaggtcacagggcaccgctggctgaaggggggcgtggtgctgaaggaggacgcgctgcccggccagaaaacggagttcaaggtggactccgacgaccagtggggagagtactcctgcgtcttcctccccgagcccatgggcacggccaacatccagctccacgggcctcccagagtgaaggctgtgaagtcgtcagaacacatcaacgagggggagacggccatgctggtctgcaagtcagagtccgtgccacctgtcactgactgggcctggtacaagatcactgactctgaggacaaggccctcatgaacggctccgagagcaggttcttcgtgagttcctcgcagggccggtcagagctacacattgagaacctgaacatggaggccgaccccggccagtaccggtgcaacggcaccagctccaagggctccgaccaggccatcatcacgctccgcgtgcgcagccacctggccgccctctggcccttcctgggcatcgtggctgaggtgctggtgctggtcaccatcatcttcatctacgagaagcgccggaagcccgaggacgtcctggatggt

SEQ ID NO: 9484 - protein, 240 aa, Homo sapiens
MAAALFVLLGFALLGTHGASGAAGTVFTTVEDLGSKILLTCSLNDSATEVTGHRWLKGGVVLKEDALPGQKTEFKVDSDDQWGEYSCVFLPEPMGTANIQLHGPPRVKAVKSSEHINEGETAMLVCKSESVPPVTDWAWYKITDSEDKALMNGSESRFFVSSSQGRSELHIENLNMEADPGQYRCNGTSSKGSDQAIITLRVRSHLAALWPFLGIVAEVLVLVTIIFIYEKRRKPEDVLD

SEQ ID NO: 9485 - DNA, 1055 bp, Homo sapiens
ctcccgggctcaagcgatcttcccgcctcgacctcccaaggctctgggagtacagacgtgagccacagcggccggcccgtgtttaactcagataaaatctgggtaacacactttcaacgcttcaaccccctcgggcgcaccgctctgcgctcattgcaactttgaaagcaggaaggaagaaatgcgcaggctccagccgcgtccccgcaggccccactcccgtttcctagcaacgccgggtcacgtgcgccgccgcccggattccgtagcgtgagcctgccggagccggcgcgtacatgcgagcgtgtgcgcgcgtgcgcaggcggggcgaccggcgtccccggcgctcgccccgcccccgagatgacgccgtgcgtgcgcgcgcccggtccgcgcctccgccgctttttatagcggccgcgggcggcggcggcagcggttggaggttgtaggaccggcgaggaataggaatcatggcggctgcgctgttcgtgctgctgggattcgcgctgctgggcacccacggagcctccggggctgccggcacagtcttcactaccgtagaagaccttggctccaagatactcctcacctgctccttgaatgacagcgccacagaggtcacagggcaccgctggctgaaggggggcgtggtgctgaaggaggacgcgctgcccggccagaaaacggagttcaaggtggactccgacgaccagtggggagagtactcctgcgtcttcctccccgagcccatgggcacggccaacatccagctccacgggcctcccagagtgaaggctgtgaagtcgtcagaacacatcaacgagggggagacggccatgctggtctgcaagtcagagtccgtgccacctgtcactgactgggcctggtacaagatcactgactctgaggacaaggccctcatgaacggctccgagagcaggttcttcgtgaccctctggcccttcctgggcatcgtggctgaggtgctggtgctggtcaccatcatcttcatctacgagaagcgccggaagcccgaggacgtcctggatggt

SEQ ID NO: 9486 - protein, 193 aa, Homo sapiens
MAAALFVLLGFALLGTHGASGAAGTVFTTVEDLGSKILLTCSLNDSATEVTGHRWLKGGVVLKEDALPGQKTEFKVDSDDQWGEYSCVFLPEPMGTANIQLHGPPRVKAVKSSEHINEGETAMLVCKSESVPPVTDWAWYKITDSEDKALMNGSESRFFVTLWPFLGIVAEVLVLVTIIFIYEKRRKPEDVLD

SEQ ID NO: 9487 - DNA, 1039 bp, Homo sapiens
ctcccgggctcaagcgatcttcccgcctcgacctcccaaggctctgggagtacagacgtgagccacagcggccggcccgtgtttaactcagataaaatctgggtaacacactttcaacgcttcaaccccctcgggcgcaccgctctgcgctcattgcaactttgaaagcaggaaggaagaaatgcgcaggctccagccgcgtccccgcaggccccactcccgtttcctagcaacgccgggtcacgtgcgccgccgcccggattccgtagcgtgagcctgccggagccggcgcgtacatgcgagcgtgtgcgcgcgtgcgcaggcggggcgaccggcgtccccggcgctcgccccgcccccgagatgacgccgtgcgtgcgcgcgcccggtccgcgcctccgccgctttttatagcggccgcgggcggcggcggcagcggttggaggttgtaggaccggcgaggaataggaatcatggcggctgcgctgttcgtgctgctgggattcgcgctgctgggcacccacggagcctccggggctgggtggactccgacgaccagtggggagagtactcctgcgtcttcctccccgagcccatgggcacggccaacatccagctccacgggcctcccagagtgaaggctgtgaagtcgtcagaacacatcaacgagggggagacggccatgctggtctgcaagtcagagtccgtgccacctgtcactgactgggcctggtacaagatcactgactctgaggacaaggccctcatgaacggctccgagagcaggttcttcgtgagttcctcgcagggccggtcagagctacacattgagaacctgaacatggaggccgaccccggccagtaccggtgcaacggcaccagctccaagggctccgaccaggccatcatcacgctccgcgtgcgcagccacctggccgccctctggcccttcctgggcatcgtggctgaggtgctggtgctggtcaccatcatcttcatctacgagaagcgccggaagcccgaggacgtcctggatggt

SEQ ID NO: 9488 - protein, 147 aa, Homo sapiens; identical to SEQ ID NO: 9470

SEQ ID NO: 9489 - DNA, 1450 bp, Homo sapiens
ctcccgggctcaagcgatcttcccgcctcgacctcccaaggctctgggagtacagacgtgagccacagcggccggcccgtgtttaactcagataaaatctgggtaacacactttcaacgcttcaaccccctcgggcgcaccgctctgcgctcattgcaactttgaaagcaggaaggaagaaatgcgcaggctccagccgcgtccccgcaggccccactcccgtttcctagcaacgccgggtcacgtgcgccgccgcccggattccgtagcgtgagcctgccggagccggcgcgtacatgcgagcgtgtgcgcgcgtgcgcaggcggggcgaccggcgtccccggcgctcgccccgcccccgagatgacgccgtgcgtgcgcgcgcccggtccgcgcctccgccgctttttatagcggccgcgggcggcggcggcagcggttggaggttgtaggaccggcgaggaataggaatcatggcggctgcgctgttcgtgctgctgggattcgcgctgctgggcacccacggagcctccggggctgccggcacagtcttcactaccgtagaagaccttggctccaagatactcctcacctgctccttgaatgacagcgccacagaggtcacagggcaccgctggctgaaggggggcgtggtgctgaaggaggacgcgctgcccggccagaaaacggagttcaaggtggactccgacgaccagtggggagagtactcctgcgtcttcctccccgagcccatgggcacggccaacatccagctccacgggcctcccagagtgaaggctgtgaagtcgtcagaacacatcaacgagggggagacggccatgctggtctgcaagtcagagtccgtgccacctgtcactgactgggcctggtacaagatcactgactctgaggacaaggccctcatgaacggctccgagagcaggttcttcgtgagttcctcgcagggccggtcagagctacacattgagaacctgaacatggaggccgaccccggccagtaccggtgcaacggcaccagctccaagggctccgaccaggccatcatcacgctccgcgtgcgcagccacctggccgccctctggcccttcctgggcatcgtggctgaggtgctggtgctggtcaccatcatcttcatctacgagaagcgccggaagcccgaggacgtcctggatgatgacgacgccggctctgcacccctgaagagcagcgggcagcaccagaatgacaaaggcaagaacgtccgccagaggaactcttcctgaggcaggtggcccgaggacgctccctgctccacgtctgcgccgccgccggagtccactcccagtgcttgcaagattccaagttctcacctcttaaagaaaacccaccccgtagattcccatcatacacttccttcttttttaaaaaagttgggttttctccattcagg

SEQ ID NO: 9490 - protein, 269 aa, Homo sapiens; identical to SEQ ID NO: 1481

SEQ ID NO: 9491 - DNA, 2037 bp, Homo sapiens
ctcccgggctcaagcgatcttcccgcctcgacctcccaaggctctgggagtacagacgtgagccacagcggccggcccgtgtttaactcagataaaatctgggtaacacactttcaacgcttcaaccccctcgggcgcaccgctctgcgctcattgcaactttgaaagcaggaaggaagaaatgcgcaggctccagccgcgtccccgcaggccccactcccgtttcctagcaacgccgggtcacgtgcgccgccgcccggattccgtagcgtgagcctgccggagccggcgcgtacatgcgagcgtgtgcgcgcgtgcgcaggcggggcgaccggcgtccccggcgctcgccccgcccccgagatgacgccgtgcgtgcgcgcgcccggtccgcgcctccgccgctttttatagcggccgcgggcggcggcggcagcggttggaggttgtaggaccggcgaggaataggaatcatggcggctgcgctgttcgtgctgctgggattcgcgctgctgggcacccacggagcctccggggctgccggcacagtcttcactaccgtagaagaccttggctccaagatactcctcacctgctccttgaatgacagcgccacagaggtcacagggcaccgctggctgaaggggggcgtggtgctgaaggaggacgcgctgcccggccagaaaacggagttcaaggtggactccgacgaccagtggggagagtactcctgcgtcttcctccccgagcccatgggcacggccaacatccagctccacgggcctcccagagtgaaggctgtgaagtcgtcagaacacatcaacgagggggagacggccatgctggtctgcaagtcagagtccgtgccacctgtcactgactgggcctggtacaagatcactgactctgaggacaaggccctcatgaacggctccgagagcaggttcttcgtgagttcctcgcagggccggtcagagctacacattgagaacctgaacatggaggccgaccccggccagtaccggtgcaacggcaccagctccaagggctccgaccaggccatcatcacgctccgcgtgcgcagccacctggccgccctctggcccttcctgggcatcgtggctgaggtgctggtgctggtcaccatcatcttcatctacgagaagcgccggaagcccgaggacgtcctggatgatgacgacgccggctctgcacccctgaagagcagcgggcagcaccagaatgacaaaggcaagaacgtccgccagaggaactcttcctgaggcaggtggcccgaggacgctccctgctccacgtctgcgccgccgccggagtccactcccagtgcttgcaagattccaagttctcacctcttaaagaaaacccaccccgtagattcccatcatacacttccttcttttttaaaaaagttgggttttctccattcaggattctgttccttaggtttttttccttctgaagtgtttcacgagagcccgggagctgctgccctgcggccccgtctgtggctttcagcctctgggtctgagtcatggccgggtgggcggcacagccttctccactggccggagtcagtgccaggtccttgccctttgtggaaagtcacaggtcacacgaggggccccgtgtcctgcctgtctgaagccaatgctgtctggttgcgccatttttgtgcttttatgtttaattttatgagggccacgggtctgtgttcgactcagcctcagggacgactctgacctcttggccacagaggactcacttgcccacaccgagggcgaccccgtcacagcctcaagtcactcccaagccccctccttgtctgtgcatccgggggcagctctggagggggtttgctggggaactggcgccatcgccgggactccagaaccgcagaagcctccccagctcacccctggaggacggccggctctctatagcaccagggctcacgtgggaacccccctcccacccaccgccacaataaagatcgcccccacctccaccctcaccctc

SEQ ID NO: 9492 - protein, 269 aa, Homo sapiens; identical to SEQ ID NO: 1481

SEQ ID NO: 9493 - DNA, 2012 bp, Homo sapiens
ctcccgggctcaagcgatcttcccgcctcgacctcccaaggctctgggagtacagacgtgagccacagcggccggcccgtgtttaactcagataaaatctgggtaacacactttcaacgcttcaaccccctcgggcgcaccgctctgcgctcattgcaactttgaaagcaggaaggaagaaatgcgcaggctccagccgcgtccccgcaggccccactcccgtttcctagcaacgccgggtcacgtgcgccgccgcccggattccgtagcgtgagcctgccggagccggcgcgtacatgcgagcgtgtgcgcgcgtgcgcaggcggggcgaccggcgtccccggcgctcgccccgcccccgagatgacgccgtgcgtgcgcgcgcccggtccgcgcctccgccgctttttatagcggccgcgggcggcggcggcagcggttggaggttgtaggaccggcgaggaataggaatcatggcggctgcgctgttcgtgctgctgggattcgcgctgctgggcacccacggagcctccggggctgccggcacagtcttcactaccgtagaagaccttggctccaagatactcctcacctgctccttgaatgacagcgccacagaggtcacagggcaccgctggctgaaggggggcgtggtgctgaaggaggacgcgctgcccggccagaaaacggagttcaaggtggactccgacgaccagtggggagagtactcctgcgtcttcctccccgagcccatgggcacggccaacatccagctccacgggcctcccagagtgaaggctgtgaagtcgtcagaacacatcaacgagggggagacggccatgctggtctgcaagtcagagtccgtgccacctgtcactgactgggcctggtacaagatcactgactctgaggacaaggccctcatgaacggctccgagagcaggttcttcgtgagttcctcgcagggccggtcagagctacacattgagaacctgaacatggaggccgaccccggccagtaccggtgcaacggcaccagctccaagggctccgaccaggccatcatcacgctccgcgtgcgcagccacctggccgccctctggcccttcctgggcatcgtggctgaggtgctggtgctggtcaccatcatcttcatctacgagaagcgccggaagcccgaggacgtcctggatggaagagcagcgggcagcaccagaatgacaaaggcaagaacgtccgccagaggaactcttcctgaggcaggtggcccgaggacgctccctgctccacgtctgcgccgccgccggagtccactcccagtgcttgcaagattccaagttctcacctcttaaagaaaacccaccccgtagattcccatcatacacttccttcttttttaaaaaagttgggttttctccattcaggattctgttccttaggtttttttccttctgaagtgtttcacgagagcccgggagctgctgccctgcggccccgtctgtggctttcagcctctgggtctgagtcatggccgggtgggcggcacagccttctccactggccggagtcagtgccaggtccttgccctttgtggaaagtcacaggtcacacgaggggccccgtgtcctgcctgtctgaagccaatgctgtctggttgcgccatttttgtgcttttatgtttaattttatgagggccacgggtctgtgttcgactcagcctcagggacgactctgacctcttggccacagaggactcacttgcccacaccgagggcgaccccgtcacagcctcaagtcactcccaagccccctccttgtctgtgcatccgggggcagctctggagggggtttgctggggaactggcgccatcgccgggactccagaaccgcagaagcctccccagctcacccctggaggacggccggctctctatagcaccagggctcacgtgggaacccccctcccacccaccgccacaataaagatcgcccccacctccaccctcaccctc

SEQ ID NO: 9494 - protein, 292 aa, Homo sapiens
MAAALFVLLGFALLGTHGASGAAGTVFTTVEDLGSKILLTCSLNDSATEVTGHRWLKGGVVLKEDALPGQKTEFKVDSDDQWGEYSCVFLPEPMGTANIQLHGPPRVKAVKSSEHINEGETAMLVCKSESVPPVTDWAWYKITDSEDKALMNGSESRFFVSSSQGRSELHIENLNMEADPGQYRCNGTSSKGSDQAIITLRVRSHLAALWPFLGIVAEVLVLVTIIFIYEKRRKPEDVLDGRAAGSTRMTKARTSARGTLPEAGGPRTLPAPRLRRRRSPLPVLARFQVLTS

SEQ ID NO: 9495 - DNA, 2385 bp, Homo sapiens
ctcccgggctcaagcgatcttcccgcctcgacctcccaaggctctgggagtacagacgtgagccacagcggccggcccgtgtttaactcagataaaatctgggtaacacactttcaacgcttcaaccccctcgggcgcaccgctctgcgctcattgcaactttgaaagcaggaaggaagaaatgcgcaggctccagccgcgtccccgcaggccccactcccgtttcctagcaacgccgggtcacgtgcgccgccgcccggattccgtagcgtgagcctgccggagccggcgcgtacatgcgagcgtgtgcgcgcgtgcgcaggcggggcgaccggcgtccccggcgctcgccccgcccccgagatgacgccgtgcgtgcgcgcgcccggtccgcgcctccgccgctttttatagcggccgcgggcggcggcggcagcggttggaggttgtaggaccggcgaggaataggaatcatggcggctgcgctgttcgtgctgctgggattcgcgctgctgggcacccacggagcctccggggctgccggcttcgtccaggcgccgctgtcccagcagaggtgggtggggggcagtgtggagctgcactgcgaggccgtgggcagcccggtgcccgagatccagtggtggtttgaagggcagggtcccaacgacacctgctcccagctctgggacggcgcccggctggaccgcgtccacatccacgccacctaccaccagcacgcggccagcaccatctccatcgacacgctcgtggaggaggacacgggcacttacgagtgccgggccagcaacgacccggatcgcaaccacctgacccgggcgcccagggtcaagtgggtccgcgcccaggcagtcgtgctagtcctggaacccggcacagtcttcactaccgtagaagaccttggctccaagatactcctcacctgctccttgaatgacagcgccacagaggtcacagggcaccgctggctgaaggggggcgtggtgctgaaggaggacgcgctgcccggccagaaaacggagttcaaggtggactccgacgaccagtggggagagtactcctgcgtcttcctccccgagcccatgggcacggccaacatccagctccacgggcctcccagagtgaaggctgtgaagtcgtcagaacacatcaacgagggggagacggccatgctggtctgcaagtcagagtccgtgccacctgtcactgactgggcctggtacaagatcactgactctgaggacaaggccctcatgaacggctccgagagcaggttcttcgtgagttcctcgcagggccggtcagagctacacattgagaacctgaacatggaggccgaccccggccagtaccggtgcaacggcaccagctccaagggctccgaccaggccatcatcacgctccgcgtgcgcagccacctggccgccctctggcccttcctgggcatcgtggctgaggtgctggtgctggtcaccatcatcttcatctacgagaagcgccggaagcccgaggacgtcctggatgatgacgacgccggctctgcacccctgaagagcagcgggcagcaccagaatgacaaaggcaagaacgtccgccagaggaactcttcctgaggcaggtggcccgaggacgctccctgctccacgtctgcgccgccgccggagtccactcccagtgcttgcaagattccaagttctcacctcttaaagaaaacccaccccgtagattcccatcatacacttccttcttttttaaaaaagttgggttttctccattcaggattctgttccttaggtttttttccttctgaagtgtttcacgagagcccgggagctgctgccctgcggccccgtctgtggctttcagcctctgggtctgagtcatggccgggtgggcggcacagccttctccactggccggagtcagtgccaggtccttgccctttgtggaaagtcacaggtcacacgaggggccccgtgtcctgcctgtctgaagccaatgctgtctggttgcgccatttttgtgcttttatgtttaattttatgagggccacgggtctgtgttcgactcagcctcagggacgactctgacctcttggccacagaggactcacttgcccacaccgagggcgaccccgtcacagcctcaagtcactcccaagccccctccttgtctgtgcatccgggggcagctctggagggggtttgctggggaactggcgccatcgccgggactccagaaccgcagaagcctccccagctcacccctggaggacggccggctctctatagcaccagggctcacgtgggaacccccctcccacccaccgccacaataaagatcgcccccacctccaccctcaccctc

SEQ ID NO: 9496 - protein, 385 aa, Homo sapiens; identical to SEQ ID NO: 1479

SEQ ID NO: 9497 - DNA, 569 bp, Homo sapiens
atagcggccgcgggcggcggcggcagcggttggaggttgtaggaccggcgaggaataggaatcatggcggctgcgctgttcgtgctgctgggattcgcgctgctgggcacccacggagcctccggggctgccggcttcgtccaggcgccgctgtcccagcagaggtgggtggggggcagtgtggagctgcactgcgaggccgtgggcagcccggtgcccgagatccagtggtggtttgaagggcagggtcccaacgacacctgctcccagctctgggacggcgcccggctggaccgcgtccacatccacgccacctaccaccagcacgcggccagcaccatctccatcgacacgctcgtggaggaggacacgggcacttacgagtgccgggccagcaacgacccggatcgcaaccacctgacccgggcgcccagggtcaagtgggtccgcgcccaggcagtcgtgctagtcctggaacgtgagtggcgggcacctccctccccgcctccctcagtttccctcctgtgccgctcgcctcccggctcctgctcagtagaacccagacgcct

SEQ ID NO: 9498 - protein, 167 aa, Homo sapiens
MAAALFVLLGFALLGTHGASGAAGFVQAPLSQQRWVGGSVELHCEAVGSPVPEIQWWFEGQGPNDTCSQLWDGARLDRVHIHATYHQHAASTISIDTLVEEDTGTYECRASNDPDRNHLTRAPRVKWVRAQAVVLVLEREWRAPPSPPPSVSLLCRSPPGSCSVEPR

SEQ ID NO: 9499 - DNA, 678 bp, Homo sapiens
atagcggccgcgggcggcggcggcagcggttggaggttgtaggaccggcgaggaataggaatcatggcggctgcgctgttcgtgctgctgggattcgcgctgctgggcacccacggagcctccggggctgccggcttcgtccaggcgccgctgtcccagcagaggtgggtggggggcagtgtggagctgcactgcgaggccgtgggcagcccggtgcccgagatccagtggtggtttgaagggcagggtcccaacgacacctgctcccagctctgggacggcgcccggctggaccgcgtccacatccacgccacctaccaccagcacgcggccagcaccatctccatcgacacgctcgtggaggaggacacgggcacttacgagtgccgggccagcaacgacccggatcgcaaccacctgacccgggcgcccagggtcaagtgggtccgcgcccaggcagtcgtgctagtcctggaacccggcacagtcttcactaccgtagaagaccttggctccaagatactcctcacctgctccttgaatgacagcgccacagaggtcacagggcaccgctggctgaaggggggcgtggtgctgaaggaggacgcgctgcccggccagaaaacggagttcaaggtggactccgacgaccagtggggagagtactcctgcgtcttc

SEQ ID NO: 9500 - protein, 204 aa, Homo sapiens
MAAALFVLLGFALLGTHGASGAAGFVQAPLSQQRWVGGSVELHCEAVGSPVPEIQWWFEGQGPNDTCSQLWDGARLDRVHIHATYHQHAASTISIDTLVEEDTGTYECRASNDPDRNHLTRAPRVKWVRAQAVVLVLEPGTVFTTVEDLGSKILLTCSLNDSATEVTGHRWLKGGVVLKEDALPGQKTEFKVDSDDQWGEYSCV

SEQ ID NO: 9501 - DNA, 643 bp, Homo sapiens
atagcggccgcgggcggcggcggcagcggttggaggttgtaggaccggcgaggaataggaatcatggcggctgcgctgttcgtgctgctgggattcgcgctgctgggcacccacggagcctccggggctgccggcacagtcttcactaccgtagaagaccttggctccaagatactcctcacctgctccttgaatgacagcgccacagaggtcacagggcaccgctgggcctcccagagtgaaggctgtgaagtcgtcagaacacatcaacgagggggagacggccatgctggtctgcaagtcagagtccgtgccacctgtcactgactgggcctggtacaagatcactgactctgaggacaaggccctcatgaacggctccgagagcaggttcttcgtgagttcctcgcagggccggtcagagctacacattgagaacctgaacatggaggccgaccccggccagtaccggtgcaacggcaccagctccaagggctccgaccaggccatcatcacgctccgcgtgcgcagccacctggccgccctctggcccttcctgggcatcgtggctgaggtgctggtgctggtcaccatcatcttcatctacgagaagcgccggaagcccgaggacgtcctggatggt

SEQ ID NO: 9502 - protein, 149 aa, Homo sapiens
MTAPQRSQGTAGPPRVKAVKSSEHINEGETAMLVCKSESVPPVTDWAWYKITDSEDKALMNGSESRFFVSSSQGRSELHIENLNMEADPGQYRCNGTSSKGSDQAIITLRVRSHLAALWPFLGIVAEVLVLVTIIFIYEKRRKPEDVLD

SEQ ID NO: 9503 - DNA, 704 bp, Homo sapiens
atagcggccgcgggcggcggcggcagcggttggaggttgtaggaccggcgaggaataggaatcatggcggctgcgctgttcgtgctgctgggattcgcgctgctgggcacccacggagcctccggggctgccggcacagtcttcactaccgtagaagaccttggctccaagatactcctcacctgctccttgaatgacagcgccacagaggtcacagggcaccgctggctgaaggggggcgtggtgctgaaggaggacgcgctgcccggccagaaaacggagttcaaggtggactccgacgaccagctgtgaagtcgtcagaacacatcaacgagggggagacggccatgctggtctgcaagtcagagtccgtgccacctgtcactgactgggcctggtacaagatcactgactctgaggacaaggccctcatgaacggctccgagagcaggttcttcgtgagttcctcgcagggccggtcagagctacacattgagaacctgaacatggaggccgaccccggccagtaccggtgcaacggcaccagctccaagggctccgaccaggccatcatcacgctccgcgtgcgcagccacctggccgccctctggcccttcctgggcatcgtggctgaggtgctggtgctggtcaccatcatcttcatctacgagaagcgccggaagcccgaggacgtcctggatggt

SEQ ID NO: 9504 - protein, 118 aa, Homo sapiens
MLVCKSESVPPVTDWAWYKITDSEDKALMNGSESRFFVSSSQGRSELHIENLNMEADPGQYRCNGTSSKGSDQAIITLRVRSHLAALWPFLGIVAEVLVLVTIIFIYEKRRKPEDVLD

SEQ ID NO: 9505 - DNA, 800 bp, Homo sapiens
atagcggccgcgggcggcggcggcagcggttggaggttgtaggaccggcgaggaataggaatcatggcggctgcgctgttcgtgctgctgggattcgcgctgctgggcacccacggagcctccggggctgggcctcccagagtgaaggctgtgaagtcgtcagaacacatcaacgagggggagacggccatgctggtctgcaagtcagagtccgtgccacctgtcactgactgggcctggtacaagatcactgactctgaggacaaggccctcatgaacggctccgagagcaggttcttcgtgagttcctcgcagggccggtcagagctacacattgagaacctgaacatggaggccgaccccggccagtaccggtgcaacggcaccagctccaagggctccgaccaggccatcatcacgctccgcgtgcgcagccacctggccgccctctggcccttcctgggcatcgtggctgaggtgctggtgctggtcaccatcatcttcatctacgagaagcgccggaagcccgaggacgtcctggatgatgacgacgccggctctgcacccctgaagagcagcgggcagcaccagaatgacaaaggcaagaacgtccgccagaggaactcttcctgaggcaggtggcccgaggacgctccctgctccacgtctgcgccgccgccggagtccactcccagtgcttgcaagattccaagttctcacctcttaaagaaaacccaccccgtagattcccatcatacacttccttcttttttaaaaaagttgggttttctccattcagg

SEQ ID NO: 9506 - protein, 189 aa, Homo sapiens
MAAALFVLLGFALLGTHGASGAGPPRVKAVKSSEHINEGETAMLVCKSESVPPVTDWAWYKITDSEDKALMNGSESRFFVSSSQGRSELHIENLNMEADPGQYRCNGTSSKGSDQAIITLRVRSHLAALWPFLGIVAEVLVLVTIIFIYEKRRKPEDVLDDDDAGSAPLKSSGQHQNDKGKNVRQRNSS

SEQ ID NO: 9507 - DNA, 1022 bp, Homo sapiens
atagcggccgcgggcggcggcggcagcggttggaggttgtaggaccggcgaggaataggaatcatggcggctgcgctgttcgtgctgctgggattcgcgctgctgggcacccacggagcctccggggctgccggcacagtcttcactaccgtagaagaccttggctccaagatactcctcacctgctccttgaatgacagcgccacagagcagcgggcagcaccagaatgacaaaggcaagaacgtccgccagaggaactcttcctgaggcaggtggcccgaggacgctccctgctccacgtctgcgccgccgccggagtccactcccagtgcttgcaagattccaagttctcacctcttaaagaaaacccaccccgtagattcccatcatacacttccttcttttttaaaaaagttgggttttctccattcaggattctgttccttaggtttttttccttctgaagtgtttcacgagagcccgggagctgctgccctgcggccccgtctgtggctttcagcctctgggtctgagtcatggccgggtgggcggcacagccttctccactggccggagtcagtgccaggtccttgccctttgtggaaagtcacaggtcacacgaggggccccgtgtcctgcctgtctgaagccaatgctgtctggttgcgccatttttgtgcttttatgtttaattttatgagggccacgggtctgtgttcgactcagcctcagggacgactctgacctcttggccacagaggactcacttgcccacaccgagggcgaccccgtcacagcctcaagtcactcccaagccccctccttgtctgtgcatccgggggcagctctggagggggtttgctggggaactggcgccatcgccgggactccagaaccgcagaagcctccccagctcacccctggaggacggccggctctctatagcaccagggctcacgtgggaacccccctcccacccaccgccacaataaagatcgcccccacctccaccctcaccctc

SEQ ID NO: 9508 - protein, 55 aa, Homo sapiens
MAAALFVLLGFALLGTHGASGAAGTVFTTVEDLGSKILLTCSLNDSATEQRAAPE

SEQ ID NO: 9509 - DNA, 997 bp, Homo sapiens
atagcggccgcgggcggcggcggcagcggttggaggttgtaggaccggcgaggaataggaatcatggcggctgcgctgttcgtgctgctgggattcgcgctgctgggcacccacggagcctccggggctgccggcacagtcttcactaccgtagaagaccttggctccaagatactcctcacctgctccttgaatgacagcgccacagaggtcacagggcaccgctggctgaaggggggcgtggtgctgaaggaggacgcgctgcccggccagaaaacggagttcaaggtggactccgacgaccatgcttgcaagattccaagttctcacctcttaaagaaaacccaccccgtagattcccatcatacacttccttcttttttaaaaaagttgggttttctccattcaggattctgttccttaggtttttttccttctgaagtgtttcacgagagcccgggagctgctgccctgcggccccgtctgtggctttcagcctctgggtctgagtcatggccgggtgggcggcacagccttctccactggccggagtcagtgccaggtccttgccctttgtggaaagtcacaggtcacacgaggggccccgtgtcctgcctgtctgaagccaatgctgtctggttgcgccatttttgtgcttttatgtttaattttatgagggccacgggtctgtgttcgactcagcctcagggacgactctgacctcttggccacagaggactcacttgcccacaccgagggcgaccccgtcacagcctcaagtcactcccaagccccctccttgtctgtgcatccgggggcagctctggagggggtttgctggggaactggcgccatcgccgggactccagaaccgcagaagcctccccagctcacccctggaggacggccggctctctatagcaccagggctcacgtgggaacccccctcccacccaccgccacaataaagatcgcccccacctccaccctcaccctc

SEQ ID NO: 9510 - protein, 218 aa, Homo sapiens
MAAALFVLLGFALLGTHGASGAAGTVFTTVEDLGSKILLTCSLNDSATEVTGHRWLKGGVVLKEDALPGQKTEFKVDSDDHACKIPSSHLLKKTHPVDSHHTLPSFLKKLGFLHSGFCSLGFFPSEVFHESPGAAALRPRLWLSASGSESWPGGRHSLLHWPESVPGPCPLWKVTGHTRGPVSCLSEANAVWLRHFCAFMFNFMRATGLCSTQPQGRL

SEQ ID NO: 9511 - DNA, 902 bp, Homo sapiens
atagcggccgcgggcggcggcggcagcggttggaggttgtaggaccggcgaggaataggaatcatggcggctgcgctgttcgtgctgctgggattcgcgctgctgggcacccacggagcctccggggctgccggcacagtcttcactaccgtagaagaccttggctccaagatactcctcacctgctccttgaatgacagcgccacagagtgcttgcaagattccaagttctcacctcttaaagaaaacccaccccgtagattcccatcatacacttccttcttttttaaaaaagttgggttttctccattcaggattctgttccttaggtttttttccttctgaagtgtttcacgagagcccgggagctgctgccctgcggccccgtctgtggctttcagcctctgggtctgagtcatggccgggtgggcggcacagccttctccactggccggagtcagtgccaggtccttgccctttgtggaaagtcacaggtcacacgaggggccccgtgtcctgcctgtctgaagccaatgctgtctggttgcgccatttttgtgcttttatgtttaattttatgagggccacgggtctgtgttcgactcagcctcagggacgactctgacctcttggccacagaggactcacttgcccacaccgagggcgaccccgtcacagcctcaagtcactcccaagccccctccttgtctgtgcatccgggggcagctctggagggggtttgctggggaactggcgccatcgccgggactccagaaccgcagaagcctccccagctcacccctggaggacggccggctctctatagcaccagggctcacgtgggaacccccctcccacccaccgccacaataaagatcgcccccacctccaccctcaccctc

SEQ ID NO: 9512 - protein, 143 aa, Homo sapiens
MTAPQSACKIPSSHLLKKTHPVDSHHTLPSFLKKLGFLHSGFCSLGFFPSEVFHESPGAAALRPRLWLSASGSESWPGGRHSLLHWPESVPGPCPLWKVTGHTRGPVSCLSEANAVWLRHFCAFMFNFMRATGLCSTQPQGRL

SEQ ID NO: 9513 - DNA, 1523 bp, Homo sapiens
atagcggccgcgggcggcggcggcagcggttggaggttgtaggaccggcgaggaataggaatcatggcggctgcgctgttcgtgctgctgggattcgcgctgctgggcacccacggagcctccggggctgccggcacagtcttcactaccgtagaagaccttggctccaagatactcctcacctgctccttgaatgacagcgccacagaggtcacagggcaccgctggctgaaggggggcgtggtgctgaaggaggacgcgctgcccggccagaaaacggagttcaaggtggactccgacgaccagtggggagagtactcctgcgtcttcctccccgagcccatgggcacggccaacatccagctccacgggcctcccagagtgaaggctgtgaagtcgtcagaacacatcaacgagggggagacggccatgctggtctgcaagtcagagtccgtgccacctgtcactgactgggcctggtacaagatcactgactctgaggacaaggccctcatgaacggctccgagagcaggttcttcgtgagttcctcgcagggccggtcagagctacacattgagaacctgaacatggaggccgaccccggccagtaccggtgcaacggcaccagctccaagggctccgaccaggccatcatcacgctccgcgtgcgcagccacctggccgccctctggcccttcctgggcatcgtggctgaggtgctggtgctggtcaccatcatcttcatctacgagaagcgccggaagcccgaggacgtggcccgaggacgctccctgctccacgtctgcgccgccgccggagtccactcccagtgcttgcaagattccaagttctcacctcttaaagaaaacccaccccgtagattcccatcatacacttccttcttttttaaaaaagttgggttttctccattcaggattctgttccttaggtttttttccttctgaagtgtttcacgagagcccgggagctgctgccctgcggccccgtctgtggctttcagcctctgggtctgagtcatggccgggtgggcggcacagccttctccactggccggagtcagtgccaggtccttgccctttgtggaaagtcacaggtcacacgaggggccccgtgtcctgcctgtctgaagccaatgctgtctggttgcgccatttttgtgcttttatgtttaattttatgagggccacgggtctgtgttcgactcagcctcagggacgactctgacctcttggccacagaggactcacttgcccacaccgagggcgaccccgtcacagcctcaagtcactcccaagccccctccttgtctgtgcatccgggggcagctctggagggggtttgctggggaactggcgccatcgccgggactccagaaccgcagaagcctccccagctcacccctggaggacggccggctctctatagcaccagggctcacgtgggaacccccctcccacccaccgccacaataaagatcgcccccacctccaccctcaccctc

SEQ ID NO: 9514 - protein, 300 aa, Homo sapiens
MAAALFVLLGFALLGTHGASGAAGTVFTTVEDLGSKILLTCSLNDSATEVTGHRWLKGGVVLKEDALPGQKTEFKVDSDDQWGEYSCVFLPEPMGTANIQLHGPPRVKAVKSSEHINEGETAMLVCKSESVPPVTDWAWYKITDSEDKALMNGSESRFFVSSSQGRSELHIENLNMEADPGQYRCNGTSSKGSDQAIITLRVRSHLAALWPFLGIVAEVLVLVTIIFIYEKRRKPEDVARGRSLLHVCAAAGVHSQCLQDSKFSPLKENPPRRFPSYTSFFFKKVGFSPFRILFLRFFSF

SEQ ID NO: 9515 - DNA, 1114 bp, Homo sapiens
atagcggccgcgggcggcggcggcagcggttggaggttgtaggaccggcgaggaataggaatcatggcggctgcgctgttcgtgctgctgggattcgcgctgctgggcacccacggagcctccggggctgccggcacagtcttcactaccgtagaagaccttggctccaagatactcctcacctgctccttgaatgacagcgccacagaggtcacagggcaccgctggctgaaggggggcgtggtgctgaaggaggacgcggtcctggatgatgacgacgccggctctgcacccctgaagagcagcgggcagcaccagaatgacaaaggcaagaacgtccgccagaggaactcttcctgaggcaggtggcccgaggacgctccctgctccacgtctgcgccgccgccggagtccactcccagtgcttgcaagattccaagttctcacctcttaaagaaaacccaccccgtagattcccatcatacacttccttcttttttaaaaaagttgggttttctccattcaggattctgttccttaggtttttttccttctgaagtgtttcacgagagcccgggagctgctgccctgcggccccgtctgtggctttcagcctctgggtctgagtcatggccgggtgggcggcacagccttctccactggccggagtcagtgccaggtccttgccctttgtggaaagtcacaggtcacacgaggggccccgtgtcctgcctgtctgaagccaatgctgtctggttgcgccatttttgtgcttttatgtttaattttatgagggccacgggtctgtgttcgactcagcctcagggacgactctgacctcttggccacagaggactcacttgcccacaccgagggcgaccccgtcacagcctcaagtcactcccaagccccctccttgtctgtgcatccgggggcagctctggagggggtttgctggggaactggcgccatcgccgggactccagaaccgcagaagcctccccagctcacccctggaggacggccggctctctatagcaccagggctcacgtgggaacccccctcccacccaccgccacaataaagatcgcccccacctccaccctcaccctc

SEQ ID NO: 9516 - protein, 98 aa, Homo sapiens
MAAALFVLLGFALLGTHGASGAAGTVFTTVEDLGSKILLTCSLNDSATEVTGHRWLKGGVVLKEDAVLDDDDAGSAPLKSSGQHQNDKGKNVRQRNSS

SEQ ID NO: 9517 - DNA, 1387 bp, Homo sapiens
atagcggccgcgggcggcggcggcagcggttggaggttgtaggaccggcgaggaataggaatcatggcggctgcgctgttcgtgctgctgggattcgcgctgctgggcacccacggagcctccggggctgggcctcccagagtgaaggctgtgaagtcgtcagaacacatcaacgagggggagacggccatgctggtctgcaagtcagagtccgtgccacctgtcactgactgggcctggtacaagatcactgactctgaggacaaggccctcatgaacggctccgagagcaggttcttcgtgagttcctcgcagggccggtcagagctacacattgagaacctgaacatggaggccgaccccggccagtaccggtgcaacggcaccagctccaagggctccgaccaggccatcatcacgctccgcgtgcgcagccacctggccgccctctggcccttcctgggcatcgtggctgaggtgctggtgctggtcaccatcatcttcatctacgagaagcgccggaagcccgaggacgtcctggatgatgacgacgccggctctgcacccctgaagagcagcgggcagcaccagaatgacaaaggcaagaacgtccgccagaggaactcttcctgaggcaggtggcccgaggacgctccctgctccacgtctgcgccgccgccggagtccactcccagtgcttgcaagattccaagttctcacctcttaaagaaaacccaccccgtagattcccatcatacacttccttcttttttaaaaaagttgggttttctccattcaggattctgttccttaggtttttttccttctgaagtgtttcacgagagcccgggagctgctgccctgcggccccgtctgtggctttcagcctctgggtctgagtcatggccgggtgggcggcacagccttctccactggccggagtcagtgccaggtccttgccctttgtggaaagtcacaggtcacacgaggggccccgtgtcctgcctgtctgaagccaatgctgtctggttgcgccatttttgtgcttttatgtttaattttatgagggccacgggtctgtgttcgactcagcctcagggacgactctgacctcttggccacagaggactcacttgcccacaccgagggcgaccccgtcacagcctcaagtcactcccaagccccctccttgtctgtgcatccgggggcagctctggagggggtttgctggggaactggcgccatcgccgggactccagaaccgcagaagcctccccagctcacccctggaggacggccggctctctatagcaccagggctcacgtgggaacccccctcccacccaccgccacaataaagatcgcccccacctccaccctcaccctc

SEQ ID NO: 9518 - protein, 189 aa, Homo sapiens; identical to SEQ ID NO: 9506

SEQ ID NO: 9519 - DNA, 750 bp, Homo sapiens
gtgcatttgtgcaggagactgagaagggtttcttctgagcagaaagcttagcctggggcttactggccagagctgcctgcagcctgggaagcagccggcacagtcttcactaccgtagaagaccttggctccaagatactcctcacctgctccttgaatgacagcgccacagaggtcacagggcaccgctggctgaaggggggcgtggtgctgaaggaggacgcgctgcccggccagaaaacggagttcaaggtggactccgacgaccagtggggagagtactcctgcgtcttcctccccgagcccatgggcacggccaacatccagctccacgggcctcccagagtgaaggctgtgaagtcgtcagaacacatcaacgagggggagacggccatgctggtctgcaagtcagagtccgtgccacctgtcactgactgggcctggtacaagatcactgactctgaggacaaggccctcatgaacggctccgagagcaggttcttcgtgagttcctcgcagggccggtcagagctacacattgagaacctgaacatggaggccgaccccggccagtaccggtgcaacggcaccagctccaagggctccgaccaggccatcatcacgctccgcgtgcgcagccacctggccgccctctggcccttcctgggcatcgtggctgaggtgctggtgctggtcaccatcatcttcatctacgagaagcgccggaagcccgaggacgtcctggatggt

SEQ ID NO: 9520 - protein, 147 aa, Homo sapiens; identical to SEQ ID NO: 9470

SEQ ID NO: 9521 - DNA, 564 bp, Homo sapiens
gtgcaggagactgagaagggtttcttctgagcagaaagcttagcctggggcttactggccagagctgcctgcagcctgggaagcagccggcttcgtccaggcgccgctgtcccagcagaggtgggtggggggcagtgtggagctgcactgcgaggccgtgggcagcccggtgcccgagatccagtggtggtttgaagggcagggtcccaacgacacctgctcccagctctgggacggcgcccggctggaccgcgtccacatccacgccacctaccaccagcacgcggccagcaccatctccatcgacacgctcgtggaggaggacacgggcacttacgagtgccgggccagcaacgacccggatcgcaaccacctgacccgggcgcccagggtcaagtgggtccgcgcccaggcagtcgtgctagtcctggaacccggcacagtcttcactaccgtagaagaccttggctccaagatactcctcacctgctccttgaatgacagcgccacagaggtcacagggcaccgctggctgaaggggggcgtggtgctgaaggaggacgc

SEQ ID NO: 9522 - protein, 172 aa, Homo sapiens
PGAYWPELPAAWEAAGFVQAPLSQQRWVGGSVELHCEAVGSPVPEIQWWFEGQGPNDTCSQLWDGARLDRVHIHATYHQHAASTISIDTLVEEDTGTYECRASNDPDRNHLTRAPRVKWVRAQAVVLVLEPGTVFTTVEDLGSKILLTCSLNDSATEVTGHRWLKGGVVLKE

SEQ ID NO: 9523 - DNA, 248 bp, Homo sapiens
agcagggaccagggcatcgagctcttgtagcagccccagcacaaactggaaattcttttctaaaaacgtagccagctgggcgcggtggtcccagccacctttccaggagtcccgggctcccaggcgccatctgcaccggtcccggtgctcccgctgggtccgccagcttctcagcgggcagcatcgctcccaaagggaccaaaaggctttggatggaacaaccctgtgtccctccggatgctgatgat

SEQ ID NO: 9524 - protein, 80 aa, Homo sapiens
AGTRASSSCSSPSTNWKFFSKNVASWARWSQPPFQESRAPRRHLHRSRCSRWVRQLLSGQHRSQRDQKALDGTTLCPSGC

SEQ ID NO: 9525 - DNA, 2440 bp, Homo sapiens
cgggaatattgtaaactaaccaagaaccaagagatttgcttggttggggattggcagaagaaccggggtgctcccagcactgctggagtgccgtcagcctggggctggggggatgtggggccacctgagtgcctcctagagaagggcacgggagccttggccgggggtgctgtggctattttttttttttttcctggagatggagtcttgctgttcccaggtggagtgtggtggcacaatctcggctcactgcaacttccgcctcccgggttcaagcgattcttctgcctcagcctcctgagtagctgggattacaggcatgagccaacatgcccagctaattttttgtatttttagaagagacggggtttcaccgtgttagccaggatggtctcgatctcccgacctcgagatccacccgccttggcctcccaaagtgctgggattacaggcgtgagcctccgcgcccggccaccaccgcgcccagctggctacgtttttagaaaagaatttccagtttgtgctggggctgctacaagagctcgatgccctggtccctgctcagggacgtgggtgggtgccttgtctgtccccacaccctggtcccagcctcgtgtgtctctgggcaggaacatcgccaggcggggcctctgggttcccagcgccttagcccagggcccgccagctgccagcgaagggtgccttcccgaagggggtgccttcccgaaggggcctcctcagcaggcgctgggctcttcccttcccggaggcgtggccagaagttccccttgggcctccggtcctcggggcgtaagggccacggtgtatttttgggatgaaaaccagtccttcccggggaggagccgcaggttcctgggggtcaggcaggcagcgcgggccgtgctcctccactctgctgaccgcgtctcgccgggccttgcagccggcacagtcttcactaccgtagaagaccttggctccaagatactcctcacctgctccttgaatgacagcgccacagaggtcacagggcaccgctggctgaaggggggcgtggtgctgaaggaggacgcgctgcccggccagaaaacggagttcaaggtggactccgacgaccagtggggagagtactcctgcgtcttcctccccgagcccatgggcacggccaacatccagctccacgggcctcccagagtgaaggctgtgaagtcgtcagaacacatcaacgagggggagacggccatgctggtctgcaagtcagagtccgtgccacctgtcactgactgggcctggtacaagatcactgactctgaggacaaggccctcatgaacggctccgagagcaggttcttcgtgagttcctcgcagggccggtcagagctacacattgagaacctgaacatggaggccgaccccggccagtaccggtgcaacggcaccagctccaagggctccgaccaggccatcatcacgctccgcgtgcgcagccacctggccgccctctggcccttcctgggcatcgtggctgaggtgctggtgctggtcaccatcatcttcatctacgagaagcgccggaagcccgaggacgtcctggatgatgacgacgccggctctgcacccctgaagagcagcgggcagcaccagaatgacaaaggcaagaacgtccgccagaggaactcttcctgaggcaggtggcccgaggacgctccctgctccacgtctgcgccgccgccggagtccactcccagtgcttgcaagattccaagttctcacctcttaaagaaaacccaccccgtagattcccatcatacacttccttcttttttaaaaaagttgggttttctccattcaggattctgttccttaggtttttttccttctgaagtgtttcacgagagcccgggagctgctgccctgcggccccgtctgtggctttcagcctctgggtctgagtcatggccgggtgggcggcacagccttctccactggccggagtcagtgccaggtccttgccctttgtggaaagtcacaggtcacacgaggggccccgtgtcctgcctgtctgaagccaatgctgtctggttgcgccatttttgtgcttttatgtttaattttatgagggccacgggtctgtgttcgactcagcctcagggacgactctgacctcttggccacagaggactcacttgcccacaccgagggcgaccccgtcacagcctcaagtcactcccaagccccctccttgtctgtgcatccgggggcagctctggagggggtttgctggggaactggcgccatcgccgggactccagaaccgcagaagcctccccagctcacccctggaggacggccggctctctatagcaccagggctcacgtgggaacccccctcccacccaccgccacaataaagatcgcccccacctccaccctcaccctc

SEQ ID NO: 9526 - protein, 432 aa, Homo sapiens
MVSISRPRDPPALASQSAGITGVSLRARPPPRPAGYVFRKEFPVCAGAATRARCPGPCSGTWVGALSVPTPWSQPRVSLGRNIARRGLWVPSALAQGPPAASEGCLPEGGAFPKGPPQQALGSSLPGGVARSSPWASGPRGVRATVYFWDENQSFPGRSRRFLGVRQAARAVLLHSADRVSPGLAAGTVFTTVEDLGSKILLTCSLNDSATEVTGHRWLKGGVVLKEDALPGQKTEFKVDSDDQWGEYSCVFLPEPMGTANIQLHGPPRVKAVKSSEHINEGETAMLVCKSESVPPVTDWAWYKITDSEDKALMNGSESRFFVSSSQGRSELHIENLNMEADPGQYRCNGTSSKGSDQAIITLRVRSHLAALWPFLGIVAEVLVLVTIIFIYEKRRKPEDVLDDDDAGSAPLKSSGQHQNDKGKNVRQRNSS

SEQ ID NO: 9527 - DNA, 1189 bp, Homo sapiens
agaaaagaatttccagtttgtgctggggctgctacaagagctcgatgccctggtccctgctcagggacgtgggtgggtgccttgtctgtccccacaccctggtcccagcctcgtgtgtctctgggcaggaacatcgccaggcggggcctctgggttcccagcgccttagcccagggcccgccagctgccagcgaagggtgccttcccgaagggggtgccttcccgaaggggcctcctcagcaggcgctgggctcttcccttcccggaggcgtggccagaagttccccttgggcctccggtcctcggggcgtaagggccacggtgtatttttgggatgaaaaccagtccttcccggggaggagccgcaggttcctgggggtcaggcaggcagcgcgggccgtgctcctccactctgctgaccgcgtctcgccgggccttgcagccggcacagtcttcactaccgtagaagaccttggctccaagatactcctcacctgctccttgaatgacagcgccacagaggtcacagggcaccgctggctgaaggggggcgtggtgctgaaggaggggagacggccatgctggtctgcaagtcagagtccgtgccacctgtcactgactgggcctggtacaagatcactgactctgaggacaaggccctcatgaacggctccgagagcaggttcttcgtgagttcctcgcagggccggtcagagctacacattgagaacctgaacatggaggccgaccccggccagtaccggtgcaacggcaccagctccaagggctccgaccaggccatcatcacgctccgcgtgcgcagccacctggccgccctctggcccttcctgggcatcgtggctgaggtgctggtgctggtcaccatcatcttcatctacgagaagcgccggaagcccgaggacgtcctggatgatgacgacgccggctctgcacccctgaagagcagcgggcagcaccagaatgacaaaggcaagaacgtccgccagaggaactcttcctgaggcaggtggcccgaggacgctccctgctccacgtctgcgccgccgccggagtccactcccagtgcttgcaagattccaagttctcacctcttaaagaaaacccaccccgtagattcccatcatacacttccttcttttttaaaaaagttgggttttctccattcagg

SEQ ID NO: 9528 - protein, 147 aa, Homo sapiens [sequence omitted]

SEQ ID NO: 9529 - DNA, 417 bp, Homo sapiens
gggcctcccagagtgaaggctgtgaagtcgtcagaacacatcaacgagggggagacggccatgctggtctgcaagtcagagtccgtgccacctgtcactgactgggcctggtacaagatcactgactctgaggacaaggccctcatgaacggctccgagagcaggttcttcgtgagttcctcgcagggccggtcagagctacacattgagaacctgaacatggaggccgaccccggccagtaccggtgcaacggcaccagctccaagggctccgaccaggccatcatcacgctccgcgtgcgcagccacctggccgccctctggcccttcctgggcatcgtggctgaggtgctggtgctggtcaccatcatcttcatctacgagaagcgccggaagcccgaggacgtcctggatggt

SEQ ID NO: 9530 - protein, 118 aa, Homo sapiens; identical to SEQ ID NO: 9504

SEQ ID NO: 9531 - DNA, 652 bp, Homo sapiens
ctgtgaagtcgtcagaacacatcaacgagggggagacggccatgctggtctgcaagtcagagtccgtgccacctgtcactgactgggcctggtacaagatcactgactctgaggacaaggccctcatgaacggctccgagagcaggttcttcgtgagttcctcgcagggccggtcagagctacacattgagaacctgaacatggaggccgaccccggccagtaccggtgcaacggcaccagctccaagggctccgaccaggccatcatcacgctccgcgtgcgcagccacctggccgccctctggcccttcctgggcatcgtggctgaggtgctggtgctggtcaccatcatcttcatctacgagaagcgccggaagcccgaggacgtcctggatgatgacgacgccggctctgcacccctgaagagcagcgggcagcaccagaatgacaaaggcaagaacgtccgccagaggaactcttcctgaggcaggtggcccgaggacgctccctgctccacgtctgcgccgccgccggagtccactcccagtgcttgcaagattccaagttctcacctcttaaagaaaacccaccccgtagattcccatcatacacttccttcttttttaaaaaagttgggttttctccattcagg

SEQ ID NO: 9532 - protein, 147 aa, Homo sapiens [sequence omitted]

SEQ ID NO: 9533 - DNA, 1239 bp, Homo sapiens
ctgtgaagtcgtcagaacacatcaacgagggggagacggccatgctggtctgcaagtcagagtccgtgccacctgtcactgactgggcctggtacaagatcactgactctgaggacaaggccctcatgaacggctccgagagcaggttcttcgtgagttcctcgcagggccggtcagagctacacattgagaacctgaacatggaggccgaccccggccagtaccggtgcaacggcaccagctccaagggctccgaccaggccatcatcacgctccgcgtgcgcagccacctggccgccctctggcccttcctgggcatcgtggctgaggtgctggtgctggtcaccatcatcttcatctacgagaagcgccggaagcccgaggacgtcctggatgatgacgacgccggctctgcacccctgaagagcagcgggcagcaccagaatgacaaaggcaagaacgtccgccagaggaactcttcctgaggcaggtggcccgaggacgctccctgctccacgtctgcgccgccgccggagtccactcccagtgcttgcaagattccaagttctcacctcttaaagaaaacccaccccgtagattcccatcatacacttccttcttttttaaaaaagttgggttttctccattcaggattctgttccttaggtttttttccttctgaagtgtttcacgagagcccgggagctgctgccctgcggccccgtctgtggctttcagcctctgggtctgagtcatggccgggtgggcggcacagccttctccactggccggagtcagtgccaggtccttgccctttgtggaaagtcacaggtcacacgaggggccccgtgtcctgcctgtctgaagccaatgctgtctggttgcgccatttttgtgcttttatgtttaattttatgagggccacgggtctgtgttcgactcagcctcagggacgactctgacctcttggccacagaggactcacttgcccacaccgagggcgaccccgtcacagcctcaagtcactcccaagccccctccttgtctgtgcatccgggggcagctctggagggggtttgctggggaactggcgccatcgccgggactccagaaccgcagaagcctccccagctcacccctggaggacggccggctctctatagcaccagggctcacgtgggaacccccctcccacccaccgccacaataaagatcgcccccacctccaccctcaccctc

SEQ ID NO: 9534 - protein, 147 aa, Homo sapiens [sequence omitted]

SEQ ID NO: 9535 - DNA, 426 bp, Homo sapiens
ccatgctggtctgcaagtcagagtccgtgccacctgtcactgactgggcctggtacaagatcactgactctgaggacaaggcccttcctgggcatcgtggctgaggtgctggtgctggtcaccatcatcttcatctacgagaagcgccggaagcccgaggacgtcctggatgatgacgacgccggctctgcacccctgaagagcagcgggcagcaccagaatgacaaaggcaagaacgtccgccagaggaactcttcctgaggcaggtggcccgaggacgctccctgctccacgtctgcgccgccgccggagtccactcccagtgcttgcaagattccaagttctcacctcttaaagaaaacccaccccgtagattcccatcatacacttccttcttttttaaaaaagttgggttttctccattca

SEQ ID NO: 9536 - protein, 44 aa, Homo sapiens
MTKARTSARGTLPEAGGPRTLPAPRLRRRRSPLPVLARFQVLTS

SEQ ID NO: 9537 - DNA, 771 bp, Homo sapiens
aggccctcatgaacggctccgagagcaggttcttcgtgagttcctcgcagggccggtcagagctacacattgagaacctgaacatggaggccgaccccggccagtaccggtgcaacggcaccagctccaagggctccgaccaggccatcatcacgctccgcgtgcgcagccacctggccgccctctggcccttcctgggcatcgtggctgaggtgctggtgctggtcaccatcatcttcatctacgagaagcgccggaagcccgaggacgtcctggatgatgacgacgccggctctgcacccctgaagagcagcgggcagcaccagaatgacaaaggcaagaacgtccgccagaggaactcttcctgaggcaggtggcccgaggacgctccctgctccacgtctgcgccgccgccggagtccactcccagtgcttgcaagattccaagttctcacctcttaaagaaaacccaccccgtagattcccatcatacacttccttcttttttaaaaaagttgggttttctccattcaggattctgttccttaggtttttttccttctgaagtgtttcacgagagcccgggagctgctgccctgcggccccgtctgtggctttcagcctctgggtctgagtcatggccgggtgggcggcacagccttctccactggccggagtcagtgccaggtccttgccctttgtggaaagtcacaggtcacacgaggggccccgtgtcctgcctgtctgaagccaatgctgtctggttgcgcc

SEQ ID NO: 9538 - protein, 119 aa, Homo sapiens [sequence omitted]

SEQ ID NO: 9539 - DNA, 1007 bp, Homo sapiens
aggccctcatgaacggctccgagagcaggttcttcgtgagttcctcgcagggccggtcagagctacacattgagaacctgaacatggaggccgaccccggccagtaccggtgcaacggcaccagctccaagggctccgaccaggccatcatcacgctccgcgtgcgcagccacctggccgccctctggcccttcctgggcatcgtggctgaggtgctggtgctggtcaccatcatcttcatctacgagaagcgccggaagcccgaggacgtcctggatgatgacgacgccggctctgcaccccttccactcccagtgcttgcaagattccaagttctcacctcttaaagaaaacccaccccgtagattcccatcatacacttccttcttttttaaaaaagttgggttttctccattcaggattctgttccttaggtttttttccttctgaagtgtttcacgagagcccgggagctgctgccctgcggccccgtctgtggctttcagcctctgggtctgagtcatggccgggtgggcggcacagccttctccactggccggagtcagtgccaggtccttgccctttgtggaaagtcacaggtcacacgaggggccccgtgtcctgcctgtctgaagccaatgctgtctggttgcgccatttttgtgcttttatgtttaattttatgagggccacgggtctgtgttcgactcagcctcagggacgactctgacctcttggccacagaggactcacttgcccacaccgagggcgaccccgtcacagcctcaagtcactcccaagccccctccttgtctgtgcatccgggggcagctctggagggggtttgctggggaactggcgccatcgccgggactccagaaccgcagaagcctccccagctcacccctggaggacggccggctctctatagcaccagggctcacgtgggaacccccctcccacccaccgccacaataaagatcgcccccacctccaccctcaccctc

SEQ ID NO: 9540 - protein, 112 aa, Homo sapiens
MNGSESRFFVSSSQGRSELHIENLNMEADPGQYRCNGTSSKGSDQAIITLRVRSHLAALWPFLGIVAEVLVLVTIIFIYEKRRKPEDVLDDDDAGSAPLPLPVLARFQVLTS

SEQ ID NO: 9541 - DNA, 1122 bp, Homo sapiens
aggccctcatgaacggctccgagagcaggttcttcgtgagttcctcgcagggccggtcagagctacacattgagaacctgaacatggaggccgaccccggccagtaccggtgcaacggcaccagctccaagggctccgaccaggccatcatcacgctccgcgtgcgcagccacctggccgccctctggcccttcctgggcatcgtggctgaggtgctggtgctggtcaccatcatcttcatctacgagaagcgccggaagcccgaggacgtcctggatgatgacgacgccggctctgcacccctgaagagcagcgggcagcaccagaatgacaaaggcaagaacgtccgccagaggaactcttcctgaggcaggtggcccgaggacgctccctgctccacgtctgcgccgccgccggagtccactcccagtgcttgcaagattccaagttctcacctcttaaagaaaacccaccccgtagattcccatcatacacttccttcttttttaaaaaagttgggttttctccattcaggattctgttccttaggtttttttccttctgaagtgtttcacgagagcccgggagctgctgccctgcggccccgtctgtggctttcagcctctgggtctgagtcatggccgggtgggcggcacagccttctccactggccggagtcagtgccaggtccttgccctttgtggaaagtcacaggtcacacgaggggccccgtgtcctgcctgtctgaagccaatgctgtctggttgcgccatttttgtgcttttatgtttaattttatgagggccacgggtctgtgttcgactcagcctcagggacgactctgacctcttggccacagaggactcacttgcccacaccgagggcgaccccgtcacagcctcaagtcactcccaagccccctccttgtctgtgcatccgggggcagctctggagggggtttgctggggaactggcgccatcgccgggactccagaaccgcagaagcctccccagctcacccctggaggacggccggctctctatagcaccagggctcacgtgggaacccccctcccacccaccgccacaataaagatcgcccccacctccaccctcaccctc

SEQ ID NO: 9542 - protein, 119 aa, Homo sapiens [sequence omitted]

SEQ ID NO: 9543 - DNA, 1097 bp, Homo sapiens
aggccctcatgaacggctccgagagcaggttcttcgtgagttcctcgcagggccggtcagagctacacattgagaacctgaacatggaggccgaccccggccagtaccggtgcaacggcaccagctccaagggctccgaccaggccatcatcacgctccgcgtgcgcagccacctggccgccctctggcccttcctgggcatcgtggctgaggtgctggtgctggtcaccatcatcttcatctacgagaagcgccggaagcccgaggacgtcctggatggaagagcagcgggcagcaccagaatgacaaaggcaagaacgtccgccagaggaactcttcctgaggcaggtggcccgaggacgctccctgctccacgtctgcgccgccgccggagtccactcccagtgcttgcaagattccaagttctcacctcttaaagaaaacccaccccgtagattcccatcatacacttccttcttttttaaaaaagttgggttttctccattcaggattctgttccttaggtttttttccttctgaagtgtttcacgagagcccgggagctgctgccctgcggccccgtctgtggctttcagcctctgggtctgagtcatggccgggtgggcggcacagccttctccactggccggagtcagtgccaggtccttgccctttgtggaaagtcacaggtcacacgaggggccccgtgtcctgcctgtctgaagccaatgctgtctggttgcgccatttttgtgcttttatgtttaattttatgagggccacgggtctgtgttcgactcagcctcagggacgactctgacctcttggccacagaggactcacttgcccacaccgagggcgaccccgtcacagcctcaagtcactcccaagccccctccttgtctgtgcatccgggggcagctctggagggggtttgctggggaactggcgccatcgccgggactccagaaccgcagaagcctccccagctcacccctggaggacggccggctctctatagcaccagggctcacgtgggaacccccctcccacccaccgccacaataaagatcgcccccacctccaccctcaccctc

SEQ ID NO: 9544 - protein, 142 aa, Homo sapiens
MNGSESRFFVSSSQGRSELHIENLNMEADPGQYRCNGTSSKGSDQAIITLRVRSHLAALWPFLGIVAEVLVLVTIIFIYEKRRKPEDVLDGRAAGSTRMTKARTSARGTLPEAGGPRTLPAPRLRRRRSPLPVLARFQVLTS

SEQ ID NO: 9545 - DNA, 927 bp, Homo sapiens
tgggcatcgtggctgaggtgctggtgctggtcaccatcatcttcatctacgagaagcgccggaagcccgaggacgtcctggatgatgacgacgccggctctgcacccctgaagagcagcgggcagcaccagaatgacaaaggcaagaacgtccgccagaggaactcttcctgaggcaggtggcccgaggacgctccctgctccacgtctgcgccgccgccggagtccactcccagtgcttgcaagattccaagttctcacctcttaaagaaaacccaccccgtagattcccatcatacacttccttcttttttaaaaaagttgggttttctccattcaggattctgttccttaggtttttttccttctgaagtgtttcacgagagcccgggagctgctgccctgcggccccgtctgtggctttcagcctctgggtctgagtcatggccgggtgggcggcacagccttctccactggccggagtcagtgccaggtccttgccctttgtggaaagtcacaggtcacacgaggggccccgtgtcctgcctgtctgaagccaatgctgtctggttgcgccatttttgtgcttttatgtttaattttatgagggccacgggtctgtgttcgactcagcctcagggacgactctgacctcttggccacagaggactcacttgcccacaccgagggcgaccccgtcacagcctcaagtcactcccaagccccctccttgtctgtgcatccgggggcagctctggagggggtttgctggggaactggcgccatcgccgggactccagaaccgcagaagcctccccagctcacccctggaggacggccggctctctatagcaccagggctcacgtgggaacccccctcccacccaccgccacaataaagatcgcccccacctccaccctcaccctc

SEQ ID NO: 9546 - protein, 44 aa, Homo sapiens; identical to SEQ ID NO: 9536

SEQ ID NO: 9547 - DNA, 887 bp, Homo sapiens
gctgtcctctcgtcctctttttcatggcggcggtccttcttcagatgacgacgccggctctgcacccctgaagagcagcgggcagcaccagaatgacaaaggcaagaacgtccgccagaggaactcttcctgaggcaggtggcccgaggacgctccctgctccacgtctgcgccgccgccggagtccactcccagtgcttgcaagattccaagttctcacctcttaaagaaaacccaccccgtagattcccatcatacacttccttcttttttaaaaaagttgggttttctccattcaggattctgttccttaggtttttttccttctgaagtgtttcacgagagcccgggagctgctgccctgcggccccgtctgtggctttcagcctctgggtctgagtcatggccgggtgggcggcacagccttctccactggccggagtcagtgccaggtccttgccctttgtggaaagtcacaggtcacacgaggggccccgtgtcctgcctgtctgaagccaatgctgtctggttgcgccatttttgtgcttttatgtttaattttatgagggccacgggtctgtgttcgactcagcctcagggacgactctgacctcttggccacagaggactcacttgcccacaccgagggcgaccccgtcacagcctcaagtcactcccaagccccctccttgtctgtgcatccgggggcagctctggagggggtttgctggggaactggcgccatcgccgggactccagaaccgcagaagcctccccagctcacccctggaggacggccggctctctatagcaccagggctcacgtgggaacccccctcccacccaccgccacaataaagatcgcccccacctccaccctcaccctc

SEQ ID NO: 9548 - protein, 44 aa, Homo sapiens; identical to SEQ ID NO: 9536

SEQ ID NO: 9549 - DNA, 809 bp, Homo sapiens
cgggcagcaccagaatgacaaaggcaagaacgtccgccagaggaactcttcctgaggcaggtggcccgaggacgctccctgctccacgtctgcgccgccgccggagtccactcccagtgcttgcaagattccaagttctcacctcttaaagaaaacccaccccgtagattcccatcatacacttccttcttttttaaaaaagttgggttttctccattcaggattctgttccttaggtttttttccttctgaagtgtttcacgagagcccgggagctgctgccctgcggccccgtctgtggctttcagcctctgggtctgagtcatggccgggtgggcggcacagccttctccactggccggagtcagtgccaggtccttgccctttgtggaaagtcacaggtcacacgaggggccccgtgtcctgcctgtctgaagccaatgctgtctggttgcgccatttttgtgcttttatgtttaattttatgagggccacgggtctgtgttcgactcagcctcagggacgactctgacctcttggccacagaggactcacttgcccacaccgagggcgaccccgtcacagcctcaagtcactcccaagccccctccttgtctgtgcatccgggggcagctctggagggggtttgctggggaactggcgccatcgccgggactccagaaccgcagaagcctccccagctcacccctggaggacggccggctctctatagcaccagggctcacgtgggaacccccctcccacccaccgccacaataaagatcgcccccacctccaccctcaccctc

SEQ ID NO: 9550 - protein, 44 aa, Homo sapiens; identical to SEQ ID NO: 9536

SEQ ID NO: 9551 - DNA, 3408 bp, Homo sapiens
ggccggcggcggcggcggcggctccgctccgcactgcccggcgccgcctcgccatggacgcgcgcgggggcggcgggcggcccggggagagcccgggcgcgacccccgcgccggggccgccgccgccgccgccgcccgcgcccccccaacagcagccgccgccgccgccgccgcccgcgccccccccgggccccgggcccgcgcccccccagcacccgccccgggccgaggcgttgcccccggaggcggcggatgagggcggcccgcggggccggctccgcagccgcgacagctcgtgcggccgccccggcaccccgggcgcggcgagcacggccaagggcagcccgaacggcgagtgcgggcgcggcgagccgcagtgcagccccgcggggcccgagggcccggcgcgggggcccaaggtgtcgttctcgtgccgcggggcggcctcggggcccgcgccggggccggggccggcggaggaggcgggcagcgaggaggcgggcccggcgggggagccgcgcggcagccaggccagcttcatgcagcgccagttcggcgcgctcctgcagccgggcgtcaacaagttctcgctgcggatgttcggcagccagaaggccgtggagcgcgagcaggagcgcgtcaagtcggcgggggcctggatcatccacccgtacagcgacttcaggttctactgggacttcaccatgctgctgttcatggtgggaaacctcatcatcatcccagtgggcatcaccttcttcaaggatgagaccactgccccgtggatcgtgttcaacgtggtctcggacaccttcttcctcatggacctggtgttgaacttccgcaccggcattgtgatcgaggacaacacggagatcatcctggaccccgagaagatcaagaagaagtatctgcgcacgtggttcgtggtggacttcgtgtcctccatccccgtggactacatcttccttatcgtggagaagggcattgactccgaggtctacaagacggcacgcgccctgcgcatcgtgcgcttcaccaagatcctcagcctcctgcggctgctgcgcctctcacgcctgatccgctacatccatcagtgggaggagatcttccacatgacctatgacctggccagcgcggtgatgaggatctgcaatctcatcagcatgatgctgctgctctgccactgggacggctgcctgcagttcctggtgcctatgctgcaggacttcccgcgcaactgctgggtgtccatcaatggcatggtgaaccactcgtggagtgaactgtactccttcgcactcttcaaggccatgagccacatgctgtgcatcgggtacggccggcaggcgcccgagagcatgacggacatctggctgaccatgctcagcatgattgtgggtgccacctgctacgccatgttcatcggccacgccactgccctcatccagtcgctggactcctcgcggcgccagtaccaggagaagtacaagcaggtggagcagtacatgtccttccacaagctgccagctgacttccgccagaagatccacgactactatgagcaccgttaccagggcaagatgtttgacgaggacagcatcctgggcgagctcaacgggcccctgcgggaggagatcgtcaacttcaactgccggaagctggtggcctccatgccgctgttcgccaacgccgaccccaacttcgtcacggccatgctgaccaagctcaagttcgaggtcttccagccgggtgactacatcatccgcgaaggcaccatcgggaagaagatgtacttcatccagcacggcgtggtcagcgtgctcactaagggcaacaaggagatgaagctgtccgatggctcctacttcggggagatctgcctgctcacccggggccgccgcacggcgagcgtgcgggctgacacctactgccgcctctattcgctgagcgtggacaacttcaacgaggtgctggaggagtaccccatgatgcggcgcgccttcgagacggtggccatcgaccgcctggaccgcatcggcaagaagaattccatcctcctgcacaaggtgcagcatgacctcaactcgggcgtattcaacaaccaggagaacgccatcatccaggagatcgtcaagtacgaccgcgagatggtgcagcaggccgagctgggtcagcgcgtgggcctcttcccgccgccgccgccgccgccgcaggtcacctcggccatcgccacgctgcagcaggcggcggccatgagcttctgcccgcaggtggcgcggccgctcgtggggccgctggcgctcggctcgccgcgcctcgtgcgccgcccgcccccggggcccgcacctgccgccgcctcacccgggcccccgccccccgccagccccccgggcgcgcccgccagcccccgggcaccgcggacctcgccctacggcggcctgcccgccgccccccttgctgggcccgccctgcccgcgcgccgcctgagccgcgcgtcgcgcccactgtccgcctcgcagccctcgctgcctcacggcgcccccggccccgcggcctccacacgcccggccagcagctccacaccgcgcttggggcccacgcccgctgcccgggccgccgcgcccagcccggaccgcagggactcggcctcacccggcgccgccggcggcctggacccccaggactccgcgcgctcgcgcctctcgtccaacttgtgaccctcgccgaccgccccgcgggcccaggcgggccgggggcggggccgtcatccagaccaaagccatgccattgcgctgccccggccgccagtccgcccagaagccatagacgagacgtaggtagccgtagttggacggacgggcagggccggcggggcagccccctccgcgcccccggccgtcccccctcatcgccccgcgcccacccccatcgcccctgcccccggcggcggcctcgcgtgcgagggggctcccttcacctcggtgcctcagttcccccagctgtaagacagggacggggcggcccagtggctgagaggagccggctgtggagccccgcccgccccccaccctctaggtggcccccgtccgaggaggatcgttttctaagtgcaatacttggcccgccggcttcccgctgcccccatcgcgctcacgcaataaccggcccggcccccgtccgcgcgcgtcccccggtgacctcggggagcagcaccccgcctccctccagcactggcaccgagaggcaggcctggctgcgcagggcgcgggggggaggctggggtcccgccgccgtgatgaatgtactgacgagccgaggcagcagtgcccccaccgtggccccccacgccccattaacccccacacccccattccgcgcaataaacgacagcattggcgccaa

SEQ ID NO: 9552 - protein, 889 aa, Homo sapiens; identical to SEQ ID NO: 1487

SEQ ID NO: 9553 - DNA, 2756 bp, Homo sapiens
ccgccgccgcccggacaataaacagcagctttgcgcggggcgatgcccgagccggtgccgccgcccccgcgccgcgcagccccggccgccaggccttagcccgccccggcccccgccaggccgcgtccccctcccctcccctcccccgcgcgccacccgcgcccgcccccgcccggcaccgcggacccacccggacctcggcggggagatggaggtcctggcggcagagaccacgtcccagcaggagcggctgcaggccatcgcagagaagcggaagcggcaggcggagatcgagaacaagcgccggcagctggaggacgagcggaggcagctgcagcacctgaagtccaaggcactgcgggagcgctggctgctggaggggacgccgtcctcggcctcagagggggatgaggacctgaggaggcagatgcaggacgacgagcagaagacacggctgctggaggactcggtgtccaggttggagaaggaaattgaggtgctggagcgtggagactccgccccagccactgccaaggagaacgcggcggccccgagcccagtccgggccccagccccgagtccagccaaggaggagcgcaagacagaggtggtgatgaattcacagcagacgccggtgggcacgcccaaagacaagcgagtctccaacacgcccctgaggacggttgacggctcccccatgatgaaggcagtggtccatgctgtggacggcaccgccgagaacgggatccaccccctgagctcctccgaggtggacgaactcatccacaaagcggacgaggtcacgctgagcgaggcagggtccacggccggggcggcagagacccggggggctgtggagggggcagcccggaccacgccctcccggcgggagatcaccggtgtgcaggcacagccaggcgaggccacgtccggcccgccggggatccagcccggccaggagcccccggtcacaatgatcttcatgggttaccagaacgtggaggatgaggccgagaccaagaaggtgctgggccttcaagataccatcacggcggagctggtggtcatcgaagacgcggctgagcccaaggagcctgcaccacccaacggcagtgctgccgagcctcccacggaggccgcctccagggaagagaatcaggcggggcccgaggccaccaccagcgacccccaggacctcgacatgaagaagcaccgttgtaaatgctgctccatcatgtgagccggcccccgagaccccggcccccaccccacaccacagacacccaccagcccggcccctcccggcgcctgcccaccctccacccacagcctcacgggtccaggacttggcgtgttgttacatgttccttccgagttttctttcgctggaaagagggacaggggcccccacccgtcaccacgccccaacactccccccgaaccagagccgtgcacttgtgcctggtaggagagagacaggacagacccgcttttcccgagacaaggaccccccatgtcacggcagcttcacagacgcggctcgcgcccaccggggtcctggcgggtgggacccgcagcctccacgcggcccaggccagcctgccaccctctgggcctcctacctgtgcctttctctgaggggacaccccgccagagagggccccgggagccgggggtgggtactgaggcctgctcaggccctggaagtgaggctctatggggttccctggccaaggcgctggccccccaatctcaggcagttggggtgaggccgtgcctctttgggggctaaaggtcttgggtggaggacaggcccctctgctgtgcccctatgccctgtgtgggcccaaccagtggacaatggagtctgggggagggggaaccccggggacatgcccccacccgggaggggccggtaacccctgggctatcttctagacggggcgaaccaggggtcattgacctgccccctgcacagggcagggaccgagtgagccactccttgtcccgagctcccgcccccactgggccctccttcctcctggtgctaatttggggaccccaggggccgcccccggcctcttctccatcctgcttggaccagggtcctgggtcttcccaaccataccccgagatcaggccccacctgccagctctactgggcttggagcacgtccgggcagtggagggagggacacagcctgggacaggaagcctcttgggttggagcaggagaccctcatttgccacccagaccaatgtgagcctgcccccagccccctctcattggaagtggcaaggggcttccctcctgggggcagctacactcgtccccagaggcacattcgtgcacattctcacagacaccgtctcacacgttggctttggacaaccaggccccaacttggtccctgccctagggacctccagcctggtgcccagtgctcaggccacctcctggtccagtcaccacctgcagcctcggcagggcaggtacaggggccacctcagatgggagcctgggtccctgcctccgctctgcccctgggtggctgggaggagaggccctctcgggggtgacctgggcgtcagccgtggaaccccctcctcctccctggagtctgcctgagtccctcgagccgcgagccttcgctgaagtgcccttgctataaccccctctgcttctggtgtgtgacgaggcccccgatgttcttgattttcccagagaagcaaataaacagcgtgaacagccccag

SEQ ID NO: 9554 - protein, 343 aa, Homo sapiens; identical to SEQ ID NO: 1489

SEQ ID NO: 9555 - DNA, 2888 bp, Homo sapiens
ccgccgccgcccggacaataaacagcagctttgcgcggggcgatgcccgagccggtgccgccgcccccgcgccgcgcagccccggccgccaggccttagcccgccccggcccccgccaggccgcgtccccctcccctcccctcccccgcgcgccacccgcgcccgcccccgcccggcaccgcggacccacccggacctcggcggggagatggaggtcctggcggcagagaccacgtcccagcaggagcggctgcaggccatcgcagagaagcggaagcggcaggcggagatcgagaacaagcgccggcagctggaggacgagcggaggcagctgcagcacctgaagtccaaggcactgcgggagcgctggctgctggaggggacgccgtcctcggcctcagagggggatgaggacctgaggaggcagatgcaggacgacgagcagaagacacggctgctggaggactcggtgtccaggttggagaaggaaattgaggtgctggagcgtggagactccgccccagccactgccaaggagaacgcggcggccccgagcccagtccgggccccagccccgagtccagccaaggaggagcgcaagacagaggtggtgatgaattcacagcagacgccggtgggcacgcccaaagacaagcgagtctccaacacgcccctgaggacggttgacggctcccccatgatgaaggcagccatgtactcggttgagatcactgtggagaaggacaaggtgacaggggagaccagggtgctgtccagcaccacgctgctccctcggcagccgctccctctgggcatcaaagtctacgaggacgagaccaaagtggtccatgctgtggacggcaccgccgagaacgggatccaccccctgagctcctccgaggtggacgaactcatccacaaagcggacgaggtcacgctgagcgaggcagggtccacggccggggcggcagagacccggggggctgtggagggggcagcccggaccacgccctcccggcgggagatcaccggtgtgcaggcacagccaggcgaggccacgtccggcccgccggggatccagcccggccaggagcccccggtcacaatgatcttcatgggttaccagaacgtggaggatgaggccgagaccaagaaggtgctgggccttcaagataccatcacggcggagctggtggtcatcgaagacgcggctgagcccaaggagcctgcaccacccaacggcagtgctgccgagcctcccacggaggccgcctccagggaagagaatcaggcggggcccgaggccaccaccagcgacccccaggacctcgacatgaagaagcaccgttgtaaatgctgctccatcatgtgagccggcccccgagaccccggcccccaccccacaccacagacacccaccagcccggcccctcccggcgcctgcccaccctccacccacagcctcacgggtccaggacttggcgtgttgttacatgttccttccgagttttctttcgctggaaagagggacaggggcccccacccgtcaccacgccccaacactccccccgaaccagagccgtgcacttgtgcctggtaggagagagacaggacagacccgcttttcccgagacaaggaccccccatgtcacggcagcttcacagacgcggctcgcgcccaccggggtcctggcgggtgggacccgcagcctccacgcggcccaggccagcctgccaccctctgggcctcctacctgtgcctttctctgaggggacaccccgccagagagggccccgggagccgggggtgggtactgaggcctgctcaggccctggaagtgaggctctatggggttccctggccaaggcgctggccccccaatctcaggcagttggggtgaggccgtgcctctttgggggctaaaggtcttgggtggaggacaggcccctctgctgtgcccctatgccctgtgtgggcccaaccagtggacaatggagtctgggggagggggaaccccggggacatgcccccacccgggaggggccggtaacccctgggctatcttctagacggggcgaaccaggggtcattgacctgccccctgcacagggcagggaccgagtgagccactccttgtcccgagctcccgcccccactgggccctccttcctcctggtgctaatttggggaccccaggggccgcccccggcctcttctccatcctgcttggaccagggtcctgggtcttcccaaccataccccgagatcaggccccacctgccagctctactgggcttggagcacgtccgggcagtggagggagggacacagcctgggacaggaagcctcttgggttggagcaggagaccctcatttgccacccagaccaatgtgagcctgcccccagccccctctcattggaagtggcaaggggcttccctcctgggggcagctacactcgtccccagaggcacattcgtgcacattctcacagacaccgtctcacacgttggctttggacaaccaggccccaacttggtccctgccctagggacctccagcctggtgcccagtgctcaggccacctcctggtccagtcaccacctgcagcctcggcagggcaggtacaggggccacctcagatgggagcctgggtccctgcctccgctctgcccctgggtggctgggaggagaggccctctcgggggtgacctgggcgtcagccgtggaaccccctcctcctccctggagtctgcctgagtccctcgagccgcgagccttcgctgaagtgcccttgctataaccccctctgcttctggtgtgtgacgaggcccccgatgttcttgattttcccagagaagcaaataaacagcgtgaacagccccag

SEQ ID NO: 9556 - protein, 387 aa, Homo sapiens; identical to SEQ ID NO: 1491

SEQ ID NO: 9557 - DNA, 3018 bp, Homo sapiens
ccgccgccgcccggacaataaacagcagctttgcgcggggcgatgcccgagccggtgccgccgcccccgcgccgcgcagccccggccgccaggccttagcccgccccggcccccgccaggccgcgtccccctcccctcccctcccccgcgcgccacccgcgcccgcccccgcccggcaccgcggacccacccggacctcggcggggagatggaggtcctggcggcagagaccacgtcccagcaggagcggctgcaggccatcgcagagaagcggaagcggcaggcggagatcgagaacaagcgccggcagctggaggacgagcggaggcagctgcagcacctgaagtccaaggcactgcgggagcgctggctgctggaggggacgccgtcctcggcctcagagggggatgaggacctgaggaggcagatgcaggacgacgagcagaagacacggctgctggaggactcggtgtccaggttggagaaggaaattgaggtgctggagcgtggagactccgccccagccactgccaaggagaacgcggcggccccgagcccagtccgggccccagccccgagtccagccaaggaggagcgcaagacagaggtggtgatgaattcacagcagacgccggtgggcacgcccaaagacaagcgagtctccaacacgcccctgaggacggttgacggctcccccatgatgaaggcagtggtccatgctgtggacggcaccgccgagaacgggatccaccccctgagctcctccgaggtggacgaactcatccacaaagcggacgaggtcacgctgagcgaggcagggtccacggccggggcggcagagacccggggggctgtggagggggcagcccggaccacgccctcccggcgggagatcaccggtgtgcaggcacagccaggcgaggccacgtccggcccgccggggatccagcccggccaggagcccccggtcacaatgatcttcatgggttaccagaacgtggaggatgaggccgagaccaagaaggtgctgggccttcaagataccatcacggcggagctggtggtcatcgaagacgcggctgagcccaaggagcctgcaccacccaacggcagtgctgccgagcctcccacggaggccgcctccagggaagagaatcaggcggggcccgaggccaccaccagcgacccccaggacctcgacatgaagaagcaccgttgtaaatgctgctccatcatgtgagccggcccccgagaccccggcccccaccccacaccacagacacccaccagcccggcccctcccggcgcctgcccaccctccacccacagcctcacgggtccaggacttggcgtgttgttacatgttccttccgagttttctttcgctggaaagagggacaggggcccccacccgtcaccacgccccaacactccccccgaaccagagccgtgcacttgtgcctggtaggagagagacaggacagacccgcttttcccgagacaaggaccccccatgtcacggcagcttcacagacgcggctcgcgcccaccggggtcctggcgggtgggacccgcagcctccacgcggcccaggccagcctgccaccctctgggcctcctacctgtgcctttctctgaggggacaccccgccagagagggccccgggagccgggggtgggtactgaggcctgctcaggccctggaagtgaggctctatggggttccctggccaaggcgctggccccccaatctcaggcagttggggtgaggccgtgcctctttgggggctaaaggtcttgggtggaggacaggcccctctgctgtgcccctatgccctgtgtgggcccaaccagtggacaatggagtctgggggagggggaaccccggggacatgcccccacccgggaggggccggtaacccctgggctatcttctagacggggcgaaccaggggtcattgacctgccccctgcacagggcagggaccgagtgagccactccttgtcccgagctcccgcccccactgggccctccttcctcctggtgctaatttggggaccccaggggccgcccccggcctcttctccatcctgcttggaccagggtcctgggtcttcccaaccataccccgagatcaggccccacctgccagctctactgggcttggagcacgtccgggcagtggagggagggacacagcctgggacaggaagcctcttgggttggagcaggagaccctcatttgccacccagaccaatgtgagcctgcccccagccccctctcattggaagtggcaaggggcttccctcctgggggcagctacactcgtccccagaggcacattcgtgcacattctcacagacaccgtctcacacgttggctttggacaaccaggccccaacttggtccctgccctagggacctccagcctggtgcccagtgctcaggccacctcctggtccagtcaccacctgcagcctcggcagggcaggtacaggggccacctcagatgggagcctgggtccctgcctccgctctgcccctgggtggctgggaggagaggccctctcgggggtgacctgggcgtcagccgtggaaccccctcctcctccctggagtctgcctgagtccctcgagccgcgagccttcgctgaagtgcccttgctataaccccctctgcttctggtgtgtgacgaggcccccgatgttcttgattttcccagagaagcaaataaacagcgtgaacagccccagttcctggagttcttgcctttcaacctggcgaggaaggcgtggccaggccagggggtggggcctgccggcctttgagccattaaagggaggctgagcagggttgcggtgtgctggcttcacctgcctgcacccgctcaccctgagcgccttggggtggtgggaggcgctggaatccccactgtgcaggtaaggcctggctgtaaggggctgctgtgggggggcaggactggcttcccggggggccctcgggttctgcggccgc

SEQ ID NO: 9558 - protein, 343 aa, Homo sapiens; identical to SEQ ID NO: 1489

SEQ ID NO: 9559 - DNA, 3150 bp, Homo sapiens
ccgccgccgcccggacaataaacagcagctttgcgcggggcgatgcccgagccggtgccgccgcccccgcgccgcgcagccccggccgccaggccttagcccgccccggcccccgccaggccgcgtccccctcccctcccctcccccgcgcgccacccgcgcccgcccccgcccggcaccgcggacccacccggacctcggcggggagatggaggtcctggcggcagagaccacgtcccagcaggagcggctgcaggccatcgcagagaagcggaagcggcaggcggagatcgagaacaagcgccggcagctggaggacgagcggaggcagctgcagcacctgaagtccaaggcactgcgggagcgctggctgctggaggggacgccgtcctcggcctcagagggggatgaggacctgaggaggcagatgcaggacgacgagcagaagacacggctgctggaggactcggtgtccaggttggagaaggaaattgaggtgctggagcgtggagactccgccccagccactgccaaggagaacgcggcggccccgagcccagtccgggccccagccccgagtccagccaaggaggagcgcaagacagaggtggtgatgaattcacagcagacgccggtgggcacgcccaaagacaagcgagtctccaacacgcccctgaggacggttgacggctcccccatgatgaaggcagccatgtactcggttgagatcactgtggagaaggacaaggtgacaggggagaccagggtgctgtccagcaccacgctgctccctcggcagccgctccctctgggcatcaaagtctacgaggacgagaccaaagtggtccatgctgtggacggcaccgccgagaacgggatccaccccctgagctcctccgaggtggacgaactcatccacaaagcggacgaggtcacgctgagcgaggcagggtccacggccggggcggcagagacccggggggctgtggagggggcagcccggaccacgccctcccggcgggagatcaccggtgtgcaggcacagccaggcgaggccacgtccggcccgccggggatccagcccggccaggagcccccggtcacaatgatcttcatgggttaccagaacgtggaggatgaggccgagaccaagaaggtgctgggccttcaagataccatcacggcggagctggtggtcatcgaagacgcggctgagcccaaggagcctgcaccacccaacggcagtgctgccgagcctcccacggaggccgcctccagggaagagaatcaggcggggcccgaggccaccaccagcgacccccaggacctcgacatgaagaagcaccgttgtaaatgctgctccatcatgtgagccggcccccgagaccccggcccccaccccacaccacagacacccaccagcccggcccctcccggcgcctgcccaccctccacccacagcctcacgggtccaggacttggcgtgttgttacatgttccttccgagttttctttcgctggaaagagggacaggggcccccacccgtcaccacgccccaacactccccccgaaccagagccgtgcacttgtgcctggtaggagagagacaggacagacccgcttttcccgagacaaggaccccccatgtcacggcagcttcacagacgcggctcgcgcccaccggggtcctggcgggtgggacccgcagcctccacgcggcccaggccagcctgccaccctctgggcctcctacctgtgcctttctctgaggggacaccccgccagagagggccccgggagccgggggtgggtactgaggcctgctcaggccctggaagtgaggctctatggggttccctggccaaggcgctggccccccaatctcaggcagttggggtgaggccgtgcctctttgggggctaaaggtcttgggtggaggacaggcccctctgctgtgcccctatgccctgtgtgggcccaaccagtggacaatggagtctgggggagggggaaccccggggacatgcccccacccgggaggggccggtaacccctgggctatcttctagacggggcgaaccaggggtcattgacctgccccctgcacagggcagggaccgagtgagccactccttgtcccgagctcccgcccccactgggccctccttcctcctggtgctaatttggggaccccaggggccgcccccggcctcttctccatcctgcttggaccagggtcctgggtcttcccaaccataccccgagatcaggccccacctgccagctctactgggcttggagcacgtccgggcagtggagggagggacacagcctgggacaggaagcctcttgggttggagcaggagaccctcatttgccacccagaccaatgtgagcctgcccccagccccctctcattggaagtggcaaggggcttccctcctgggggcagctacactcgtccccagaggcacattcgtgcacattctcacagacaccgtctcacacgttggctttggacaaccaggccccaacttggtccctgccctagggacctccagcctggtgcccagtgctcaggccacctcctggtccagtcaccacctgcagcctcggcagggcaggtacaggggccacctcagatgggagcctgggtccctgcctccgctctgcccctgggtggctgggaggagaggccctctcgggggtgacctgggcgtcagccgtggaaccccctcctcctccctggagtctgcctgagtccctcgagccgcgagccttcgctgaagtgcccttgctataaccccctctgcttctggtgtgtgacgaggcccccgatgttcttgattttcccagagaagcaaataaacagcgtgaacagccccagttcctggagttcttgcctttcaacctggcgaggaaggcgtggccaggccagggggtggggcctgccggcctttgagccattaaagggaggctgagcagggttgcggtgtgctggcttcacctgcctgcacccgctcaccctgagcgccttggggtggtgggaggcgctggaatccccactgtgcaggtaaggcctggctgtaaggggctgctgtgggggggcaggactggcttcccggggggccctcgggttctgcggccgc

SEQ ID NO: 9560 - protein, 387 aa, Homo sapiens; identical to SEQ ID NO: 1491

SEQ ID NO: 9561 - DNA, 1939 bp, Homo sapiens
aataaacagcagctttgcgcggggcgatgcccgagccggtgccgccgcccccgcgccgcgcagccccggcgggagatcaccggtgtgcaggcacagccaggcgaggccacgtccggcccgccggggatccagcccggccaggagcccccggtcacaatgatcttcatgggttaccagaacgtggaggatgaggccgagaccaagaaggtgctgggccttcaagataccatcacggcggagctggtggtcatcgaagacgcggctgagcccaaggagcctgcaccacccaacggcagtgctgccgagcctcccacggaggccgcctccagggaagagaatcaggcggggcccgaggccaccaccagcgacccccaggacctcgacatgaagaagcaccgttgtaaatgctgctccatcatgtgagccggcccccgagaccccggcccccaccccacaccacagacacccaccagcccggcccctcccggcgcctgcccaccctccacccacagcctcacgggtccaggacttggcgtgttgttacatgttccttccgagttttctttcgctggaaagagggacaggggcccccacccgtcaccacgccccaacactccccccgaaccagagccgtgcacttgtgcctggtaggagagagacaggacagacccgcttttcccgagacaaggaccccccatgtcacggcagcttcacagacgcggctcgcgcccaccggggtcctggcgggtgggacccgcagcctccacgcggcccaggccagcctgccaccctctgggcctcctacctgtgcctttctctgaggggacaccccgccagagagggccccgggagccgggggtgggtactgaggcctgctcaggccctggaagtgaggctctatggggttccctggccaaggcgctggccccccaatctcaggcagttggggtgaggccgtgcctctttgggggctaaaggtcttgggtggaggacaggcccctctgctgtgcccctatgccctgtgtgggcccaaccagtggacaatggagtctgggggagggggaaccccggggacatgcccccacccgggaggggccggtaacccctgggctatcttctagacggggcgaaccaggggtcattgacctgccccctgcacagggcagggaccgagtgagccactccttgtcccgagctcccgcccccactgggccctccttcctcctggtgctaatttggggaccccaggggccgcccccggcctcttctccatcctgcttggaccagggtcctgggtcttcccaaccataccccgagatcaggccccacctgccagctctactgggcttggagcacgtccgggcagtggagggagggacacagcctgggacaggaagcctcttgggttggagcaggagaccctcatttgccacccagaccaatgtgagcctgcccccagccccctctcattggaagtggcaaggggcttccctcctgggggcagctacactcgtccccagaggcacattcgtgcacattctcacagacaccgtctcacacgttggctttggacaaccaggccccaacttggtccctgccctagggacctccagcctggtgcccagtgctcaggccacctcctggtccagtcaccacctgcagcctcggcagggcaggtacaggggccacctcagatgggagcctgggtccctgcctccgctctgcccctgggtggctgggaggagaggccctctcgggggtgacctgggcgtcagccgtggaaccccctcctcctccctggagtctgcctgagtccctcgagccgcgagccttcgctgaagtgcccttgctataaccccctctgcttctggtgtgtgacgaggcccccgatgttcttgattttcccagagaagcaaataaacagcgtgaacagccccag

SEQ ID NO: 9562 - protein, 54 aa, Homo sapiens
MPEPVPPPPRRAAPAGDHRCAGTARRGHVRPAGDPARPGAPGHNDLHGLPERGG

SEQ ID NO: 9563 - DNA, 2201 bp, Homo sapiens
aataaacagcagctttgcgcggggcgatgcccgagccggtgccgccgcccccgcgccgcgcagccccggcgggagatcaccggtgtgcaggcacagccaggcgaggccacgtccggcccgccggggatccagcccggccaggagcccccggtcacaatgatcttcatgggttaccagaacgtggaggatgaggccgagaccaagaaggtgctgggccttcaagataccatcacggcggagctggtggtcatcgaagacgcggctgagcccaaggagcctgcaccacccaacggcagtgctgccgagcctcccacggaggccgcctccagggaagagaatcaggcggggcccgaggccaccaccagcgacccccaggacctcgacatgaagaagcaccgttgtaaatgctgctccatcatgtgagccggcccccgagaccccggcccccaccccacaccacagacacccaccagcccggcccctcccggcgcctgcccaccctccacccacagcctcacgggtccaggacttggcgtgttgttacatgttccttccgagttttctttcgctggaaagagggacaggggcccccacccgtcaccacgccccaacactccccccgaaccagagccgtgcacttgtgcctggtaggagagagacaggacagacccgcttttcccgagacaaggaccccccatgtcacggcagcttcacagacgcggctcgcgcccaccggggtcctggcgggtgggacccgcagcctccacgcggcccaggccagcctgccaccctctgggcctcctacctgtgcctttctctgaggggacaccccgccagagagggccccgggagccgggggtgggtactgaggcctgctcaggccctggaagtgaggctctatggggttccctggccaaggcgctggccccccaatctcaggcagttggggtgaggccgtgcctctttgggggctaaaggtcttgggtggaggacaggcccctctgctgtgcccctatgccctgtgtgggcccaaccagtggacaatggagtctgggggagggggaaccccggggacatgcccccacccgggaggggccggtaacccctgggctatcttctagacggggcgaaccaggggtcattgacctgccccctgcacagggcagggaccgagtgagccactccttgtcccgagctcccgcccccactgggccctccttcctcctggtgctaatttggggaccccaggggccgcccccggcctcttctccatcctgcttggaccagggtcctgggtcttcccaaccataccccgagatcaggccccacctgccagctctactgggcttggagcacgtccgggcagtggagggagggacacagcctgggacaggaagcctcttgggttggagcaggagaccctcatttgccacccagaccaatgtgagcctgcccccagccccctctcattggaagtggcaaggggcttccctcctgggggcagctacactcgtccccagaggcacattcgtgcacattctcacagacaccgtctcacacgttggctttggacaaccaggccccaacttggtccctgccctagggacctccagcctggtgcccagtgctcaggccacctcctggtccagtcaccacctgcagcctcggcagggcaggtacaggggccacctcagatgggagcctgggtccctgcctccgctctgcccctgggtggctgggaggagaggccctctcgggggtgacctgggcgtcagccgtggaaccccctcctcctccctggagtctgcctgagtccctcgagccgcgagccttcgctgaagtgcccttgctataaccccctctgcttctggtgtgtgacgaggcccccgatgttcttgattttcccagagaagcaaataaacagcgtgaacagccccagttcctggagttcttgcctttcaacctggcgaggaaggcgtggccaggccagggggtggggcctgccggcctttgagccattaaagggaggctgagcagggttgcggtgtgctggcttcacctgcctgcacccgctcaccctgagcgccttggggtggtgggaggcgctggaatccccactgtgcaggtaaggcctggctgtaaggggctgctgtgggggggcaggactggcttcccggggggccctcgggttctgcggccgc

SEQ ID NO: 9564 - protein, 54 aa, Homo sapiens; identical to SEQ ID NO: 9562

SEQ ID NO: 9565 - DNA, 2338 bp, Homo sapiens
ccgagcccagtccgggccccagccccgagtccagccaaggaggagcgcaagacagaggtggtgatgaattcacagcagacgccggtgggcacgcccaaagacaagcgagtctccaacacgcccctgaggacggttgacggctcccccatgatgaaggcagccatgtactcggttgagatcactgtggagaaggacaaggtgacaggggagaccagggtgctgtccagcaccacgctgctccctcggcagccgctccctctgggcatcaaagtctacgaggacgagaccaaagtggtccatgctgtggacggcaccgccgagaacgggatccaccccctgagctcctccgaggtggacgaactcatccacaaagcggacgaggtcacgctgagcgaggcagggtccacggccggggcggcagagacccggggggctgtggagggggcagcccggaccacgccctcccggcgggagatcaccggtgtgcaggcacagccaggcgaggccacgtccggcccgccggggatccagcccggccaggagcccccggtcacaatgatcttcatgggttaccagaacgtggaggatgaggccgagaccaagaaggtgctgggccttcaagataccatcacggcggagctggtggtcatcgaagacgcggctgagcccaaggagcctgcaccacccaacggcagtgctgccgagcctcccacggaggccgcctccagggaagagaatcaggcggggcccgaggccaccaccagcgacccccaggacctcgacatgaagaagcaccgttgtaaatgctgctccatcatgtgagccggcccccgagaccccggcccccaccccacaccacagacacccaccagcccggcccctcccggcgcctgcccaccctccacccacagcctcacgggtccaggacttggcgtgttgttacatgttccttccgagttttctttcgctggaaagagggacaggggcccccacccgtcaccacgccccaacactccccccgaaccagagccgtgcacttgtgcctggtaggagagagacaggacagacccgcttttcccgagacaaggaccccccatgtcacggcagcttcacagacgcggctcgcgcccaccggggtcctggcgggtgggacccgcagcctccacgcggcccaggccagcctgccaccctctgggcctcctacctgtgcctttctctgaggggacaccccgccagagagggccccgggagccgggggtgggtactgaggcctgctcaggccctggaagtgaggctctatggggttccctggccaaggcgctggccccccaatctcaggcagttggggtgaggccgtgcctctttgggggctaaaggtcttgggtggaggacaggcccctctgctgtgcccctatgccctgtgtgggcccaaccagtggacaatggagtctgggggagggggaaccccggggacatgcccccacccgggaggggccggtaacccctgggctatcttctagacggggcgaaccaggggtcattgacctgccccctgcacagggcagggaccgagtgagccactccttgtcccgagctcccgcccccactgggccctccttcctcctggtgctaatttggggaccccaggggccgcccccggcctcttctccatcctgcttggaccagggtcctgggtcttcccaaccataccccgagatcaggccccacctgccagctctactgggcttggagcacgtccgggcagtggagggagggacacagcctgggacaggaagcctcttgggttggagcaggagaccctcatttgccacccagaccaatgtgagcctgcccccagccccctctcattggaagtggcaaggggcttccctcctgggggcagctacactcgtccccagaggcacattcgtgcacattctcacagacaccgtctcacacgttggctttggacaaccaggccccaacttggtccctgccctagggacctccagcctggtgcccagtgctcaggccacctcctggtccagtcaccacctgcagcctcggcagggcaggtacaggggccacctcagatgggagcctgggtccctgcctccgctctgcccctgggtggctgggaggagaggccctctcgggggtgacctgggcgtcagccgtggaaccccctcctcctccctggagtctgcctgagtccctcgagccgcgagccttcgctgaagtgcccttgctataaccccctctgcttctggtgtgtgacgaggcccccgatgttcttgattttcccagagaagcaaataaacagcgtgaacagccccag

SEQ ID NO: 9566 - protein, 252 aa, Homo sapiens
MNSQQTPVGTPKDKRVSNTPLRTVDGSPMMKAAMYSVEITVEKDKVTGETRVLSSTTLLPRQPLPLGIKVYEDETKVVHAVDGTAENGIHPLSSSEVDELIHKADEVTLSEAGSTAGAAETRGAVEGAARTTPSRREITGVQAQPGEATSGPPGIQPGQEPPVTMIFMGYQNVEDEAETKKVLGLQDTITAELVVIEDAAEPKEPAPPNGSAAEPPTEAASREENQAGPEATTSDPQDLDMKKHRCKCCSIM

SEQ ID NO: 9567 - DNA, 2600 bp, Homo sapiens
ccgagcccagtccgggccccagccccgagtccagccaaggaggagcgcaagacagaggtggtgatgaattcacagcagacgccggtgggcacgcccaaagacaagcgagtctccaacacgcccctgaggacggttgacggctcccccatgatgaaggcagccatgtactcggttgagatcactgtggagaaggacaaggtgacaggggagaccagggtgctgtccagcaccacgctgctccctcggcagccgctccctctgggcatcaaagtctacgaggacgagaccaaagtggtccatgctgtggacggcaccgccgagaacgggatccaccccctgagctcctccgaggtggacgaactcatccacaaagcggacgaggtcacgctgagcgaggcagggtccacggccggggcggcagagacccggggggctgtggagggggcagcccggaccacgccctcccggcgggagatcaccggtgtgcaggcacagccaggcgaggccacgtccggcccgccggggatccagcccggccaggagcccccggtcacaatgatcttcatgggttaccagaacgtggaggatgaggccgagaccaagaaggtgctgggccttcaagataccatcacggcggagctggtggtcatcgaagacgcggctgagcccaaggagcctgcaccacccaacggcagtgctgccgagcctcccacggaggccgcctccagggaagagaatcaggcggggcccgaggccaccaccagcgacccccaggacctcgacatgaagaagcaccgttgtaaatgctgctccatcatgtgagccggcccccgagaccccggcccccaccccacaccacagacacccaccagcccggcccctcccggcgcctgcccaccctccacccacagcctcacgggtccaggacttggcgtgttgttacatgttccttccgagttttctttcgctggaaagagggacaggggcccccacccgtcaccacgccccaacactccccccgaaccagagccgtgcacttgtgcctggtaggagagagacaggacagacccgcttttcccgagacaaggaccccccatgtcacggcagcttcacagacgcggctcgcgcccaccggggtcctggcgggtgggacccgcagcctccacgcggcccaggccagcctgccaccctctgggcctcctacctgtgcctttctctgaggggacaccccgccagagagggccccgggagccgggggtgggtactgaggcctgctcaggccctggaagtgaggctctatggggttccctggccaaggcgctggccccccaatctcaggcagttggggtgaggccgtgcctctttgggggctaaaggtcttgggtggaggacaggcccctctgctgtgcccctatgccctgtgtgggcccaaccagtggacaatggagtctgggggagggggaaccccggggacatgcccccacccgggaggggccggtaacccctgggctatcttctagacggggcgaaccaggggtcattgacctgccccctgcacagggcagggaccgagtgagccactccttgtcccgagctcccgcccccactgggccctccttcctcctggtgctaatttggggaccccaggggccgcccccggcctcttctccatcctgcttggaccagggtcctgggtcttcccaaccataccccgagatcaggccccacctgccagctctactgggcttggagcacgtccgggcagtggagggagggacacagcctgggacaggaagcctcttgggttggagcaggagaccctcatttgccacccagaccaatgtgagcctgcccccagccccctctcattggaagtggcaaggggcttccctcctgggggcagctacactcgtccccagaggcacattcgtgcacattctcacagacaccgtctcacacgttggctttggacaaccaggccccaacttggtccctgccctagggacctccagcctggtgcccagtgctcaggccacctcctggtccagtcaccacctgcagcctcggcagggcaggtacaggggccacctcagatgggagcctgggtccctgcctccgctctgcccctgggtggctgggaggagaggccctctcgggggtgacctgggcgtcagccgtggaaccccctcctcctccctggagtctgcctgagtccctcgagccgcgagccttcgctgaagtgcccttgctataaccccctctgcttctggtgtgtgacgaggcccccgatgttcttgattttcccagagaagcaaataaacagcgtgaacagccccagttcctggagttcttgcctttcaacctggcgaggaaggcgtggccaggccagggggtggggcctgccggcctttgagccattaaagggaggctgagcagggttgcggtgtgctggcttcacctgcctgcacccgctcaccctgagcgccttggggtggtgggaggcgctggaatccccactgtgcaggtaaggcctggctgtaaggggctgctgtgggggggcaggactggcttcccggggggccctcgggttctgcggccgc

SEQ ID NO: 9568 - protein, 252 aa, Homo sapiens; identical to SEQ ID NO: 9566

SEQ ID NO: 9569 - DNA, 2273 bp, Homo sapiens
gtgaaaatcactgggctgaggatgaggaatgaactacaagcgagtctccaacacgcccctgaggacggttgacggctcccccatgatgaaggcagccatgtactcggttgagatcactgtggagaaggacaaggtgacaggggagaccagggtgctgtccagcaccacgctgctccctcggcagccgctccctctgggcatcaaagtctacgaggacgagaccaaagtggtccatgctgtggacggcaccgccgagaacgggatccaccccctgagctcctccgaggtggacgaactcatccacaaagcggacgaggtcacgctgagcgaggcagggtccacggccggggcggcagagacccggggggctgtggagggggcagcccggaccacgccctcccggcgggagatcaccggtgtgcaggcacagccaggcgaggccacgtccggcccgccggggatccagcccggccaggagcccccggtcacaatgatcttcatgggttaccagaacgtggaggatgaggccgagaccaagaaggtgctgggccttcaagataccatcacggcggagctggtggtcatcgaagacgcggctgagcccaaggagcctgcaccacccaacggcagtgctgccgagcctcccacggaggccgcctccagggaagagaatcaggcggggcccgaggccaccaccagcgacccccaggacctcgacatgaagaagcaccgttgtaaatgctgctccatcatgtgagccggcccccgagaccccggcccccaccccacaccacagacacccaccagcccggcccctcccggcgcctgcccaccctccacccacagcctcacgggtccaggacttggcgtgttgttacatgttccttccgagttttctttcgctggaaagagggacaggggcccccacccgtcaccacgccccaacactccccccgaaccagagccgtgcacttgtgcctggtaggagagagacaggacagacccgcttttcccgagacaaggaccccccatgtcacggcagcttcacagacgcggctcgcgcccaccggggtcctggcgggtgggacccgcagcctccacgcggcccaggccagcctgccaccctctgggcctcctacctgtgcctttctctgaggggacaccccgccagagagggccccgggagccgggggtgggtactgaggcctgctcaggccctggaagtgaggctctatggggttccctggccaaggcgctggccccccaatctcaggcagttggggtgaggccgtgcctctttgggggctaaaggtcttgggtggaggacaggcccctctgctgtgcccctatgccctgtgtgggcccaaccagtggacaatggagtctgggggagggggaaccccggggacatgcccccacccgggaggggccggtaacccctgggctatcttctagacggggcgaaccaggggtcattgacctgccccctgcacagggcagggaccgagtgagccactccttgtcccgagctcccgcccccactgggccctccttcctcctggtgctaatttggggaccccaggggccgcccccggcctcttctccatcctgcttggaccagggtcctgggtcttcccaaccataccccgagatcaggccccacctgccagctctactgggcttggagcacgtccgggcagtggagggagggacacagcctgggacaggaagcctcttgggttggagcaggagaccctcatttgccacccagaccaatgtgagcctgcccccagccccctctcattggaagtggcaaggggcttccctcctgggggcagctacactcgtccccagaggcacattcgtgcacattctcacagacaccgtctcacacgttggctttggacaaccaggccccaacttggtccctgccctagggacctccagcctggtgcccagtgctcaggccacctcctggtccagtcaccacctgcagcctcggcagggcaggtacaggggccacctcagatgggagcctgggtccctgcctccgctctgcccctgggtggctgggaggagaggccctctcgggggtgacctgggcgtcagccgtggaaccccctcctcctccctggagtctgcctgagtccctcgagccgcgagccttcgctgaagtgcccttgctataaccccctctgcttctggtgtgtgacgaggcccccgatgttcttgattttcccagagaagcaaataaacagcgtgaacagccccag

SEQ ID NO: 9570 - protein, 242 aa, Homo sapiens
MNYKRVSNTPLRTVDGSPMMKAAMYSVEITVEKDKVTGETRVLSSTTLLPRQPLPLGIKVYEDETKVVHAVDGTAENGIHPLSSSEVDELIHKADEVTLSEAGSTAGAAETRGAVEGAARTTPSRREITGVQAQPGEATSGPPGIQPGQEPPVTMIFMGYQNVEDEAETKKVLGLQDTITAELVVIEDAAEPKEPAPPNGSAAEPPTEAASREENQAGPEATTSDPQDLDMKKHRCKCCSIM

SEQ ID NO: 9571 - DNA, 2535 bp, Homo sapiens
gtgaaaatcactgggctgaggatgaggaatgaactacaagcgagtctccaacacgcccctgaggacggttgacggctcccccatgatgaaggcagccatgtactcggttgagatcactgtggagaaggacaaggtgacaggggagaccagggtgctgtccagcaccacgctgctccctcggcagccgctccctctgggcatcaaagtctacgaggacgagaccaaagtggtccatgctgtggacggcaccgccgagaacgggatccaccccctgagctcctccgaggtggacgaactcatccacaaagcggacgaggtcacgctgagcgaggcagggtccacggccggggcggcagagacccggggggctgtggagggggcagcccggaccacgccctcccggcgggagatcaccggtgtgcaggcacagccaggcgaggccacgtccggcccgccggggatccagcccggccaggagcccccggtcacaatgatcttcatgggttaccagaacgtggaggatgaggccgagaccaagaaggtgctgggccttcaagataccatcacggcggagctggtggtcatcgaagacgcggctgagcccaaggagcctgcaccacccaacggcagtgctgccgagcctcccacggaggccgcctccagggaagagaatcaggcggggcccgaggccaccaccagcgacccccaggacctcgacatgaagaagcaccgttgtaaatgctgctccatcatgtgagccggcccccgagaccccggcccccaccccacaccacagacacccaccagcccggcccctcccggcgcctgcccaccctccacccacagcctcacgggtccaggacttggcgtgttgttacatgttccttccgagttttctttcgctggaaagagggacaggggcccccacccgtcaccacgccccaacactccccccgaaccagagccgtgcacttgtgcctggtaggagagagacaggacagacccgcttttcccgagacaaggaccccccatgtcacggcagcttcacagacgcggctcgcgcccaccggggtcctggcgggtgggacccgcagcctccacgcggcccaggccagcctgccaccctctgggcctcctacctgtgcctttctctgaggggacaccccgccagagagggccccgggagccgggggtgggtactgaggcctgctcaggccctggaagtgaggctctatggggttccctggccaaggcgctggccccccaatctcaggcagttggggtgaggccgtgcctctttgggggctaaaggtcttgggtggaggacaggcccctctgctgtgcccctatgccctgtgtgggcccaaccagtggacaatggagtctgggggagggggaaccccggggacatgcccccacccgggaggggccggtaacccctgggctatcttctagacggggcgaaccaggggtcattgacctgccccctgcacagggcagggaccgagtgagccactccttgtcccgagctcccgcccccactgggccctccttcctcctggtgctaatttggggaccccaggggccgcccccggcctcttctccatcctgcttggaccagggtcctgggtcttcccaaccataccccgagatcaggccccacctgccagctctactgggcttggagcacgtccgggcagtggagggagggacacagcctgggacaggaagcctcttgggttggagcaggagaccctcatttgccacccagaccaatgtgagcctgcccccagccccctctcattggaagtggcaaggggcttccctcctgggggcagctacactcgtccccagaggcacattcgtgcacattctcacagacaccgtctcacacgttggctttggacaaccaggccccaacttggtccctgccctagggacctccagcctggtgcccagtgctcaggccacctcctggtccagtcaccacctgcagcctcggcagggcaggtacaggggccacctcagatgggagcctgggtccctgcctccgctctgcccctgggtggctgggaggagaggccctctcgggggtgacctgggcgtcagccgtggaaccccctcctcctccctggagtctgcctgagtccctcgagccgcgagccttcgctgaagtgcccttgctataaccccctctgcttctggtgtgtgacgaggcccccgatgttcttgattttcccagagaagcaaataaacagcgtgaacagccccagttcctggagttcttgcctttcaacctggcgaggaaggcgtggccaggccagggggtggggcctgccggcctttgagccattaaagggaggctgagcagggttgcggtgtgctggcttcacctgcctgcacccgctcaccctgagcgccttggggtggtgggaggcgctggaatccccactgtgcaggtaaggcctggctgtaaggggctgctgtgggggggcaggactggcttcccggggggccctcgggttctgcggccgc

SEQ ID NO: 9572 - protein, 242 aa, Homo sapiens; identical to SEQ ID NO: 9570

SEQ ID NO: 9573 - DNA, 2138 bp, Homo sapiens
aaaatcactgggctgaggatgaggaatgaactacaagcgagtctccaacacgcccctgaggacggttgacggctcccccatgatgaaggcagtggtccatgctgtggacggcaccgccgagaacgggatccaccccctgagctcctccgaggtggacgaactcatccacaaagcggacgaggtcacgctgagcgaggcagggtccacggccggggcggcagagacccggggggctgtggagggggcagcccggaccacgccctcccggcgggagatcaccggtgtgcaggcacagccaggcgaggccacgtccggcccgccggggatccagcccggccaggagcccccggtcacaatgatcttcatgggttaccagaacgtggaggatgaggccgagaccaagaaggtgctgggccttcaagataccatcacggcggagctggtggtcatcgaagacgcggctgagcccaaggagcctgcaccacccaacggcagtgctgccgagcctcccacggaggccgcctccagggaagagaatcaggcggggcccgaggccaccaccagcgacccccaggacctcgacatgaagaagcaccgttgtaaatgctgctccatcatgtgagccggcccccgagaccccggcccccaccccacaccacagacacccaccagcccggcccctcccggcgcctgcccaccctccacccacagcctcacgggtccaggacttggcgtgttgttacatgttccttccgagttttctttcgctggaaagagggacaggggcccccacccgtcaccacgccccaacactccccccgaaccagagccgtgcacttgtgcctggtaggagagagacaggacagacccgcttttcccgagacaaggaccccccatgtcacggcagcttcacagacgcggctcgcgcccaccggggtcctggcgggtgggacccgcagcctccacgcggcccaggccagcctgccaccctctgggcctcctacctgtgcctttctctgaggggacaccccgccagagagggccccgggagccgggggtgggtactgaggcctgctcaggccctggaagtgaggctctatggggttccctggccaaggcgctggccccccaatctcaggcagttggggtgaggccgtgcctctttgggggctaaaggtcttgggtggaggacaggcccctctgctgtgcccctatgccctgtgtgggcccaaccagtggacaatggagtctgggggagggggaaccccggggacatgcccccacccgggaggggccggtaacccctgggctatcttctagacggggcgaaccaggggtcattgacctgccccctgcacagggcagggaccgagtgagccactccttgtcccgagctcccgcccccactgggccctccttcctcctggtgctaatttggggaccccaggggccgcccccggcctcttctccatcctgcttggaccagggtcctgggtcttcccaaccataccccgagatcaggccccacctgccagctctactgggcttggagcacgtccgggcagtggagggagggacacagcctgggacaggaagcctcttgggttggagcaggagaccctcatttgccacccagaccaatgtgagcctgcccccagccccctctcattggaagtggcaaggggcttccctcctgggggcagctacactcgtccccagaggcacattcgtgcacattctcacagacaccgtctcacacgttggctttggacaaccaggccccaacttggtccctgccctagggacctccagcctggtgcccagtgctcaggccacctcctggtccagtcaccacctgcagcctcggcagggcaggtacaggggccacctcagatgggagcctgggtccctgcctccgctctgcccctgggtggctgggaggagaggccctctcgggggtgacctgggcgtcagccgtggaaccccctcctcctccctggagtctgcctgagtccctcgagccgcgagccttcgctgaagtgcccttgctataaccccctctgcttctggtgtgtgacgaggcccccgatgttcttgattttcccagagaagcaaataaacagcgtgaacagccccag

SEQ ID NO: 9574 - protein, 198 aa, Homo sapiens
MNYKRVSNTPLRTVDGSPMMKAVVHAVDGTAENGIHPLSSSEVDELIHKADEVTLSEAGSTAGAAETRGAVEGAARTTPSRREITGVQAQPGEATSGPPGIQPGQEPPVTMIFMGYQNVEDEAETKKVLGLQDTITAELVVIEDAAEPKEPAPPNGSAAEPPTEAASREENQAGPEATTSDPQDLDMKKHRCKCCSIM

SEQ ID NO: 9575 - DNA, 2400 bp, Homo sapiens
aaaatcactgggctgaggatgaggaatgaactacaagcgagtctccaacacgcccctgaggacggttgacggctcccccatgatgaaggcagtggtccatgctgtggacggcaccgccgagaacgggatccaccccctgagctcctccgaggtggacgaactcatccacaaagcggacgaggtcacgctgagcgaggcagggtccacggccggggcggcagagacccggggggctgtggagggggcagcccggaccacgccctcccggcgggagatcaccggtgtgcaggcacagccaggcgaggccacgtccggcccgccggggatccagcccggccaggagcccccggtcacaatgatcttcatgggttaccagaacgtggaggatgaggccgagaccaagaaggtgctgggccttcaagataccatcacggcggagctggtggtcatcgaagacgcggctgagcccaaggagcctgcaccacccaacggcagtgctgccgagcctcccacggaggccgcctccagggaagagaatcaggcggggcccgaggccaccaccagcgacccccaggacctcgacatgaagaagcaccgttgtaaatgctgctccatcatgtgagccggcccccgagaccccggcccccaccccacaccacagacacccaccagcccggcccctcccggcgcctgcccaccctccacccacagcctcacgggtccaggacttggcgtgttgttacatgttccttccgagttttctttcgctggaaagagggacaggggcccccacccgtcaccacgccccaacactccccccgaaccagagccgtgcacttgtgcctggtaggagagagacaggacagacccgcttttcccgagacaaggaccccccatgtcacggcagcttcacagacgcggctcgcgcccaccggggtcctggcgggtgggacccgcagcctccacgcggcccaggccagcctgccaccctctgggcctcctacctgtgcctttctctgaggggacaccccgccagagagggccccgggagccgggggtgggtactgaggcctgctcaggccctggaagtgaggctctatggggttccctggccaaggcgctggccccccaatctcaggcagttggggtgaggccgtgcctctttgggggctaaaggtcttgggtggaggacaggcccctctgctgtgcccctatgccctgtgtgggcccaaccagtggacaatggagtctgggggagggggaaccccggggacatgcccccacccgggaggggccggtaacccctgggctatcttctagacggggcgaaccaggggtcattgacctgccccctgcacagggcagggaccgagtgagccactccttgtcccgagctcccgcccccactgggccctccttcctcctggtgctaatttggggaccccaggggccgcccccggcctcttctccatcctgcttggaccagggtcctgggtcttcccaaccataccccgagatcaggccccacctgccagctctactgggcttggagcacgtccgggcagtggagggagggacacagcctgggacaggaagcctcttgggttggagcaggagaccctcatttgccacccagaccaatgtgagcctgcccccagccccctctcattggaagtggcaaggggcttccctcctgggggcagctacactcgtccccagaggcacattcgtgcacattctcacagacaccgtctcacacgttggctttggacaaccaggccccaacttggtccctgccctagggacctccagcctggtgcccagtgctcaggccacctcctggtccagtcaccacctgcagcctcggcagggcaggtacaggggccacctcagatgggagcctgggtccctgcctccgctctgcccctgggtggctgggaggagaggccctctcgggggtgacctgggcgtcagccgtggaaccccctcctcctccctggagtctgcctgagtccctcgagccgcgagccttcgctgaagtgcccttgctataaccccctctgcttctggtgtgtgacgaggcccccgatgttcttgattttcccagagaagcaaataaacagcgtgaacagccccagttcctggagttcttgcctttcaacctggcgaggaaggcgtggccaggccagggggtggggcctgccggcctttgagccattaaagggaggctgagcagggttgcggtgtgctggcttcacctgcctgcacccgctcaccctgagcgccttggggtggtgggaggcgctggaatccccactgtgcaggtaaggcctggctgtaaggggctgctgtgggggggcaggactggcttcccggggggccctcgggttctgcggccgc

SEQ ID NO: 9576 - protein, 198 aa, Homo sapiens; identical to SEQ ID NO: 9574

SEQ ID NO: 9577 - DNA, 2294 bp, Homo sapiens
ggaatgaactgtgaggctgcctgtgggattttctaggggttgcggtgggggtccagacaagcgagtctccaacacgcccctgaggacggttgacggctcccccatgatgaaggcagccatgtactcggttgagatcactgtggagaaggacaaggtgacaggggagaccagggtgctgtccagcaccacgctgctccctcggcagccgctccctctgggcatcaaagtctacgaggacgagaccaaagtggtccatgctgtggacggcaccgccgagaacgggatccaccccctgagctcctccgaggtggacgaactcatccacaaagcggacgaggtcacgctgagcgaggcagggtccacggccggggcggcagagacccggggggctgtggagggggcagcccggaccacgccctcccggcgggagatcaccggtgtgcaggcacagccaggcgaggccacgtccggcccgccggggatccagcccggccaggagcccccggtcacaatgatcttcatgggttaccagaacgtggaggatgaggccgagaccaagaaggtgctgggccttcaagataccatcacggcggagctggtggtcatcgaagacgcggctgagcccaaggagcctgcaccacccaacggcagtgctgccgagcctcccacggaggccgcctccagggaagagaatcaggcggggcccgaggccaccaccagcgacccccaggacctcgacatgaagaagcaccgttgtaaatgctgctccatcatgtgagccggcccccgagaccccggcccccaccccacaccacagacacccaccagcccggcccctcccggcgcctgcccaccctccacccacagcctcacgggtccaggacttggcgtgttgttacatgttccttccgagttttctttcgctggaaagagggacaggggcccccacccgtcaccacgccccaacactccccccgaaccagagccgtgcacttgtgcctggtaggagagagacaggacagacccgcttttcccgagacaaggaccccccatgtcacggcagcttcacagacgcggctcgcgcccaccggggtcctggcgggtgggacccgcagcctccacgcggcccaggccagcctgccaccctctgggcctcctacctgtgcctttctctgaggggacaccccgccagagagggccccgggagccgggggtgggtactgaggcctgctcaggccctggaagtgaggctctatggggttccctggccaaggcgctggccccccaatctcaggcagttggggtgaggccgtgcctctttgggggctaaaggtcttgggtggaggacaggcccctctgctgtgcccctatgccctgtgtgggcccaaccagtggacaatggagtctgggggagggggaaccccggggacatgcccccacccgggaggggccggtaacccctgggctatcttctagacggggcgaaccaggggtcattgacctgccccctgcacagggcagggaccgagtgagccactccttgtcccgagctcccgcccccactgggccctccttcctcctggtgctaatttggggaccccaggggccgcccccggcctcttctccatcctgcttggaccagggtcctgggtcttcccaaccataccccgagatcaggccccacctgccagctctactgggcttggagcacgtccgggcagtggagggagggacacagcctgggacaggaagcctcttgggttggagcaggagaccctcatttgccacccagaccaatgtgagcctgcccccagccccctctcattggaagtggcaaggggcttccctcctgggggcagctacactcgtccccagaggcacattcgtgcacattctcacagacaccgtctcacacgttggctttggacaaccaggccccaacttggtccctgccctagggacctccagcctggtgcccagtgctcaggccacctcctggtccagtcaccacctgcagcctcggcagggcaggtacaggggccacctcagatgggagcctgggtccctgcctccgctctgcccctgggtggctgggaggagaggccctctcgggggtgacctgggcgtcagccgtggaaccccctcctcctccctggagtctgcctgagtccctcgagccgcgagccttcgctgaagtgcccttgctataaccccctctgcttctggtgtgtgacgaggcccccgatgttcttgattttcccagagaagcaaataaacagcgtgaacagccccag

SEQ ID NO: 9578 - protein, 224 aa, Homo sapiens
MMKAAMYSVEITVEKDKVTGETRVLSSTTLLPRQPLPLGIKVYEDETKVVHAVDGTAENGIHPLSSSEVDELIHKADEVTLSEAGSTAGAAETRGAVEGAARTTPSRREITGVQAQPGEATSGPPGIQPGQEPPVTMIFMGYQNVEDEAETKKVLGLQDTITAELVVIEDAAEPKEPAPPNGSAAEPPTEAASREENQAGPEATTSDPQDLDMKKHRCKCCSIM

SEQ ID NO: 9579 - DNA, 2556 bp, Homo sapiens
ggaatgaactgtgaggctgcctgtgggattttctaggggttgcggtgggggtccagacaagcgagtctccaacacgcccctgaggacggttgacggctcccccatgatgaaggcagccatgtactcggttgagatcactgtggagaaggacaaggtgacaggggagaccagggtgctgtccagcaccacgctgctccctcggcagccgctccctctgggcatcaaagtctacgaggacgagaccaaagtggtccatgctgtggacggcaccgccgagaacgggatccaccccctgagctcctccgaggtggacgaactcatccacaaagcggacgaggtcacgctgagcgaggcagggtccacggccggggcggcagagacccggggggctgtggagggggcagcccggaccacgccctcccggcgggagatcaccggtgtgcaggcacagccaggcgaggccacgtccggcccgccggggatccagcccggccaggagcccccggtcacaatgatcttcatgggttaccagaacgtggaggatgaggccgagaccaagaaggtgctgggccttcaagataccatcacggcggagctggtggtcatcgaagacgcggctgagcccaaggagcctgcaccacccaacggcagtgctgccgagcctcccacggaggccgcctccagggaagagaatcaggcggggcccgaggccaccaccagcgacccccaggacctcgacatgaagaagcaccgttgtaaatgctgctccatcatgtgagccggcccccgagaccccggcccccaccccacaccacagacacccaccagcccggcccctcccggcgcctgcccaccctccacccacagcctcacgggtccaggacttggcgtgttgttacatgttccttccgagttttctttcgctggaaagagggacaggggcccccacccgtcaccacgccccaacactccccccgaaccagagccgtgcacttgtgcctggtaggagagagacaggacagacccgcttttcccgagacaaggaccccccatgtcacggcagcttcacagacgcggctcgcgcccaccggggtcctggcgggtgggacccgcagcctccacgcggcccaggccagcctgccaccctctgggcctcctacctgtgcctttctctgaggggacaccccgccagagagggccccgggagccgggggtgggtactgaggcctgctcaggccctggaagtgaggctctatggggttccctggccaaggcgctggccccccaatctcaggcagttggggtgaggccgtgcctctttgggggctaaaggtcttgggtggaggacaggcccctctgctgtgcccctatgccctgtgtgggcccaaccagtggacaatggagtctgggggagggggaaccccggggacatgcccccacccgggaggggccggtaacccctgggctatcttctagacggggcgaaccaggggtcattgacctgccccctgcacagggcagggaccgagtgagccactccttgtcccgagctcccgcccccactgggccctccttcctcctggtgctaatttggggaccccaggggccgcccccggcctcttctccatcctgcttggaccagggtcctgggtcttcccaaccataccccgagatcaggccccacctgccagctctactgggcttggagcacgtccgggcagtggagggagggacacagcctgggacaggaagcctcttgggttggagcaggagaccctcatttgccacccagaccaatgtgagcctgcccccagccccctctcattggaagtggcaaggggcttccctcctgggggcagctacactcgtccccagaggcacattcgtgcacattctcacagacaccgtctcacacgttggctttggacaaccaggccccaacttggtccctgccctagggacctccagcctggtgcccagtgctcaggccacctcctggtccagtcaccacctgcagcctcggcagggcaggtacaggggccacctcagatgggagcctgggtccctgcctccgctctgcccctgggtggctgggaggagaggccctctcgggggtgacctgggcgtcagccgtggaaccccctcctcctccctggagtctgcctgagtccctcgagccgcgagccttcgctgaagtgcccttgctataaccccctctgcttctggtgtgtgacgaggcccccgatgttcttgattttcccagagaagcaaataaacagcgtgaacagccccagttcctggagttcttgcctttcaacctggcgaggaaggcgtggccaggccagggggtggggcctgccggcctttgagccattaaagggaggctgagcagggttgcggtgtgctggcttcacctgcctgcacccgctcaccctgagcgccttggggtggtgggaggcgctggaatccccactgtgcaggtaaggcctggctgtaaggggctgctgtgggggggcaggactggcttcccggggggccctcgggttctgcggccgc

SEQ ID NO: 9580 - protein, 224 aa, Homo sapiens; identical to SEQ ID NO: 9578

SEQ ID NO: 9581 - DNA, 2872 bp, Homo sapiens
aggagtcagagtggaggctgcagactgtggagccgggagccggcagtaagcccagaggtctccaccccacgggaggaaggctgaggccaagaccccggaagagatggaccgcgtgaccagataccccatcctgggcatccctcaggcacaccgtggcaccggcctggtgctggatggagacaccagctacacataccatctggtgtgcatgggccccgaggccagcggctggggccaggatgagccgcagacatggcccactgaccacagggcccagcagggcgtgcagaggcagggggtgtcctacagcgtgcatgcctacactggccagccgtccccacgggggctccactcggagaacagggaggatgagggttggcaggtttaccgcctgggcgccagggatgcccaccagggacgtccaacatgggcactccgcccagaggacggggaggacaaggagatgaagacctaccgcctggatgctggggacgctgaccccaggaggctgtgtgacctggagcgggagcgctgggccgtcatccagggccaggcagtcaggaagagcagcaccgtggccacgctccagggcactcctgaccacggagaccccaggacccccggcccacctcggtccacgcccctggaggagaacgtggttgacagggagcagattgacttcctggcagcgagacagcagttcctgagtctggagcaggcgaacaagggggcccctcatagctccccggccagggggacccctgcaggcacaaccccaggggccagccaggcccccaaggccttcaacaagccccacctggccaacgggcacgtggttcccatcaagccccaggtgaagggggtggtcagggaagagaacaaggtgcgtgctgtgcccacctgggccagtgtccaagttgtggatgaccctggctccttggcctcagtggagtccccggggacccccaaggagacgcccatcgagcgggagatccgtctggctcaggagcgtgaggcagacctgcgagagcagagggggcttcggcaggcaaccgaccaccaggagctggtggaaatccccaccaggccgctgctgaccaagctgagcctgatcacagccccacggcgggagagagggcgcccgtccctctacgtgcagcgggacatagtacaggagacacagcgtgaggaagaccaccggcgggagggcctgcacgtgggccgggcgtccacacccgactgggtctcggagggtccccagcccggactccggagagccctcagctcagattccatcctcagcccggccccagatgcccgtgcggccgacccagctccagaagtgaggaaggtgaaccgcatcccacctgatgcctaccagccgtacctgagccccgggaccccccagctagaattctcagccttcggagcattcggcaagcccagcagtctctccacagcggaggccaaggctgcgacttcaccaaaggccacgatgtccccgaggcatctctcagaatcctctggaaaacccctgagcacaaagcaagaggcatcgaagccccctcggggatgcccgcaagccaacaggggtgtcgtgcggtgggagtacttccgcctgcgtcctctgcggttcagggccccagacgagccccagcaggcccaagtcccccatgtctggggctgggaggtggctggggcccctgcactgaggctgcagaagtcccagtcatctgatctgctggaaagggagagggagagtgtcctgcgccgggagcaagaggtggcagaggagcggagaaatgctctcttcccagaggtcttctccccaacgccagatgagaactctgaccagaactccaggagctcctcccaggcatccggcatcacgggcagttactcggtgtctgagtctcccttcttcagccccatccacctacactcaaacgtggcgtggacagtggaagatccagtggacagtgctcctcccgggcagagaaagaaggagcaatggtacgctggcatcaacccctcggacggtatcaactcagaggtcctggaagccatacgggtgacccgtcacaagaacgccatggcagagcgctgggaatcccgcatctacgccagtgaggaggatgactgagcctcgggatggggcgcccaccccctgccctgccctgaccctcgtgggaactgccaagaccatcgccaagcccccaccctaggaaatgggtcctaggtccaggatccaagaaccacagctcatctgccaacaatcccaccatgggcacatttgggactgttgggtttttcgtttccgtttctatcttcctttagaaatgtttctgcctttggggtctaaagcttttggggatgaaatgggacccctgctgattctttctgcttctaagactttgccaaatgccctgggtctaagaaagaaagagacccgctcctccactttcaggtgtaatttgcttccgctagtctgagggcagagggaccggtcaaagagggtggcacagatcgcagcaccttgaggggctgcgggtctgagggaggagacactcagctcctccctctgagaagtcccaagctgagaggggagacctgcccctttccaaccctgggaaaccatccagtctgagggaggaggccaaactcccagtgctgggggtccctgtgcagccctcaaacccttcaccttggtgcacccagccacacctggtggacacaaagctctcacatcgataggatcccatgaggatggtccccttcacctgggagaaaagtgacccagtttaggagctggaggggggtctttgtcccccacccccaaactgccctgaaataaacctggagtgagctgcct

SEQ ID NO: 9582 - protein, 679 aa, Homo sapiens; identical to SEQ ID NO: 1493

SEQ ID NO: 9583 - DNA, 2717 bp, Homo sapiens
gcggccgccctcgccgcgctcccgccccggccgctgcccctgcccgccccgctcgccccgcgcaccccaacccggggaggggctcccacgaccccgggcgcgcgcgcttgggggcgcgccagggactccagggtcccttgccccgcgccgcttctccctcctccctctttcttcgggcagcctccccaccaccccacttcagcctcccccactcttgccgcctccatatcatcaagctctggtggcgcctggggggcttttcggatcggcaggatgtacccccagggaaggcacccgaccccgctccagtccggccagcccttcaagttctcgatcttggagatctgcgaccgcatcaaagaagaattccagtttcttcaggctcaataccacagcctcaagctagaatgtgagaagctggccagcgagaagacggaaatgcagcgacattatgtcatgtattatgagatgtcgtacgggctcaacattgaaatgcataagcaggcggagattgtgaagcgtctgagcggtatctgcgctcagattatccccttcctgacccaggagcatcagcagcaggtgctccaggccgtagaacgcgccaagcaggtcaccgtgggggagctgaacagcctcatcgggcagcagcagctccagccgctgtcccaccacgcaccccctgtgcccctcaccccccgcccagccgggctggtgggcggcagtgctacggggctgcttgctctgtctggagccctggctgcccaggctcagctggcggcggctgtcaaggaggaccgtgcgggcgtggaggccgaggggtccagagtggagagagccccgagcaggagtgcatctccctcgccccctgagagtctcgtggaggaggagcgaccgagtggccctggtggtggcgggaagcagagagcagatgagaaggagccatcaggaccttatgaaagcgacgaagacaagagtgattacaatctggtggtggacgaggaccaaccctcagagccccccagcccggctaccaccccctgcggaaaggtacccatctgcattcctgcccgtcgggacctggtggacagtccagcctccttggcctctagccttggctcaccgctgcctagagccaaggagctcatcctgaatgaccttcccgccagcactcctgcctccaaatcctgtgactcctccccgccccaggacgcttccacccccgggcccagctcggccagtcacctctgccagcttgctgccaagccagcaccttccacggacagcgtcgccctgaggagccccctgactctgtccagtcccttcaccacgtccttcagcctgggctcccacagcactctcaacggagacctctccgtgcccagctcctacgtcagcctccacctgtccccccaggtcagcagctctgtggtgtacggacgctcccccgtgatggcatttgagtctcatccccatctccgagggtcatccgtctcttcctccctacccagcatccctgggggaaagccggcctactccttccacgtgtctgcggacgggcagatgcagccggttcccttcccctcggatgcactggtaggcgcgggcatcccgcggcacgcccggcagctgcacacgctggcccatggcgaggtggtctgcgcggtcaccatcagcggctccacacagcatgtgtacacgggcggcaagggctgtgtgaaggtgtgggacgtgggccagcctggggccaagacgcccgtggcccagctcgactgcctgaaccgagacaactacattcgttcctgcaagttgctgccggatggccggagtctgatcgtgggcggtgaggccagcaccttgtccatttgggacctggcggcgcccaccccccgtatcaaggccgagctgacttcctcagccccagcctgctacgccctggccgtcagccccgacgccaaggtttgcttctcctgctgcagcgatggcaacattgtggtctgggacctgcagaatcagactatggtcaggcagttccagggccacacggacggcgccagctgcattgatatttccgattacggcactcggctctggacagggggcctggacaacacggtgcgctgctgggacctgcgggagggccgccagctgcagcagcatgacttcagctcccagattttctccctgggccactgccctaaccaggactggctggcggtcggaatggagagtagcaacgtggagatcctgcacgtccgcaagccggagaaataccagctgcacctccacgagagctgcgtgctgtccctgaagtttgcctcctgcggacggtggtttgtgagcaccgggaaggacaacctgctcaacgcctggaggacgccgtacggggccagcattttccagtccaaggagtcgtcctcagtcctgagttgtgacatctccagaaataacaaatacatcgtgacaggctcgggggacaagaaggccaccgtgtatgaggtggtctactgagacatgaccccccttcctgtacccgaagtccagactcccaggggaatcagcagccaggacagacatcctagcagccgcctcccagccctgcctaggaaccgtacatcccatctgctctctggccaacggcttcacaccttcccctgctgcatgtgggggccgatgggcaggggacctcggtggaaataaaatgtatctatcacatccgc

SEQ ID NO: 9584 - protein, 744 aa, Homo sapiens
MYPQGRHPTPLQSGQPFKFSILEICDRIKEEFQFLQAQYHSLKLECEKLASEKTEMQRHYVMYYEMSYGLNIEMHKQAEIVKRLSGICAQIIPFLTQEHQQQVLQAVERAKQVTVGELNSLIGQQQLQPLSHHAPPVPLTPRPAGLVGGSATGLLALSGALAAQAQLAAAVKEDRAGVEAEGSRVERAPSRSASPSPPESLVEEERPSGPGGGGKQRADEKEPSGPYESDEDKSDYNLVVDEDQPSEPPSPATTPCGKVPICIPARRDLVDSPASLASSLGSPLPRAKELILNDLPASTPASKSCDSSPPQDASTPGPSSASHLCQLAAKPAPSTDSVALRSPLTLSSPFTTSFSLGSHSTLNGDLSVPSSYVSLHLSPQVSSSVVYGRSPVMAFESHPHLRGSSVSSSLPSIPGGKPAYSFHVSADGQMQPVPFPSDALVGAGIPRHARQLHTLAHGEVVCAVTISGSTQHVYTGGKGCVKVWDVGQPGAKTPVAQLDCLNRDNYIRSCKLLPDGRSLIVGGEASTLSIWDLAAPTPRIKAELTSSAPACYALAVSPDAKVCFSCCSDGNIVVWDLQNQTMVRQFQGHTDGASCIDISDYGTRLWTGGLDNTVRCWDLREGRQLQQHDFSSQIFSLGHCPNQDWLAVGMESSNVEILHVRKPEKYQLHLHESCVLSLKFASCGRWFVSTGKDNLLNAWRTPYGASIFQSKESSSVLSCDISRNNKYIVTGSGDKKATVYEVVY

SEQ ID NO: 9585 - DNA, 1020 bp, Homo sapiens
gcggccgccctcgccgcgctcccgccccggccgctgcccctgcccgccccgctcgccccgcgcaccccaacccggggaggggctcccacgaccccgggcgcgcgcgcttgggggcgcgccagggactccagggtcccttgccccgcgccgcttctccctcctccctctttcttcgggcagcctccccaccaccccacttcagcctcccccactcttgccgcctccatatcatcaagctctggtggcgcctggggggcttttcggatcggcaggatgtacccccagggaaggcacccgaccccgctccagtccggccagcccttcaagttctcgatcttggagatctgcgaccgcatcaaagaagaattccagtttcttcaggctcaataccacagcctcaagctagaatgtgagaagctggccagcgagaagacggaaatgcagcgacattatgtcatgtattatgagatgtcgtacgggctcaacattgaaatgcataagcaggcggagattgtgaagcgtctgagcggtatctgcgctcagattatccccttcctgacccaggagcatcagcagcaggtgctccaggccgtagaacgcgccaagcaggtcaccgtgggggagctgaacagcctcatcggggtgagtctctctagcccctgccccgccatggggagacgcccactcccaggtccctggcacccacccaggaggtgttaaagctggggtggtgtgtgggccttggctccagtggtcctgggaaccccaggggcacatgctgtgcttaggtcccatcccctgtgtctacctcttgggctggggaccgctgggctcctgccgccccccgccccggcccatcctgcctcctttctagcagcagcagctccagccgctgtcccaccacgcaccccctgtgcccctcaccccccgcccagccgggctggtgggcggcagtgctacggggctgcttgctctgtctggagccctggctgcccaggctcagctggcggcggctgtcaa

SEQ ID NO: 9586 - protein, 148 aa, Homo sapiens [sequence omitted]

SEQ ID NO: 9587 - DNA, 821 bp, Homo sapiens
acttgctcagaaaagccatttccgactccagactggtccccgctccccgcaagcccccccccccgctcccacggatgtacccccagggaaggcacccgaccccgctccagtccggccagcccttcaagttctcgatcttggagatctgcgaccgcatcaaagaagaattccagtttcttcaggctcaataccacagcctcaagctagaatgtgagaagctggccagcgagaagacggaaatgcagcgacattatgtcatgtattatgagatgtcgtacgggctcaacattgaaatgcataagcaggcggagattgtgaagcgtctgagcggtatctgcgctcagattatccccttcctgacccaggagcatcagcagcaggtgctccaggccgtagaacgcgccaagcaggtcaccgtgggggagctgaacagcctcatcggggtgagtctctctagcccctgccccgccatggggagacgcccactcccaggtccctggcacccacccaggaggtgttaaagctggggtggtgtgtgggccttggctccagtggtcctgggaaccccaggggcacatgctgtgcttaggtcccatcccctgtgtctacctcttgggctggggaccgctgggctcctgccgccccccgccccggcccatcctgcctcctttctagcagcagcagctccagccgctgtcccaccacgcaccccctgtgcccctcaccccccgcccagccgggctggtgggcggcagtgctacggggctgcttgctctgtctggagccctggctgcccaggctcagctggcggcggctgtcaa

SEQ ID NO: 9588 - protein, 148 aa, Homo sapiens [sequence omitted]

SEQ ID NO: 9589 - DNA, 619 bp, Homo sapiens
agatgaaatccttcccttgagtgtggcgtgctgagatctccacctggaggcatccccagctggtagatcagtcctgggaagcggaggagaccaagaaaggggccttgcctgggacagacgtgggccaagccggggctggaatctgggactccaggcggaggcccctttcctttgtttcagctgagcccagcacctctgagtgtctgcgtctgagcggagattgtgaagcgtctgagcggtatctgcgctcagattatccccttcctgacccaggagcatcagcagcaggtgctccaggccgtagaacgcgccaagcaggtcaccgtgggggagctgaacagcctcatcggggtgagtctctctagcccctgccccgccatggggagacgcccactcccaggtccctggcacccacccaggaggtgttaaagctggggtggtgtgtgggccttggctccagtggtcctgggaaccccaggggcacatgctgtgcttaggtcccatcccctgtgtctacctcttgggctggggaccgctgggctcctgccgccccccgccccggcccatcctgcctcctttctagcagcagcagctccagccgctgtcccaccacgcaccc

SEQ ID NO: 9590 - protein, 32 aa, Homo sapiens
MLCLGPIPCVYLLGWGPLGSCRPPPRPILPPF

SEQ ID NO: 9591 - DNA, 674 bp, Homo sapiens
gaaattcagtttgggaagatgggaaaattctggagatggtgctggggatggctgcacaaccgtgtgtgtgctttatgctgctgagctgtgcacttacaaatggttaaaatggactgtaattcggcccccggactcaagcaatccgcccgtgtcaggctccgagtgttgggtttacaggtgtgagccactgtacccagcctgcactgtccctgtttctgtgtggtacgttctctcttcagagagacgtgaaagatagttctacttcagagtggatacactgggaggatccttgatgccttgaggaccaaacccagaggggagatgctcagtttgttcagattccactgagtctgagatttctggaagcttggggtggggagaggtcctgtgtagacacagaacataaagagcatctgcagcggaaagtggggacgaggtggtctagagaaaggcaagagccgcaagaagtttaggtaggccgagcccagtggctcacgcctgtaatcccagcactttgggaggccaaggcgtgcgggtcatgaggtcaggagtttgagacccacctggccagtatggtgaaacctcatttctactaaaaatacaaaaattagctgggctagtcccagctactcgggaggctgaggcaggagaattgcttgaacccggggggtgga

SEQ ID NO: 9592 - protein, 84 aa, Homo sapiens
KFSLGRWENSGDGAGDGCTTVCVLYAAELCTYKWLKWTVIRPPDSSNPPVSGSECWVYRCEPLYPACTVPVSVWYVLSSERRER

SEQ ID NO: 9593 - DNA, 1018 bp, Homo sapiens
gctccaagcccaccagctgtcccagctgcaggccctggccctgcccttgaccccactacccgtggggctgcagccgccttcgctgccggcggtcagcgcaggcaccggcctcctctcgctgtccgcgctgggttcccaggcccacctctccaaggaagacaagaacgggcacgatggtgacacccaccaggaggatgatggcgagaagtcggattagcagggggccgggacagggaggttgggaggggggacagaggggagacagaggcacggagagaaaggaatgtttagcacaagacacagcggagctcgggattggctaaactcccatagtatttatggtggccgccggcgggggccccagcccagcttgcaggccacctctagctttcttcctaccccattcccggcttccctcctcctcccctgcagcctggttaggtggatacctgccctgacatgtgaggcaagctaaggcctggagggtcagatgggagaccaggtcccaagggagcaagacctcgcgaagcgcagcagccccggcccttcccccgttttgaacatgtgtaaccgacagtctgcctgggccacagccctctcaccctggtactgcatgcacgcaatgctagctgcccctttcccgtcctgggcaccccgagtctcccccgaccccgggtcccaggtatgctcccacctccacctgccccactcaccacctctgctagttccagacacctccccttcccaaataaagatgagggtactaaagttgtcttggtttttattttattattatttttttctttttccagtatactagcttgtcttttaagaaaggggatattaaaaaaaaaaaaagacaaaagtgtttttaaaaaaaagcaacacccacacctgtgtctgtatatagtcagcttatctcgtgttcaatcgtctgatctctacagagagaagtggaaaatgctgtatcaagggtgggcttagctgtgcctttccaataaagatgtgagaagcttcg

SEQ ID NO: 9594 - protein, 109 aa, Homo sapiens
MGDQVPREQDLAKRSSPGPSPVLNMCNRQSAWATALSPWYCMHAMLAAPFPSWAPRVSPDPGSQVCSHLHLPHSPPLLVPDTSPSQIKMRVLKLSWFLFYYYFFLFPVY

SEQ ID NO: 9595 - DNA, 898 bp, Homo sapiens
agcagcaggtcttgggagccattgagagggccaagcaggcacggagagaaaggaatgtttagcacaagacacagcggagctcgggattggctaaactcccatagtatttatggtggccgccggcgggggccccagcccagcttgcaggccacctctagctttcttcctaccccattcccggcttccctcctcctcccctgcagcctggttaggtggatacctgccctgacatgtgaggcaagctaaggcctggagggtcagatgggagaccaggtcccaagggagcaagacctcgcgaagcgcagcagccccggcccttcccccgttttgaacatgtgtaaccgacagtctgcctgggccacagccctctcaccctggtactgcatgcacgcaatgctagctgcccctttcccgtcctgggcaccccgagtctcccccgaccccgggtcccaggtatgctcccacctccacctgccccactcaccacctctgctagttccagacacctccacgcccacctggtcctctcccatcgcccacaaaagggggggcacgagggacgagcttagctgagctgggaggagcagggtgagggtgggcgacccaggattccccctccccttcccaaataaagatgagggtactaaagttgtcttggtttttattttattattatttttttctttttccagtatactagcttgtcttttaagaaaggggatattaaaaaaaaaaaaagacaaaagtgtttttaaaaaaaagcaacacccacacctgtgtctgtatatagtcagcttatctcgtgttcaatcgtctgatctctacagagagaagtggaaaatgctgtatcaagggtgggcttagctgtgcctttccaataaagatgtgagaagcttcg

SEQ ID NO: 9596 - protein, 103 aa, Homo sapiens
MGDQVPREQDLAKRSSPGPSPVLNMCNRQSAWATALSPWYCMHAMLAAPFPSWAPRVSPDPGSQVCSHLHLPHSPPLLVPDTSTPTWSSPIAHKRGGTRDELS

SEQ ID NO: 9597 - DNA, 645 bp, Homo sapiens
agcaccagcagcaggtcttgggagccattgagagggccaagcaggtcaccgctcccgagctgaactctatcatccgacagcagctccaagcccaccagctgtcccagctgcaggccctggccctgcccttgaccccactacccgtggggctgcagccgccttcgctgccggcggtcagcgcaggcaccggcctcctctcgctgtccgcgctgggttcccaggcccacctctccaaggaagacaagaacgggcacgatggtgacacctggtcctctcccatcgcccacaaaagggggggcacgagggacgagcttagctgagctgggaggagcagggtgagggtgggcgacccaggattccccctccccttcccaaataaagatgagggtactaaagttgtcttggtttttattttattattatttttttctttttccagtatactagcttgtcttttaagaaaggggatattaaaaaaaaaaaaagacaaaagtgtttttaaaaaaaagcaacacccacacctgtgtctgtatatagtcagcttatctcgtgttcaatcgtctgatctctacagagagaagtggaaaatgctgtatcaagggtgggcttagctgtgcctttccaataaagatgtgagaagcttcg

SEQ ID NO: 9598 - protein, 105 aa, Homo sapiens
HQQQVLGAIERAKQVTAPELNSIIRQQLQAHQLSQLQALALPLTPLPVGLQPPSLPAVSAGTGLLSLSALGSQAHLSKEDKNGHDGDTWSSPIAHKRGGTRDELS

SEQ ID NO: 9599 - DNA, 1114 bp, Homo sapiens
tctcccccgacccccttccagcaccagcagcaggtcttgggagccattgagagggccaagcaggtcaccgctcccgagctgaactctatcatccgagtatgtatggggacctgggcgggtgggcgggggacaggtgggccccaggcagctaatgttcccctcccccgccctgcagcagcagctccaagcccaccagctgtcccagctgcaggccctggccctgcccttgaccccactacccgtggggctgcagccgccttcgctgccggcggtcagcgcaggcaccggcctcctctcgctgtccgcgctgggttcccaggcccacctctccaaggaagacaagaacgggcacgatggtgacacccaccaggaggatgatggcgagaagtcggattagcagggggccgggacagggaggttgggaggggggacagaggggagacagaggcacggagagaaaggaatgtttagcacaagacacagcggagctcgggattggctaaactcccatagtatttatggtggccgccggcgggggccccagcccagcttgcaggccacctctagctttcttcctaccccattcccggcttccctcctcctcccctgcagcctggttaggtggatacctgccctgacatgtgaggcaagctaaggcctggagggtcagatgggagaccaggtcccaagggagcaagacctcgcgaagcgcagcagccccggcccttcccccgttttgaacatgtgtaaccgacagtctgcctgggcacgagggacgagcttagctgagctgggaggagcagggtgagggtgggcgacccaggattccccctccccttcccaaataaagatgagggtactaaagttgtcttggtttttattttattattatttttttctttttccagtatactagcttgtcttttaagaaaggggatattaaaaaaaaaaaaagacaaaagtgtttttaaaaaaaagcaacacccacacctgtgtctgtatatagtcagcttatctcgtgttcaatcgtctgatctctacagagagaagtggaaaatgctgtatcaagggtgggcttagctgtgcctttccaataaagatgtgagaagcttcg

SEQ ID NO: 9600 - protein, 45 aa, Homo sapiens
MGDQVPREQDLAKRSSPGPSPVLNMCNRQSAWARGTSLAELGGAG

SEQ ID NO: 9601 - DNA, 1195 bp, Homo sapiens
tctcccccgacccccttccagcaccagcagcaggtcttgggagccattgagagggccaagcaggtcaccgctcccgagctgaactctatcatccgagtatgtatggggacctgggcgggtgggcgggggacaggtgggccccaggcagctaatgttcccctcccccgccctgcagcagcagctccaagcccaccagctgtcccagctgcaggccctggccctgcccttgaccccactacccgtggggctgcagccgccttcgctgccggcggtcagcgcaggcaccggcctcctctcgctgtccgcgctgggttcccaggcccacctctccaaggaagacaagaacgggcacgatggtgacacccaccaggaggatgatggcgagaagtcggattagcagggggccgggacagggaggttgggaggggggacagaggggagacagaggcacggagagaaaggaatgtttagcacaagacacagcggagctcgggattggctaaactcccatagtatttatggtggccgccggcgggggccccagcccagcttgcaggccacctctagctttcttcctaccccattcccggcttccctcctcctcccctgcagcctggttaggtggatacctgccctgacatgtgaggcaagctaaggcctggagggtcagatgggagaccaggtcccaagggagcaagacctcgcgaagcgcagcagccccggcccttcccccgttttgaacatgtgtaaccgacagtctgcctgggccacagcccttcaccacctctgctagttccagacacctccacgcccacctggtcctctcccatcgcccacaaaagggggggcacgagggacgagcttagctgagctgggaggagcagggtgagggtgggcgacccaggattccccctccccttcccaaataaagatgagggtactaaagttgtcttggtttttattttattattatttttttctttttccagtatactagcttgtcttttaagaaaggggatattaaaaaaaaaaaaagacaaaagtgtttttaaaaaaaagcaacacccacacctgtgtctgtatatagtcagcttatctcgtgttcaatcgtctgatctctacagagagaagtggaaaatgctgtatcaagggtgggcttagctgtgcctttccaataaagatgtgagaagcttcg

SEQ ID NO: 9602 - protein, 40 aa, Homo sapiens
MGDQVPREQDLAKRSSPGPSPVLNMCNRQSAWATALHHLC

SEQ ID NO: 9603 - DNA, 1056 bp, Homo sapiens
tctcccccgacccccttccagcaccagcagcaggtcttgggagccattgagagggccaagcaggtcaccgctcccgagctgaactctatcatccgagtatgtatggggacctgggcgggtgggcgggggacaggtgggccccaggcagctaatgttcccctcccccgccctgcagcagcagctccaagcccaccagctgtcccagctgcaggccctggccctgcccttgaccccactacccgtggggctgcagccgccttcgctgccggcggtcagcgcaggcaccggcctcctctcgctgtccgcgctgggttcccaggcccacctctccaaggaagacaagaacgggcacgatggtgacacccaccaggaggatgatggcgagaagtcggattagcagggggccgggacagggaggttgggaggggggacagaggggagacagaggcacggagagaaaggaatgtttagcacaagacacagcggagctcgggattggctaaactcccatagtatttatggtggccgccggcgggggccccagcccagcttgcaggccacctctagctttcttcctaccccattcccggcttccctcctcctcccctgcagcctggttaggtggatacctgccccactcaccacctctgctagttccagacacctccacgcccacctggtcctctcccatcgcccacaaaagggggggcacgagggacgagcttagctgagctgggaggagcagggtgagggtgggcgacccaggattccccctccccttcccaaataaagatgagggtactaaagttgtcttggtttttattttattattatttttttctttttccagtatactagcttgtcttttaagaaaggggatattaaaaaaaaaaaaagacaaaagtgtttttaaaaaaaagcaacacccacacctgtgtctgtatatagtcagcttatctcgtgttcaatcgtctgatctctacagagagaagtggaaaatgctgtatcaagggtgggcttagctgtgcctttccaataaagatgtgagaagcttcg

SEQ ID NO: 9604 - protein, 87 aa, Homo sapiens
MFSTRHSGARDWLNSHSIYGGRRRGPQPSLQATSSFLPTPFPASLLLPCSLVRWIPAPLTTSASSRHLHAHLVLSHRPQKGGHEGRA

SEQ ID NO: 9605 - DNA, 1236 bp, Homo sapiens
gcctctcctctcccccgacccccttccagcaccagcagcaggtcttgggagccattgagagggccaagcaggtcaccgctcccgagctgaactctatcatccgacagcagctccaagcccaccagctgtcccagctgcaggccctggccctgcccttgaccccactacccgtggggctgcagccgccttcgctgccggcggtcagcgcaggcaccggcctcctctcgctgtccgcgctgggttcccaggcccacctctccaaggaagacaagaacgggcacgatggtgacacccaccaggaggatgatggcgagaagtcggattagcagggggccgggacagggaggttgggaggggggacagaggggagacagaggcacggagagaaaggaatgtttagcacaagacacagcggagctcgggattggctaaactcccatagtatttatggtggccgccggcgggggccccagcccagcttgcaggccacctctagctttcttcctaccccattcccggcttccctcctcctcccctgcagcctggttaggtggatacctgccctgacatgtgaggcaagctaaggcctggagggtcagatgggagaccaggtcccaagggagcaagacctcgcgaagcgcagcagccccggcccttcccccgttttgaacatgtgtaaccgacagtctgcctgggccacagccctctcaccctggtactgcatgcacgcaatgctagctgcccctttcccgtcctgggcaccccgagtctcccccgaccccgggtcccaggtatgctcccacctccacctgccccactcaccacctctgctagttccagacacctccacgcccacctggtcctctcccatcgcccacaaaagggggggcacgagggacgagcttagctgagctgggaggagcagggtgagggtgggcgacccaggattccccctccccttcccaaataaagatgagggtactaaagttgtcttggtttttattttattattatttttttctttttccagtatactagcttgtcttttaagaaaggggatattaaaaaaaaaaaaagacaaaagtgtttttaaaaaaaagcaacacccacacctgtgtctgtatatagtcagcttatctcgtgttcaatcgtctgatctctacagagagaagtggaaaatgctgtatcaagggtgggcttagctgtgcctttccaataaagatgtgagaagcttcg

SEQ ID NO: 9606 - protein, 103 aa, Homo sapiens; identical to SEQ ID NO: 9596

SEQ ID NO: 9607 - DNA, 1538 bp, Homo sapiens
cgacccccgaggaatgtgcagtctggcctcatcctgcacttacctcactctaagctgcaggcgacagccggtgtccagccccacctttgccactgactggctgccctcgggcccgaacacggctttgctcatcccaccctggccagacctagcccctcttagaagccgcaagtggcagggctgggccgggccccgcgcaggcctcctgtggctagcctgcacctgccacccgcccaggactgaagccggcttcatctgtgtgttccaggctgagatcgtcaaaaggctgaacgggatttgtgcccaggtcctgccctacctctcccaagagcaccagcagcaggtcttgggagccattgagagggccaagcaggtcaccgctcccgagctgaactctatcatccgacagcagctccaagcccaccagctgtcccagctgcaggccctggccctgcccttgaccccactacccgtggggctgcagccgccttcgctgccggcggtcagcgcaggcaccggcctcctctcgctgtccgcgctgggttcccaggcccacctctccaaggaagacaagaacgggcacgatggtgacacccaccaggaggatgatggcgagaagtcggattagcagggggccgggacagggaggttgggaggggggacagaggggagacagaggcacggagagaaaggaatgtttagcacaagacacagcggagctcgggattggctaaactcccatagtatttatggtggccgccggcgggggccccagcccagcttgcaggccacctctagctttcttcctaccccattcccggcttccctcctcctcccctgcagcctggttaggtggatacctgccctgacatgtgaggcaagctaaggcctggagggtcagatgggagaccaggtcccaagggagcaagacctcgcgaagcgcagcagccccggcccttcccccgttttgaacatgtgtaaccgacagtctgcctgggccacagccctctcaccctggtactgcatgcacgcaatgctagctgcccctttcccgtcctgggcaccccgagtctcccccgaccccgggtcccaggtatgctcccacctccacctgccccactcaccacctctgctagttccagacacctccacgcccacctggtcctctcccatcgcccacaaaagggggggcacgagggacgagcttagctgagctgggaggagcagggtgagggtgggcgacccaggattccccctccccttcccaaataaagatgagggtactaaagttgtcttggtttttattttattattatttttttctttttccagtatactagcttgtcttttaagaaaggggatattaaaaaaaaaaaaagacaaaagtgtttttaaaaaaaagcaacacccacacctgtgtctgtatatagtcagcttatctcgtgttcaatcgtctgatctctacagagagaagtggaaaatgctgtatcaagggtgggcttagctgtgcctttccaataaagatgtgagaagcttcg

SEQ ID NO: 9608 - protein, 204 aa, Homo sapiens
MCSLASSCTYLTLSCRRQPVSSPTFATDWLPSGPNTALLIPPWPDLAPLRSRKWQGWAGPRAGLLWLACTCHPPRTEAGFICVFQAEIVKRLNGICAQVLPYLSQEHQQQVLGAIERAKQVTAPELNSIIRQQLQAHQLSQLQALALPLTPLPVGLQPPSLPAVSAGTGLLSLSALGSQAHLSKEDKNGHDGDTHQEDDGEKSD

SEQ ID NO: 9609 - DNA, 3643 bp, Homo sapiens
cccttggcctggccctcgagcagcgatgctggggtctcagcccagtacccaaatctcccagactgtgggggaggcagagccagaccctgaccctcccagccagaagaatagggctggggtcagagagagggacctaggacctgcctgaggaagactatatggagaaatggggcacacagctggggtcttgcaggatgagtaggagttcaccagacagagacagagaaactacgtgaaggcctgggaatgaacttggttttcccccaggggtgacagggagccatgggagggtttagagcaggggaggggcagggtgagatctggggcttggggtgggggtagctgctggccccagagccagcaggctttgtttacccctcactgtttatacctaggcaggcaaacttccctggcgtctgggcccacccgcagacaagacatagaaagatacaagattaggagccctggaatgcgtgttctcgcggtgcacatggagtgggggaggagccaggccagggctagggacctaaagtgcccccagtctccatccgcagccccagcggccccctgcccctctccagggcgggctgggatgctgggtgtgggcgtctctccctcctctttccctcccacctgcctctcctttctttcctgccctcagctgtctcttgctgtctcccccctttgtctgtctctgccactcccctatctctttgtctccgtgtccccccatccttccccacccccatctcccgctccccctctctctcccccatacagtactacgagatgtcctacggcttgaacatcgagatgcacaaacaggctgagatcgtcaaaaggctgaacgggatttgtgcccaggtcctgccctacctctcccaagaggtaagagccagggccttggggaggggttgtgagggggccccgcacttgcccagcccctgtccactgcagccatcttgggtggtgtgctgggcgccccagggcacacgcctcccctctctggacctccctggctctgaacaccagagccggcctgtgcagaagaatccccgggccagagacactccaggggtgcaggcgtgtggggggcgggcctcaccctgctctggaattcccagctggagtgagtcatgtcataggtagaaatgtcagatgggcctaaactgcaccaggaatgtttttttctcatctctcttcctcctttcaccctcttgagacatcctcctccaggccatgcgggctgcacaggaccaaggactagagggtgttaggggattgtgggggaaggggtagcacagggtggtcacacatggacacagccacacagataggcacgagcacatcaacacacgggagatacacagatgcagacacggatacacgtgtgtgcagacagcacagggacacgcatgcaggaatgtgcagctacacgtgggcacacgtgatcctgagcacacattaccacatgcacacacacacccagatgaacctgacgcccagctcctcttctcctttcttgggttctgaggctcaggatgcgaggccgcccctccccagggccatgtaaggcccatctcctgtccctgccaagtttactgtcaaaagtttgtaacttcctcttcaatccctgtgggtatctcaggatcctttgggtgccctgctttgcccagggacaagtcttagcaggacccaatgaaagccctagagaaaagggcacttggagcccttcagaacagaggcttcctggtagccaaggcaaaaagggagattggtagattctagcatctgctggccacagagtcaggtgtttggggagagctcagggaggaactgccctgaatctgagcccattccccagccagccctgccagaattcattgggccctccccagccatggtaggagaagggctcaatttggccagactcagggcacagtcttggagctcctaggatcaggacgtccctgtacagttgggcaggttgtgtactgcacaaacattcacatgtttcacatctttgcaggtggctgtgcacataggataggtcaggatccagggtttctcccgggctcactcaaaagctgtttcctaactacttagcacaaaacccttttaattgttttctgcacttttccatttgtctctgttggccagacgaagagacgagcttggtgaaaggaagcagttggagagagggagggtgctttctgatggggttgaaaaccactgggaggagcagacatgatggcccacttggtagtggggctcctcctggcctcagggccgtccccctctcctctcccaggatcaggaggaatcactgcctctcctctcccccgacccccttccagcaccagcagcaggtcttgggagccattgagagggccaagcaggtcaccgctcccgagctgaactctatcatccgagtatgtatggggacctgggcgggtgggcgggggacaggtgggccccaggcagctaatgttcccctcccccgccctgcagcagcagctccaagcccaccagctgtcccagctgcaggccctggccctgcccttgaccccactacccgtggggctgcagccgccttcgctgccggcggtcagcgcaggcaccggcctcctctcgctgtccgcgctgggttcccaggcccacctctccaaggaagacaagaacgggcacgatggtgacacccaccaggaggatgatggcgagaagtcggattagcagggggccgggacagggaggttgggaggggggacagaggggagacagaggcacggagagaaaggaatgtttagcacaagacacagcggagctcgggattggctaaactcccatagtatttatggtggccgccggcgggggccccagcccagcttgcaggccacctctagctttcttcctaccccattcccggcttccctcctcctcccctgcagcctggttaggtggatacctgccctgacatgtgaggcaagctaaggcctggagggtcagatgggagaccaggtcccaagggagcaagacctcgcgaagcgcagcagccccggcccttcccccgttttgaacatgtgtaaccgacagtctgcctgggccacagccctctcaccctggtactgcatgcacgcaatgctagctgcccctttcccgtcctgggcaccccgagtctcccccgaccccgggtcccaggtatgctcccacctccacctgccccactcaccacctctgctagttccagacacctccacgcccacctggtcctctcccatcgcccacaaaagggggggcacgagggacgagcttagctgagctgggaggagcagggtgagggtgggcgacccaggattccccctccccttcccaaataaagatgagggtactaaagttgtcttggtttttattttattattatttttttctttttccagtatactagcttgtcttttaagaaaggggatattaaaaaaaaaaaaagacaaaagtgtttttaaaaaaaagcaacacccacacctgtgtctgtatatagtcagcttatctcgtgttcaatcgtctgatctctacagagagaagtggaaaatgctgtatcaagggtgggcttagctgtgcctttccaataaagatgtgagaagcttcg

SEQ ID NO: 9610 - protein, 119 aa, Homo sapiens
MSYGLNIEMHKQAEIVKRLNGICAQVLPYLSQEVRARALGRGCEGAPHLPSPCPLQPSWVVCWAPQGTRLPSLDLPGSEHQSRPVQKNPRARDTPGVQACGGRASPCSGIPSWSESCHR

SEQ ID NO: 9611 - DNA, 2095 bp, Homo sapiens
cccttggcctggccctcgagcagcgatgctggggtctcagcccagtacccaaatctcccagactgtgggggaggcagagccagaccctgaccctcccagccagaagaatagggctggggtcagagagagggacctaggacctgcctgaggaagactatatggagaaatggggcacacagctggggtcttgcaggatgagtaggagttcaccagacagagacagagaaactacgtgaaggcctgggaatgaacttggttttcccccaggggtgacagggagccatgggagggtttagagcaggggaggggcagggtgagatctggggcttggggtgggggtagctgctggccccagagccagcaggctttgtttacccctcactgtttatacctaggcaggcaaacttccctggcgtctgggcccacccgcagacaagacatagaaagatacaagattaggagccctggaatgcgtgttctcgcggtgcacatggagtgggggaggagccaggccagggctagggacctaaagtgcccccagtctccatccgcagccccagcggccccctgcccctctccagggcgggctgggatgctgggtgtgggcgtctctccctcctctttccctcccacctgcctctcctttctttcctgccctcagctgtctcttgctgtctcccccctttgtctgtctctgccactcccctatctctttgtctccgtgtccccccatccttccccacccccatctcccgctccccctctctctcccccatacagtactacgagatgtcctacggcttgaacatcgagatgcacaaacaggctgagatcgtcaaaaggctgaacgggatttgtgcccaggtcctgccctacctctcccaagagcaccagcagcaggtcttgggagccattgagagggccaagcaggtcaccgctcccgagctgaactctatcatccgacagcagctccaagcccaccagctgtcccagctgcaggccctggccctgcccttgaccccactacccgtggggctgcagccgccttcgctgccggcggtcagcgcaggcaccggcctcctctcgctgtccgcgctgggttcccaggcccacctctccaaggaagacaagaacgggcacgatggtgacacccaccaggaggatgatggcgagaagtcggattagcagggggccgggacagggaggttgggaggggggacagaggggagacagaggcacggagagaaaggaatgtttagcacaagacacagcggagctcgggattggctaaactcccatagtatttatggtggccgccggcgggggccccagcccagcttgcaggccacctctagctttcttcctaccccattcccggcttccctcctcctcccctgcagcctggttaggtggatacctgccctgacatgtgaggcaagctaaggcctggagggtcagatgggagaccaggtcccaagggagcaagacctcgcgaagcgcagcagccccggcccttcccccgttttgaacatgtgtaaccgacagtctgcctgggccacagccctctcaccctggtactgcatgcacgcaatgctagctgcccctttcccgtcctgggcaccccgagtctcccccgaccccgggtcccaggtatgctcccacctccacctgccccactcaccacctctgctagttccagacacctccacgcccacctggtcctctcccatcgcccacaaaagggggggcacgagggacgagcttagctgagctgggaggagcagggtgagggtgggcgacccaggattccccctccccttcccaaataaagatgagggtactaaagttgtcttggtttttattttattattatttttttctttttccagtatactagcttgtcttttaagaaaggggatattaaaaaaaaaaaaagacaaaagtgtttttaaaaaaaagcaacacccacacctgtgtctgtatatagtcagcttatctcgtgttcaatcgtctgatctctacagagagaagtggaaaatgctgtatcaagggtgggcttagctgtgcctttccaataaagatgtgagaagcttcg

SEQ ID NO: 9612 - protein, 131 aa, Homo sapiens
MSYGLNIEMHKQAEIVKRLNGICAQVLPYLSQEHQQQVLGAIERAKQVTAPELNSIIRQQLQAHQLSQLQALALPLTPLPVGLQPPSLPAVSAGTGLLSLSALGSQAHLSKEDKNGHDGDTHQEDDGEKSD

SEQ ID NO: 9613 - DNA, 758 bp, Homo sapiens
gggctcctcgcacctaccccagcaactcaaattcaccacctcggactcctgcgaccgcatcaaagacgaatttcagctactgcaagctcagtaccacagcctcaagctcgaatgtgacaagttggccagtgagaagtcagagatgcagcgtcactatgtgatgtactacgagatgtcctacggcttgaacatcgagatgcacaaacagtctgcctgggccacagccctctcaccctggtactgcatgcacgcaatgctagctgcccctttcccgtcctgggcaccccgagtctcccccgaccccgggtcccaggtatgctcccacctccacctgccccactcaccacctctgctagttccagacacctccacgcccacctggtcctctcccatcgcccacaaaagggggggcacgagggacgagcttagctgagctgggaggagcagggtgagggtgggcgacccaggattccccctccccttcccaaataaagatgagggtactaaagttgtcttggtttttattttattattatttttttctttttccagtatactagcttgtcttttaagaaaggggatattaaaaaaaaaaaaagacaaaagtgtttttaaaaaaaagcaacacccacacctgtgtctgtatatagtcagcttatctcgtgttcaatcgtctgatctctacagagagaagtggaaaatgctgtatcaagggtgggcttagctgtgcctttccaataaagatgtgagaagcttcg

SEQ ID NO: 9614 - protein, 96 aa, Homo sapiens
MQRHYVMYYEMSYGLNIEMHKQSAWATALSPWYCMHAMLAAPFPSWAPRVSPDPGSQVCSHLHLPHSPPLLVPDTSTPTWSSPIAHKRGGTRDELS

SEQ ID NO: 9615 - DNA, 628 bp, Homo sapiens
gggctcctcgcacctaccccagcaactcaaattcaccaccccggcccttcccccgttttgaacatgtgtaaccgacagtctgcctgggccacagccctctcaccctggtactgcatgcacgcaatgctagctgcccctttcccgtcctgggcaccccgagtctcccccgaccccgggtcccaggtatgctcccacctccacctgccccactcaccacctctgctagttccagacacctccacgcccacctggtcctctcccatcgcccacaaaagggggggcacgagggacgagcttagctgagctgggaggagcagggtgagggtgggcgacccaggattccccctccccttcccaaataaagatgagggtactaaagttgtcttggtttttattttattattatttttttctttttccagtatactagcttgtcttttaagaaaggggatattaaaaaaaaaaaaagacaaaagtgtttttaaaaaaaagcaacacccacacctgtgtctgtatatagtcagcttatctcgtgttcaatcgtctgatctctacagagagaagtggaaaatgctgtatcaagggtgggcttagctgtgcctttccaataaagatgtgagaagcttcg

SEQ ID NO: 9616 - protein, 79 aa, Homo sapiens
MCNRQSAWATALSPWYCMHAMLAAPFPSWAPRVSPDPGSQVCSHLHLPHSPPLLVPDTSTPTWSSPIAHKRGGTRDELS

SEQ ID NO: 9617 - DNA, 929 bp, Homo sapiens
agggctcctcgcacctaccccagcaactcaaattcaccacctcggactcctgcgaccgcatcaaagacgaatttcagctactgcaagctcagtaccacagcctcaagctcgaatgtgacaagttggccagtgagaagtcagagatgcagcgtcactatgtgatgtactacgagatgtcctacggcttgaacatcgagatgcacaaacaggctgagatcgtcaaaaggctgaacgggatttgtgcccaggtcctgccctgacatgtgaggcaagctaaggcctggagggtcagatgggagaccaggtcccaagggagcaagacctcgcgaagcgcagcagccccggcccttcccccgttttgaacatgtgtaaccgacagtctgcctgggccacagccctctcaccctggtactgcatgcacgcaatgctagctgcccctttcccgtcctgggcaccccgagtctcccccgaccccgggtcccaggtatgctcccacctccacctgccccactcaccacctctgctagttccagacacctccacgcccacctggtcctctcccatcgcccacaaaagggggggcacgagggacgagcttagctgagctgggaggagcagggtgagggtgggcgacccaggattccccctccccttcccaaataaagatgagggtactaaagttgtcttggtttttattttattattatttttttctttttccagtatactagcttgtcttttaagaaaggggatattaaaaaaaaaaaaagacaaaagtgtttttaaaaaaaagcaacacccacacctgtgtctgtatatagtcagcttatctcgtgttcaatcgtctgatctctacagagagaagtggaaaatgctgtatcaagggtgggcttagctgtgcctttccaataaagatgtgagaagcttcg

SEQ ID NO: 9618 - protein, 38 aa, Homo sapiens
MQRHYVMYYEMSYGLNIEMHKQAEIVKRLNGICAQVLP

SEQ ID NO: 9619 - DNA, 784 bp, Homo sapiens
ctacagggctcctcgcacctaccccagcaactcaaattcaccacctcggactcctgcgaccgcatcaaagacgaatttcagctactgcaagctcagtaccacagcctcaagctcgaatgtgacaagttggccagtgagaagtcagagatgcagcgtcactatgtgatgtactacgagatgtcctacggcttgaacatcgagatgcacaaacaggctgagatcgtcaaaaggctgaacgggatttgtgcccaggtcctgccctacctctcccaagagcaccagcagcaggtcttgggagccattgagagggccaagcaggtcaccgctcccgagctgaactctatcatccgactccacctgccccactcaccacctctgctagttccagacacctccacgcccacctggtcctctcccatcgcccacaaaagggggggcacgagggacgagcttagctgagctgggaggagcagggtgagggtgggcgacccaggattccccctccccttcccaaataaagatgagggtactaaagttgtcttggtttttattttattattatttttttctttttccagtatactagcttgtcttttaagaaaggggatattaaaaaaaaaaaaagacaaaagtgtttttaaaaaaaagcaacacccacacctgtgtctgtatatagtcagcttatctcgtgttcaatcgtctgatctctacagagagaagtggaaaatgctgtatcaagggtgggcttagctgtgcctttccaataaagatgtgagaagcttcg

SEQ ID NO: 9620 - protein, 103 aa, Homo sapiens
MQRHYVMYYEMSYGLNIEMHKQAEIVKRLNGICAQVLPYLSQEHQQQVLGAIERAKQVTAPELNSIIRLHLPHSPPLLVPDTSTPTWSSPIAHKRGGTRDELS

SEQ ID NO: 9621 - DNA, 1624 bp, Homo sapiens
ggggtcgcgccaggggccgtaaacacgggcccaggaagtggggcaggagggggggcgccgcagctgcgcggccgctccctcctagccggcccttgaggggggtccagcccacgcctgggcctgacccgggccgccccatccctacagggctcctcgcacctaccccagcaactcaaattcaccacctcggactcctgcgaccgcatcaaagacgaatttcagctactgcaagctcagtaccacagcctcaagctcgaatgtgacaagttggccagtgagaagtcagagatgcagcgtcactatgtgatgtactacgagatgtcctacggcttgaacatcgagatgcacaaacaggctgagatcgtcaaaaggctgaacgggatttgtgcccaggtcctgccctacctctcccaagagcaccagcagcaggtcttgggagccattgagagggccaagcaggtcaccgctcccgagctgaactctatcatccgacagcagctccaagcccaccagctgtcccagctgcaggccctggccctgcccttgaccccactacccgtggggctgcagccgccttcgctgccggcggtcagcgcaggcaccggcctcctctcgctgtccgcgctgggttcccaggcccacctctccaaggaagacaagaacgggcacgatggtgacacccaccaggaggatgatggcgagaagtcggattagcagggggccgggacagggaggttgggaggggggacagaggggagacagaggcacggagagaaaggaatgtttagcacaagacacagcggagctcgggattggctaaactcccatagtatttatggtggccgccggcgggggccccagcccagcttgcaggccacctctagctttcttcctaccccattcccggcttccctcctcctcccctgcagcctggttaggtggatacctgccctgacatgtgaggcaagctaaggcctggagggtcagatgggagaccaggtcccaagggagcaagacctcgcgaagcgcagcagccccggcccttcccccgttttgaacatgtgtaaccgacagtctgcctgggccacagccctctcaccctggtactgcatgcacgcaatgctagctgcccctttcccgtcctgggcaccccgagtctcccccgaccccgggtcccaggtatgctcccacctccacctgccccactcaccacctctgctagttccagacacctccacgcccacctggtcctctcccatcgcccacaaaagggggggcacgagggacgagcttagctgagctgggaggagcagggtgagggtgggcgacccaggattccccctccccttcccaaataaagatgagggtactaaagttgtcttggtttttattttattattatttttttctttttccagtatactagcttgtcttttaagaaaggggatattaaaaaaaaaaaaagacaaaagtgtttttaaaaaaaagcaacacccacacctgtgtctgtatatagtcagcttatctcgtgttcaatcgtctgatctctacagagagaagtggaaaatgctgtatcaagggtgggcttagctgtgcctttccaataaagatgtgagaagcttcg

SEQ ID NO: 9622 - protein, 141 aa, Homo sapiens
MQRHYVMYYEMSYGLNIEMHKQAEIVKRLNGICAQVLPYLSQEHQQQVLGAIERAKQVTAPELNSIIRQQLQAHQLSQLQALALPLTPLPVGLQPPSLPAVSAGTGLLSLSALGSQAHLSKEDKNGHDGDTHQEDDGEKSD

SEQ ID NO: 9623 - DNA, 1722 bp, Homo sapiens
ccaacccgccgggacagtcagggcctcggacggccttggcctcgggcctggggcgctccggaagccccgcgaggcacctctagcccggggatcctttgggggcctgtggtggggggggtgatccgaggcgcacccctcccggaagagcgtgtccccgaggaagggcgctgggaatctggggttgggcccccccggaagatttcgagcaccgagagagagacccctcccccaagaggactttgcagggctcctcgcacctaccccagcaactcaaattcaccacctcggactcctgcgaccgcatcaaagacgaatttcagctactgcaagctcagtaccacagcctcaagctcgaatgtgacaagttggccagtgagaagtcagagatgcagcgtcactatgtgatgtactacgagatgtcctacggcttgaacatcgagatgcacaaacaggctgagatcgtcaaaaggctgaacgggatttgtgcccaggtcctgccctacctctcccaagagcaccagcagcaggtcttgggagccattgagagggccaagcaggtcaccgctcccgagctgaactctatcatccgacagcagctccaagcccaccagctgtcccagctgcaggccctggccctgcccttgaccccactacccgtggggctgcagccgccttcgctgccggcggtcagcgcaggcaccggcctcctctcgctgtccgcgctgggttcccaggcccacctctccaaggaagacaagaacgggcacgatggtgacacccaccaggaggatgatggcgagaagtcggattagcagggggccgggacagggaggttgggaggggggacagaggggagacagaggcacggagagaaaggaatgtttagcacaagacacagcggagctcgggattggctaaactcccatagtatttatggtggccgccggcgggggccccagcccagcttgcaggccacctctagctttcttcctaccccattcccggcttccctcctcctcccctgcagcctggttaggtggatacctgccctgacatgtgaggcaagctaaggcctggagggtcagatgggagaccaggtcccaagggagcaagacctcgcgaagcgcagcagccccggcccttcccccgttttgaacatgtgtaaccgacagtctgcctgggccacagccctctcaccctggtactgcatgcacgcaatgctagctgcccctttcccgtcctgggcaccccgagtctcccccgaccccgggtcccaggtatgctcccacctccacctgccccactcaccacctctgctagttccagacacctccacgcccacctggtcctctcccatcgcccacaaaagggggggcacgagggacgagcttagctgagctgggaggagcagggtgagggtgggcgacccaggattccccctccccttcccaaataaagatgagggtactaaagttgtcttggtttttattttattattatttttttctttttccagtatactagcttgtcttttaagaaaggggatattaaaaaaaaaaaaagacaaaagtgtttttaaaaaaaagcaacacccacacctgtgtctgtatatagtcagcttatctcgtgttcaatcgtctgatctctacagagagaagtggaaaatgctgtatcaagggtgggcttagctgtgcctttccaataaagatgtgagaagcttcg

SEQ ID NO: 9624 - protein, 141 aa, Homo sapiens; identical to SEQ ID NO: 9622

SEQ ID NO: 9625 - DNA, 772 bp, Homo sapiens
cgaagcttctcacatctttattggaaaggcacagctaagcccacccttgatacagcattttccacttctctctgtagagatcagacgattgaacacgagataagctgactatatacagacacaggtgtgggtgttgcttttttttaaaaacacttttgtctttttttttttttaatatcccctttcttaaaagacaagctagtatactggaaaaagaaaaaaataataataaaataaaaaccaagacaactttagtaccctcatctttatttgggaaggggagggggaatcctgggtcgcccaccctcaccctgctcctcccagctcagctaagctcgtccctcgtgcccccccttttgtgggcgatgggagaggaccaggtgggcgtggaggtgtctggaactagcagaggtggtgagtggggcaggtggaggtgggagcatacctgggacccggggtcgggggagactcggggtgcccaggacgggaaaggggcagctagcattgcgtgcatgcagtaccagggtgagagggctgtggcccaggcagactgtcggttacacatgttcaaaacgggggaagggccggggctgctgcgcttcgcgaggtcttgctcccttgggacctggtctcccatctgaccctccaggccttagcttgcctcacatgtcagggcaggtatccacctaaccaggctgcaggggaggaggagggaagcatcatgtcaatcgcggcggggggcgcgggctgcgccccggctgtgcgccccggc

SEQ ID NO: 9626 - protein, 91 aa, Homo sapiens [sequence omitted]

SEQ ID NO: 9627 - DNA, 862 bp, Homo sapiens
gccggggcgcacagccggggcgcagcccgcgccccccgccgcgattgacatgatgtttccacaaagcaggcattcgggctcctcgcacctaccccagcaaccagcttgcaggccacctctagctttcttcctaccccattcccggcttccctcctcctcccctgcagcctggttaggtggatacctgccctgacatgtgaggcaagctaaggcctggagggtcagatgggagaccaggtcccaagggagcaagacctcgcgaagcgcagcagccccggcccttcccccgttttgaacatgtgtaaccgacagtctgcctgggccacagccctctcaccctggtactgcatgcacgcaatgctagctgcccctttcccgtcctgggcaccccgagtctcccccgaccccgggtcccaggtatgctcccacctccacctgccccactcaccacctctgctagttccagacacctccacgcccacctggtcctctcccatcgcccacaaaagggggggcacgagggacgagcttagctgagctgggaggagcagggtgagggtgggcgacccaggattccccctccccttcccaaataaagatgagggtactaaagttgtcttggtttttattttattattatttttttctttttccagtatactagcttgtcttttaagaaaggggatattaaaaaaaaaaaaagacaaaagtgtttttaaaaaaaagcaacacccacacctgtgtctgtatatagtcagcttatctcgtgttcaatcgtctgatctctacagagagaagtggaaaatgctgtatcaagggtgggcttagctgtgcctttccaataaagatgtgagaagcttcg

SEQ ID NO: 9628 - protein, 47 aa, Homo sapiens
MMFPQSRHSGSSHLPQQPACRPPLAFFLPHSRLPSSSPAAWLGGYLP

SEQ ID NO: 9629 - DNA, 521 bp, Homo sapiens
ggccgcccggcgcccccagcagcccgagccggggcgcacagccggggcgcagcccgcgccccccgccgcgattgacatgatgtttccacaaagcaggcattcgggctcctcgcacctaccccagcaactcaaattcaccacctggtcctctcccatcgcccacaaaagggggggcacgagggacgagcttagctgagctgggaggagcagggtgagggtgggcgacccaggattccccctccccttcccaaataaagatgagggtactaaagttgtcttggtttttattttattattatttttttctttttccagtatactagcttgtcttttaagaaaggggatattaaaaaaaaaaaaagacaaaagtgtttttaaaaaaaagcaacacccacacctgtgtctgtatatagtcagcttatctcgtgttcaatcgtctgatctctacagagagaagtggaaaatgctgtatcaagggtgggcttagctgtgcctttccaataaagatgtgagaagcttcg

SEQ ID NO: 9630 - protein, 39 aa, Homo sapiens
MMFPQSRHSGSSHLPQQLKFTTWSSPIAHKRGGTRDELS

SEQ ID NO: 9631 - DNA, 551 bp, Homo sapiens
cgaagcttctcacatctttattggaaaggcacagctaagcccacccttgatacagcattttccacttctctctgtagagatcagacgattgaacacgagataagctgactatatacagacacaggtgtgggtgttgcttttttttaaaaacacttttgtctttttttttttttaatatcccctttcttaaaagacaagctagtatactggaaaaagaaaaaaataataataaaataaaaaccaagacaactttagtaccctcatctttatttgggaaggggagggggaatcctgggtcgcccaccctcaccctgctcctcccagctcagctaagctcgtccctcgtgcccccccttttgtgggcgatgggagaggaccaggtgggcgtggaggtgtctggaactagcagaggtggtgagtggggcaggtggaggtgggagcatacctgggacccggggtcgggggagaatcatgtcaatcgcggcggggggcgcgggctgcgccccggctgtgcgccccggctcgggctgctgggggcgccgggcggccgc

SEQ ID NO: 9632 - protein, 61 aa, Homo sapiens
MGEDQVGVEVSGTSRGGEWGRWRWEHTWDPGSGENHVNRGGGRGLRPGCAPRLGLLGAPGG

SEQ ID NO: 9633 - DNA, 1054 bp, Homo sapiens
cgatcggcgccgggacaaaggcgcggccgcccggcgcccccagcagcccgagccggggcgcacagccggggcgcagcccgcgccccccgccgcgattgacatgatgtttccacaaagcaggcattcgggctcctcgcacctaccccagcaactcaaattcaccacctcggactcctgcgaccgcatcaaagacgaatttcagctactgcaagctcagtaccacagcctcaagctcgaatgtgacaagttggccagtgagaagtcagagatgcagcgtcactatgtgatgtactacgagatgtcctacggcttgaacatcgagatgcacaaacaggctgagatcgtcaaaaggctgaacgggatttgtgcccaggtcctgccctgacatgtgaggcaagctaaggcctggagggtcagatgggagaccaggtcccaagggagcaagacctcgcgaagcgcagcagccccggcccttcccccgttttgaacatgtgtaaccgacagtctgcctgggccacagccctctcaccctggtactgcatgcacgcaatgctagctgcccctttcccgtcctgggcaccccgagtctcccccgaccccgggtcccaggtatgctcccacctccacctgccccactcaccacctctgctagttccagacacctccacgcccacctggtcctctcccatcgcccacaaaagggggggcacgagggacgagcttagctgagctgggaggagcagggtgagggtgggcgacccaggattccccctccccttcccaaataaagatgagggtactaaagttgtcttggtttttattttattattatttttttctttttccagtatactagcttgtcttttaagaaaggggatattaaaaaaaaaaaaagacaaaagtgtttttaaaaaaaagcaacacccacacctgtgtctgtatatagtcagcttatctcgtgttcaatcgtctgatctctacagagagaagtggaaaatgctgtatcaagggtgggcttagctgtgcctttccaataaagatgtgagaagcttcg

SEQ ID NO: 9634 - protein, 94 aa, Homo sapiens
MMFPQSRHSGSSHLPQQLKFTTSDSCDRIKDEFQLLQAQYHSLKLECDKLASEKSEMQRHYVMYYEMSYGLNIEMHKQAEIVKRLNGICAQVLP

SEQ ID NO: 9635 - DNA, 954 bp, Homo sapiens
gaagcgggcgaggccgggcgcgggaggcggcggcggccccgggagctgccgatcggcgccgggacaaaggcgcggccgcccggcgcccccagcagcccgagccggggcgcacagccggggcgcagcccgcgccccccgccgcgattgacatgatgtttccacaaagcaggcattcgggctcctcgcacctaccccagcaactcaaattcaccacctcggactcctgcgaccgcatcaaagacgaatttcagctactgcaagctcagtaccacagcctcaagctcgaatgtgacaagttggccagtgagaagtcagagatgcagcgtcactatgtgatgtactacgagatgtcctacggcttgaacatcgagatgcacaaacaggctgagatcgtcaaaaggctgaacgggatttgtgcccaggtcctgccctacctctcccaagagcaccagcagcaggtcttgggagccattgagagggccaagcaggtcaccgctcccgagctgaactctatcatccgactccacctgccccactcaccacctctgctagttccagacacctccacgcccacctggtcctctcccatcgcccacaaaagggggggcacgagggacgagcttagctgagctgggaggagcagggtgagggtgggcgacccaggattccccctccccttcccaaataaagatgagggtactaaagttgtcttggtttttattttattattatttttttctttttccagtatactagcttgtcttttaagaaaggggatattaaaaaaaaaaaaagacaaaagtgtttttaaaaaaaagcaacacccacacctgtgtctgtatatagtcagcttatctcgtgttcaatcgtctgatctctacagagagaagtggaaaatgctgtatcaagggtgggcttagctgtgcctttccaataaagatgtgagaagcttcg

SEQ ID NO: 9636 - protein, 159 aa, Homo sapiens
MMFPQSRHSGSSHLPQQLKFTTSDSCDRIKDEFQLLQAQYHSLKLECDKLASEKSEMQRHYVMYYEMSYGLNIEMHKQAEIVKRLNGICAQVLPYLSQEHQQQVLGAIERAKQVTAPELNSIIRLHLPHSPPLLVPDTSTPTWSSPIAHKRGGTRDELS

SEQ ID NO: 9637 - DNA, 1573 bp, Homo sapiens
ggcgcaggaagcgggcgaggccgggcgcgggaggcggcggcgcagcccgcgccccccgccgcgattgacatgatgtttccacaaagcaggcattcgggctcctcgcacctaccccagcaactcaaattcaccacctcggactcctgcgaccgcatcaaagacgaatttcagctactgcaagctcagtaccacagcctcaagctcgaatgtgacaagttggccagtgagaagtcagagatgcagcgtcactatgtgatgtactacgagatgtcctacggcttgaacatcgagatgcacaaacaggctgagatcgtcaaaaggctgaacgggatttgtgcccaggtcctgccctacctctcccaagagcaccagcagcaggtcttgggagccattgagagggccaagcaggtcaccgctcccgagctgaactctatcatccgacagcagctccaagcccaccagctgtcccagctgcaggccctggccctgcccttgaccccactacccgtggggctgcagccgccttcgctgccggcggtcagcgcaggcaccggcctcctctcgctgtccgcgctgggttcccaggcccacctctccaaggaagacaagaacgggcacgatggtgacacccaccaggaggatgatggcgagaagtcggattagcagggggccgggacagggaggttgggaggggggacagaggggagacagaggcacggagagaaaggaatgtttagcacaagacacagcggagctcgggattggctaaactcccatagtatttatggtggccgccggcgggggccccagcccagcttgcaggccacctctagctttcttcctaccccattcccggcttccctcctcctcccctgcagcctggttaggtggatacctgccctgacatgtgaggcaagctaaggcctggagggtcagatgggagaccaggtcccaagggagcaagacctcgcgaagcgcagcagccccggcccttcccccgttttgaacatgtgtaaccgacagtctgcctgggccacagccctctcaccctggtactgcatgcacgcaatgctagctgcccctttcccgtcctgggcaccccgagtctcccccgaccccgggtcccaggtatgctcccacctccacctgccccactcaccacctctgctagttccagacacctccacgcccacctggtcctctcccatcgcccacaaaagggggggcacgagggacgagcttagctgagctgggaggagcagggtgagggtgggcgacccaggattccccctccccttcccaaataaagatgagggtactaaagttgtcttggtttttattttattattatttttttctttttccagtatactagcttgtcttttaagaaaggggatattaaaaaaaaaaaaagacaaaagtgtttttaaaaaaaagcaacacccacacctgtgtctgtatatagtcagcttatctcgtgttcaatcgtctgatctctacagagagaagtggaaaatgctgtatcaagggtgggcttagctgtgcctttccaataaagatgtgagaagcttcg

SEQ ID NO: 9638 - protein, 197 aa, Homo sapiens; identical to SEQ ID NO: 1497

SEQ ID NO: 9639 - DNA, 1705 bp, Homo sapiens
ggaagcggggcccggggcgcgccggggccgggcgcgcggggagggggcgcaggaagcgggcgaggccgggcgcgggaggcggcggcggccccgggagctgccgatcggcgccgggacaaaggcgcggccgcccggcgcccccagcagcccgagccggggcgcacagccggggcgcagcccgcgccccccgccgcgattgacatgatgtttccacaaagcaggcattcgggctcctcgcacctaccccagcaactcaaattcaccacctcggactcctgcgaccgcatcaaagacgaatttcagctactgcaagctcagtaccacagcctcaagctcgaatgtgacaagttggccagtgagaagtcagagatgcagcgtcactatgtgatgtactacgagatgtcctacggcttgaacatcgagatgcacaaacaggctgagatcgtcaaaaggctgaacgggatttgtgcccaggtcctgccctacctctcccaagagcaccagcagcaggtcttgggagccattgagagggccaagcaggtcaccgctcccgagctgaactctatcatccgacagcagctccaagcccaccagctgtcccagctgcaggccctggccctgcccttgaccccactacccgtggggctgcagccgccttcgctgccggcggtcagcgcaggcaccggcctcctctcgctgtccgcgctgggttcccaggcccacctctccaaggaagacaagaacgggcacgatggtgacacccaccaggaggatgatggcgagaagtcggattagcagggggccgggacagggaggttgggaggggggacagaggggagacagaggcacggagagaaaggaatgtttagcacaagacacagcggagctcgggattggctaaactcccatagtatttatggtggccgccggcgggggccccagcccagcttgcaggccacctctagctttcttcctaccccattcccggcttccctcctcctcccctgcagcctggttaggtggatacctgccctgacatgtgaggcaagctaaggcctggagggtcagatgggagaccaggtcccaagggagcaagacctcgcgaagcgcagcagccccggcccttcccccgttttgaacatgtgtaaccgacagtctgcctgggccacagccctctcaccctggtactgcatgcacgcaatgctagctgcccctttcccgtcctgggcaccccgagtctcccccgaccccgggtcccaggtatgctcccacctccacctgccccactcaccacctctgctagttccagacacctccacgcccacctggtcctctcccatcgcccacaaaagggggggcacgagggacgagcttagctgagctgggaggagcagggtgagggtgggcgacccaggattccccctccccttcccaaataaagatgagggtactaaagttgtcttggtttttattttattattatttttttctttttccagtatactagcttgtcttttaagaaaggggatattaaaaaaaaaaaaagacaaaagtgtttttaaaaaaaagcaacacccacacctgtgtctgtatatagtcagcttatctcgtgttcaatcgtctgatctctacagagagaagtggaaaatgctgtatcaagggtgggcttagctgtgcctttccaataaagatgtgagaagcttcg

SEQ ID NO: 9640 - protein, 197 aa, Homo sapiens; identical to SEQ ID NO: 1497

SEQ ID NO: 9641 - DNA, 1663 bp, Homo sapiens
ccgagccgcggccactgccggcgtcgccgccattagacaatagcggtggggccggggagcggggaggcgggcggcggggaggggcggggaggggcgccgggcgcgcaggaagcggggcgcacagccggggcgcagcccgcgccccccgccgcgattgacatgatgtttccacaaagcaggcattcgggctcctcgcacctaccccagcaactcaaattcaccacctcggactcctgcgaccgcatcaaagacgaatttcagctactgcaagctcagtaccacagcctcaagctcgaatgtgacaagttggccagtgagaagtcagagatgcagcgtcactatgtgatgtactacgagatgtcctacggcttgaacatcgagatgcacaaacaggctgagatcgtcaaaaggctgaacgggatttgtgcccaggtcctgccctacctctcccaagagcaccagcagcaggtcttgggagccattgagagggccaagcaggtcaccgctcccgagctgaactctatcatccgacagcagctccaagcccaccagctgtcccagctgcaggccctggccctgcccttgaccccactacccgtggggctgcagccgccttcgctgccggcggtcagcgcaggcaccggcctcctctcgctgtccgcgctgggttcccaggcccacctctccaaggaagacaagaacgggcacgatggtgacacccaccaggaggatgatggcgagaagtcggattagcagggggccgggacagggaggttgggaggggggacagaggggagacagaggcacggagagaaaggaatgtttagcacaagacacagcggagctcgggattggctaaactcccatagtatttatggtggccgccggcgggggccccagcccagcttgcaggccacctctagctttcttcctaccccattcccggcttccctcctcctcccctgcagcctggttaggtggatacctgccctgacatgtgaggcaagctaaggcctggagggtcagatgggagaccaggtcccaagggagcaagacctcgcgaagcgcagcagccccggcccttcccccgttttgaacatgtgtaaccgacagtctgcctgggccacagccctctcaccctggtactgcatgcacgcaatgctagctgcccctttcccgtcctgggcaccccgagtctcccccgaccccgggtcccaggtatgctcccacctccacctgccccactcaccacctctgctagttccagacacctccacgcccacctggtcctctcccatcgcccacaaaagggggggcacgagggacgagcttagctgagctgggaggagcagggtgagggtgggcgacccaggattccccctccccttcccaaataaagatgagggtactaaagttgtcttggtttttattttattattatttttttctttttccagtatactagcttgtcttttaagaaaggggatattaaaaaaaaaaaaagacaaaagtgtttttaaaaaaaagcaacacccacacctgtgtctgtatatagtcagcttatctcgtgttcaatcgtctgatctctacagagagaagtggaaaatgctgtatcaagggtgggcttagctgtgcctttccaataaagatgtgagaagcttcg

SEQ ID NO: 9642 - protein, 197 aa, Homo sapiens; identical to SEQ ID NO: 1497

SEQ ID NO: 9643 - DNA, 1541 bp, Homo sapiens
ctccgcagcagccgagccgcggccactgccggcgtcgccgccattagacaatagcgccctacagggctcctcgcacctaccccagcaactcaaattcaccacctcggactcctgcgaccgcatcaaagacgaatttcagctactgcaagctcagtaccacagcctcaagctcgaatgtgacaagttggccagtgagaagtcagagatgcagcgtcactatgtgatgtactacgagatgtcctacggcttgaacatcgagatgcacaaacaggctgagatcgtcaaaaggctgaacgggatttgtgcccaggtcctgccctacctctcccaagagcaccagcagcaggtcttgggagccattgagagggccaagcaggtcaccgctcccgagctgaactctatcatccgacagcagctccaagcccaccagctgtcccagctgcaggccctggccctgcccttgaccccactacccgtggggctgcagccgccttcgctgccggcggtcagcgcaggcaccggcctcctctcgctgtccgcgctgggttcccaggcccacctctccaaggaagacaagaacgggcacgatggtgacacccaccaggaggatgatggcgagaagtcggattagcagggggccgggacagggaggttgggaggggggacagaggggagacagaggcacggagagaaaggaatgtttagcacaagacacagcggagctcgggattggctaaactcccatagtatttatggtggccgccggcgggggccccagcccagcttgcaggccacctctagctttcttcctaccccattcccggcttccctcctcctcccctgcagcctggttaggtggatacctgccctgacatgtgaggcaagctaaggcctggagggtcagatgggagaccaggtcccaagggagcaagacctcgcgaagcgcagcagccccggcccttcccccgttttgaacatgtgtaaccgacagtctgcctgggccacagccctctcaccctggtactgcatgcacgcaatgctagctgcccctttcccgtcctgggcaccccgagtctcccccgaccccgggtcccaggtatgctcccacctccacctgccccactcaccacctctgctagttccagacacctccacgcccacctggtcctctcccatcgcccacaaaagggggggcacgagggacgagcttagctgagctgggaggagcagggtgagggtgggcgacccaggattccccctccccttcccaaataaagatgagggtactaaagttgtcttggtttttattttattattatttttttctttttccagtatactagcttgtcttttaagaaaggggatattaaaaaaaaaaaaagacaaaagtgtttttaaaaaaaagcaacacccacacctgtgtctgtatatagtcagcttatctcgtgttcaatcgtctgatctctacagagagaagtggaaaatgctgtatcaagggtgggcttagctgtgcctttccaataaagatgtgagaagcttcg

SEQ ID NO: 9644 - protein, 141 aa, Homo sapiens; identical to SEQ ID NO: 9622

SEQ ID NO: 9645 - DNA, 1540 bp, Homo sapiens
ctccgcagcagccgagccgcggccactgccggcgtcgccgccattagacaatagcggcattcgggctcctcgcacctaccccagcaactcaaattcaccacctcggactcctgcgaccgcatcaaagacgaatttcagctactgcaagctcagtaccacagcctcaagctcgaatgtgacaagttggccagtgagaagtcagagatgcagcgtcactatgtgatgtactacgagatgtcctacggcttgaacatcgagatgcacaaacaggctgagatcgtcaaaaggctgaacgggatttgtgcccaggtcctgccctacctctcccaagagcaccagcagcaggtcttgggagccattgagagggccaagcaggtcaccgctcccgagctgaactctatcatccgacagcagctccaagcccaccagctgtcccagctgcaggccctggccctgcccttgaccccactacccgtggggctgcagccgccttcgctgccggcggtcagcgcaggcaccggcctcctctcgctgtccgcgctgggttcccaggcccacctctccaaggaagacaagaacgggcacgatggtgacacccaccaggaggatgatggcgagaagtcggattagcagggggccgggacagggaggttgggaggggggacagaggggagacagaggcacggagagaaaggaatgtttagcacaagacacagcggagctcgggattggctaaactcccatagtatttatggtggccgccggcgggggccccagcccagcttgcaggccacctctagctttcttcctaccccattcccggcttccctcctcctcccctgcagcctggttaggtggatacctgccctgacatgtgaggcaagctaaggcctggagggtcagatgggagaccaggtcccaagggagcaagacctcgcgaagcgcagcagccccggcccttcccccgttttgaacatgtgtaaccgacagtctgcctgggccacagccctctcaccctggtactgcatgcacgcaatgctagctgcccctttcccgtcctgggcaccccgagtctcccccgaccccgggtcccaggtatgctcccacctccacctgccccactcaccacctctgctagttccagacacctccacgcccacctggtcctctcccatcgcccacaaaagggggggcacgagggacgagcttagctgagctgggaggagcagggtgagggtgggcgacccaggattccccctccccttcccaaataaagatgagggtactaaagttgtcttggtttttattttattattatttttttctttttccagtatactagcttgtcttttaagaaaggggatattaaaaaaaaaaaaagacaaaagtgtttttaaaaaaaagcaacacccacacctgtgtctgtatatagtcagcttatctcgtgttcaatcgtctgatctctacagagagaagtggaaaatgctgtatcaagggtgggcttagctgtgcctttccaataaagatgtgagaagcttcg

SEQ ID NO: 9646 - protein, 141 aa, Homo sapiens; identical to SEQ ID NO: 9622

SEQ ID NO: 9647 - DNA, 1605 bp, Homo sapiens
caagaatggcttccctcaggaaggcggcattaccgctgcctttctgcagaaaaggaaactaaggctcagcaagaaccaccgcccagccagagccaaggtcacagagcacgtccgtggcacgcgtccagggctcctcgcacctaccccagcaactcaaattcaccacctcggactcctgcgaccgcatcaaagacgaatttcagctactgcaagctcagtaccacagcctcaagctcgaatgtgacaagttggccagtgagaagtcagagatgcagcgtcactatgtgatgtactacgagatgtcctacggcttgaacatcgagatgcacaaacaggctgagatcgtcaaaaggctgaacgggatttgtgcccaggtcctgccctacctctcccaagagcaccagcagcaggtcttgggagccattgagagggccaagcaggtcaccgctcccgagctgaactctatcatccgacagcagctccaagcccaccagctgtcccagctgcaggccctggccctgcccttgaccccactacccgtggggctgcagccgccttcgctgccggcggtcagcgcaggcaccggcctcctctcgctgtccgcgctgggttcccaggcccacctctccaaggaagacaagaacgggcacgatggtgacacccaccaggaggatgatggcgagaagtcggattagcagggggccgggacagggaggttgggaggggggacagaggggagacagaggcacggagagaaaggaatgtttagcacaagacacagcggagctcgggattggctaaactcccatagtatttatggtggccgccggcgggggccccagcccagcttgcaggccacctctagctttcttcctaccccattcccggcttccctcctcctcccctgcagcctggttaggtggatacctgccctgacatgtgaggcaagctaaggcctggagggtcagatgggagaccaggtcccaagggagcaagacctcgcgaagcgcagcagccccggcccttcccccgttttgaacatgtgtaaccgacagtctgcctgggccacagccctctcaccctggtactgcatgcacgcaatgctagctgcccctttcccgtcctgggcaccccgagtctcccccgaccccgggtcccaggtatgctcccacctccacctgccccactcaccacctctgctagttccagacacctccacgcccacctggtcctctcccatcgcccacaaaagggggggcacgagggacgagcttagctgagctgggaggagcagggtgagggtgggcgacccaggattccccctccccttcccaaataaagatgagggtactaaagttgtcttggtttttattttattattatttttttctttttccagtatactagcttgtcttttaagaaaggggatattaaaaaaaaaaaaagacaaaagtgtttttaaaaaaaagcaacacccacacctgtgtctgtatatagtcagcttatctcgtgttcaatcgtctgatctctacagagagaagtggaaaatgctgtatcaagggtgggcttagctgtgcctttccaataaagatgtgagaagcttcg

SEQ ID NO: 9648 - protein, 141 aa, Homo sapiens; identical to SEQ ID NO: 9622

SEQ ID NO: 9649 - DNA, 1964 bp, Homo sapiens
attctcccggctggtttttctgcagaactgtccccaccatctgacctgccaggaattcagcttgtgaatttgtctctgtctgtctccaggcaccaccaccagggcagggacccacccccgccccgccccaccccagggccctggagcagcggggcctggcacacagtaggcgttctataaatgtgtcacaagaatggcttccctcaggaaggcggcattaccgctgcctttctgcagaaaaggaaactaaggctcagcaagaaccaccgcccagccagagccaaggtcacagagcacgtccgtggcacgcgtccaggtcgtgccacagcagggccggcggcttcgacgcgggcagccgggtcccttttctttgacagatggggaaaccgaggcccggccggctgccggggctcctcgcacctaccccagcaactcaaattcaccacctcggactcctgcgaccgcatcaaagacgaatttcagctactgcaagctcagtaccacagcctcaagctcgaatgtgacaagttggccagtgagaagtcagagatgcagcgtcactatgtgatgtactacgagatgtcctacggcttgaacatcgagatgcacaaacaggctgagatcgtcaaaaggctgaacgggatttgtgcccaggtcctgccctacctctcccaagagcaccagcagcaggtcttgggagccattgagagggccaagcaggtcaccgctcccgagctgaactctatcatccgagtatgtatggggacctgggcgggtgggcgggggacaggtgggccccaggcagctaatgttcccctcccccgccctgcagcagcagctccaagcccaccagctgtcccagctgcaggccctggccctgcccttgaccccactacccgtggggctgcagccgccttcgctgccggcggtcagcgcaggcaccggcctcctctcgctgtccgcgctgggttcccaggcccacctctccaaggaagacaagaacgggcacgatggtgacacccaccaggaggatgatggcgagaagtcggattagcagggggccgggacagggaggttgggaggggggacagaggggagacagaggcacggagagaaaggaatgtttagcacaagacacagcggagctcgggattggctaaactcccatagtatttatggtggccgccggcgggggccccagcccagcttgcaggccacctctagctttcttcctaccccattcccggcttccctcctcctcccctgcagcctggttaggtggatacctgccctgacatgtgaggcaagctaaggcctggagggtcagatgggagaccaggtcccaagggagcaagacctcgcgaagcgcagcagccccggcccttcccccgttttgaacatgtgtaaccgacagtctgcctgggccacagccctctcaccctggtactgcatgcacgcaatgctagctgcccctttcccgtcctgggcaccccgagtctcccccgaccccgggtcccaggtatgctcccacctccacctgccccactcaccacctctgctagttccagacacctccacgcccacctggtcctctcccatcgcccacaaaagggggggcacgagggacgagcttagctgagctgggaggagcagggtgagggtgggcgacccaggattccccctccccttcccaaataaagatgagggtactaaagttgtcttggtttttattttattattatttttttctttttccagtatactagcttgtcttttaagaaaggggatattaaaaaaaaaaaaagacaaaagtgtttttaaaaaaaagcaacacccacacctgtgtctgtatatagtcagcttatctcgtgttcaatcgtctgatctctacagagagaagtggaaaatgctgtatcaagggtgggcttagctgtgcctttccaataaagatgtgagaagcttcg

SEQ ID NO: 9650 - protein, 278 aa, Homo sapiens
MCHKNGFPQEGGITAAFLQKRKLRLSKNHRPARAKVTEHVRGTRPGRATAGPAASTRAAGSLFFDRWGNRGPAGCRGSSHLPQQLKFTTSDSCDRIKDEFQLLQAQYHSLKLECDKLASEKSEMQRHYVMYYEMSYGLNIEMHKQAEIVKRLNGICAQVLPYLSQEHQQQVLGAIERAKQVTAPELNSIIRVCMGTWAGGRGTGGPQAANVPLPRPAAAAPSPPAVPAAGPGPALDPTTRGAAAAFAAGGQRRHRPPLAVRAGFPGPPLQGRQERARW

SEQ ID NO: 9651 - DNA, 1885 bp, Homo sapiens
attctcccggctggtttttctgcagaactgtccccaccatctgacctgccaggaattcagcttgtgaatttgtctctgtctgtctccaggcaccaccaccagggcagggacccacccccgccccgccccaccccagggccctggagcagcggggcctggcacacagtaggcgttctataaatgtgtcacaagaatggcttccctcaggaaggcggcattaccgctgcctttctgcagaaaaggaaactaaggctcagcaagaaccaccgcccagccagagccaaggtcacagagcacgtccgtggcacgcgtccaggtcgtgccacagcagggccggcggcttcgacgcgggcagccgggtcccttttctttgacagatggggaaaccgaggcccggccggctgccggggctcctcgcacctaccccagcaactcaaattcaccacctcggactcctgcgaccgcatcaaagacgaatttcagctactgcaagctcagtaccacagcctcaagctcgaatgtgacaagttggccagtgagaagtcagagatgcagcgtcactatgtgatgtactacgagatgtcctacggcttgaacatcgagatgcacaaacaggctgagatcgtcaaaaggctgaacgggatttgtgcccaggtcctgccctacctctcccaagagcaccagcagcaggtcttgggagccattgagagggccaagcaggtcaccgctcccgagctgaactctatcatccgacagcagctccaagcccaccagctgtcccagctgcaggccctggccctgcccttgaccccactacccgtggggctgcagccgccttcgctgccggcggtcagcgcaggcaccggcctcctctcgctgtccgcgctgggttcccaggcccacctctccaaggaagacaagaacgggcacgatggtgacacccaccaggaggatgatggcgagaagtcggattagcagggggccgggacagggaggttgggaggggggacagaggggagacagaggcacggagagaaaggaatgtttagcacaagacacagcggagctcgggattggctaaactcccatagtatttatggtggccgccggcgggggccccagcccagcttgcaggccacctctagctttcttcctaccccattcccggcttccctcctcctcccctgcagcctggttaggtggatacctgccctgacatgtgaggcaagctaaggcctggagggtcagatgggagaccaggtcccaagggagcaagacctcgcgaagcgcagcagccccggcccttcccccgttttgaacatgtgtaaccgacagtctgcctgggccacagccctctcaccctggtactgcatgcacgcaatgctagctgcccctttcccgtcctgggcaccccgagtctcccccgaccccgggtcccaggtatgctcccacctccacctgccccactcaccacctctgctagttccagacacctccacgcccacctggtcctctcccatcgcccacaaaagggggggcacgagggacgagcttagctgagctgggaggagcagggtgagggtgggcgacccaggattccccctccccttcccaaataaagatgagggtactaaagttgtcttggtttttattttattattatttttttctttttccagtatactagcttgtcttttaagaaaggggatattaaaaaaaaaaaaagacaaaagtgtttttaaaaaaaagcaacacccacacctgtgtctgtatatagtcagcttatctcgtgttcaatcgtctgatctctacagagagaagtggaaaatgctgtatcaagggtgggcttagctgtgcctttccaataaagatgtgagaagcttcg

SEQ ID NO: 9652 - protein, 264 aa, Homo sapiens; identical to SEQ ID NO: 1499

SEQ ID NO: 9653 - DNA, 652 bp, Homo sapiens
agcagcaggtcttgggagccattgagagggccaagcaggcacggagagaaaggaatgtttagcacaagacacagcggagctcgggattggctaaactcccatagtatttatggtggccgccggcgggggccccagcccagcttgcaggccacctctagctttcttcctaccccattcccggcttccctcctcctcccctgcagcctggttaggtggatacctgccctgacatgtgaggcaagctaaggcctggagggtcagatgggagaccaggtcccaagggagcaagacctcgcgaagcgcagcagccccggcccttcccccgttttgaacatgtgtaaccgacagtctgcctgggccacagccctctcaccctggtactgcatgcacgcaatgctagctgcccctttcccgtcctgggcaccccgagtctcccccgaccccgggtcccaggtatgctcccacctccacctgccccactcaccacctctgctagttccagacacctccacgcccacctggtcctctcccatcgcccacaaaagggggggcacgagggacgagcttagctgagctgggaggagcagggtgagggtgggcgacccaggattccccctccccttcccaaataaagatgagggtactaaagttg

SEQ ID NO: 9654 - protein, 103 aa, Homo sapiens; identical to SEQ ID NO: 9596

SEQ ID NO: 9655 - DNA, 990 bp, Homo sapiens
gcctctcctctcccccgacccccttccagcaccagcagcaggtcttgggagccattgagagggccaagcaggtcaccgctcccgagctgaactctatcatccgacagcagctccaagcccaccagctgtcccagctgcaggccctggccctgcccttgaccccactacccgtggggctgcagccgccttcgctgccggcggtcagcgcaggcaccggcctcctctcgctgtccgcgctgggttcccaggcccacctctccaaggaagacaagaacgggcacgatggtgacacccaccaggaggatgatggcgagaagtcggattagcagggggccgggacagggaggttgggaggggggacagaggggagacagaggcacggagagaaaggaatgtttagcacaagacacagcggagctcgggattggctaaactcccatagtatttatggtggccgccggcgggggccccagcccagcttgcaggccacctctagctttcttcctaccccattcccggcttccctcctcctcccctgcagcctggttaggtggatacctgccctgacatgtgaggcaagctaaggcctggagggtcagatgggagaccaggtcccaagggagcaagacctcgcgaagcgcagcagccccggcccttcccccgttttgaacatgtgtaaccgacagtctgcctgggccacagccctctcaccctggtactgcatgcacgcaatgctagctgcccctttcccgtcctgggcaccccgagtctcccccgaccccgggtcccaggtatgctcccacctccacctgccccactcaccacctctgctagttccagacacctccacgcccacctggtcctctcccatcgcccacaaaagggggggcacgagggacgagcttagctgagctgggaggagcagggtgagggtgggcgacccaggattccccctccccttcccaaataaagatgagggtactaaagttg

SEQ ID NO: 9656 - protein, 103 aa, Homo sapiens; identical to SEQ ID NO: 9596

SEQ ID NO: 9657 - DNA, 1292 bp, Homo sapiens
cgacccccgaggaatgtgcagtctggcctcatcctgcacttacctcactctaagctgcaggcgacagccggtgtccagccccacctttgccactgactggctgccctcgggcccgaacacggctttgctcatcccaccctggccagacctagcccctcttagaagccgcaagtggcagggctgggccgggccccgcgcaggcctcctgtggctagcctgcacctgccacccgcccaggactgaagccggcttcatctgtgtgttccaggctgagatcgtcaaaaggctgaacgggatttgtgcccaggtcctgccctacctctcccaagagcaccagcagcaggtcttgggagccattgagagggccaagcaggtcaccgctcccgagctgaactctatcatccgacagcagctccaagcccaccagctgtcccagctgcaggccctggccctgcccttgaccccactacccgtggggctgcagccgccttcgctgccggcggtcagcgcaggcaccggcctcctctcgctgtccgcgctgggttcccaggcccacctctccaaggaagacaagaacgggcacgatggtgacacccaccaggaggatgatggcgagaagtcggattagcagggggccgggacagggaggttgggaggggggacagaggggagacagaggcacggagagaaaggaatgtttagcacaagacacagcggagctcgggattggctaaactcccatagtatttatggtggccgccggcgggggccccagcccagcttgcaggccacctctagctttcttcctaccccattcccggcttccctcctcctcccctgcagcctggttaggtggatacctgccctgacatgtgaggcaagctaaggcctggagggtcagatgggagaccaggtcccaagggagcaagacctcgcgaagcgcagcagccccggcccttcccccgttttgaacatgtgtaaccgacagtctgcctgggccacagccctctcaccctggtactgcatgcacgcaatgctagctgcccctttcccgtcctgggcaccccgagtctcccccgaccccgggtcccaggtatgctcccacctccacctgccccactcaccacctctgctagttccagacacctccacgcccacctggtcctctcccatcgcccacaaaagggggggcacgagggacgagcttagctgagctgggaggagcagggtgagggtgggcgacccaggattccccctccccttcccaaataaagatgagggtactaaagttg

SEQ ID NO: 9658 - protein, 204 aa, Homo sapiens; identical to SEQ ID NO: 9608

SEQ ID NO: 9659 - DNA, 1849 bp, Homo sapiens
cccttggcctggccctcgagcagcgatgctggggtctcagcccagtacccaaatctcccagactgtgggggaggcagagccagaccctgaccctcccagccagaagaatagggctggggtcagagagagggacctaggacctgcctgaggaagactatatggagaaatggggcacacagctggggtcttgcaggatgagtaggagttcaccagacagagacagagaaactacgtgaaggcctgggaatgaacttggttttcccccaggggtgacagggagccatgggagggtttagagcaggggaggggcagggtgagatctggggcttggggtgggggtagctgctggccccagagccagcaggctttgtttacccctcactgtttatacctaggcaggcaaacttccctggcgtctgggcccacccgcagacaagacatagaaagatacaagattaggagccctggaatgcgtgttctcgcggtgcacatggagtgggggaggagccaggccagggctagggacctaaagtgcccccagtctccatccgcagccccagcggccccctgcccctctccagggcgggctgggatgctgggtgtgggcgtctctccctcctctttccctcccacctgcctctcctttctttcctgccctcagctgtctcttgctgtctcccccctttgtctgtctctgccactcccctatctctttgtctccgtgtccccccatccttccccacccccatctcccgctccccctctctctcccccatacagtactacgagatgtcctacggcttgaacatcgagatgcacaaacaggctgagatcgtcaaaaggctgaacgggatttgtgcccaggtcctgccctacctctcccaagagcaccagcagcaggtcttgggagccattgagagggccaagcaggtcaccgctcccgagctgaactctatcatccgacagcagctccaagcccaccagctgtcccagctgcaggccctggccctgcccttgaccccactacccgtggggctgcagccgccttcgctgccggcggtcagcgcaggcaccggcctcctctcgctgtccgcgctgggttcccaggcccacctctccaaggaagacaagaacgggcacgatggtgacacccaccaggaggatgatggcgagaagtcggattagcagggggccgggacagggaggttgggaggggggacagaggggagacagaggcacggagagaaaggaatgtttagcacaagacacagcggagctcgggattggctaaactcccatagtatttatggtggccgccggcgggggccccagcccagcttgcaggccacctctagctttcttcctaccccattcccggcttccctcctcctcccctgcagcctggttaggtggatacctgccctgacatgtgaggcaagctaaggcctggagggtcagatgggagaccaggtcccaagggagcaagacctcgcgaagcgcagcagccccggcccttcccccgttttgaacatgtgtaaccgacagtctgcctgggccacagccctctcaccctggtactgcatgcacgcaatgctagctgcccctttcccgtcctgggcaccccgagtctcccccgaccccgggtcccaggtatgctcccacctccacctgccccactcaccacctctgctagttccagacacctccacgcccacctggtcctctcccatcgcccacaaaagggggggcacgagggacgagcttagctgagctgggaggagcagggtgagggtgggcgacccaggattccccctccccttcccaaataaagatgagggtactaaagttg

SEQ ID NO: 9660 - protein, 131 aa, Homo sapiens; identical to SEQ ID NO: 9612

SEQ ID NO: 9661 - DNA, 512 bp, Homo sapiens
gggctcctcgcacctaccccagcaactcaaattcaccacctcggactcctgcgaccgcatcaaagacgaatttcagctactgcaagctcagtaccacagcctcaagctcgaatgtgacaagttggccagtgagaagtcagagatgcagcgtcactatgtgatgtactacgagatgtcctacggcttgaacatcgagatgcacaaacagtctgcctgggccacagccctctcaccctggtactgcatgcacgcaatgctagctgcccctttcccgtcctgggcaccccgagtctcccccgaccccgggtcccaggtatgctcccacctccacctgccccactcaccacctctgctagttccagacacctccacgcccacctggtcctctcccatcgcccacaaaagggggggcacgagggacgagcttagctgagctgggaggagcagggtgagggtgggcgacccaggattccccctccccttcccaaataaagatgagggtactaaagttg

SEQ ID NO: 9662 - protein, 96 aa, Homo sapiens; identical to SEQ ID NO: 9614

SEQ ID NO: 9663 - DNA, 382 bp, Homo sapiens
gggctcctcgcacctaccccagcaactcaaattcaccaccccggcccttcccccgttttgaacatgtgtaaccgacagtctgcctgggccacagccctctcaccctggtactgcatgcacgcaatgctagctgcccctttcccgtcctgggcaccccgagtctcccccgaccccgggtcccaggtatgctcccacctccacctgccccactcaccacctctgctagttccagacacctccacgcccacctggtcctctcccatcgcccacaaaagggggggcacgagggacgagcttagctgagctgggaggagcagggtgagggtgggcgacccaggattccccctccccttcccaaataaagatgagggtactaaagttg

SEQ ID NO: 9664 - protein, 79 aa, Homo sapiens; identical to SEQ ID NO: 9616

SEQ ID NO: 9665 - DNA, 683 bp, Homo sapiens
agggctcctcgcacctaccccagcaactcaaattcaccacctcggactcctgcgaccgcatcaaagacgaatttcagctactgcaagctcagtaccacagcctcaagctcgaatgtgacaagttggccagtgagaagtcagagatgcagcgtcactatgtgatgtactacgagatgtcctacggcttgaacatcgagatgcacaaacaggctgagatcgtcaaaaggctgaacgggatttgtgcccaggtcctgccctgacatgtgaggcaagctaaggcctggagggtcagatgggagaccaggtcccaagggagcaagacctcgcgaagcgcagcagccccggcccttcccccgttttgaacatgtgtaaccgacagtctgcctgggccacagccctctcaccctggtactgcatgcacgcaatgctagctgcccctttcccgtcctgggcaccccgagtctcccccgaccccgggtcccaggtatgctcccacctccacctgccccactcaccacctctgctagttccagacacctccacgcccacctggtcctctcccatcgcccacaaaagggggggcacgagggacgagcttagctgagctgggaggagcagggtgagggtgggcgacccaggattccccctccccttcccaaataaagatgagggtactaaagttg

SEQ ID NO: 9666 - protein, 38 aa, Homo sapiens; identical to SEQ ID NO: 9618

SEQ ID NO: 9667 - DNA, 1378 bp, Homo sapiens
ggggtcgcgccaggggccgtaaacacgggcccaggaagtggggcaggagggggggcgccgcagctgcgcggccgctccctcctagccggcccttgaggggggtccagcccacgcctgggcctgacccgggccgccccatccctacagggctcctcgcacctaccccagcaactcaaattcaccacctcggactcctgcgaccgcatcaaagacgaatttcagctactgcaagctcagtaccacagcctcaagctcgaatgtgacaagttggccagtgagaagtcagagatgcagcgtcactatgtgatgtactacgagatgtcctacggcttgaacatcgagatgcacaaacaggctgagatcgtcaaaaggctgaacgggatttgtgcccaggtcctgccctacctctcccaagagcaccagcagcaggtcttgggagccattgagagggccaagcaggtcaccgctcccgagctgaactctatcatccgacagcagctccaagcccaccagctgtcccagctgcaggccctggccctgcccttgaccccactacccgtggggctgcagccgccttcgctgccggcggtcagcgcaggcaccggcctcctctcgctgtccgcgctgggttcccaggcccacctctccaaggaagacaagaacgggcacgatggtgacacccaccaggaggatgatggcgagaagtcggattagcagggggccgggacagggaggttgggaggggggacagaggggagacagaggcacggagagaaaggaatgtttagcacaagacacagcggagctcgggattggctaaactcccatagtatttatggtggccgccggcgggggccccagcccagcttgcaggccacctctagctttcttcctaccccattcccggcttccctcctcctcccctgcagcctggttaggtggatacctgccctgacatgtgaggcaagctaaggcctggagggtcagatgggagaccaggtcccaagggagcaagacctcgcgaagcgcagcagccccggcccttcccccgttttgaacatgtgtaaccgacagtctgcctgggccacagccctctcaccctggtactgcatgcacgcaatgctagctgcccctttcccgtcctgggcaccccgagtctcccccgaccccgggtcccaggtatgctcccacctccacctgccccactcaccacctctgctagttccagacacctccacgcccacctggtcctctcccatcgcccacaaaagggggggcacgagggacgagcttagctgagctgggaggagcagggtgagggtgggcgacccaggattccccctccccttcccaaataaagatgagggtactaaagttg

SEQ ID NO: 9668 - protein, 141 aa, Homo sapiens; identical to SEQ ID NO: 9622

SEQ ID NO: 9669 - DNA, 1476 bp, Homo sapiens
ccaacccgccgggacagtcagggcctcggacggccttggcctcgggcctggggcgctccggaagccccgcgaggcacctctagcccggggatcctttgggggcctgtggtggggggggtgatccgaggcgcacccctcccggaagagcgtgtccccgaggaagggcgctgggaatctggggttgggcccccccggaagatttcgagcaccgagagagagacccctcccccaagaggactttgcagggctcctcgcacctaccccagcaactcaaattcaccacctcggactcctgcgaccgcatcaaagacgaatttcagctactgcaagctcagtaccacagcctcaagctcgaatgtgacaagttggccagtgagaagtcagagatgcagcgtcactatgtgatgtactacgagatgtcctacggcttgaacatcgagatgcacaaacaggctgagatcgtcaaaaggctgaacgggatttgtgcccaggtcctgccctacctctcccaagagcaccagcagcaggtcttgggagccattgagagggccaagcaggtcaccgctcccgagctgaactctatcatccgacagcagctccaagcccaccagctgtcccagctgcaggccctggccctgcccttgaccccactacccgtggggctgcagccgccttcgctgccggcggtcagcgcaggcaccggcctcctctcgctgtccgcgctgggttcccaggcccacctctccaaggaagacaagaacgggcacgatggtgacacccaccaggaggatgatggcgagaagtcggattagcagggggccgggacagggaggttgggaggggggacagaggggagacagaggcacggagagaaaggaatgtttagcacaagacacagcggagctcgggattggctaaactcccatagtatttatggtggccgccggcgggggccccagcccagcttgcaggccacctctagctttcttcctaccccattcccggcttccctcctcctcccctgcagcctggttaggtggatacctgccctgacatgtgaggcaagctaaggcctggagggtcagatgggagaccaggtcccaagggagcaagacctcgcgaagcgcagcagccccggcccttcccccgttttgaacatgtgtaaccgacagtctgcctgggccacagccctctcaccctggtactgcatgcacgcaatgctagctgcccctttcccgtcctgggcaccccgagtctcccccgaccccgggtcccaggtatgctcccacctccacctgccccactcaccacctctgctagttccagacacctccacgcccacctggtcctctcccatcgcccacaaaagggggggcacgagggacgagcttagctgagctgggaggagcagggtgagggtgggcgacccaggattccccctccccttcccaaataaagatgagggtactaaagttg

SEQ ID NO: 9670 - protein, 141 aa, Homo sapiens; identical to SEQ ID NO: 9622

SEQ ID NO: 9671 - DNA, 616 bp, Homo sapiens
gccggggcgcacagccggggcgcagcccgcgccccccgccgcgattgacatgatgtttccacaaagcaggcattcgggctcctcgcacctaccccagcaaccagcttgcaggccacctctagctttcttcctaccccattcccggcttccctcctcctcccctgcagcctggttaggtggatacctgccctgacatgtgaggcaagctaaggcctggagggtcagatgggagaccaggtcccaagggagcaagacctcgcgaagcgcagcagccccggcccttcccccgttttgaacatgtgtaaccgacagtctgcctgggccacagccctctcaccctggtactgcatgcacgcaatgctagctgcccctttcccgtcctgggcaccccgagtctcccccgaccccgggtcccaggtatgctcccacctccacctgccccactcaccacctctgctagttccagacacctccacgcccacctggtcctctcccatcgcccacaaaagggggggcacgagggacgagcttagctgagctgggaggagcagggtgagggtgggcgacccaggattccccctccccttcccaaataaagatgagggtactaaagttg

SEQ ID NO: 9672 - protein, 47 aa, Homo sapiens; identical to SEQ ID NO: 9628

SEQ ID NO: 9673 - DNA, 808 bp, Homo sapiens
cgatcggcgccgggacaaaggcgcggccgcccggcgcccccagcagcccgagccggggcgcacagccggggcgcagcccgcgccccccgccgcgattgacatgatgtttccacaaagcaggcattcgggctcctcgcacctaccccagcaactcaaattcaccacctcggactcctgcgaccgcatcaaagacgaatttcagctactgcaagctcagtaccacagcctcaagctcgaatgtgacaagttggccagtgagaagtcagagatgcagcgtcactatgtgatgtactacgagatgtcctacggcttgaacatcgagatgcacaaacaggctgagatcgtcaaaaggctgaacgggatttgtgcccaggtcctgccctgacatgtgaggcaagctaaggcctggagggtcagatgggagaccaggtcccaagggagcaagacctcgcgaagcgcagcagccccggcccttcccccgttttgaacatgtgtaaccgacagtctgcctgggccacagccctctcaccctggtactgcatgcacgcaatgctagctgcccctttcccgtcctgggcaccccgagtctcccccgaccccgggtcccaggtatgctcccacctccacctgccccactcaccacctctgctagttccagacacctccacgcccacctggtcctctcccatcgcccacaaaagggggggcacgagggacgagcttagctgagctgggaggagcagggtgagggtgggcgacccaggattccccctccccttcccaaataaagatgagggtactaaagttg

SEQ ID NO: 9674 - protein, 94 aa, Homo sapiens; identical to SEQ ID NO: 9634

SEQ ID NO: 9675 - DNA, 1327 bp, Homo sapiens
ggcgcaggaagcgggcgaggccgggcgcgggaggcggcggcgcagcccgcgccccccgccgcgattgacatgatgtttccacaaagcaggcattcgggctcctcgcacctaccccagcaactcaaattcaccacctcggactcctgcgaccgcatcaaagacgaatttcagctactgcaagctcagtaccacagcctcaagctcgaatgtgacaagttggccagtgagaagtcagagatgcagcgtcactatgtgatgtactacgagatgtcctacggcttgaacatcgagatgcacaaacaggctgagatcgtcaaaaggctgaacgggatttgtgcccaggtcctgccctacctctcccaagagcaccagcagcaggtcttgggagccattgagagggccaagcaggtcaccgctcccgagctgaactctatcatccgacagcagctccaagcccaccagctgtcccagctgcaggccctggccctgcccttgaccccactacccgtggggctgcagccgccttcgctgccggcggtcagcgcaggcaccggcctcctctcgctgtccgcgctgggttcccaggcccacctctccaaggaagacaagaacgggcacgatggtgacacccaccaggaggatgatggcgagaagtcggattagcagggggccgggacagggaggttgggaggggggacagaggggagacagaggcacggagagaaaggaatgtttagcacaagacacagcggagctcgggattggctaaactcccatagtatttatggtggccgccggcgggggccccagcccagcttgcaggccacctctagctttcttcctaccccattcccggcttccctcctcctcccctgcagcctggttaggtggatacctgccctgacatgtgaggcaagctaaggcctggagggtcagatgggagaccaggtcccaagggagcaagacctcgcgaagcgcagcagccccggcccttcccccgttttgaacatgtgtaaccgacagtctgcctgggccacagccctctcaccctggtactgcatgcacgcaatgctagctgcccctttcccgtcctgggcaccccgagtctcccccgaccccgggtcccaggtatgctcccacctccacctgccccactcaccacctctgctagttccagacacctccacgcccacctggtcctctcccatcgcccacaaaagggggggcacgagggacgagcttagctgagctgggaggagcagggtgagggtgggcgacccaggattccccctccccttcccaaataaagatgagggtactaaagttg

SEQ ID NO: 9676 - protein, 197 aa, Homo sapiens; identical to SEQ ID NO: 1497

SEQ ID NO: 9677 - DNA, 1459 bp, Homo sapiens
ggaagcggggcccggggcgcgccggggccgggcgcgcggggagggggcgcaggaagcgggcgaggccgggcgcgggaggcggcggcggccccgggagctgccgatcggcgccgggacaaaggcgcggccgcccggcgcccccagcagcccgagccggggcgcacagccggggcgcagcccgcgccccccgccgcgattgacatgatgtttccacaaagcaggcattcgggctcctcgcacctaccccagcaactcaaattcaccacctcggactcctgcgaccgcatcaaagacgaatttcagctactgcaagctcagtaccacagcctcaagctcgaatgtgacaagttggccagtgagaagtcagagatgcagcgtcactatgtgatgtactacgagatgtcctacggcttgaacatcgagatgcacaaacaggctgagatcgtcaaaaggctgaacgggatttgtgcccaggtcctgccctacctctcccaagagcaccagcagcaggtcttgggagccattgagagggccaagcaggtcaccgctcccgagctgaactctatcatccgacagcagctccaagcccaccagctgtcccagctgcaggccctggccctgcccttgaccccactacccgtggggctgcagccgccttcgctgccggcggtcagcgcaggcaccggcctcctctcgctgtccgcgctgggttcccaggcccacctctccaaggaagacaagaacgggcacgatggtgacacccaccaggaggatgatggcgagaagtcggattagcagggggccgggacagggaggttgggaggggggacagaggggagacagaggcacggagagaaaggaatgtttagcacaagacacagcggagctcgggattggctaaactcccatagtatttatggtggccgccggcgggggccccagcccagcttgcaggccacctctagctttcttcctaccccattcccggcttccctcctcctcccctgcagcctggttaggtggatacctgccctgacatgtgaggcaagctaaggcctggagggtcagatgggagaccaggtcccaagggagcaagacctcgcgaagcgcagcagccccggcccttcccccgttttgaacatgtgtaaccgacagtctgcctgggccacagccctctcaccctggtactgcatgcacgcaatgctagctgcccctttcccgtcctgggcaccccgagtctcccccgaccccgggtcccaggtatgctcccacctccacctgccccactcaccacctctgctagttccagacacctccacgcccacctggtcctctcccatcgcccacaaaagggggggcacgagggacgagcttagctgagctgggaggagcagggtgagggtgggcgacccaggattccccctccccttcccaaataaagatgagggtactaaagttg

SEQ ID NO: 9678 - protein, 197 aa, Homo sapiens; identical to SEQ ID NO: 1497

SEQ ID NO: 9679 - DNA, 1417 bp, Homo sapiens
ccgagccgcggccactgccggcgtcgccgccattagacaatagcggtggggccggggagcggggaggcgggcggcggggaggggcggggaggggcgccgggcgcgcaggaagcggggcgcacagccggggcgcagcccgcgccccccgccgcgattgacatgatgtttccacaaagcaggcattcgggctcctcgcacctaccccagcaactcaaattcaccacctcggactcctgcgaccgcatcaaagacgaatttcagctactgcaagctcagtaccacagcctcaagctcgaatgtgacaagttggccagtgagaagtcagagatgcagcgtcactatgtgatgtactacgagatgtcctacggcttgaacatcgagatgcacaaacaggctgagatcgtcaaaaggctgaacgggatttgtgcccaggtcctgccctacctctcccaagagcaccagcagcaggtcttgggagccattgagagggccaagcaggtcaccgctcccgagctgaactctatcatccgacagcagctccaagcccaccagctgtcccagctgcaggccctggccctgcccttgaccccactacccgtggggctgcagccgccttcgctgccggcggtcagcgcaggcaccggcctcctctcgctgtccgcgctgggttcccaggcccacctctccaaggaagacaagaacgggcacgatggtgacacccaccaggaggatgatggcgagaagtcggattagcagggggccgggacagggaggttgggaggggggacagaggggagacagaggcacggagagaaaggaatgtttagcacaagacacagcggagctcgggattggctaaactcccatagtatttatggtggccgccggcgggggccccagcccagcttgcaggccacctctagctttcttcctaccccattcccggcttccctcctcctcccctgcagcctggttaggtggatacctgccctgacatgtgaggcaagctaaggcctggagggtcagatgggagaccaggtcccaagggagcaagacctcgcgaagcgcagcagccccggcccttcccccgttttgaacatgtgtaaccgacagtctgcctgggccacagccctctcaccctggtactgcatgcacgcaatgctagctgcccctttcccgtcctgggcaccccgagtctcccccgaccccgggtcccaggtatgctcccacctccacctgccccactcaccacctctgctagttccagacacctccacgcccacctggtcctctcccatcgcccacaaaagggggggcacgagggacgagcttagctgagctgggaggagcagggtgagggtgggcgacccaggattccccctccccttcccaaataaagatgagggtactaaagttg

SEQ ID NO: 9680 - protein, 197 aa, Homo sapiens; identical to SEQ ID NO: 1497

SEQ ID NO: 9681 - DNA, 1294 bp, Homo sapiens
ctccgcagcagccgagccgcggccactgccggcgtcgccgccattagacaatagcggcattcgggctcctcgcacctaccccagcaactcaaattcaccacctcggactcctgcgaccgcatcaaagacgaatttcagctactgcaagctcagtaccacagcctcaagctcgaatgtgacaagttggccagtgagaagtcagagatgcagcgtcactatgtgatgtactacgagatgtcctacggcttgaacatcgagatgcacaaacaggctgagatcgtcaaaaggctgaacgggatttgtgcccaggtcctgccctacctctcccaagagcaccagcagcaggtcttgggagccattgagagggccaagcaggtcaccgctcccgagctgaactctatcatccgacagcagctccaagcccaccagctgtcccagctgcaggccctggccctgcccttgaccccactacccgtggggctgcagccgccttcgctgccggcggtcagcgcaggcaccggcctcctctcgctgtccgcgctgggttcccaggcccacctctccaaggaagacaagaacgggcacgatggtgacacccaccaggaggatgatggcgagaagtcggattagcagggggccgggacagggaggttgggaggggggacagaggggagacagaggcacggagagaaaggaatgtttagcacaagacacagcggagctcgggattggctaaactcccatagtatttatggtggccgccggcgggggccccagcccagcttgcaggccacctctagctttcttcctaccccattcccggcttccctcctcctcccctgcagcctggttaggtggatacctgccctgacatgtgaggcaagctaaggcctggagggtcagatgggagaccaggtcccaagggagcaagacctcgcgaagcgcagcagccccggcccttcccccgttttgaacatgtgtaaccgacagtctgcctgggccacagccctctcaccctggtactgcatgcacgcaatgctagctgcccctttcccgtcctgggcaccccgagtctcccccgaccccgggtcccaggtatgctcccacctccacctgccccactcaccacctctgctagttccagacacctccacgcccacctggtcctctcccatcgcccacaaaagggggggcacgagggacgagcttagctgagctgggaggagcagggtgagggtgggcgacccaggattccccctccccttcccaaataaagatgagggtactaaagttg

SEQ ID NO: 9682 - protein, 141 aa, Homo sapiens; identical to SEQ ID NO: 9622

SEQ ID NO: 9683 - DNA, 1295 bp, Homo sapiens
ctccgcagcagccgagccgcggccactgccggcgtcgccgccattagacaatagcgccctacagggctcctcgcacctaccccagcaactcaaattcaccacctcggactcctgcgaccgcatcaaagacgaatttcagctactgcaagctcagtaccacagcctcaagctcgaatgtgacaagttggccagtgagaagtcagagatgcagcgtcactatgtgatgtactacgagatgtcctacggcttgaacatcgagatgcacaaacaggctgagatcgtcaaaaggctgaacgggatttgtgcccaggtcctgccctacctctcccaagagcaccagcagcaggtcttgggagccattgagagggccaagcaggtcaccgctcccgagctgaactctatcatccgacagcagctccaagcccaccagctgtcccagctgcaggccctggccctgcccttgaccccactacccgtggggctgcagccgccttcgctgccggcggtcagcgcaggcaccggcctcctctcgctgtccgcgctgggttcccaggcccacctctccaaggaagacaagaacgggcacgatggtgacacccaccaggaggatgatggcgagaagtcggattagcagggggccgggacagggaggttgggaggggggacagaggggagacagaggcacggagagaaaggaatgtttagcacaagacacagcggagctcgggattggctaaactcccatagtatttatggtggccgccggcgggggccccagcccagcttgcaggccacctctagctttcttcctaccccattcccggcttccctcctcctcccctgcagcctggttaggtggatacctgccctgacatgtgaggcaagctaaggcctggagggtcagatgggagaccaggtcccaagggagcaagacctcgcgaagcgcagcagccccggcccttcccccgttttgaacatgtgtaaccgacagtctgcctgggccacagccctctcaccctggtactgcatgcacgcaatgctagctgcccctttcccgtcctgggcaccccgagtctcccccgaccccgggtcccaggtatgctcccacctccacctgccccactcaccacctctgctagttccagacacctccacgcccacctggtcctctcccatcgcccacaaaagggggggcacgagggacgagcttagctgagctgggaggagcagggtgagggtgggcgacccaggattccccctccccttcccaaataaagatgagggtactaaagttg

SEQ ID NO: 9684 - protein, 141 aa, Homo sapiens; identical to SEQ ID NO: 9622

SEQ ID NO: 9685 - DNA, 1359 bp, Homo sapiens
caagaatggcttccctcaggaaggcggcattaccgctgcctttctgcagaaaaggaaactaaggctcagcaagaaccaccgcccagccagagccaaggtcacagagcacgtccgtggcacgcgtccagggctcctcgcacctaccccagcaactcaaattcaccacctcggactcctgcgaccgcatcaaagacgaatttcagctactgcaagctcagtaccacagcctcaagctcgaatgtgacaagttggccagtgagaagtcagagatgcagcgtcactatgtgatgtactacgagatgtcctacggcttgaacatcgagatgcacaaacaggctgagatcgtcaaaaggctgaacgggatttgtgcccaggtcctgccctacctctcccaagagcaccagcagcaggtcttgggagccattgagagggccaagcaggtcaccgctcccgagctgaactctatcatccgacagcagctccaagcccaccagctgtcccagctgcaggccctggccctgcccttgaccccactacccgtggggctgcagccgccttcgctgccggcggtcagcgcaggcaccggcctcctctcgctgtccgcgctgggttcccaggcccacctctccaaggaagacaagaacgggcacgatggtgacacccaccaggaggatgatggcgagaagtcggattagcagggggccgggacagggaggttgggaggggggacagaggggagacagaggcacggagagaaaggaatgtttagcacaagacacagcggagctcgggattggctaaactcccatagtatttatggtggccgccggcgggggccccagcccagcttgcaggccacctctagctttcttcctaccccattcccggcttccctcctcctcccctgcagcctggttaggtggatacctgccctgacatgtgaggcaagctaaggcctggagggtcagatgggagaccaggtcccaagggagcaagacctcgcgaagcgcagcagccccggcccttcccccgttttgaacatgtgtaaccgacagtctgcctgggccacagccctctcaccctggtactgcatgcacgcaatgctagctgcccctttcccgtcctgggcaccccgagtctcccccgaccccgggtcccaggtatgctcccacctccacctgccccactcaccacctctgctagttccagacacctccacgcccacctggtcctctcccatcgcccacaaaagggggggcacgagggacgagcttagctgagctgggaggagcagggtgagggtgggcgacccaggattccccctccccttcccaaataaagatgagggtactaaagttg

SEQ ID NO: 9686 - protein, 141 aa, Homo sapiens; identical to SEQ ID NO: 9622

SEQ ID NO: 9687 - DNA, 1639 bp, Homo sapiens
attctcccggctggtttttctgcagaactgtccccaccatctgacctgccaggaattcagcttgtgaatttgtctctgtctgtctccaggcaccaccaccagggcagggacccacccccgccccgccccaccccagggccctggagcagcggggcctggcacacagtaggcgttctataaatgtgtcacaagaatggcttccctcaggaaggcggcattaccgctgcctttctgcagaaaaggaaactaaggctcagcaagaaccaccgcccagccagagccaaggtcacagagcacgtccgtggcacgcgtccaggtcgtgccacagcagggccggcggcttcgacgcgggcagccgggtcccttttctttgacagatggggaaaccgaggcccggccggctgccggggctcctcgcacctaccccagcaactcaaattcaccacctcggactcctgcgaccgcatcaaagacgaatttcagctactgcaagctcagtaccacagcctcaagctcgaatgtgacaagttggccagtgagaagtcagagatgcagcgtcactatgtgatgtactacgagatgtcctacggcttgaacatcgagatgcacaaacaggctgagatcgtcaaaaggctgaacgggatttgtgcccaggtcctgccctacctctcccaagagcaccagcagcaggtcttgggagccattgagagggccaagcaggtcaccgctcccgagctgaactctatcatccgacagcagctccaagcccaccagctgtcccagctgcaggccctggccctgcccttgaccccactacccgtggggctgcagccgccttcgctgccggcggtcagcgcaggcaccggcctcctctcgctgtccgcgctgggttcccaggcccacctctccaaggaagacaagaacgggcacgatggtgacacccaccaggaggatgatggcgagaagtcggattagcagggggccgggacagggaggttgggaggggggacagaggggagacagaggcacggagagaaaggaatgtttagcacaagacacagcggagctcgggattggctaaactcccatagtatttatggtggccgccggcgggggccccagcccagcttgcaggccacctctagctttcttcctaccccattcccggcttccctcctcctcccctgcagcctggttaggtggatacctgccctgacatgtgaggcaagctaaggcctggagggtcagatgggagaccaggtcccaagggagcaagacctcgcgaagcgcagcagccccggcccttcccccgttttgaacatgtgtaaccgacagtctgcctgggccacagccctctcaccctggtactgcatgcacgcaatgctagctgcccctttcccgtcctgggcaccccgagtctcccccgaccccgggtcccaggtatgctcccacctccacctgccccactcaccacctctgctagttccagacacctccacgcccacctggtcctctcccatcgcccacaaaagggggggcacgagggacgagcttagctgagctgggaggagcagggtgagggtgggcgacccaggattccccctccccttcccaaataaagatgagggtactaaagttg

SEQ ID NO: 9688 - protein, 264 aa, Homo sapiens; identical to SEQ ID NO: 1499

SEQ ID NO: 9689 - DNA, 1718 bp, Homo sapiens
attctcccggctggtttttctgcagaactgtccccaccatctgacctgccaggaattcagcttgtgaatttgtctctgtctgtctccaggcaccaccaccagggcagggacccacccccgccccgccccaccccagggccctggagcagcggggcctggcacacagtaggcgttctataaatgtgtcacaagaatggcttccctcaggaaggcggcattaccgctgcctttctgcagaaaaggaaactaaggctcagcaagaaccaccgcccagccagagccaaggtcacagagcacgtccgtggcacgcgtccaggtcgtgccacagcagggccggcggcttcgacgcgggcagccgggtcccttttctttgacagatggggaaaccgaggcccggccggctgccggggctcctcgcacctaccccagcaactcaaattcaccacctcggactcctgcgaccgcatcaaagacgaatttcagctactgcaagctcagtaccacagcctcaagctcgaatgtgacaagttggccagtgagaagtcagagatgcagcgtcactatgtgatgtactacgagatgtcctacggcttgaacatcgagatgcacaaacaggctgagatcgtcaaaaggctgaacgggatttgtgcccaggtcctgccctacctctcccaagagcaccagcagcaggtcttgggagccattgagagggccaagcaggtcaccgctcccgagctgaactctatcatccgagtatgtatggggacctgggcgggtgggcgggggacaggtgggccccaggcagctaatgttcccctcccccgccctgcagcagcagctccaagcccaccagctgtcccagctgcaggccctggccctgcccttgaccccactacccgtggggctgcagccgccttcgctgccggcggtcagcgcaggcaccggcctcctctcgctgtccgcgctgggttcccaggcccacctctccaaggaagacaagaacgggcacgatggtgacacccaccaggaggatgatggcgagaagtcggattagcagggggccgggacagggaggttgggaggggggacagaggggagacagaggcacggagagaaaggaatgtttagcacaagacacagcggagctcgggattggctaaactcccatagtatttatggtggccgccggcgggggccccagcccagcttgcaggccacctctagctttcttcctaccccattcccggcttccctcctcctcccctgcagcctggttaggtggatacctgccctgacatgtgaggcaagctaaggcctggagggtcagatgggagaccaggtcccaagggagcaagacctcgcgaagcgcagcagccccggcccttcccccgttttgaacatgtgtaaccgacagtctgcctgggccacagccctctcaccctggtactgcatgcacgcaatgctagctgcccctttcccgtcctgggcaccccgagtctcccccgaccccgggtcccaggtatgctcccacctccacctgccccactcaccacctctgctagttccagacacctccacgcccacctggtcctctcccatcgcccacaaaagggggggcacgagggacgagcttagctgagctgggaggagcagggtgagggtgggcgacccaggattccccctccccttcccaaataaagatgagggtactaaagttg

SEQ ID NO: 9690 - protein, 278 aa, Homo sapiens; identical to SEQ ID NO: 9650

SEQ ID NO: 9691 - DNA, 536 bp, Homo sapiens
ctacagggctcctcgcacctaccccagcaactcaaattcaccacctcggactcctgcgaccgcatcaaagacgaatttcagctactgcaagctcagtaccacagcctcaagctcgaatgtgacaagttggccagtgagaagtcagagatgcagcgtcactatgtgatgtactacgagatgtcctacggcttgaacatcgagatgcacaaacaggctgagatcgtcaaaaggctgaacgggatttgtgcccaggtcctgccctacctctcccaagagcaccagcagcaggtcttgggagccattgagagggccaagcaggtcaccgctcccgagctgaactctatcatccgactccacctgccccactcaccacctctgctagttccagacacctccacgcccacctggtcctctcccatcgcccacaaaagggggggcacgagggacgagcttagctgagctgggaggagcagggtgagggtgggcgacccaggattccccctccccttcccaaataaagatgagggtactaaagt

SEQ ID NO: 9692 - protein, 103 aa, Homo sapiens; identical to SEQ ID NO: 9620

SEQ ID NO: 9693 - DNA, 706 bp, Homo sapiens
gaagcgggcgaggccgggcgcgggaggcggcggcggccccgggagctgccgatcggcgccgggacaaaggcgcggccgcccggcgcccccagcagcccgagccggggcgcacagccggggcgcagcccgcgccccccgccgcgattgacatgatgtttccacaaagcaggcattcgggctcctcgcacctaccccagcaactcaaattcaccacctcggactcctgcgaccgcatcaaagacgaatttcagctactgcaagctcagtaccacagcctcaagctcgaatgtgacaagttggccagtgagaagtcagagatgcagcgtcactatgtgatgtactacgagatgtcctacggcttgaacatcgagatgcacaaacaggctgagatcgtcaaaaggctgaacgggatttgtgcccaggtcctgccctacctctcccaagagcaccagcagcaggtcttgggagccattgagagggccaagcaggtcaccgctcccgagctgaactctatcatccgactccacctgccccactcaccacctctgctagttccagacacctccacgcccacctggtcctctcccatcgcccacaaaagggggggcacgagggacgagcttagctgagctgggaggagcagggtgagggtgggcgacccaggattccccctccccttcccaaataaagatgagggtactaaagt

SEQ ID NO: 9694 - protein, 159 aa, Homo sapiens; identical to SEQ ID NO: 9636

SEQ ID NO: 9695 - DNA, 271 bp, Homo sapiens
ggccgcccggcgcccccagcagcccgagccggggcgcacagccggggcgcagcccgcgccccccgccgcgattgacatgatgtttccacaaagcaggcattcgggctcctcgcacctaccccagcaactcaaattcaccacctggtcctctcccatcgcccacaaaagggggggcacgagggacgagcttagctgagctgggaggagcagggtgagggtgggcgacccaggattccccctccccttcccaaataaagatgagggtactaaa

SEQ ID NO: 9696 - protein, 39 aa, Homo sapiens; identical to SEQ ID NO: 9630

SEQ ID NO: 9697 - DNA, 942 bp, Homo sapiens
tctcccccgacccccttccagcaccagcagcaggtcttgggagccattgagagggccaagcaggtcaccgctcccgagctgaactctatcatccgagtatgtatggggacctgggcgggtgggcgggggacaggtgggccccaggcagctaatgttcccctcccccgccctgcagcagcagctccaagcccaccagctgtcccagctgcaggccctggccctgcccttgaccccactacccgtggggctgcagccgccttcgctgccggcggtcagcgcaggcaccggcctcctctcgctgtccgcgctgggttcccaggcccacctctccaaggaagacaagaacgggcacgatggtgacacccaccaggaggatgatggcgagaagtcggattagcagggggccgggacagggaggttgggaggggggacagaggggagacagaggcacggagagaaaggaatgtttagcacaagacacagcggagctcgggattggctaaactcccatagtatttatggtggccgccggcgggggccccagcccagcttgcaggccacctctagctttcttcctaccccattcccggcttccctcctcctcccctgcagcctggttaggtggatacctgccctgacatgtgaggcaagctaaggcctggagggtcagatgggagaccaggtcccaagggagcaagacctcgcgaagcgcagcagccccggcccttcccccgttttgaacatgtgtaaccgacagtctgcctgggccacagcccttcaccacctctgctagttccagacacctccacgcccacctggtcctctcccatcgcccacaaaagggggggcacgagggacgagcttagctgagctgggaggagcagggtgagggtgggcgacccaggattccccctccccttcccaaataaagatgagggtact

SEQ ID NO: 9698 - protein, 40 aa, Homo sapiens; identical to SEQ ID NO: 9602

SEQ ID NO: 9699 - DNA, 562 bp, Homo sapiens
aagccagcccggttatcctgttacctcctaagccctccccaagctcccgctctcctcccccccgccccgcctctttttcaggcctccctgggagtgtttctcccggtggtggggaggggcagagaccttccccacagcctacggcccccagccctccctacattcgcacaagcgcttactacctgccaggggcctgagtggccgacccccgaggaatgtgcagtctggcctcatcctgcacttacctcactctaagctgcaggcgacagccggtgtccagccccacctttgccactgactggctgccctcgggcccgaacacggctttgctcatcccaccctggccagacctagcccctcttagaagccgcaagtggcagggctgggccgggccccgcgcaggcctcctgtggctagcctgcacctgccacccgcccaggactgaagccggcttcatctgtgtgttccaggctgagatcgtcaaaaggctgaacgggatttgtgcccaggtcctgccctacctctcccaagagcaccagcagcaggtcttgggagccattga

SEQ ID NO: 9700 - protein, 114 aa, Homo sapiens
MCSLASSCTYLTLSCRRQPVSSPTFATDWLPSGPNTALLIPPWPDLAPLRSRKWQGWAGPRAGLLWLACTCHPPRTEAGFICVFQAEIVKRLNGICAQVLPYLSQEHQQQVLGA

SEQ ID NO: 9701 - DNA, 915 bp, Homo sapiens
cccttggcctggccctcgagcagcgatgctggggtctcagcccagtacccaaatctcccagactgtgggggaggcagagccagaccctgaccctcccagccagaagaatagggctggggtcagagagagggacctaggacctgcctgaggaagactatatggagaaatggggcacacagctggggtcttgcaggatgagtaggagttcaccagacagagacagagaaactacgtgaaggcctgggaatgaacttggttttcccccaggggtgacagggagccatgggagggtttagagcaggggaggggcagggtgagatctggggcttggggtgggggtagctgctggccccagagccagcaggctttgtttacccctcactgtttatacctaggcaggcaaacttccctggcgtctgggcccacccgcagacaagacatagaaagatacaagattaggagccctggaatgcgtgttctcgcggtgcacatggagtgggggaggagccaggccagggctagggacctaaagtgcccccagtctccatccgcagccccagcggccccctgcccctctccagggcgggctgggatgctgggtgtgggcgtctctccctcctctttccctcccacctgcctctcctttctttcctgccctcagctgtctcttgctgtctcccccctttgtctgtctctgccactcccctatctctttgtctccgtgtccccccatccttccccacccccatctcccgctccccctctctctcccccatacagtactacgagatgtcctacggcttgaacatcgagatgcacaaacaggctgagatcgtcaaaaggctgaacgggatttgtgcccaggtcctgccctacctctcccaagagcaccagcagcaggtcttgggagccatt

SEQ ID NO: 9702 - protein, 41 aa, Homo sapiens
MSYGLNIEMHKQAEIVKRLNGICAQVLPYLSQEHQQQVLGA

SEQ ID NO: 9703 - DNA, 2830 bp, Homo sapiens
ggtcgctggcgcctgtttcctcagagccactttttcctttgtgttgtctggtcgttcactactttgagggaaaagaattttgccgttcgcgttcgattgactccgtccccaagatcctgtagccccacggacctggcgactccaccgtgttcgggtctttctaggaacccaatctgccttcatgaagaaaagacagaggcagaaaggaagatggcttactgcctgacaaattgttatcagtactccgtgacctttgaggatacagctgtggacttcacccaggaggagtggattttactggacccagttcagagaaacttatacagagatgtgatgctggagaattatgagaacgtggccaaagtaggatttcagctctttaaacccagtgtcatctcttggttggaagaagaagagttgagaaccttgcagcaaggagttctccaagactgggcaataaaacatcaaaccagtgtttcagcactgcagcaggagttttggaaaatacaaacttctaatgggatacaaatggacctggtaacctttgacagtgtggctgtggagttcacccaggaagagtggactttactggacccagctcagagaaacctgtacagtgatgtgatgctggagaactacaagaacctgtcctcagtaggttaccagctcttcaaacccagtctgatctcttggctggaggaagaggaagagttgagcacactgccaagagttctccaagaatggaaaatgtgcctgaaaaccaaagggccagccctttggcaagataatttttgtttaaaaacattaaatgggatacagttggcaagaaaccaaaatggagaggaactctatgactgtaagcaatgtgaagatgtcttctgtaaacatccatgccttaagaccaacatgagtactcaaaatagaggcaacacgtctgaatgtattcagtatgcaaaagacctcctttctctatacaataaaacctctaccataaggaaagtttctgtgttcagtaagcatggaaaatctttccgcctgattttaaatgttcaggtccagagaaagtgtacacaagataaatcctttgaaggcactgactatgggaaagccttcatttatcagtcataccttgaagcacacaggaaaactcagagtggagaaaaactcaatgaatggaagcaatgtggggaagcatttactcactccacaagccatgctgtaaatgttgaaacacacattattaaaaacccctatgaatgtaaggaatgtggaaaagattttagataccctacccaccttaataatcacatgcaaacccacattgggataaaaccttataaatgtaagcactgtggcaaaaccttcactgtgccgtcaggctttcttgaacatgtacgaactcacactggagagaagccctatgggtgtaaggaatgtggtaaagcctttggtacatctgcaggccttattgaacatataagatgtcacgccagagagaaaacctttaaatgtgaccactgtgggaaagcctttatttcttacccatctctttttggacatttgagagttcataatggagagaagccatatgagcataaggaatatgggaaggcctttggtacatcctcaggtgttattgaagatagaagaagtaacacaggacagaaacgctttgattgtgaccagtgtgggaaagtctttgtttctttctcatctctttttgctcatttgagaactcacactggtgagaagccctttaagtgttacaaatgtgggaaaccatttacctcttctgcctgtcttcgtattcacatgcgaactcacacagaagagagactctatcaatgtaagaaatgtggtaaagctttcactaagtgctcatatcttaccaaacatttacgaacacacgctggagagaaaccctatgaatgtatgaaatgtgggaaagccttcactgagcgctcataccttactaaacatttacgaagacacagtggagagaagccatatgaatgtaagaaatgtggaaaagccttcacagaacgctcagatcttactaaacatttacgaagacacactggagataagccctatgaatataaggactgtgggaaagcctttgttgtctcctccagtctagttgatcatttaagaactcacactggatataaaccctataaatgtaatgcatgtgaaaaagcttacagtaggtcttgtgtactaactcaacacttaaaaactcatgcagcagagaagacctctgaatgtaacgcatgtggaaattcctttcgaaattccatgtgctttcatgatcgcttaaaaactctcaccaaaataaaaccctataaatgtaaggactgtgggaaagccttcacttgtcattcagatcttactaatcatgtgcgaattcacactggagagaagccctataaatgtaaggaatgtgggaaggccttccgtacatcctcaggacgtattcaacatttaagaactcatatgggagagaaaccctttgaatgtgaccagtgtgggaaagcctttgcttctttctcagctcgtattgcacatttgaaaacacactagagagaagccctgtggatgtgaagaatgtggaaaaacctttgctgtttcctcaagcctaactgaacatgtaaaaattcacaggagaaagtaacactatcaatgtaaggaatgtgagaaagcctgaacagttgaatctttctagatatgtacaaactcacactgtagagaaaccctgtaaatgtaagggatgtaggaaaacactagttcttctctctctctttttttttttttgatgagtctcactctg

SEQ ID NO: 9704 - protein, 790 aa, Homo sapiens; identical to SEQ ID NO: 1503

SEQ ID NO: 9705 - DNA, 656 bp, Homo sapiens
agttggacaggatggaactcttcaggattctagtttccctccgcgtgggtgcggaggtatcaaggggtcggctcagtgcctgggtgggcaagagagaaatggacccacagagaaagatattgccactgaagaagaggcgggataaagcctgttccatgccaagcaaccctggcagcagaatgggattggatcctggtgtggtgtaaagaagaagcattgaaagtctgctaccaatgacagtgaagtttgtgccatgatgtctgattttatctttaccatctagttgacctttaggtccccaagtcacaatgtcttcagttaacatagattgttttctagccagtgggccaagacattgggtccatggagcggggtaggaactattgaagggaatccattccatatagtcaacacaattggggtgattgggccgggaatggttggttagcacaccagttacattaatagaactaagacctaataagcacatgacttttccatggtgactcaaccatgcttgagcttgaattgtaagacagctactacagttgagcaatatctttgtagtgatacaccaggggagtccttccagtggggccatataattgatgacattgttctgagagtctaactgttctatgtcaggaggagttaga

SEQ ID NO: 9706 - protein, 64 aa, Homo sapiens
MELFRILVSLRVGAEVSRGRLSAWVGKREMDPQRKILPLKKRRDKACSMPSNPGSRMGLDPGVV

SEQ ID NO: 9707 - DNA, 2289 bp, Homo sapiens
acatcttttgtagttatcccacagttcttatatcttgtttttttattcttctctttgcttttcaggtgtggatgtttctgctgatatattctcaagctctttagttggctgtttcttggccaataataagcctaccaaagacattcttcatttctgttacactgtcttcaatttctagcatttctttgtggttcttagaatttccatctctgtgtttacactgcctgtctgttcttggatgctgtctgctttatccagtagaacccatggcatatcaatcataattgttttaaattcccagtctgataatttcagcaatcctgctatatctggttctggttcttactctttctctttaaactaacttttgccttttagtatgcttgtaatttttccttagctggacatggcatactggataagaggaaatgctgtaagcaggcctctagtaatcatgataagctgtggggagaggggcagcattctattgtccagggattagatgtcagtcttgcagtgagtctgtgcttctgcactgtgaacttcagtttttcccaccctttagttgggtcaggatgtatagagttggctggagttggatatttcccttcctccaggtcactgaagctctgactaaaactccaggtgtggtggcttatgcctgtaataccagcactttgggaggccaaggcaggtggatcacctgaggttgggagttcatgaccagcctgaattgcttgaatccaggaggtggaggtcacagtgagccgagattgtgatactgcactccagcctgggaaacagtgagacactgtctcaaaaaaataaataaataaataaaaggctaggcgcagtggctcaaccctgtaatcccagcataattttgtatttttagtgaaggcagggattctccatgttgatcaggctggtctcgaactcctgacctccagtgatctgcctggtttgacctcccaaagtgctgagattacaggcatgagccatcacgcccagccagttcttcaattcttacagtccctttccatgtcattaaagaactcacactggagagaaatcttatcaatgttagaattgtggtaaagctctctgttgttcccatttacatgaaagatgtgaacagtcacattgtagaaaaatgctgtgagagttgggaatctggaaccacttctttattatctcaggtcataatgaacttgtaagaattcacagtggcaggaaaccctatgtaaatggaaaatatgggaaaggcttcatttaatccataggactgataccacaaaactcccactaggagaaaacctatgtttatacggaatgtgggaaaatcttcacttatttctcaagccttaaagtgtatgtcaggattcccagtggagagaagccatattgatgtaaggaatgtgggaaagcccttgcctgccacttagtccttgataaacattttagaacacaaactggagagaaactatgaattcaaggattgtgggaaaacccttttatgttccacaagctttaatattcatatgcaatgtatgctggagaataacttgatgactataataagtggaatggcctaggtcagggatccccaaacccctgggccatggactggtactggtctgtggcctgctaggatccagggtgcacagcaggaggtgaatgtaggatgagcaaacattactgcctgagctcaactttctgtcagatcagcagtggcattagattctcataggagcatgaactttattgtgaactgcacatgcaagggatctaggttgcacactccttatgagaatctaatgcctgatgatctgaactggaacagtttaatccccaactccagtccgtgggaaaaatgtcttccacgaaactggtccctggtgccaaaaagttaggggaccactgatttagattatgtcacatgtcccatccactcattaacattaaggctttcatccctgggacctcaagataatggtggtatttagagatgtggttttttaaagaggtgattttaaaatgaggcagttagaatggggccctcattcaatatgactggtttccttataagaagtgaaagagataccagggtagcaggcacagaattttatgtgaagtgaccggaaatggttaccttcaaggcaaagagagattcctggaggagatccttcttttaaggctcattatagaggaaatcatccttatctacactttgatcctggacttccagcctcaaaaattatgagcaaataaatttctgttgtttaagcc

SEQ ID NO: 9708 - protein, 52 aa, Homo sapiens
MNFIVNCTCKGSRLHTPYENLMPDDLNWNSLIPNSSPWEKCLPRNWSLVPKS

SEQ ID NO: 9709 - DNA, 2376 bp, Homo sapiens
ttgtttgtttacttatttttatttttgtttctttagagatagggtcttgctatgttgcccaggctggtctcaaacttctaggctgaagcagtcctcccaccctggcctcccaaaatgctgggattacaggcatgagctactgccccagccggtgtatatgtttgatggctgatgattaagtactgcttgttgattattgattaataccaacaggaatcccaataaccctgtttaaagaggaatggagattgccactgtccatttagattaatgaggtgtcctgaagtgatggtgacatcaatgaaaggagggttctgacacgttctcacctcgcgggatggcagctgctgatttgtcccatggacattatctttctggggacccagtttgccttcatgaagaaaagacaccagcaggaagaatagtggctgactgcctaacagattgttatcaggattcagtgacctttgacgatgtggctgtggacttcacccaggaggagtggactttactggactcaactcagagaagcctctacagtgacgtgatgctggagaactacaagaacctggccacagtaggaggtcagatcatcaaacccagtctaatctcttggttggaacaagaagagtcaaggacagttcagggaggagttctccaaggatgggaaatgcgacttgaaacccagtggtctatacttcagcaggactttttgaggggtcagacatccattgggatacaattggaaggaaaacacaatggaagggaactctgtgactgtgagcaatgtggagaagtcttcagtgaacactcatgccttaagacgcacgtgagaactcaaagtacagggaacactcatgactgtaatcagtatggaaaagatttccttaccctgtgtgagaaaacctctactggtgagaaactttctgagtttaatcagagtgaaaaaatcttcagcctgacaccaaatattgtataccagagaactagcacacaagaaaagtcatttgaatgtagtcactgtggaaaatccttcattaatgagtcataccttcaggcacatatgagaactcacaatggagaaaaactctacgaatggaggaattatgggccaggttttattgactctacaagcctttctgtgcttatagaaaccctcaatgcaaaaaagccctacaaatgtaaggaatgtggaaaaggctatagatacccagcctacctcagtattcacatgcgaacccacactggggagaaaccatatgaatgtaaggaatgtgggaaagccttcaattattccaactcatttcagatacatggaagaactcacactggagagaaaccctatgtatgtaaggaatgtgggaaagccttcactcagtactcgggccttagtatgcatgtacgatctcacagtggagacaagccctatgaatgtaaggaatgtgggaaatccttccttacatcctcacgccttattcaacatataagaactcacactggagagaagccttttgtatgtgttgaatgtgggaaagcctttgcagtttcctcaaatcttagtggacatttgagaactcacactgaagagaaggcctgtgagtgtaagatatgtgggaaagtatttgggtatccctcatgtcttaataatcacatgcgaacgcacagtgcccagaaaccatacacctgtaaggaatgtgggaaggcttttaactattccacccaccttaaaattcacatgcgaatccacactggagaaaaaccctatgagtgtaaacaatgtggaaaggccttcagtcattccagttcatttcaaatacatgaaaggactcacactggagagaaaccctatgaatgcaaggagtgtgggaaagccttcacgtgttccagttcctttagaattcatgaaaaaactcacacagaagagaaaccctataaatgtcagcaatgcgggaaagcttacagtcatccccgttcacttcgaagacatgaacaaattcactagtgagaaactgtccatgtaataaatgtgggaaagctctcatttgttccagttcactttaaagacatgaatgaactcactctggagagaagaagctgcatgaaaattacttaattcctgtaatcccagcattttgagaggctgaggtgggtggatcacttgaggtcaggagtttgagaccaccctggccaacatggtgaaaccttgtctctactgaaaatacaaaaaatttagccaggtgtggtgggcacctgtaatcccagctacttgggaggctgaggcaagtgaatcacttgaacccaggaagcagaggttgcagtgagcagagatcatgccactgcactccagcctgggcgatggagtgagactccatctca

SEQ ID NO: 9710 - protein, 554 aa, Homo sapiens; identical to SEQ ID NO: 1506

SEQ ID NO: 9711 - DNA, 2403 bp, Homo sapiens
ggcctcactggcctgggtgagttccgaggagatgaactggttttggggtgaaggacgggtttggcccggacgttagagaggcctggcccgctctgctcgtgtctgctgggcccgctagcgtccgctcggaccgtcgctcctcgggaggagtcgggtttatagttacggtgtccgcagggtgttttcatctgtgcgcccctctccaaaggcctccaaagcagcgtttgtgaatttttttccggcaggaaaataattgctgccttttgcatccgcgttggctccgtccccaggatcttcccggttcagggacctggcgatttctgagtgttccggaatcccaataaccctgtttaaagaggaatggagattgccactgtccatttagattaatgaggtgtcctgaagtgatggtgacatcaatgaaaggagggttctgacacgttctcacctcgcgggatggcagctgctgatttgtcccatggattcagtgacctttgacgatgtggctgtggacttcacccaggaggagtggactttactggactcaactcagagaagcctctacagtgacgtgatgctggagaactacaagaacctggccacagtaggaggtcagatcatcaaacccagtctaatctcttggttggaacaagaagagtcaaggacagttcagggaggagttctccaaggatgggaaatgcgacttgaaacccagtggtctatacttcagcaggactttttgaggggtcagacatccattgggatacaattggaaggaaaacacaatggaagggaactctgtgactgtgagcaatgtggagaagtcttcagtgaacactcatgccttaagacgcacgtgagaactcaaagtacagggaacactcatgactgtaatcagtatggaaaagatttccttaccctgtgtgagaaaacctctactggtgagaaactttctgagtttaatcagagtgaaaaaatcttcagcctgacaccaaatattgtataccagagaactagcacacaagaaaagtcatttgaatgtagtcactgtggaaaatccttcattaatgagtcataccttcaggcacatatgagaactcacaatggagaaaaactctacgaatggaggaattatgggccaggttttattgactctacaagcctttctgtgcttatagaaaccctcaatgcaaaaaagccctacaaatgtaaggaatgtggaaaaggctatagatacccagcctacctcagtattcacatgcgaacccacactggggagaaaccatatgaatgtaaggaatgtgggaaagccttcaattattccaactcatttcagatacatggaagaactcacactggagagaaaccctatgtatgtaaggaatgtgggaaagccttcactcagtactcgggccttagtatgcatgtacgatctcacagtggagacaagccctatgaatgtaaggaatgtgggaaatccttccttacatcctcacgccttattcaacatataagaactcacactggagagaagccttttgtatgtgttgaatgtgggaaagcctttgcagtttcctcaaatcttagtggacatttgagaactcacactgaagagaaggcctgtgagtgtaagatatgtgggaaagtatttgggtatccctcatgtcttaataatcacatgcgaacgcacagtgcccagaaaccatacacctgtaaggaatgtgggaaggcttttaactattccacccaccttaaaattcacatgcgaatccacactggagaaaaaccctatgagtgtaaacaatgtggaaaggccttcagtcattccagttcatttcaaatacatgaaaggactcacactggagagaaaccctatgaatgcaaggagtgtgggaaagccttcacgtgttccagttcctttagaattcatgaaaaaactcacacagaagagaaaccctataaatgtcagcaatgcgggaaagcttacagtcatccccgttcacttcgaagacatgaacaaattcactagtgagaaactgtccatgtaataaatgtgggaaagctctcatttgttccagttcactttaaagacatgaatgaactcactctggagagaagaagctgcatgaaaattacttaattcctgtaatcccagcattttgagaggctgaggtgggtggatcacttgaggtcaggagtttgagaccaccctggccaacatggtgaaaccttgtctctactgaaaatacaaaaaatttagccaggtgtggtgggcacctgtaatcccagctacttgggaggctgaggcaagtgaatcacttgaacccaggaagcagaggttgcagtgagcagagatcatgccactgcactccagcctgggcgatggagtgagactccatctca

SEQ ID NO: 9712 - protein, 516 aa, Homo sapiens
MDSVTFDDVAVDFTQEEWTLLDSTQRSLYSDVMLENYKNLATVGGQIIKPSLISWLEQEESRTVQGGVLQGWEMRLETQWSILQQDFLRGQTSIGIQLEGKHNGRELCDCEQCGEVFSEHSCLKTHVRTQSTGNTHDCNQYGKDFLTLCEKTSTGEKLSEFNQSEKIFSLTPNIVYQRTSTQEKSFECSHCGKSFINESYLQAHMRTHNGEKLYEWRNYGPGFIDSTSLSVLIETLNAKKPYKCKECGKGYRYPAYLSIHMRTHTGEKPYECKECGKAFNYSNSFQIHGRTHTGEKPYVCKECGKAFTQYSGLSMHVRSHSGDKPYECKECGKSFLTSSRLIQHIRTHTGEKPFVCVECGKAFAVSSNLSGHLRTHTEEKACECKICGKVFGYPSCLNNHMRTHSAQKPYTCKECGKAFNYSTHLKIHMRIHTGEKPYECKQCGKAFSHSSSFQIHERTHTGEKPYECKECGKAFTCSSSFRIHEKTHTEEKPYKCQQCGKAYSHPRSLRRHEQIH

SEQ ID NO: 9713 - DNA, 2208 bp, Homo sapiens
gagtctttttgcctttcagagttaaggcctcactggcctgggaaaataattgctgccttttgcatccgcgttggctccgtccccaggatcttcccggttcagggacctggcgatttctgagtgttccggaatcccaataaccctgtttaaagaggaatggagattgccactgtccatttagattaatgaggtgtcctgaagtgatggtgacatcaatgaaaggagggttctgacacgttctcacctcgcgggatggcagctgctgatttgtcccatggacattatctttctggggacccagtttgccttcatgaagaaaagacaccagcaggaagaatagtggctgactgcctaacagattgttatcaggattcagtgacctttgacgatgtggctgtggacttcacccaggaggagtggactttactggactcaactcagagaagcctctacagtgacgtgatgctggagaactacaagaacctggccacagtaggaggtcagatcatcaaacccagtctaatctcttggttggaacaagaagagtcaaggacagttcagggaggagttctccaaggaaggaaaacacaatggaagggaactctgtgactgtgagcaatgtggagaagtcttcagtgaacactcatgccttaagacgcacgtgagaactcaaagtacagggaacactcatgactgtaatcagtatggaaaagatttccttaccctgtgtgagaaaacctctactggtgagaaactttctgagtttaatcagagtgaaaaaatcttcagcctgacaccaaatattgtataccagagaactagcacacaagaaaagtcatttgaatgtagtcactgtggaaaatccttcattaatgagtcataccttcaggcacatatgagaactcacaatggagaaaaactctacgaatggaggaattatgggccaggttttattgactctacaagcctttctgtgcttatagaaaccctcaatgcaaaaaagccctacaaatgtaaggaatgtggaaaaggctatagatacccagcctacctcagtattcacatgcgaacccacactggggagaaaccatatgaatgtaaggaatgtgggaaagccttcaattattccaactcatttcagatacatggaagaactcacactggagagaaaccctatgtatgtaaggaatgtgggaaagccttcactcagtactcgggccttagtatgcatgtacgatctcacagtggagacaagccctatgaatgtaaggaatgtgggaaatccttccttacatcctcacgccttattcaacatataagaactcacactggagagaagccttttgtatgtgttgaatgtgggaaagcctttgcagtttcctcaaatcttagtggacatttgagaactcacactgaagagaaggcctgtgagtgtaagatatgtgggaaagtatttgggtatccctcatgtcttaataatcacatgcgaacgcacagtgcccagaaaccatacacctgtaaggaatgtgggaaggcttttaactattccacccaccttaaaattcacatgcgaatccacactggagaaaaaccctatgagtgtaaacaatgtggaaaggccttcagtcattccagttcatttcaaatacatgaaaggactcacactggagagaaaccctatgaatgcaaggagtgtgggaaagccttcacgtgttccagttcctttagaattcatgaaaaaactcacacagaagagaaaccctataaatgtcagcaatgcgggaaagcttacagtcatccccgttcacttcgaagacatgaacaaattcactagtgagaaactgtccatgtaataaatgtgggaaagctctcatttgttccagttcactttaaagacatgaatgaactcactctggagagaagaagctgcatgaaaattacttaattcctgtaatcccagcattttgagaggctgaggtgggtggatcacttgaggtcaggagtttgagaccaccctggccaacatggtgaaaccttgtctctactgaaaatacaaaaaatttagccaggtgtggtgggcacctgtaatcccagctacttgggaggctgaggcaagtgaatcacttgaacccaggaagcagaggttgcagtgagcagagatcatgccactgcactccagcctgggcgatggagtgagactccatctca

SEQ ID NO: 9714 - protein, 118 aa, Homo sapiens
MAAADLSHGHYLSGDPVCLHEEKTPAGRIVADCLTDCYQDSVTFDDVAVDFTQEEWTLLDSTQRSLYSDVMLENYKNLATVGGQIIKPSLISWLEQEESRTVQGGVLQGRKTQWKGTL

SEQ ID NO: 9715 - DNA, 2439 bp, Homo sapiens
gagagtctttttgcctttcagagttaaggcctcactggcctgggtgagttccgaggagatgaactggttttggggtgaaggacgggtttggcccggacgttagagaggcctggcccgctctgctcgtgtctgctgggcccgctagcgtccgctcggaccgtcgctcctcgggaggagtcgggtttatagttacggtgtccgcagggtgttttcatctgtgcgcccctctccaaaggcctccaaagcagcgtttgtgaatttttttccggcaggaaaataattgctgccttttgcatccgcgttggctccgtccccaggatcttcccggttcagggacctggcgatttctgagtgttccggaatcccaataaccctgtttaaagaggaatggagattgccactgtccatttagattaatgaggtgtcctgaagtgatggtgacatcaatgaaaggagggttctgacacgttctcacctcgcgggatggcagctgctgatttgtcccatggacattatctttctggggacccagtttgccttcatgaagaaaagacaccagcaggaagaatagtggctgactgcctaacagattgttatcaggattcagtgacctttgacgatgtggctgtggacttcacccaggaggagtggactttactggactcaactcagagaagcctctacagtgacgtgatgctggagaactacaagaacctggccacagtaggaggtcagatcatcaaacccagtctaatctcttggttggaacaagaagagtcaaggacagttcagggaggagttctccaaggaaggaaaacacaatggaagggaactctgtgactgtgagcaatgtggagaagtcttcagtgaacactcatgccttaagacgcacgtgagaactcaaagtacagggaacactcatgactgtaatcagtatggaaaagatttccttaccctgtgtgagaaaacctctactggtgagaaactttctgagtttaatcagagtgaaaaaatcttcagcctgacaccaaatattgtataccagagaactagcacacaagaaaagtcatttgaatgtagtcactgtggaaaatccttcattaatgagtcataccttcaggcacatatgagaactcacaatggagaaaaactctacgaatggaggaattatgggccaggttttattgactctacaagcctttctgtgcttatagaaaccctcaatgcaaaaaagccctacaaatgtaaggaatgtggaaaaggctatagatacccagcctacctcagtattcacatgcgaacccacactggggagaaaccatatgaatgtaaggaatgtgggaaagccttcaattattccaactcatttcagatacatggaagaactcacactggagagaaaccctatgtatgtaaggaatgtgggaaagccttcactcagtactcgggccttagtatgcatgtacgatctcacagtggagacaagccctatgaatgtaaggaatgtgggaaatccttccttacatcctcacgccttattcaacatataagaactcacactggagagaagccttttgtatgtgttgaatgtgggaaagcctttgcagtttcctcaaatcttagtggacatttgagaactcacactgaagagaaggcctgtgagtgtaagatatgtgggaaagtatttgggtatccctcatgtcttaataatcacatgcgaacgcacagtgcccagaaaccatacacctgtaaggaatgtgggaaggcttttaactattccacccaccttaaaattcacatgcgaatccacactggagaaaaaccctatgagtgtaaacaatgtggaaaggccttcagtcattccagttcatttcaaatacatgaaaggactcacactggagagaaaccctatgaatgcaaggagtgtgggaaagccttcacgtgttccagttcctttagaattcatgaaaaaactcacacagaagagaaaccctataaatgtcagcaatgcgggaaagcttacagtcatccccgttcacttcgaagacatgaacaaattcactagtgagaaactgtccatgtaataaatgtgggaaagctctcatttgttccagttcactttaaagacatgaatgaactcactctggagagaagaagctgcatgaaaattacttaattcctgtaatcccagcattttgagaggctgaggtgggtggatcacttgaggtcaggagtttgagaccaccctggccaacatggtgaaaccttgtctctactgaaaatacaaaaaatttagccaggtgtggtgggcacctgtaatcccagctacttgggaggctgaggcaagtgaatcacttgaacccaggaagcagaggttgcagtgagcagagatcatgccactgcactccagcctgggcgatggagtgagactccatctca

SEQ ID NO: 9716 - protein, 118 aa, Homo sapiens; identical to SEQ ID NO: 9714

SEQ ID NO: 9717 - DNA, 2303 bp, Homo sapiens
gtgagcgcctgagagtctttttgcctttcagagttaaggcctcactggcctgggaaaataattgctgccttttgcatccgcgttggctccgtccccaggatcttcccggttcagggacctggcgatttctgagtgttccggaatcccaataaccctgtttaaagaggaatggagattgccactgtccatttagattaatgaggtgtcctgaagtgatggtgacatcaatgaaaggagggttctgacacgttctcacctcgcgggatggcagctgctgatttgtcccatggacattatctttctggggacccagtttgccttcatgaagaaaagacaccagcaggaagaatagtggctgactgcctaacagattgttatcaggattcagtgacctttgacgatgtggctgtggacttcacccaggaggagtggactttactggactcaactcagagaagcctctacagtgacgtgatgctggagaactacaagaacctggccacagtaggaggtcagatcatcaaacccagtctaatctcttggttggaacaagaagagtcaaggacagttcagggaggagttctccaaggatgggaaatgcgacttgaaacccagtggtctatacttcagcaggactttttgaggggtcagacatccattgggatacaattggaaggaaaacacaatggaagggaactctgtgactgtgagcaatgtggagaagtcttcagtgaacactcatgccttaagacgcacgtgagaactcaaagtacagggaacactcatgactgtaatcagtatggaaaagatttccttaccctgtgtgagaaaacctctactggtgagaaactttctgagtttaatcagagtgaaaaaatcttcagcctgacaccaaatattgtataccagagaactagcacacaagaaaagtcatttgaatgtagtcactgtggaaaatccttcattaatgagtcataccttcaggcacatatgagaactcacaatggagaaaaactctacgaatggaggaattatgggccaggttttattgactctacaagcctttctgtgcttatagaaaccctcaatgcaaaaaagccctacaaatgtaaggaatgtggaaaaggctatagatacccagcctacctcagtattcacatgcgaacccacactggggagaaaccatatgaatgtaaggaatgtgggaaagccttcaattattccaactcatttcagatacatggaagaactcacactggagagaaaccctatgtatgtaaggaatgtgggaaagccttcactcagtactcgggccttagtatgcatgtacgatctcacagtggagacaagccctatgaatgtaaggaatgtgggaaatccttccttacatcctcacgccttattcaacatataagaactcacactggagagaagccttttgtatgtgttgaatgtgggaaagcctttgcagtttcctcaaatcttagtggacatttgagaactcacactgaagagaaggcctgtgagtgtaagatatgtgggaaagtatttgggtatccctcatgtcttaataatcacatgcgaacgcacagtgcccagaaaccatacacctgtaaggaatgtgggaaggcttttaactattccacccaccttaaaattcacatgcgaatccacactggagaaaaaccctatgagtgtaaacaatgtggaaaggccttcagtcattccagttcatttcaaatacatgaaaggactcacactggagagaaaccctatgaatgcaaggagtgtgggaaagccttcacgtgttccagttcctttagaattcatgaaaaaactcacacagaagagaaaccctataaatgtcagcaatgcgggaaagcttacagtcatccccgttcacttcgaagacatgaacaaattcactagtgagaaactgtccatgtaataaatgtgggaaagctctcatttgttccagttcactttaaagacatgaatgaactcactctggagagaagaagctgcatgaaaattacttaattcctgtaatcccagcattttgagaggctgaggtgggtggatcacttgaggtcaggagtttgagaccaccctggccaacatggtgaaaccttgtctctactgaaaatacaaaaaatttagccaggtgtggtgggcacctgtaatcccagctacttgggaggctgaggcaagtgaatcacttgaacccaggaagcagaggttgcagtgagcagagatcatgccactgcactccagcctgggcgatggagtgagactccatctca

SEQ ID NO: 9718 - protein, 554 aa, Homo sapiens; identical to SEQ ID NO: 1506

SEQ ID NO: 9719 - DNA, 267 bp, Homo sapiens
ctgaatgcaaagagaaataacagagacatagtccctgtcctaaatagattttaatctactgtgaccattctgaaaatgtggtccaagattaatagcaacaccatctgcctcagcctcccaaagtgctgggattacaggcatgagccaccacactcggccattattttgtgtttgaataaaagtctcagtgctttttaaatgtgtacataagcctgaatttcggtttaggggacagaagtaaccagactgtttggggcacagtcagag

SEQ ID NO: 9720 - protein, 40 aa, Homo sapiens
MWSKINSNTICLSLPKCWDYRHEPPHSAIILCLNKSLSAF

SEQ ID NO: 9721 - DNA, 1193 bp, Homo sapiens
gcacagatgaaaacaccctgcggacaccgtaactataaacccgactcctcccgaggagcgacggtccgagcggacgctagcgggcccagcagacacgagcagagcgggccaggcctctctaacgtccgggccaaacccgtccttcaccccaaaaccagttcatctcctcggaactcacccaggccagtgaggccttaactctgaaaggcaaaaagactctcaggcgctcacagccggcgtcacaaaaggaacggcgcaccgctgacgtcatttacgctctccgcctcgggccaggcggggtttcgggactagggtttctgccgtgtaatacctcctcgaggcagaaaaattctactttccatctgcttggctgcggaggaccttggggtgggctcagcgtgggggctgcaggcagaaatgggtccagaaggcaaggtcgaggttagagccaagcctgtgggcagggctacgggcagggggcggggaggaatgtgggtccaggcccagaggaaaaggttgaagttatagccaggcctgtgggcgaggccgcagcagggcggccataggggaaggagccaatgtgttatgcatgtagaaaatagacaaaatctcactctgtcaccaaggctggagttcagtggagccatctcagctcactgcaacctccacctcccaggttcaagcgattctcctgcctcatcctcccaagtagctggaattacaggtgcatgctgccacaccctgctaatttttgtatttttagtagaggcagggttttgccatgctggccaggctggtcttgaactacttgtcaggcctctgagcccaagttaaatcatcataaaccctgtcacctgcacgtatacatccagatggcctggagcaactgaagaaccacaaaagaagtgaaacagccagttcctgccttaactgatgacgttccaccattgtgatttgttgctgccccaccccaactgatctcttgaccttgtgacattcttcttctggacgagtctcaggagttccccaccgagcaccttgtgacccccggccctgccagcaaaagataaccacctttaactttccactacctacccaaatcctataaaactgccccacccctatctccctttgctgacccctttctcggactcagcccacttgcacccaagtgaataaacagccttgttgct

SEQ ID NO: 9722 - protein, 82 aa, Homo sapiens
MHVENRQNLTLSPRLEFSGAISAHCNLHLPGSSDSPASSSQVAGITGACCHTLLIFVFLVEAGFCHAGQAGLELLVRPLSPS

SEQ ID NO: 9723 - DNA, 926 bp, Homo sapiens
gcacagatgaaaacaccctgcggacaccgtaactataaacccgactcctcccgaggagcgacggtccgagcggacgctagcgggcccagcagacacgagcagagcgggccaggcctctctaacgtccgggccaaacccgtccttcaccccaaaaccagttcatctcctcggaactcacccaggccagtgaggccttaactctgaaaggcaaaaagactctcaggcgctcacagccggcgtcacaaaaggaacggcgcaccgctgacgtcatttacgctctccgcctcgggccaggcggggtttcgggactagggtttctgccgtgtaatacctcctcgaggcagaaaaattctactttccatctgcttggctgcggaggaccttggggtgggctcagcgtgggggctgcaggcagaaatgggtccagaaggcaaggtcgaggttagagccaagcctgtgggcagggctacgggcagggggcggggaggaatgtgggtccaggcccagaggaaaaggttgaagttatagccaggcctgtgggcgaggccgcagcagggcggccataggggaaggagccaatgtgttatgcatgtagaaaatagatggcctggagcaactgaagaaccacaaaagaagtgaaacagccagttcctgccttaactgatgacgttccaccattgtgatttgttgctgccccaccccaactgatctcttgaccttgtgacattcttcttctggacgagtctcaggagttccccaccgagcaccttgtgacccccggccctgccagcaaaagataaccacctttaactttccactacctacccaaatcctataaaactgccccacccctatctccctttgctgacccctttctcggactcagcccacttgcacccaagtgaataaacagccttgttgctaac

SEQ ID NO: 9724 - protein, 63 aa, Homo sapiens
MKTPCGHRNYKPDSSRGATVRADASGPSRHEQSGPGLSNVRAKPVLHPKTSSSPRNSPRPVRP

SEQ ID NO: 9725 - DNA, 1614 bp, Homo sapiens
atgagactgatgatctgtcactgtctcccatcacctagatgggactgtctagttgcaggaaaacaagctcaggcctcctgctgatcctattttatggcagaaatccacaatggaggggaactctgtgactttatggaaaatggagaaatcttcagtgaacactcatgccttaatgcacacatgggaactgaaaatacaggggacacttatgactgtgatgagtatggagaaaactttcccatgttacacaacagtgcccctgctggagagacactttctgtgttgaatcagtgcagaaaagccttcagcctgccaccaaatgttcaccagagaacgtggataggagacaaatcctttgaatacagtgactgtgaggaagcctttgttgatcagtcacatcttcaggcaaataggataactcacaatggagaaacactctatgaacagaagcaatgtgggagagcttttacttactccacaagccatgctgtgtctgttaaaatgcatactgtagaaaaaccctacgaatgtaaggaatgtggaaaattctttagatattcttcatatcttaatagtcacatgcgaacccatactggggagaaaccctatgaatgtaaggaatgtgggaaatgcttcactgtttcttcacacctagttgaacatgtaagaattcatactggagagaaaccttatcaatgtaaggaatgtggaagagccttcgctgggcgctcaggccttactaaacatgtacgaatacacactggagagaagccctatgaatgtaacgaatgtgggaaagcctacaataggttttatctactaactgaacattttaaaactcacacagaggagaagccctttgaatgtaaggtatgtggaaaatccttcagaagctcttcatgccttaagaatcactttagaattcacactggaataaaaccctataaatgtaaggagtgtgggaaagcattcactgtttcctcaagcttacataatcatgtaaaaatccatactggagagaagccctatgaatgtaaggactgtgggaaagcctttgctacatcttcacaactcattgaacatataagaactcacactggagagaaaccgtatatatgtaaggaatgtgggaaaaccttccgtgcttcttcacatctacagaaacatgttagaattcacactggagagaaaccctatatatgtaacgaatgtgggaaagcctacaatagattttatttacttactaaacatttaaaaacacactgaagaaaaactctgaatgtaaggaatgtggaaatcttttaggaatttctcataccataattaccacatttgaattcacactgaagagaaattttattggtacaaagaatgtgaggaggccttcagttatccccattcacttcgaagacatgaaagaactcatactctatgtgtcccctataaattttaggaatgttagggagccaatggaatctttttttattattttattttattttattttattttattttattttattttattttatttgagacagagttttgctgttgtcatcacacaggctggagtgcaatggcatgatcccagctcactgcaacctttgtctcc

SEQ ID NO: 9726 - protein, 390 aa, Homo sapiens; identical to SEQ ID NO: 1508

SEQ ID NO: 9727 - DNA, 1880 bp, Homo sapiens
tttcgcctttatcgtggtggagtccaccctggctgtggggctgtcggtcctccttgcgcggccagtggctagaggccgcaggctcagtgggtcccagtcaggagccaggtcgggaagtgtgtttgtcccgactccgcgcgttttctggagtggtttcatccgctgtgctcccttcttcaaaagcttggaaagcaacctttgacctattcaaactcagtctgtctcttgactggaggaggagaaggaaaagttgagcacattgccaaccggagttccccaagaatggcaagttaaaaccaaagtgtcagcacctcaacaacatttttttttggcttaacaaaacatcaaacggcatacaaatggcagaaatccacaatggaggggaactctgtgactttatggaaaatggagaaatcttcagtgaacactcatgccttaatgcacacatgggaactgaaaatacaggggacacttatgactgtgatgagtatggagaaaactttcccatgttacacaacagtgcccctgctggagagacactttctgtgttgaatcagtgcagaaaagccttcagcctgccaccaaatgttcaccagagaacgtggataggagacaaatcctttgaatacagtgactgtgaggaagcctttgttgatcagtcacatcttcaggcaaataggataactcacaatggagaaacactctatgaacagaagcaatgtgggagagcttttacttactccacaagccatgctgtgtctgttaaaatgcatactgtagaaaaaccctacgaatgtaaggaatgtggaaaattctttagatattcttcatatcttaatagtcacatgcgaacccatactggggagaaaccctatgaatgtaaggaatgtgggaaatgcttcactgtttcttcacacctagttgaacatgtaagaattcatactggagagaaaccttatcaatgtaaggaatgtggaagagccttcgctgggcgctcaggccttactaaacatgtacgaatacacactggagagaagccctatgaatgtaacgaatgtgggaaagcctacaataggttttatctactaactgaacattttaaaactcacacagaggagaagccctttgaatgtaaggtatgtggaaaatccttcagaagctcttcatgccttaagaatcactttagaattcacactggaataaaaccctataaatgtaaggagtgtgggaaagcattcactgtttcctcaagcttacataatcatgtaaaaatccatactggagagaagccctatgaatgtaaggactgtgggaaagcctttgctacatcttcacaactcattgaacatataagaactcacactggagagaaaccgtatatatgtaaggaatgtgggaaaaccttccgtgcttcttcacatctacagaaacatgttagaattcacactggagagaaaccctatatatgtaacgaatgtgggaaagcctacaatagattttatttacttactaaacatttaaaaacacactgaagaaaaactctgaatgtaaggaatgtggaaatcttttaggaatttctcataccataattaccacatttgaattcacactgaagagaaattttattggtacaaagaatgtgaggaggccttcagttatccccattcacttcgaagacatgaaagaactcatactctatgtgtcccctataaattttaggaatgttagggagccaatggaatctttttttattattttattttattttattttattttattttattttattttattttatttgagacagagttttgctgttgtcatcacacaggctggagtgcaatggcatgatcccagctcactgcaacctttgtctcc

SEQ ID NO: 9728 - protein, 390 aa, Homo sapiens; identical to SEQ ID NO: 1508

SEQ ID NO: 9729 - DNA, 1746 bp, Homo sapiens
ccggcgctggctccgcatggtcagtgccatttcgcctttatcgtggtggagtccaccctggctgtggacctattcaaactcagtctgtctcttgactggaggaggagaaggaaaagttgagcacattgccaaccggagttccccaagaatggcaagttaaaaccaaagtgtcagcacctcaacaacatttttttttggcttaacaaaacatcaaacggcatacaaatggcagaaatccacaatggaggggaactctgtgactttatggaaaatggagaaatcttcagtgaacactcatgccttaatgcacacatgggaactgaaaatacaggggacacttatgactgtgatgagtatggagaaaactttcccatgttacacaacagtgcccctgctggagagacactttctgtgttgaatcagtgcagaaaagccttcagcctgccaccaaatgttcaccagagaacgtggataggagacaaatcctttgaatacagtgactgtgaggaagcctttgttgatcagtcacatcttcaggcaaataggataactcacaatggagaaacactctatgaacagaagcaatgtgggagagcttttacttactccacaagccatgctgtgtctgttaaaatgcatactgtagaaaaaccctacgaatgtaaggaatgtggaaaattctttagatattcttcatatcttaatagtcacatgcgaacccatactggggagaaaccctatgaatgtaaggaatgtgggaaatgcttcactgtttcttcacacctagttgaacatgtaagaattcatactggagagaaaccttatcaatgtaaggaatgtggaagagccttcgctgggcgctcaggccttactaaacatgtacgaatacacactggagagaagccctatgaatgtaacgaatgtgggaaagcctacaataggttttatctactaactgaacattttaaaactcacacagaggagaagccctttgaatgtaaggtatgtggaaaatccttcagaagctcttcatgccttaagaatcactttagaattcacactggaataaaaccctataaatgtaaggagtgtgggaaagcattcactgtttcctcaagcttacataatcatgtaaaaatccatactggagagaagccctatgaatgtaaggactgtgggaaagcctttgctacatcttcacaactcattgaacatataagaactcacactggagagaaaccgtatatatgtaaggaatgtgggaaaaccttccgtgcttcttcacatctacagaaacatgttagaattcacactggagagaaaccctatatatgtaacgaatgtgggaaagcctacaatagattttatttacttactaaacatttaaaaacacactgaagaaaaactctgaatgtaaggaatgtggaaatcttttaggaatttctcataccataattaccacatttgaattcacactgaagagaaattttattggtacaaagaatgtgaggaggccttcagttatccccattcacttcgaagacatgaaagaactcatactctatgtgtcccctataaattttaggaatgttagggagccaatggaatctttttttattattttattttattttattttattttattttattttattttattttatttgagacagagttttgctgttgtcatcacacaggctggagtgcaatggcatgatcccagctcactgcaacctttgtctcc

SEQ ID NO: 9730 - protein, 390 aa, Homo sapiens; identical to SEQ ID NO: 1508

SEQ ID NO: 9731 - DNA, 400 bp, Homo sapiens
tcccgccactactctcttaataacctttgtgaagagagtgtcttctgctctgtcaacaaagggcgggggagtgggctatacagatgacacatagtaaatccagtgcaacactcctgtctctctaggattccctccttcacattatgccagggaagctctggcatatgagcctcattaattataacaatttcagccctgagaacataagaaataactttatttcaggggtgtcctaaagaagctctctgattcttttgtttttggatggaatcttgctctgttgcccagcctgggggacagagcaaaaatctctcaaaaagaaaaaaaagagagagagagagagatgtaatactacccatgatataagaaaagctacaaaagacacaatattcgagctttt

SEQ ID NO: 9732 - protein, 33 aa, Homo sapiens
MESCSVAQPGGQSKNLSKRKKRERERDVILPMI

SEQ ID NO: 9733 - DNA, 991 bp, Homo sapiens
ctttatggtggtggagtctgcccaggctgtgggactatcagtcctccctgtgcgtccagttcggagaggctgcgcgctctctcggctcactgcaacctctgcaacctctgcctccagggctgaggcaggagaatggcatgaacctgggaggcacaggttgcagtgagccgagatcgcagccactgcattccagcctggacaacagagcgagactctgtctcaaaaacaaaactaaaaaaccctattttcacatacagtcacattgggatttggagcttcaacatatgaattttcagggttatcattcagtccaaagtacttaatatgattcttttccgtttccacatagacaatcacataatctgtaaataatgactcttacttttccactttagtcgttaggttatacctatatatatattttcttgctttactggactaatttcaacctccagcacaccaccaatgaatagcagtaataccagcataattgtctgcagttctgctgagatacgtgctctattttattggcttggctgtaggtttttattttattttttgaagaggctaatctcttacaggaaaggtttctttttatatccagtttttacatgatgaatgatttcccagtatttcataattcatgaggctgaattcctcttgaatttattaaatgcttcctgtgcatcctctgtgatgatcatgtttatttactgctagaactcaagtacctagaactgttcctggccaatgatggtatgtaataaatacttcaatgaaatgatgtggtgatgcatgtctatagttctagctacttgggaggatggcctgaacccaggggttctagaccagcttagacaacatagcaagaccacatctcaaaaaacaaaaaacaaaacgaatgaatgaatgcatggaaggactcatctctaaaataaatgtggtcaggttgggtgtggtggctcatgcctgtaataccagcactttggga

SEQ ID NO: 9734 - protein, 53 aa, Homo sapiens
MVVESAQAVGLSVLPVRPVRRGCALSRLTATSATSASRAEAGEWHEPGRHRLQ

SEQ ID NO: 9735 - DNA, 4626 bp, Homo sapiens
gtcagtgcggtttcgcctttatggtggtggagtctgcccaggctgtggaccgcaaataaccctgtacaaagaggaatggagattgcctctatccacctagattcataagctggcctgaggtgatcttggcatcaaggaagggatgcacatcatcacaccatcagcttcagagaatggcagccatttatttgtcccgtggattcagtgacgtttgatgatgtggctgtggacttcaccccagaggagtgggctttactggacacaactgagaaatacctctacagagatgtgatgctggagaactacatgaacctggcctctgtggaatgggaaatacaacctagaaccaaacggtcatcacttcagcagggttttttgaagaatcaaatattcagtgggatacaaatgacaagaggctacagtggatggaaactctgtgactgtaagaattgtggagaggtcttcagggaacagttttgccttaagacacacatgagagttcagaatggagggaatacttctgagggtaattgttatggaaaagacaccctcagtgtgcacaaggaagcctctactggacaggaactttccaaatttaatccatgtggaaaagtctttactctaactccaggtcttgctgtacatcttgaagttctcaatgcaagacaaccctacaaatgtaaggaatgtggaaaaggctttaagtattttgcaagccttgataatcatatgggaatccacactgatgagaaactctgtgaatttcaggaatatgggagagctgtcacagcttcttcacacctaaagcagtgtgtagcagttcatacaggaaagaaatccaaaaagactaagaaatgtgggaaatccttcactaatttttctcaactttatgcacctgtgaaaactcataaaggagagaagtcctttgaatgtaaagaatgtggaagatcctttagaaattcctcatgccttaatgatcacattcaaattcacactggaataaaaccacacaagtgtacttactgtgggaaagccttcactagatcaactcaacttactgaacatgtaagaactcacactggaataaaaccctatgaatgtaaggaatgtggccaagcctttgctcagtactcgggcctttctatacacatacgaagtcacagtggaaagaaaccctatcagtgtaaggaatgtgggaaagccttcactacatccacaagtcttattcagcatacaagaattcacacaggagagaagccttatgaatgtgttgaatgtgggaagaccttcattacttcttcccgtcgtagtaaacatttgaaaactcatagtggagaaaagccctttgtatgcaagatatgtgggaaagcatttctatattcctcacgccttaatgttcacctgcgaactcataccggagagaaacccttcgtatgtaaagaatgtgggaaagcatttgctgtttcctcacgcctaagtagacatgaaagaattcacactggggagaaaccctatgaatgcaaggatatgagtgttaccatttagcccatcggttgccatctttaattattggcaatgacaccaaagattatcagatttgtcctaaatgccttttggaggttgtaatgactcatggattggccttagataccatcctgagggtctgaaattaaacctacaggttctgaatacaacatcatggttgcctgagtctgggcatctgtgaagaagggtcatggatggtgaggtcagtactgcaggctgcctcaccttggtgattagattcctaagatcatagcattaacaagttgtgtatgagataaatcatgcagattgaccccagcccctgttggttagtggctgccagtgtggcacatttatgtcaaaatttaccagaagccaagatgatgtaggaccccaaaggtgggttgttaagagatgctcctccaagggtctcttctgatcccacggatcctgcagagcgtgtcaggaatgaaaccatccataactgccagtgccctttcacagctgattatttctgtgtccccttgtaaaatctaagaagtgtgacagccttgcctgttctgccttgtatgtctattttagatggcacaatgtaagtggcaatgtctcttctagtataatccagtctctcttctcacttctgtcaaggtggctgatatagtccatgaatcccactcatgatctctttatcagatgatcgttcagccacactttgaggattctcttcagtacaagttttctaatttttgcattatggataggctgagaattttccaaatctccaagttctggttcctttttccttaacaattttttctgcaattcaggtctccttttgcatttttgctgagaccagctgggtcatggagaccctgacccagcagctctagaggaattaagacaaagacacagaaatagagtgcagagtgggaatcggggctcacagccttcagagctgagagccttgaacagagtttgacccacatatttattgacagtaagcctgtgataaacattatttctatagattatagattagctaaaagtattccttacaagaaagaaagggacaggctctggcttgttatctgcaacaggaacatgtccttaaggcacaaatcactcatggtattgtttgtggtttaggaatgcctgagcagttttccagttttccaccgtgggtgggccaggtgttccttgccctcattcgggtaaaccagcaacctccagcatgggtgtcatagccatcacgagcatgtcacagtgccgcagagattttgtttatgggcagtttctcatggcctgtttatgtccaaatttggggggcctgttctgagcacattttcctgtaagcactcaggaagaatgaagcttcctgtgtcctttaacactttaagtacagatcttagtgatacataaccagttttatctctctcaagctctaccttccgcaaagtgctagaatacagttctgccaagttcttcactacttcgtatcaagggttgtattttctttatttcccaatagcatgttcctcattccccaatgacacctcaccaggatcacccttaccaaccttacttccagcttgcacatcagaatttttccagcctcatttgtcagtttcaaatctgcttcacatttttagtttttttgtttgtttgtttttaatctgccttaatgagctcaggccactatcacaaaataccacagaccaaatggcttacaaatttgttaattttaaataaatgaggttaaaaacaaatttatattctcacatttctcgaggctggaagtctgagatcagagtgccagcatggtcaacttctggcgagagctctcttcctggtatgtaaatgcccacttcctcatgtcttcacaggaaggaaaccaacaaataggtctctctctcctctctcctttctcctctctcctctctcctctttctctctctctccccaccatctctctccttcccctccctccccctccctccccctacccatctcttgacatcatttcacgatacttctaaagagcctattttcaggccgggcgcggtggctcacacctgtaatcccagcactttgggaggccgaggtgggcggatcacgaggtcaggagatcgagactgtcctagttaacacggtgaaaccctgtctctactacaaatacaaaaaattagcctggcgtggtggcgggtacctgcagtcccagctactcgggaggctgaggcaggagaatggcatgaacctgggaggcacaggttgcagtgagccgagatcgcagccactgcattccagcctggacaacagagcgagactctgtctcaaaaacaaaactaaaaaaccctattttcacatacagtcacattgggatttggagcttcaacatatgaattttcagggttatcattcagtccaaagtacttaatatgattcttttccgtttccacatagacaatcacataatctgtaaataatgactcttacttttccactttagtcgttaggttatacctatatatatattttcttgctttactggactaatttcaacctccagcacaccaccaatgaatagcagtaataccagcataattgtctgcagttctgctgagatacgtgctctattttattggcttggctgtaggtttttattttattttttgaagaggctaatctcttacaggaaaggtttctttttatatccagtttttacatgatgaatgatttcccagtatttcataattcatgaggctgaattcctcttgaatttattaaatgcttcctgtgcatcctctgtgatgatcatgtttatttactgctagaactcaagtacctagaactgttcctggccaatgatggtatgtaataaatacttcaatgaaatgatgtggtgatgcatgtctatagttctagctacttgggaggatggcctgaacccaggggttctagaccagcttagacaacatagcaagaccacatctcaaaaaacaaaaaacaaaacgaatgaatgaatgcatggaaggactcatctctaaaataaatgtggtcaggttgggtgtggtggctcatgcctgtaataccagcactttggga

SEQ ID NO: 9736 - protein, 417 aa, Homo sapiens; identical to SEQ ID NO: 1510

SEQ ID NO: 9737 - DNA, 3632 bp, Homo sapiens
atctttaccggctgtggctcagcatggtcagtgccgtttaacctttattgtggtggagtccaccccgctgtgttctgcatccccctccctgagccaaccccaggccctttctgcacccacccgagaggaaactagaatttctgtgttctacccggtcctacgtggctgaaactggagcccacgagcctcgcccggccagagtgttgaagcggaagtgacgtcagcgcaccaccgccatcttttccggcgctggctcctctccgtcagtgcggtttcgcctttatggtggtggagtctgcccaggctgtggaccgcaaataaccctgtacaaagaggaatggagattgcctctatccacctagattcataagctggcctgaggtgatcttggcatcaaggaagggatgcacatcatcacaccatcagcttcagagaatggcagccatttatttgtcccgtgggtttttttccagggaaccaatctgcccttttgaagaaaagacaaaggtagaaaggatggtggaggactacctggcaagtggttatcaggattcagtgacgtttgatgatgtggctgtggacttcaccccagaggagtgggctttactggacacaactgagaaatacctctacagagatgtgatgctggagaactacatgaacctggcctctgtggaatgggaaatacaacctagaaccaaacggtcatcacttcagcagggttttttgaagaatcaaatattcagtgggatacaaatgacaagaggctacagtggatggaaactctgtgactgtaagaattgtggagaggtcttcagggaacagttttgccttaagacacacatgagagttcagaatggagggaatacttctgagggtaattgttatggaaaagacaccctcagtgtgcacaaggaagcctctactggacaggaactttccaaatttaatccatgtggaaaagtctttactctaactccaggtcttgctgtacatcttgaagttctcaatgcaagacaaccctacaaatgtaaggaatgtggaaaaggctttaagtattttgcaagccttgataatcatatgggaatccacactgatgagaaactctgtgaatttcaggaatatgggagagctgtcacagcttcttcacacctaaagcagtgtgtagcagttcatacaggaaagaaatccaaaaagactaagaaatgtgggaaatccttcactaatttttctcaactttatgcacctgtgaaaactcataaaggagagaagtcctttgaatgtaaagaatgtggaagatcctttagaaattcctcatgccttaatgatcacattcaaattcacactggaataaaaccacacaagtgtacttactgtgggaaagccttcactagatcaactcaacttactgaacatgtaagaactcacactggaataaaaccctatgaatgtaaggaatgtggccaagcctttgctcagtactcgggcctttctatacacatacgaagtcacagtggaaagaaaccctatcagtgtaaggaatgtgggaaagccttcactacatccacaagtcttattcagcatacaagaattcacacaggagagaagccttatgaatgtgttgaatgtgggaagaccttcattacttcttcccgtcgtagtaaacatttgaaaactcatagtggagaaaagccctttgtatgcaagatatgtgggaaagcatttctatattcctcacgccttaatgttcacctgcgaactcataccggagagaaacccttcgtatgtaaagaatgtgggaaagcatttgctgtttcctcacgcctaagtagacatgaaagaattcacactggggagaaaccctatgaatgcaaggatatgagtgttaccatttagcccatcggttgccatctttaattattggcaatgacaccaaagattatcagatttgtcctaaatgccttttggaggttgtaatgactcatggattggccttagataccatcctgagggtctgaaattaaacctacaggttctgaatacaacatcatggttgcctgagtctgggcatctgtgaagaagggtcatggatggtgaggtcagtactgcaggctgcctcaccttggtgattagattcctaagatcatagcattaacaagttgtgtatgagataaatcatgcagattgaccccagcccctgttggttagtggctgccagtgtggcacatttatgtcaaaatttaccagaagccaagatgatgtaggaccccaaaggtgggttgttaagagatgctcctccaagggtctcttctgatcccacggatcctgcagagcgtgtcaggaatgaaaccatccataactgccagtgccctttcacagctgattatttctgtgtccccttgtaaaatctaagaagtgtgacagccttgcctgttctgccttgtatgtctattttagatggcacaatgtaagtggcaatgtctcttctagtataatccagtctctcttctcacttctgtcaaggtggctgatatagtccatgaatcccactcatgatctctttatcagatgatcgttcagccacactttgaggattctcttcagtacaagttttctaatttttgcattatggataggctgagaattttccaaatctccaagttctggttcctttttccttaacaattttttctgcaattcaggtctccttttgcatttttgctgagaccagctgggtcatggagaccctgacccagcagctctagaggaattaagacaaagacacagaaatagagtgcagagtgggaatcggggctcacagccttcagagctgagagccttgaacagagtttgacccacatatttattgacagtaagcctgtgataaacattatttctatagattatagattagctaaaagtattccttacaagaaagaaagggacaggctctggcttgttatctgcaacaggaacatgtccttaaggcacaaatcactcatggtattgtttgtggtttaggaatgcctgagcagttttccagttttccaccgtgggtgggccaggtgttccttgccctcattcgggtaaaccagcaacctccagcatgggtgtcatagccatcacgagcatgtcacagtgccgcagagattttgtttatgggcagtttctcatggcctgtttatgtccaaatttggggggcctgttctgagcacattttcctgtaagcactcaggaagaatgaagcttcctgtgtcctttaacactttaagtacagatcttagtgatacataaccagttttatctctctcaagctctaccttccgcaaagtgctagaatacagttctgccaagttcttcactacttcgtatcaagggttgtattttctttatttcccaatagcatgttcctcattccccaatgacacctcaccaggatcacccttaccaaccttacttccagcttgcacatcagaatttttccagcctcatttgtcagtttcaaatctgcttcacatttttagtttttttgtttgtttgtttttaatctgccttaatgagctcaggccactatcacaaaataccacagaccaaatggcttacaaatttgttaattttaaataaatgaggtt

SEQ ID NO: 9738 - protein, 486 aa, Homo sapiens
MAAIYLSRGFFSREPICPFEEKTKVERMVEDYLASGYQDSVTFDDVAVDFTPEEWALLDTTEKYLYRDVMLENYMNLASVEWEIQPRTKRSSLQQGFLKNQIFSGIQMTRGYSGWKLCDCKNCGEVFREQFCLKTHMRVQNGGNTSEGNCYGKDTLSVHKEASTGQELSKFNPCGKVFTLTPGLAVHLEVLNARQPYKCKECGKGFKYFASLDNHMGIHTDEKLCEFQEYGRAVTASSHLKQCVAVHTGKKSKKTKKCGKSFTNFSQLYAPVKTHKGEKSFECKECGRSFRNSSCLNDHIQIHTGIKPHKCTYCGKAFTRSTQLTEHVRTHTGIKPYECKECGQAFAQYSGLSIHIRSHSGKKPYQCKECGKAFTTSTSLIQHTRIHTGEKPYECVECGKTFITSSRRSKHLKTHSGEKPFVCKICGKAFLYSSRLNVHLRTHTGEKPFVCKECGKAFAVSSRLSRHERIHTGEKPYECKDMSVTI

SEQ ID NO: 9739 - DNA, 2882 bp, Homo sapiens
attctgatacatgctgtttatctagatctttcctactttcctttcccgaaaatctactctttctgttttccatcagctttaattttcttttcttttctgaagtcttgctctgtcacccaggctggagtgcaatggcatgatctcagctcactgcaacttctgcctcccaggttcaagcaatactgcctcagcctcacaagtagctgggattataggcatgcgccaccatgcctggctaattttgtatttttagtagagatggggtttctccatgttggtcaggctggtctcgaactcctgacctcaagtgatccacccgcctcagcctcccaaagtgctgggattacaggtgtgagccaccactcccggcatttttaatttttacagaagtagtttgtaataaactatctaaacacatcagttatgtaataaaccccacatcattatagccaaatttttgatgtaccaaaatcctcaaggttctctggcttttattttattgctgtgtttaatttgaaaacaagtaaaaatgactcattttaaatgaatatttcttctctaaatccttacgtttctttttctgcttaactttagaatgggaaatacaacctagaaccaaacggtcatcacttcagcagggttttttgaagaatcaaatattcagtgggatacaaatgacaagaggctacagtggatggaaactctgtgactgtaagaattgtggagaggtcttcagggaacagttttgccttaagacacacatgagagttcagaatggagggaatacttctgagggtaattgttatggaaaagacaccctcagtgtgcacaaggaagcctctactggacaggaactttccaaatttaatccatgtggaaaagtctttactctaactccaggtcttgctgtacatcttgaagttctcaatgcaagacaaccctacaaatgtaaggaatgtggaaaaggctttaagtattttgcaagccttgataatcatatgggaatccacactgatgagaaactctgtgaatttcaggaatatgggagagctgtcacagcttcttcacacctaaagcagtgtgtagcagttcatacaggaaagaaatccaaaaagactaagaaatgtgggaaatccttcactaatttttctcaactttatgcacctgtgaaaactcataaaggagagaagtcctttgaatgtaaagaatgtggaagatcctttagaaattcctcatgccttaatgatcacattcaaattcacactggaataaaaccacacaagtgtacttactgtgggaaagccttcactagatcaactcaacttactgaacatgtaagaactcacactggaataaaaccctatgaatgtaaggaatgtggccaagcctttgctcagtactcgggcctttctatacacatacgaagtcacagtggaaagaaaccctatcagtgtaaggaatgtgggaaagccttcactacatccacaagtcttattcagcatacaagaattcacacaggagagaagccttatgaatgtgttgaatgtgggaagaccttcattacttcttcccgtcgtagtaaacatttgaaaactcatagtggagaaaagccctttgtatgcaagatatgtgggaaagcatttctatattcctcacgccttaatgttcacctgcgaactcataccggagagaaacccttcgtatgtaaagaatgtgggaaagcatttgctgtttcctcacgcctaagtagacatgaaagaattcacactggggagaaaccctatgaatgcaaggatatgagtgttaccatttagcccatcggttgccatctttaattattggcaatgacaccaaagattatcagatttgtcctaaatgccttttggaggttgtaatgactcatggattggccttagataccatcctgagggtctgaaattaaacctacaggttctgaatacaacatcatggttgcctgagtctgggcatctgtgaagaagggtcatggatggtgaggtcagtactgcaggctgcctcaccttggtgattagattcctaagatcatagcattaacaagttgtgtatgagataaatcatgcagattgaccccagcccctgttggttagtggctgccagtgtggcacatttatgtcaaaatttaccagaagccaagatgatgtaggaccccaaaggtgggttgttaagagatgctcctccaagggtctcttctgatcccacggatcctgcagagcgtgtcaggaatgaaaccatccataactgccagtgccctttcacagctgattatttctgtgtccccttgtaaaatctaagaagtgtgacagccttgcctgttctgccttgtatgtctattttagatggcacaatgtaagtggcaatgtctcttctagtataatccagtctctcttctcacttctgtcaaggtggctgatatagtccatgaatcccactcatgatctctttatcagatgatcgttcagccacactttgaggattctcttcagtacaagttttctaatttttgcattatggataggctgagaattttccaaatctccaagttctggttcctttttccttaacaattttttctgcaattcaggtctccttttgcatttttgctgagaccagctgggtcatggagaccctgacccagcagctctagaggaattaagacaaagacacagaaatagagtgcagagtgggaatcggggctcacagccttcagagctgagagccttgaacagagtttgacccacatatttattgacagtaagcctgtgataaacattatttctatagattatagattagctaaaagtattccttacaagaaagaaagggacaggctctggcttgttatc

SEQ ID NO: 9740 - protein, 379 aa, Homo sapiens
MTRGYSGWKLCDCKNCGEVFREQFCLKTHMRVQNGGNTSEGNCYGKDTLSVHKEASTGQELSKFNPCGKVFTLTPGLAVHLEVLNARQPYKCKECGKGFKYFASLDNHMGIHTDEKLCEFQEYGRAVTASSHLKQCVAVHTGKKSKKTKKCGKSFTNFSQLYAPVKTHKGEKSFECKECGRSFRNSSCLNDHIQIHTGIKPHKCTYCGKAFTRSTQLTEHVRTHTGIKPYECKECGQAFAQYSGLSIHIRSHSGKKPYQCKECGKAFTTSTSLIQHTRIHTGEKPYECVECGKTFITSSRRSKHLKTHSGEKPFVCKICGKAFLYSSRLNVHLRTHTGEKPFVCKECGKAFAVSSRLSRHERIHTGEKPYECKDMSVTI

SEQ ID NO: 9741 - DNA, 3154 bp, Homo sapiens
tgaaaatcagtccagtagctcagtaattactacttaagcttgaccttcatggtgccaactgcatctttcttacattgctgggtgcggtgacggatgataaagcagatgaaagtgtccttttatcaaatcattcacttatcagcatttatcaggtatctgcagtgtgctgaggagtgtgctgcatagacaccaatgggacaggaagagctcctagcctggttgtgctgagatcaagcgtaagcagtgtgcagtggctcatgcctgtaattccagctactcaggagacagaggtgagaggaccacttcagcccaggagatcgaagctgtagtaatcagcagttgtgcctgggtgacacagttggaccctgtttttatatataaataaataaacagattagatagatgatagatagaggaaaattcatctttaggaagtactgttctaatcaaaataaaaataaaatttaaaatttaaaaatacaaatattaaaaaattaaaaatagatcagcaaaaaaagatttaaaaaaattttaaaaagtgctgtttaaggcatatgcctgtaggaggtcaaccttgagtgtttagacacaagagctcctgagacattaaaccctggagtagatcatgggagacctgacaaccacgtgtaagtgagtataaggttccccttcatcattctccagtgaatattggtggaagtgttcattggctcaaaccagcatgtgtatgatgacataggattcagtgacgtttgatgatgtggctgtggacttcaccccagaggagtgggctttactggacacaactgagaaatacctctacagagatgtgatgctggagaactacatgaacctggcctctgtggaatgggaaatacaacctagaaccaaacggtcatcacttcagcagggttttttgaagaatcaaatattcagtgggatacaaatgacaagaggctacagtggatggaaactctgtgactgtaagaattgtggagaggtcttcagggaacagttttgccttaagacacacatgagagttcagaatggagggaatacttctgagggtaattgttatggaaaagacaccctcagtgtgcacaaggaagcctctactggacaggaactttccaaatttaatccatgtggaaaagtctttactctaactccaggtcttgctgtacatcttgaagttctcaatgcaagacaaccctacaaatgtaaggaatgtggaaaaggctttaagtattttgcaagccttgataatcatatgggaatccacactgatgagaaactctgtgaatttcaggaatatgggagagctgtcacagcttcttcacacctaaagcagtgtgtagcagttcatacaggaaagaaatccaaaaagactaagaaatgtgggaaatccttcactaatttttctcaactttatgcacctgtgaaaactcataaaggagagaagtcctttgaatgtaaagaatgtggaagatcctttagaaattcctcatgccttaatgatcacattcaaattcacactggaataaaaccacacaagtgtacttactgtgggaaagccttcactagatcaactcaacttactgaacatgtaagaactcacactggaataaaaccctatgaatgtaaggaatgtggccaagcctttgctcagtactcgggcctttctatacacatacgaagtcacagtggaaagaaaccctatcagtgtaaggaatgtgggaaagccttcactacatccacaagtcttattcagcatacaagaattcacacaggagagaagccttatgaatgtgttgaatgtgggaagaccttcattacttcttcccgtcgtagtaaacatttgaaaactcatagtggagaaaagccctttgtatgcaagatatgtgggaaagcatttctatattcctcacgccttaatgttcacctgcgaactcataccggagagaaacccttcgtatgtaaagaatgtgggaaagcatttgctgtttcctcacgcctaagtagacatgaaagaattcacactggggagaaaccctatgaatgcaaggatatgagtgttaccatttagcccatcggttgccatctttaattattggcaatgacaccaaagattatcagatttgtcctaaatgccttttggaggttgtaatgactcatggattggccttagataccatcctgagggtctgaaattaaacctacaggttctgaatacaacatcatggttgcctgagtctgggcatctgtgaagaagggtcatggatggtgaggtcagtactgcaggctgcctcaccttggtgattagattcctaagatcatagcattaacaagttgtgtatgagataaatcatgcagattgaccccagcccctgttggttagtggctgccagtgtggcacatttatgtcaaaatttaccagaagccaagatgatgtaggaccccaaaggtgggttgttaagagatgctcctccaagggtctcttctgatcccacggatcctgcagagcgtgtcaggaatgaaaccatccataactgccagtgccctttcacagctgattatttctgtgtccccttgtaaaatctaagaagtgtgacagccttgcctgttctgccttgtatgtctattttagatggcacaatgtaagtggcaatgtctcttctagtataatccagtctctcttctcacttctgtcaaggtggctgatatagtccatgaatcccactcatgatctctttatcagatgatcgttcagccacactttgaggattctcttcagtacaagttttctaatttttgcattatggataggctgagaattttccaaatctccaagttctggttcctttttccttaacaattttttctgcaattcaggtctccttttgcatttttgctgagaccagctgggtcatggagaccctgacccagcagctctagaggaattaagacaaagacacagaaatagagtgcagagtgggaatcggggctcacagccttcagagctgagagccttgaacagagtttgacccacatatttattgacagtaagcctgtgataaacattatttctatagattatagattagctaaaagtattccttacaagaaagaaagggacaggctctggcttgttatc

SEQ ID NO: 9742 - protein, 417 aa, Homo sapiens; identical to SEQ ID NO: 1510

SEQ ID NO: 9743 - DNA, 1967 bp, Homo sapiens
attctgatacatgctgtttatctagatctttcctactttcctttcccgaaaatctactctttctgttttccatcagctttaattttcttttcttttctgaagtcttgctctgtcacccaggctggagtgcaatggcatgatctcagctcactgcaacttctgcctcccaggttcaagcaatactgcctcagcctcacaagtagctgggattataggcatgcgccaccatgcctggctaattttgtatttttagtagagatggggtttctccatgttggtcaggctggtctcgaactcctgacctcaagtgatccacccgcctcagcctcccaaagtgctgggattacaggtgtgagccaccactcccggcatttttaatttttacagaagtagtttgtaataaactatctaaacacatcagttatgtaataaaccccacatcattatagccaaatttttgatgtaccaaaatcctcaaggttctctggcttttattttattgctgtgtttaatttgaaaacaagtaaaaatgactcattttaaatgaatatttcttctctaaatccttacgtttctttttctgcttaactttagaatgggaaatacaacctagaaccaaacggtcatcacttcagcagggttttttgaagaatcaaatattcagtgggatacaaatgacaagaggctacagtggatggaaactctgtgactgtaagaattgtggagaggtcttcagggaacagttttgccttaagacacacatgagagttcagaatggagggaatacttctgagggtaattgttatggaaaagacaccctcagtgtgcacaaggaagcctctactggacaggaactttccaaatttaatccatgtggaaaagtctttactctaactccaggtcttgctgtacatcttgaagttctcaatgcaagacaaccctacaaatgtaaggaatgtggaaaaggctttaagtattttgcaagccttgataatcatatgggaatccacactgatgagaaactctgtgaatttcaggaatatgggagagctgtcacagcttcttcacacctaaagcagtgtgtagcagttcatacaggaaagaaatccaaaaagactaagaaatgtgggaaatccttcactaatttttctcaactttatgcacctgtgaaaactcataaaggagagaagtcctttgaatgtaaagaatgtggaagatcctttagaaattcctcatgccttaatgatcacattcaaattcacactggaataaaaccacacaagtgtacttactgtgggaaagccttcactagatcaactcaacttactgaacatgtaagaactcacactggaataaaaccctatgaatgtaaggaatgtggccaagcctttgctcagtactcgggcctttctatacacatacgaagtcacagtggaaagaaaccctatcagtgtaaggaatgtgggaaagccttcactacatccacaagtcttattcagcatacaagaattcacacaggagagaagccttatgaatgtgttgaatgtgggaagaccttcattacttcttcccgtcgtagtaaacatttgaaaactcatagtggagaaaagccctttgtatgcaagatatgtgggaaagcatttctatattcctcacgccttaatgttcacctgcgaactcataccggagagaaacccttcgtatgtaaagaatgtgggaaagcatttgctgtttcctcacgcctaagtagacatgaaagaattcacactggggagaaaccctatgaatgcaaggatatgagtgttaccatttagcccatcggttgccatctttaattattggcaatgacaccaaagattatcagatttgtcctaaatgccttttggaggttgtaatgactcatggattggccttagataccatcctgagggtctgaaattaaacctacaggttctgaatacaacatc

SEQ ID NO: 9744 - protein, 379 aa, Homo sapiens; identical to SEQ ID NO: 9740

SEQ ID NO: 9745 - DNA, 2239 bp, Homo sapiens
tgaaaatcagtccagtagctcagtaattactacttaagcttgaccttcatggtgccaactgcatctttcttacattgctgggtgcggtgacggatgataaagcagatgaaagtgtccttttatcaaatcattcacttatcagcatttatcaggtatctgcagtgtgctgaggagtgtgctgcatagacaccaatgggacaggaagagctcctagcctggttgtgctgagatcaagcgtaagcagtgtgcagtggctcatgcctgtaattccagctactcaggagacagaggtgagaggaccacttcagcccaggagatcgaagctgtagtaatcagcagttgtgcctgggtgacacagttggaccctgtttttatatataaataaataaacagattagatagatgatagatagaggaaaattcatctttaggaagtactgttctaatcaaaataaaaataaaatttaaaatttaaaaatacaaatattaaaaaattaaaaatagatcagcaaaaaaagatttaaaaaaattttaaaaagtgctgtttaaggcatatgcctgtaggaggtcaaccttgagtgtttagacacaagagctcctgagacattaaaccctggagtagatcatgggagacctgacaaccacgtgtaagtgagtataaggttccccttcatcattctccagtgaatattggtggaagtgttcattggctcaaaccagcatgtgtatgatgacataggattcagtgacgtttgatgatgtggctgtggacttcaccccagaggagtgggctttactggacacaactgagaaatacctctacagagatgtgatgctggagaactacatgaacctggcctctgtggaatgggaaatacaacctagaaccaaacggtcatcacttcagcagggttttttgaagaatcaaatattcagtgggatacaaatgacaagaggctacagtggatggaaactctgtgactgtaagaattgtggagaggtcttcagggaacagttttgccttaagacacacatgagagttcagaatggagggaatacttctgagggtaattgttatggaaaagacaccctcagtgtgcacaaggaagcctctactggacaggaactttccaaatttaatccatgtggaaaagtctttactctaactccaggtcttgctgtacatcttgaagttctcaatgcaagacaaccctacaaatgtaaggaatgtggaaaaggctttaagtattttgcaagccttgataatcatatgggaatccacactgatgagaaactctgtgaatttcaggaatatgggagagctgtcacagcttcttcacacctaaagcagtgtgtagcagttcatacaggaaagaaatccaaaaagactaagaaatgtgggaaatccttcactaatttttctcaactttatgcacctgtgaaaactcataaaggagagaagtcctttgaatgtaaagaatgtggaagatcctttagaaattcctcatgccttaatgatcacattcaaattcacactggaataaaaccacacaagtgtacttactgtgggaaagccttcactagatcaactcaacttactgaacatgtaagaactcacactggaataaaaccctatgaatgtaaggaatgtggccaagcctttgctcagtactcgggcctttctatacacatacgaagtcacagtggaaagaaaccctatcagtgtaaggaatgtgggaaagccttcactacatccacaagtcttattcagcatacaagaattcacacaggagagaagccttatgaatgtgttgaatgtgggaagaccttcattacttcttcccgtcgtagtaaacatttgaaaactcatagtggagaaaagccctttgtatgcaagatatgtgggaaagcatttctatattcctcacgccttaatgttcacctgcgaactcataccggagagaaacccttcgtatgtaaagaatgtgggaaagcatttgctgtttcctcacgcctaagtagacatgaaagaattcacactggggagaaaccctatgaatgcaaggatatgagtgttaccatttagcccatcggttgccatctttaattattggcaatgacaccaaagattatcagatttgtcctaaatgccttttggaggttgtaatgactcatggattggccttagataccatcctgagggtctgaaattaaacctacaggttctgaatacaacatc

SEQ ID NO: 9746 - protein, 417 aa, Homo sapiens; identical to SEQ ID NO: 1510

SEQ ID NO: 9747 - DNA, 1698 bp, Homo sapiens
gtcagtgcggtttcgcctttatggtggtggagtctgcccaggctgtggaccgcaaataaccctgtacaaagaggaatggagattgcctctatccacctagattcataagctggcctgaggtgatcttggcatcaaggaagggatgcacatcatcacaccatcagcttcagagaatggcagccatttatttgtcccgtggattcagtgacgtttgatgatgtggctgtggacttcaccccagaggagtgggctttactggacacaactgagaaatacctctacagagatgtgatgctggagaactacatgaacctggcctctgtggaatgggaaatacaacctagaaccaaacggtcatcacttcagcagggttttttgaagaatcaaatattcagtgggatacaaatgacaagaggctacagtggatggaaactctgtgactgtaagaattgtggagaggtcttcagggaacagttttgccttaagacacacatgagagttcagaatggagggaatacttctgagggtaattgttatggaaaagacaccctcagtgtgcacaaggaagcctctactggacaggaactttccaaatttaatccatgtggaaaagtctttactctaactccaggtcttgctgtacatcttgaagttctcaatgcaagacaaccctacaaatgtaaggaatgtggaaaaggctttaagtattttgcaagccttgataatcatatgggaatccacactgatgagaaactctgtgaatttcaggaatatgggagagctgtcacagcttcttcacacctaaagcagtgtgtagcagttcatacaggaaagaaatccaaaaagactaagaaatgtgggaaatccttcactaatttttctcaactttatgcacctgtgaaaactcataaaggagagaagtcctttgaatgtaaagaatgtggaagatcctttagaaattcctcatgccttaatgatcacattcaaattcacactggaataaaaccacacaagtgtacttactgtgggaaagccttcactagatcaactcaacttactgaacatgtaagaactcacactggaataaaaccctatgaatgtaaggaatgtggccaagcctttgctcagtactcgggcctttctatacacatacgaagtcacagtggaaagaaaccctatcagtgtaaggaatgtgggaaagccttcactacatccacaagtcttattcagcatacaagaattcacacaggagagaagccttatgaatgtgttgaatgtgggaagaccttcattacttcttcccgtcgtagtaaacatttgaaaactcatagtggagaaaagccctttgtatgcaagatatgtgggaaagcatttctatattcctcacgccttaatgttcacctgcgaactcataccggagagaaacccttcgtatgtaaagaatgtgggaaagcatttgctgtttcctcacgcctaagtagacatgaaagaattcacactggggagaaaccctatgaatgcaaggatatgagtgttaccatttagcccatcggttgccatctttaattattggcaatgacaccaaagattatcagatttgtcctaaatgccttttggaggttgtaatgactcatggattggccttagataccatcctgagggtctgaaattaaacctacaggttctgaatacaacatc

SEQ ID NO: 9748 - protein, 417 aa, Homo sapiens; identical to SEQ ID NO: 1510

SEQ ID NO: 9749 - DNA, 1542 bp, Homo sapiens
cttttccggcgctggctcctctccgtcagtgcggtttcgcctttatggtggtggagtctgcccaggctgtgggactatcagtcctccctgtgcgtccagttcggagaggctgcgcgctctctcggctcactgcaacctctgcaacctctgcctccagggtcaagcagttctcctgcctcagccttccgagtacctgggattacaggaccgcaaataaccctgtacaaagaggaatggagattgcctctatccacctagattcataagctggcctgaggtgatcttggcatcaaggaagggatgcacatcatcacaccatcagcttcagagaatggcagccatttatttgtcccgtgggtttttttccagggaaccaatctgcccttttgaagaaaagacaaaggtagaaaggatggtggaggactacctggcaagtggttatcaggtaagcagaaaacgtactgttgttaaaaatgatatgctttcatccaataggtagacagatttctttctagacagactcatcttcagagttttcttagagcaaatgaagccttactcaaggactgagtccccagatgaatttccccagggaatgaagtctcctatacataaaatgttaacttgaaaatcagtccagtagctcagtaattactacttaagcttgaccttcatggtgccaactgcatctttcttacattgctgggtgcggtgacggatgataaagcagatgaaagtgtccttttatcaaatcattcacttatcagcatttatcaggtatctgcagtgtgctgaggagtgtgctgcatagacaccaatgggacaggaagagctcctagcctggttgtgctgagatcaagcgtaagcagtgtgcagtggctcatgcctgtaattccagctactcaggagacagaggtgagaggaccacttcagcccaggagatcgaagctgtagtaatcagcagttgtgcctgggtgacacagttggaccctgtttttatatataaataaataaacagattagatagatgatagatagaggaaaattcatctttaggaagtactgttctaatcaaaataaaaataaaatttaaaatttaaaaatacaaatattaaaaaattaaaaatagatcagcaaaaaaagatttaaaaaaattttaaaaagtgctgtttaaggcatatgcctgtaggaggtcaaccttgagtgtttagacacaagagctcctgagacattaaaccctggagtagatcatgggagacctgacaaccacgtgtaagtgagtataaggttccccttcatcattctccagtgaatattggtggaagtgttcattggctcaaaccagcatgtgtatgatgacataggattcagtgacgtttgatgatgtggctgtggacttcaccccagaggagtgggctttactggacacaactgagaaatacctctacagagatgtgatgctggagaactacatgaacctggcctctgtgggtaagagtaacatcactatgcttggcatggtggcctgcacctgtagtccca

SEQ ID NO: 9750 - protein, 73 aa, Homo sapiens
MVVESAQAVGLSVLPVRPVRRGCALSRLTATSATSASRVKQFSCLSLPSTWDYRTANNPVQRGMEIASIHLDS

SEQ ID NO: 9751 - DNA, 548 bp, Homo sapiens
ccggcgctggctcctctccgtcagtgcggtttcgcctttatggtggtggagtctgcccaggctgtgggactatcagtcctccctgtgcgtccagttcggagaggctgcgcgctctctcggctcactgcaacctctgcaacctctgcctccagggtcaagcagttctcctgcctcagccttccgagtacctgggattacaggaccgcaaataaccctgtacaaagaggaatggagattgcctctatccacctagattcataagctggcctgaggtgatcttggcatcaaggaagggatgcacatcatcacaccatcagcttcagagaatggcagccatttatttgtcccgtgggtttttttccagggaaccaatctgcccttttgaagaaaagacaaaggtagaaaggatggtggaggactacctggcaagtggttatcagtgaatattggtggaagtgttcattggctcaaaccagcatgtgtatgatgacataggattcagtgacgtttgatgatgtggctgtggacttcaccccagaggagtgggc

SEQ ID NO: 9752 - protein, 73 aa, Homo sapiens; identical to SEQ ID NO: 9750

SEQ ID NO: 9753 - DNA, 668 bp, Homo sapiens
gtcagtgcggtttcgcctttatggtggtggagtctgcccaggctgtggaccgcaaataaccctgtacaaagaggaatggagattgcctctatccacctagattcataagctggcctgaggtgatcttggcatcaaggaagggatgcacatcatcacaccatcagcttcagagaatggcagccatttatttgtcccgtggtaagtctttgttgatgctctttttcagagattctgctttaggtcaccctccacaacacaagcgtccagtgagctgagcctgagcaggcatgcagctggttcttttaggaggaattgaagtgaaccacagaacagaatgctgttttattatttatttatttatttatttatttttgagacagaatcttgttccgtcacccaggctggagtgcagtggtgcaatcttagctcactgcaaccttcacctcccaggttcaagtgattctcttgcctcagcctcccaagtatctgggaccacaagcacatactgccagacctggctaatttttgtttgtttgtttgtttttgtttttgagacagaatctcactctgtctcccaggctggagtgcagtgcctgtggtctcgactcactgcaacttctgtctcctgggttcaagtaattctctgcctcagcctcccataatttttc

SEQ ID NO: 9754 - protein, 124 aa, Homo sapiens
MQLVLLGGIEVNHRTECCFIIYLFIYLFLRQNLVPSPRLECSGAILAHCNLHLPGSSDSLASASQVSGTTSTYCQTWLIFVCLFVFVFETESHSVSQAGVQCLWSRLTATSVSWVQVILCLSLP

SEQ ID NO: 9755 - DNA, 1822 bp, Homo sapiens
ggacccggcctagccggtggttcaggtggccggtcgggctggaagggcggggatgagggatgggacgcatccccgggggatgctcctccaaagcttttatcgggcgagcgcagtggctcacgcctgtaattcctgcactttgggaggctaagggtctcactctattgtctaggctcgaatgcagtgacgtgatcatggatcactgcagtcctcaacttactgggctcaggatgaaaggcttcctagcacaaacaccacccctggagttcccggtacatcaataccagcctggggatcacgttctcatcaagagttggaagagggaaagcttgaaccagcttaggaggacctcatctggtactcttgatgaatgaaacagcaatctgaatggctgaaaaaggatggacccagcactccagggagaaaacttggcattctttgggaatctaacaggatgcagtgaacccaagccttttgaagagctcaccaatcagactgcccttgtctatccatgagcagatgtttgatagtattgcggaggccctctagtgggtatgctgccaagcaactggagtggcacttgggctctaatccagttgtctatccctttcaccctggcatttcatcagccaaacaaaaaccaactaactcagaaaaaaaggaaagcccctcaagggtcctttgaccccgatatctacatagatgctatcggggtcccctgaggggtaccaaacgaattcaaagctcgaaatcaaatagctgctggattcaagtctgtccttttcttgtggtctactataaataaaaatgtagactggataaattacatatactataaccaacaacgatttgtcagttacaccagggatgccattaaaggaatagctgaacaattgggtttcaccagccaaatggcctgggaaaatagaatagctcttgacatgatattagtggaagtccaatgttgtacctgtatccccaataatacagcccctgatgtaactatcactaagggtctataaggcctcaccactctaggaaatgaactagctgaaaattcgggaatgaatgatccctttacaggtgtaatggaaaaaatggtttggtagatggaaaggactaatggcctctattctcacctcccttgtgatcataataggggtgctcattctcttagggtgctgtattataccctgtgtctgcggactagttcaaaagctcatagaaacagcccttaccaagacctcccacaactctcccccaccctattcagataaacgtttatttctaagcaaccaagaagagcagtgaagccagatcctgttagaaatatatgaagaggaaggactacaaaatcaaaaggggaaaattattagacaaaatgagttgctctacaaaggtccaacttcgttgtcctttgttctgtaacctttgttctgtaaactgcccttcccgcagaaactgtctttcccgccgaccaaaactgcccttcactatcactgtaatccatacccctactctatttgaaactgccaatcgggatcagcttacattgtgtggttcaaccaccagccaatgaggaaaaaacacagaagcaaaagctatgatgcattagggttaaaaaccccttcctttccctgtccaatgtgctcttgagactgctacaggcgcaagcagccaccttctgcagaagtaaaccttgccttgctgagaaatttttcttttgagtgctggtctctctctgtggcaccaagaacttatttctaacatggagtgatttccaagatagatggttaagtgaaaataaaaactgttgccaggc

SEQ ID NO: 9756 - protein, 104 aa, Homo sapiens
MGRIPGGCSSKAFIGRAQWLTPVIPALWEAKGLTLLSRLECSDVIMDHCSPQLTGLRMKGFLAQTPPLEFPVHQYQPGDHVLIKSWKRESLNQLRRTSSGTLDE

SEQ ID NO: 9757 - DNA, 1593 bp, Homo sapiens
agccggtggttcaggtggccggtcgggctggaagggcggggatgagggatgggacgcatccccgggggatgctcctccaaagcttttatcgggcgagcgcagtggctcacgcctgtaattcctgcactttgggaggctaaggatgaaaggcttcctagcacaaacaccacccctggagttcccggtacatcaataccagcctggggatcacgttctcatcaagagttggaagagggaaagcttgaaccagcttaggaggacctcatctggtactcttgatgaatgaaacagcaatctgaatggctgaaaaaggatggacccagcactccagggagaaaacttggcattctttgggaatctaacaggatgcagtgaacccaagccttttgaagagctcaccaatcagactgcccttgtctatccatgagcagatgtttgatagtattgcggaggccctctagtgggtatgctgccaagcaactggagtggcacttgggctctaatccagttgtctatccctttcaccctggcatttcatcagccaaacaaaaaccaactaactcagaaaaaaaggaaagcccctcaagggtcctttgaccccgatatctacatagatgctatcggggtcccctgaggggtaccaaacgaattcaaagctcgaaatcaaatagctgctggattcaagtctgtccttttcttgtggtctactataaataaaaatgtagactggataaattacatatactataaccaacaacgatttgtcagttacaccagggatgccattaaaggaatagctgaacaattgggtttcaccagccaaatggcctgggaaaatagaatagctcttgacatgatattagtggaagtccaatgttgtacctgtatccccaataatacagcccctgatgtaactatcactaagggtctataaggcctcaccactctaggaaatgaactagctgaaaattcgggaatgaatgatccctttacaggtgtaatggaaaaaatggtttggtagatggaaaggactaatggcctctattctcacctcccttgtgatcataataggggtgctcattctcttagggtgctgtattataccctgtgtctgcggactagttcaaaagctcatagaaacagcccttaccaagacctcccacaactctcccccaccctattcagataaacgtttatttctaagcaaccaagaagagcagtgaagccagatcctgttagaaatatatgaagaggaaggactacaaaatcaaaaggggaaaattattagacaaaatgagttgctctacaaaggtccaacttcgttgtcctttgttctgtaacctttgttctgtaaactgcccttcccgcagaaactgtctttcccgccgaccaaaactgcccttcactatcactgtaatccatacccctactctatttgaaactgccaatcgggatcagcttacattgtgtggttcaaccaccagccaatgaggaaaaaacacagaagcaaaagctatgatgcattagggttaaaaaccccttcctttccctgtccaatgtgctcttgagactgctacaggcgcaagcagccac

SEQ ID NO: 9758 - protein, 68 aa, Homo sapiens
MGRIPGGCSSKAFIGRAQWLTPVIPALWEAKDERLPSTNTTPGVPGTSIPAWGSRSHQELEEGKLEPA

SEQ ID NO: 9759 - DNA, 2280 bp, Homo sapiens
gatgagggatgggacgcatccccgggggatgctcctccaaagcttttatcgggcgagcgcagtggctcacgcctgtaattcctgcactttgggaggctaagggtctcactctattgtctaggctcgaatgcagtgacgtgatcatggatcactgcagtcctcaacttactgggctcaggatgaaaggcttcctagcacaaacaccacccctggagttcccggtacatcaataccagcctggggatcacgttctcatcaagagttggaagagggaaagcttgaaccagcttaggaggacctcatctggtactcttgatgaatgaaacagcaatctgaatggctgaaaaaggatggacccagcactccagagtctcacactgtcaccaggctggagtgccgtggcgcaatatcagctcactgtaacctccacctcccaggttgaagtgattctcccatctcagcccccaagtagctgggactacaggtgagtgccaccacacccagctaatttttgtatttttagtagagatgggggttcaccatgttgcccaaaatggtctcaatctcttggcctcgtgatccaaccatctcagcctcccaaagtgctgggtttaaaggcatgagccactgtgcctggcccagaattctttactgctaacacgagtgggcctggttctggaggatttcccagtgggtcctgaagaaccacagtttattggcttgtgggcaaaggggtatgtgtatcagttggcctttactgtgtaataaacagccacaaaaattactagctgaaaacagcagctacttaattagcagaagcctcttgaggatggacttgcaaaccaaagttgtgctggtttctactggtcaaagcaaggactggctcacataaaaaggagagagattgcaccttcagagagtaatctcaagacatctgtaatctaccacagggtgtcactgggcctctgtcaaggagcctattctttctgccaccagatctgtctaatagcttgtgtgacaatgcacttccttctgggtctctctccaagtgtagtaagtgtatatgggaatcactttattcaaacagtgtagtgcacttagttagaaagaaaaggtattaaggaagacttatatttaaaattgttatttatggtaacaacgaaaagtaacatacaaatttcaaacatcaagaataaaataaattaaaggtatgatcaatacacatcagtacaaagaggggaacacaatgaaacaaacaaaaaaaattagatgctagaaattaatccaaattattactaattaaatgtcaggcactaaatgtgcaacataaaaggattgttaattggtattattcaagtattttttctttttttttttttttttgtgacagagtttcactcttgttgcccaggctgcagtgcaatggcgtgatctcggctcactgcaacctctgcctcccgggttcaaatgattctcctgcctcagcctcccaagtagctggcattacaggcatgcaccactaggcacagctaattttgtatttttagtagagatggggtttctcagtgttggtcaggctggtctcgaactcccgacctcaggtgatcacctgccttggcctcccaaagtgctgtgattacagacatcagccactatgcccagcggtatacagattttttaaaactccagctaaagtatgtataaaaagacacatttttttaaaaagcatacagaaagactaagaagtagaggaaaatcaagctgatgtaactatataaatatctaacagaattagtggaacagaaaacatgcaagaaatagtgtagatttttcaagcgaaatatctgaaagaattcataaacctgggtactctctaccaagattaacacaagcaaagggaaagaatgcacaattaataagttattccagaatgcaaaaggagactgaagttatacaaccagcaaaaatgaaaaatataaaaagtataaatttttgctacacatttggaaataaaaacatgcctagaagaatattctcaaaatacttatgcaagccttagttgtctttttttttttttttttatgagatggagttttgctcttgtcacccaggctggagtgcagtggcaagaactcaactcactgcaaccttcgcctcccagattcaagcaattctcctgcctcagcctcccaagcggctgggattacaggcgcccgccaactcacctggctaattttattttttgaatttttagtagagacaaaagtttcaccgcattgg

SEQ ID NO: 9760 - protein, 104 aa, Homo sapiens; identical to SEQ ID NO: 9756

SEQ ID NO: 9761 - DNA, 500 bp, Homo sapiens
agagagacccagaaggaagtgcattgtcacacaagctattagacagatctggtggcagaaagaataggctccttgacagaggcccagtgacaccctgtggtagattacagatgtcttgagattactctctgaaggtgcaatctctctcctttttatgtgagccagtccttgctttgaccagtagaaaccagcacaactttggtttgcaagtccatcctcaagaggcttctgctaattaagtagctgctgttttcagctagtaatttttgtggctgtttattacacagtaaaggccaactgatacacataccctgtgcctggcctctatttctaatgtctaggcagcaactgttgttgtgttgttcctgttacatagtcttattacccatttgatacaaagttcagattgattgttcctgttcgtattccattttgggttttccctctatctttgttgattttttaaaaaattaaatatgtaaaagaataaagggccaagc

SEQ ID NO: 9762 - protein, 39 aa, Homo sapiens
DYSLKVQSLSFLCEPVLALTSRNQHNFGLQVHPQEASAN

SEQ ID NO: 9763 - DNA, 1242 bp, Homo sapiens
gagaattgtggagaggtcttcagtgaacagttttgccttaagacacacatgagagctcagaatggagggaacacttttgagggtaattgttatggaaaagacagcatcagtgtgcacaaggaagcctctattggacaagaactttccaaatttaatccatgtggaaaagtcttcaccttaactccaggccttgctgtgcatcttgaaattctcaatggaagacaaccctacaaatgtaaggaatgtggaaaaggctttaagtattttgcaagccttgataatcacatgggaatccacattggagagaaactctgtgaatttcaggaatgtgagagagccatcacaacttcctcacacttaaagcagtgtgtagcagttcatactggaaagaaatccgaaaagactaagaactgtgggaaatccttcactaatttttctcaactttctgcacatgcaaaaactcataaaggagagaagtcctttgaatgtaaagaatgtggaagatcctttagaaattcctcatcctttaatgttcacattcaaattcacactggaataaaaccacacaaatgtacggaatgtgggaaagccttcactagatcaactcaccttactcaacatgtaagaactcacactggaataaaaccctatgaatgtaaggaatgtggccaagccttcactcagtacacgggccttgctatacacatacgaaatcacactggagagaaaccctatcagtgtaaggaatgtgggaaagccttcaatagatcttcaacgcttactcaacatagaagaattcacacaggagagaagccttatgaatgtgttgaatgtgggaagaccttcattacttcttcccatcgtagtaaacatttgaaaactcacagtggagaaaggtaaatgcaagatatgtgggaaagaatttctgtattcctcaccccacctgtgaactcctaccagagagaaaccttttgtatgtaaagaatttgggaaagcatttgctctttcctcatgcctaagtatgcatgaaagaattcacactggggagaaatactatgaatgtaaggatatgagtgttgttaccatttagcccattggttgccatctttaattattggcagtgcaaagatcatcagattagtcctaaatgccttttggaggttgcattgagccaagattgcaccactgcactccatgctgggtgacagggtgcgactctgtcaaaaataaataaattaaatt

SEQ ID NO: 9764 - protein, 283 aa, Homo sapiens
MRAQNGGNTFEGNCYGKDSISVHKEASIGQELSKFNPCGKVFTLTPGLAVHLEILNGRQPYKCKECGKGFKYFASLDNHMGIHIGEKLCEFQECERAITTSSHLKQCVAVHTGKKSEKTKNCGKSFTNFSQLSAHAKTHKGEKSFECKECGRSFRNSSSFNVHIQIHTGIKPHKCTECGKAFTRSTHLTQHVRTHTGIKPYECKECGQAFTQYTGLAIHIRNHTGEKPYQCKECGKAFNRSSTLTQHRRIHTGEKPYECVECGKTFITSSHRSKHLKTHSGER

SEQ ID NO: 9765 - DNA, 5693 bp, Homo sapiens
gtgtgccaccgccatctttaccggctgtggctcagcatggtcagtgccgtttaacctttattgtggtggagtccaccccgctgtgggcctcagataaccctgtacaaaggggaatggagattgcctgtatccacctagattcataagctgccctgaggcgatcttggcatcaagaaagacagcattgaggcacatctcaccatcagcttcagaggatgtcagcctttgatatgtcccatgatttctttttctgcttaacttcagaatgggaaatacaacctagaaccaaacggtcatcacttcagcagggttttttgaagaatcaaatattcactgggatacaaatgcagacaagaagctacagtggatggaaactctgtgagaattgtggagaggtcttcagtgaacagttttgccttaagacacacatgagagctcagaatggagggaacacttttgagggtaattgttatggaaaagacagcatcagtgtgcacaaggaagcctctattggacaagaactttccaaatttaatccatgtggaaaagtcttcaccttaactccaggccttgctgtgcatcttgaaattctcaatggaagacaaccctacaaatgtaaggaatgtggaaaaggctttaagtattttgcaagccttgataatcacatgggaatccacattggagagaaactctgtgaatttcaggaatgtgagagagccatcacaacttcctcacacttaaagcagtgtgtagcagttcatactggaaagaaatccgaaaagactaagaactgtgggaaatccttcactaatttttctcaactttctgcacatgcaaaaactcataaaggagagaagtcctttgaatgtaaagaatgtggaagatcctttagaaattcctcatcctttaatgttcacattcaaattcacactggaataaaaccacacaaatgtacggaatgtgggaaagccttcactagatcaactcaccttactcaacatgtaagaactcacactggaataaaaccctatgaatgtaaggaatgtggccaagccttcactcagtacacgggccttgctatacacatacgaaatcacactggagagaaaccctatcagtgtaaggaatgtgggaaagccttcaatagatcttcaacgcttactcaacatagaagaattcacacaggagagaagccttatgaatgtgttgaatgtgggaagaccttcattacttcttcccatcgtagtaaacatttgaaaactcacagtggagaaaggtaaatgcaagatatgtgggaaagaatttctgtattcctcaccccacctgtgaactcctaccagagagaaaccttttgtatgtaaagaatttgggaaagcatttgctctttcctcatgcctaagtatgcatgaaagaattcacactggggagaaatactatgaatgtaaggatatgagtgttgttaccatttagcccattggttgccatctttaattattggcagtgcaaagatcatcagattagtcctaaatgccttttggaggttgtaatggctcacagattggccttagatgcatcccgagggtctgaaattaaacctacaggttctgaatacaacatcatggttacctgagtctgggcatctgtgaagaagggtcatggatggtgaggtcagtactgcaggctgcctcaccttggtgattagattcctaagatcatagcattaacaagttctgtacgagataaatcatgcagattgatcccagcccctgttggttagtggctgccagtgtggcacattcatgtcaaaatttaccagaagccaagatgatgtaggccccagaggtggattgttaaaaagatgctcctccaaggttctcttctgttcccatggatcctgcagagcatgtcaggagtgaaaccatccataactgccagtgccctttcacagctgattatttctatgtccccttcttgtaaaataagaagtgtgacaaccttgactgttctgttctgtcttctctgtccattttaggtggcacaatgtaagtggcagtgtctcttatagtataatccagtctctcttctcacttctgttaagatggctgatatagtccatgaatcccactcatgatctctttatcaaatgattgttcagccacactttgaggattctcttcagtacaagttttctaatttttgcagtatggataggctgagaattttccaaatctccaagttctggttcctttttccttaacaatttcttctgcaattcaggtctccttttgcatttttgccgagaccagctgggtcgtggagaccctaacccagtggctctagaggaattaagacaaagacacagaaatatagtgcagagtgggaatcggggctcacagccttcagagctgagcttgaacagagtttgacccacatatttattgacagtaagcctgtgataaacattattcctatagattgtagatcagctataagtattccttatgagaaagaaagggacaggctctggcttgttatctgcaacaggaatatgtccttaaggcacaaatcactcatgctattgtttgtggtttaggaatgccttgagcagttttccagttttctgccctgggtgggccaggtgttgcttgccctcattctggtaaaccagcagcctccagcatgggcgtcatagccatcacgagcatgtcacagtgctgcagagattttgtttatggccagtttctcattgcctgtttatggccagatttggggggcctgttcccagcacattttcctgtaagcactcaggaataatgaagcttcctgtgtcctttaacactttaattacagatcttagtgatacataccattttatctgtctcaagctctaccttccgtaaaatgctagaatacagttctgccaagttcttcaccactttatatcaagggttgtcttttcttcatttcccaatagcatgttcctcattccccaatgacacctcaccagaataacccttaccaaccttatttccagcttgcacatcagaatttttccagcctctactcatttgtcagtttcaaagctgcttcacatttttagtttttttgtttgtttttaattgcagtacctcacttctcagtaccaatatctgccttagtcagctcagacaaccataagagaataccgcagaccaaatggcttagaaattaatttaattttaaatcaatgaggttaaaaacacaggattttttttttttttttttttttttttttgagatggagttttgctcttgttgcccaggctggagtgcaatggtatgatcttggctcaccgcaacctccacctcctgagttccagtgattctcctgcctcaccctcagtagctgggattattggcatgcaccacaaaccttagctaagtttgtatttttagtagagacagggtttctccatgttggttaggctgatctccatgttggtcagatctgacctttggtgatccacctgccttggcctcccaaagtgctgggattacaggcctgagccaccgtatctggcccaaaacacaaatttatattctcacatatctggaggctggaagtctgagatcagagtgccagcatggtcaacctctagtgagagctctcttcctggcatgtaagtgcccacttcctcatgttttcacacgatggagaccaacaaataggtcggtcggtctcccccctccccgcccccttctcttttcacatacagtcacattgaggtttggaacttcatatgaaatttggggggtcactgtgtgtgtgtgtgtgtgtgtgtgtatgtgtatatatatatacatatatatacacatatgtatgtatacctaactcctaaagtggaacagtaagagtcattatttatagattatctgattctctatgtggaaagagaaaagaatcatattaagtactttggactgaacaatgacccccaaaattcgtatgatgatgaagctctctctaaatattttcttgctttactggactgattttaacccgctgcacaacaccaactaaaagtagtaataccagcatacttgtctttgcagttctggtgagatatgcactctattttgttggtttggctgtaggcttttatttcttttttattttttgaagaggttatgtcctgtcagggaaccagccccgatattcacataggttcttttctattttccctaagtgtcagccaacttgagaaataaagggacagagtacaaaagagagaaattttaaagctgggtgtccggggcagacatcacatgtcggtaggttccgtgatgccccacaagccgcaaaaaccagcaagtttttattagggattttcaaaaggggagggagtgtgcaaataggtgtgggtcacagacatcaagtactttacaaggtaatagaatatcacaaggcaagtggaggcagggcgagatcacaggaccaaggtgaaattaaaattgctaatgaagttttgggcaccattgtcattgataacatcttatcaggagacggttttgagatcaactggtctgactaaaatttattaggtgggaatttcctcttcctaataagcctgggagtgctatgggagactggggtctatttcacccctgcagtctcgaccataagagatggctacacccaggggggccagttcagagacccactcccaggtgtgcattctctttctcaaggatgttccttgctgagaaaaagaattcagtgatatttctcccatttgcttgtgaaagaagagaaatgtggctttgttccacctggctcaccggcggtcagaatttaaggttatctctcttgtttcctaaacattgctgttatcctgttcttttttcaaggtgcccagatttcatattgctcaaacacacatgctgtataatttgtgcagttaatgcaattattacagggtcctgaggtaatatacatcctcctcagctgacaggattgagagattaaagtaaagacaggcataggaaatcacaagggtattgactggggaagtgataagtgtccatgaaatctttacaatttatgtttagagattgcagtaaagacaggcataagaaattataaaagtattaatttggggaactaataaatgtccatgaaaccttcacaatccatgtttttctgccatggcttcagccagtccccccgtttggggtccctgacttcctgcaacaatgtcctgcaggaaaagttttttctttatatccagtttttacatgatgaattatttcccaatatttcatagtttatgaggctgaattcctcttgaatttattaaatgcttccttcacatcctctgtgatgatcatgtttatttactgataaaactcaatacctagaactgcacctagctcatgatggtacctaataaatacttcaatgaaatgatgtggtgatgcatgcctatagttttagctacttgggagggtggcctgagcccaggggttctagaccagcttaggcaacatagcaagaccccatctcaaaaaaaaaaacaaaaacaaaacaaaaaaaaaacttgaagaagtgaatgcatggaaaggcgcttttctaaaacaaatgtggtcaggctgggtgtgggggcttatgcctgtaatcccagcaatttgggaggtgggggtgggcagatcatttg

SEQ ID NO: 9766 - protein, 354 aa, Homo sapiens
MSAFDMSHDFFFCLTSEWEIQPRTKRSSLQQGFLKNQIFTGIQMQTRSYSGWKLCENCGEVFSEQFCLKTHMRAQNGGNTFEGNCYGKDSISVHKEASIGQELSKFNPCGKVFTLTPGLAVHLEILNGRQPYKCKECGKGFKYFASLDNHMGIHIGEKLCEFQECERAITTSSHLKQCVAVHTGKKSEKTKNCGKSFTNFSQLSAHAKTHKGEKSFECKECGRSFRNSSSFNVHIQIHTGIKPHKCTECGKAFTRSTHLTQHVRTHTGIKPYECKECGQAFTQYTGLAIHIRNHTGEKPYQCKECGKAFNRSSTLTQHRRIHTGEKPYECVECGKTFITSSHRSKHLKTHSGER

SEQ ID NO: 9767 - DNA, 6262 bp, Homo sapiens
gtccagaggtccggttctaaactcatctttttctctgaacccgtttctgcatcccgctccctgagccaaccccaggcactgtccggcacccacccaggaggaaactagaatttctttgtcctacgtgcctgaaactcaagccctggagccccacccggccggaggctcggagcggaagtgacgtcagtgtgccaccgccatctttaccggctgtggctcagcatggtcagtgccgtttaacctttattgtggtggagtccaccccgctgtggtgagttctacctgcttgggggtccgggacataccagcggggcggcaaaggaaggattgggcgtggtcgcccaggagcctctcagatccgcctagtttcactcgcttttctaggggctgtcagtcctcctggtgcggcctctggccagttccgagaggccgcacagtccgtctggctgcgtcgggaagtgtgtttgttccgcctccgccgggtgttttcttgagtactttcatccgctgtgctcctctcttgaaaagcttggaaagcaacctttgggagtttttttctttccgaaaggaaaaggatttctgcccttctggtgaggttggctctggccccgcattctcccgcgtctggaacctatctcttccggcatgttcctgggcctcagataaccctgtacaaaggggaatggagattgcctgtatccacctagattcataagctgccctgaggcgatcttggcatcaagaaagacagcattgaggcacatctcaccatcagcttcagaggatgtcagcctttgatatgtcccatgatttctttttctgcttaacttcagaatgggaaatacaacctagaaccaaacggtcatcacttcagcagggttttttgaagaatcaaatattcactgggatacaaatgcagacaagaagctacagtggatggaaactctgtgagaattgtggagaggtcttcagtgaacagttttgccttaagacacacatgagagctcagaatggagggaacacttttgagggtaattgttatggaaaagacagcatcagtgtgcacaaggaagcctctattggacaagaactttccaaatttaatccatgtggaaaagtcttcaccttaactccaggccttgctgtgcatcttgaaattctcaatggaagacaaccctacaaatgtaaggaatgtggaaaaggctttaagtattttgcaagccttgataatcacatgggaatccacattggagagaaactctgtgaatttcaggaatgtgagagagccatcacaacttcctcacacttaaagcagtgtgtagcagttcatactggaaagaaatccgaaaagactaagaactgtgggaaatccttcactaatttttctcaactttctgcacatgcaaaaactcataaaggagagaagtcctttgaatgtaaagaatgtggaagatcctttagaaattcctcatcctttaatgttcacattcaaattcacactggaataaaaccacacaaatgtacggaatgtgggaaagccttcactagatcaactcaccttactcaacatgtaagaactcacactggaataaaaccctatgaatgtaaggaatgtggccaagccttcactcagtacacgggccttgctatacacatacgaaatcacactggagagaaaccctatcagtgtaaggaatgtgggaaagccttcaatagatcttcaacgcttactcaacatagaagaattcacacaggagagaagccttatgaatgtgttgaatgtgggaagaccttcattacttcttcccatcgtagtaaacatttgaaaactcacagtggagaaaggtaaatgcaagatatgtgggaaagaatttctgtattcctcaccccacctgtgaactcctaccagagagaaaccttttgtatgtaaagaatttgggaaagcatttgctctttcctcatgcctaagtatgcatgaaagaattcacactggggagaaatactatgaatgtaaggatatgagtgttgttaccatttagcccattggttgccatctttaattattggcagtgcaaagatcatcagattagtcctaaatgccttttggaggttgtaatggctcacagattggccttagatgcatcccgagggtctgaaattaaacctacaggttctgaatacaacatcatggttacctgagtctgggcatctgtgaagaagggtcatggatggtgaggtcagtactgcaggctgcctcaccttggtgattagattcctaagatcatagcattaacaagttctgtacgagataaatcatgcagattgatcccagcccctgttggttagtggctgccagtgtggcacattcatgtcaaaatttaccagaagccaagatgatgtaggccccagaggtggattgttaaaaagatgctcctccaaggttctcttctgttcccatggatcctgcagagcatgtcaggagtgaaaccatccataactgccagtgccctttcacagctgattatttctatgtccccttcttgtaaaataagaagtgtgacaaccttgactgttctgttctgtcttctctgtccattttaggtggcacaatgtaagtggcagtgtctcttatagtataatccagtctctcttctcacttctgttaagatggctgatatagtccatgaatcccactcatgatctctttatcaaatgattgttcagccacactttgaggattctcttcagtacaagttttctaatttttgcagtatggataggctgagaattttccaaatctccaagttctggttcctttttccttaacaatttcttctgcaattcaggtctccttttgcatttttgccgagaccagctgggtcgtggagaccctaacccagtggctctagaggaattaagacaaagacacagaaatatagtgcagagtgggaatcggggctcacagccttcagagctgagcttgaacagagtttgacccacatatttattgacagtaagcctgtgataaacattattcctatagattgtagatcagctataagtattccttatgagaaagaaagggacaggctctggcttgttatctgcaacaggaatatgtccttaaggcacaaatcactcatgctattgtttgtggtttaggaatgccttgagcagttttccagttttctgccctgggtgggccaggtgttgcttgccctcattctggtaaaccagcagcctccagcatgggcgtcatagccatcacgagcatgtcacagtgctgcagagattttgtttatggccagtttctcattgcctgtttatggccagatttggggggcctgttcccagcacattttcctgtaagcactcaggaataatgaagcttcctgtgtcctttaacactttaattacagatcttagtgatacataccattttatctgtctcaagctctaccttccgtaaaatgctagaatacagttctgccaagttcttcaccactttatatcaagggttgtcttttcttcatttcccaatagcatgttcctcattccccaatgacacctcaccagaataacccttaccaaccttatttccagcttgcacatcagaatttttccagcctctactcatttgtcagtttcaaagctgcttcacatttttagtttttttgtttgtttttaattgcagtacctcacttctcagtaccaatatctgccttagtcagctcagacaaccataagagaataccgcagaccaaatggcttagaaattaatttaattttaaatcaatgaggttaaaaacacaggattttttttttttttttttttttttttttgagatggagttttgctcttgttgcccaggctggagtgcaatggtatgatcttggctcaccgcaacctccacctcctgagttccagtgattctcctgcctcaccctcagtagctgggattattggcatgcaccacaaaccttagctaagtttgtatttttagtagagacagggtttctccatgttggttaggctgatctccatgttggtcagatctgacctttggtgatccacctgccttggcctcccaaagtgctgggattacaggcctgagccaccgtatctggcccaaaacacaaatttatattctcacatatctggaggctggaagtctgagatcagagtgccagcatggtcaacctctagtgagagctctcttcctggcatgtaagtgcccacttcctcatgttttcacacgatggagaccaacaaataggtcggtcggtctcccccctccccgcccccttctcttttcacatacagtcacattgaggtttggaacttcatatgaaatttggggggtcactgtgtgtgtgtgtgtgtgtgtgtgtatgtgtatatatatatacatatatatacacatatgtatgtatacctaactcctaaagtggaacagtaagagtcattatttatagattatctgattctctatgtggaaagagaaaagaatcatattaagtactttggactgaacaatgacccccaaaattcgtatgatgatgaagctctctctaaatattttcttgctttactggactgattttaacccgctgcacaacaccaactaaaagtagtaataccagcatacttgtctttgcagttctggtgagatatgcactctattttgttggtttggctgtaggcttttatttcttttttattttttgaagaggttatgtcctgtcagggaaccagccccgatattcacataggttcttttctattttccctaagtgtcagccaacttgagaaataaagggacagagtacaaaagagagaaattttaaagctgggtgtccggggcagacatcacatgtcggtaggttccgtgatgccccacaagccgcaaaaaccagcaagtttttattagggattttcaaaaggggagggagtgtgcaaataggtgtgggtcacagacatcaagtactttacaaggtaatagaatatcacaaggcaagtggaggcagggcgagatcacaggaccaaggtgaaattaaaattgctaatgaagttttgggcaccattgtcattgataacatcttatcaggagacggttttgagatcaactggtctgactaaaatttattaggtgggaatttcctcttcctaataagcctgggagtgctatgggagactggggtctatttcacccctgcagtctcgaccataagagatggctacacccaggggggccagttcagagacccactcccaggtgtgcattctctttctcaaggatgttccttgctgagaaaaagaattcagtgatatttctcccatttgcttgtgaaagaagagaaatgtggctttgttccacctggctcaccggcggtcagaatttaaggttatctctcttgtttcctaaacattgctgttatcctgttcttttttcaaggtgcccagatttcatattgctcaaacacacatgctgtataatttgtgcagttaatgcaattattacagggtcctgaggtaatatacatcctcctcagctgacaggattgagagattaaagtaaagacaggcataggaaatcacaagggtattgactggggaagtgataagtgtccatgaaatctttacaatttatgtttagagattgcagtaaagacaggcataagaaattataaaagtattaatttggggaactaataaatgtccatgaaaccttcacaatccatgtttttctgccatggcttcagccagtccccccgtttggggtccctgacttcctgcaacaatgtcctgcaggaaaagttttttctttatatccagtttttacatgatgaattatttcccaatatttcatagtttatgaggctgaattcctcttgaatttattaaatgcttccttcacatcctctgtgatgatcatgtttatttactgataaaactcaatacctagaactgcacctagctcatgatggtacctaataaatacttcaatgaaatgatgtggtgatgcatgcctatagttttagctacttgggagggtggcctgagcccaggggttctagaccagcttaggcaacatagcaagaccccatctcaaaaaaaaaaacaaaaacaaaacaaaaaaaaaacttgaagaagtgaatgcatggaaaggcgcttttctaaaacaaatgtggtcaggctgggtgtgggggcttatgcctgtaatcccagcaatttgggaggtgggggtgggcagatcatttg

SEQ ID NO: 9768 - protein, 354 aa, Homo sapiens; identical to SEQ ID NO: 9766

SEQ ID NO: 9769 - DNA, 2407 bp, Homo sapiens
gtgtgccaccgccatctttaccggctgtggctcagcatggtcagtgccgtttaacctttattgtggtggagtccaccccgctgtgggcctcagataaccctgtacaaaggggaatggagattgcctgtatccacctagattcataagctgccctgaggcgatcttggcatcaagaaagacagcattgaggcacatctcaccatcagcttcagaggatgtcagcctttgatatgtcccatgggttttttcccagggaaccaatctgtccttttgaagaaaagacaaagataggaacgatggtagaggaccaccggtcaaattcttaccagatttctttttctgcttaacttcagaatgggaaatacaacctagaaccaaacggtcatcacttcagcagggttttttgaagaatcaaatattcactgggatacaaatgcagacaagaagctacagtggatggaaactctgtgagaattgtggagaggtcttcagtgaacagttttgccttaagacacacatgagagctcagaatggagggaacacttttgagggtaattgttatggaaaagacagcatcagtgtgcacaaggaagcctctattggacaagaactttccaaatttaatccatgtggaaaagtcttcaccttaactccaggccttgctgtgcatcttgaaattctcaatggaagacaaccctacaaatgtaaggaatgtggaaaaggctttaagtattttgcaagccttgataatcacatgggaatccacattggagagaaactctgtgaatttcaggaatgtgagagagccatcacaacttcctcacacttaaagcagtgtgtagcagttcatactggaaagaaatccgaaaagactaagaactgtgggaaatccttcactaatttttctcaactttctgcacatgcaaaaactcataaaggagagaagtcctttgaatgtaaagaatgtggaagatcctttagaaattcctcatcctttaatgttcacattcaaattcacactggaataaaaccacacaaatgtacggaatgtgggaaagccttcactagatcaactcaccttactcaacatgtaagaactcacactggaataaaaccctatgaatgtaaggaatgtggccaagccttcactcagtacacgggccttgctatacacatacgaaatcacactggagagaaaccctatcagtgtaaggaatgtgggaaagccttcaatagatcttcaacgcttactcaacatagaagaattcacacaggagagaagccttatgaatgtgttgaatgtgggaagaccttcattacttcttcccatcgtagtaaacatttgaaaactcacagtggagaaaggtaaatgcaagatatgtgggaaagaatttctgtattcctcaccccacctgtgaactcctaccagagagaaaccttttgtatgtaaagaatttgggaaagcatttgctctttcctcatgcctaagtatgcatgaaagaattcacactggggagaaatactatgaatgtaaggatatgagtgttgttaccatttagcccattggttgccatctttaattattggcagtgcaaagatcatcagattagtcctaaatgccttttggaggttgtaatggctcacagattggccttagatgcatcccgagggtctgaaattaaacctacaggttctgaatacaacatcatggttacctgagtctgggcatctgtgaagaagggtcatggatggtgaggtcagtactgcaggctgcctcaccttggtgattagattcctaagatcatagcattaacaagttctgtacgagataaatcatgcagattgatcccagcccctgttggttagtggctgccagtgtggcacattcatgtcaaaatttaccagaagccaagatgatgtaggccccagaggtggattgttaaaaagatgctcctccaaggttctcttctgttcccatggatcctgcagagcatgtcaggagtgaaaccatccataactgccagtgccctttcacagctgattatttctatgtccccttcttgtaaaataagaagtgtgacaaccttgactgttctgttctgtcttctctgtccattttaggtggcacaatgtaagtggcagtgtctcttatagtataatccagtctctcttctcacttctgttaagatggctgatatagtccatgaatcccactcatgatctctttatcaaatgattgttcagccacactttgaggattctcttcagtacaagttttctaatttttgcagtatggataggctgagaattttccaaatctccaagttctggttcctttttccttaacaatttcttctgcaattcaggtctccttttgcatttttgccgagaccagctgggtcgtgga

SEQ ID NO: 9770 - protein, 311 aa, Homo sapiens
MQTRSYSGWKLCENCGEVFSEQFCLKTHMRAQNGGNTFEGNCYGKDSISVHKEASIGQELSKFNPCGKVFTLTPGLAVHLEILNGRQPYKCKECGKGFKYFASLDNHMGIHIGEKLCEFQECERAITTSSHLKQCVAVHTGKKSEKTKNCGKSFTNFSQLSAHAKTHKGEKSFECKECGRSFRNSSSFNVHIQIHTGIKPHKCTECGKAFTRSTHLTQHVRTHTGIKPYECKECGQAFTQYTGLAIHIRNHTGEKPYQCKECGKAFNRSSTLTQHRRIHTGEKPYECVECGKTFITSSHRSKHLKTHSGER

SEQ ID NO: 9771 - DNA, 2427 bp, Homo sapiens
gtgtgccaccgccatctttaccggctgtggctcagcatggtcagtgccgtttaacctttattgtggtggagtccaccccgctgtgggcctcagataaccctgtacaaaggggaatggagattgcctgtatccacctagattcataagctgccctgaggcgatcttggcatcaagaaagacagcattgaggcacatctcaccatcagcttcagaggatgtcagcctttgatatgtcccatgggttttttcccagggaaccaatctgtccttttgaagaaaagacaaagataggaacgatggtagaggaccaccggtcaaattcttaccaggattcagtgacgtttgatgatgtggctgtggagttcaccccagaggagtgggctttactggacacaactcagaaatacctctacagagatgtgatgctggagaactacatgaacctggcctctgtggcagacaagaagctacagtggatggaaactctgtgagaattgtggagaggtcttcagtgaacagttttgccttaagacacacatgagagctcagaatggagggaacacttttgagggtaattgttatggaaaagacagcatcagtgtgcacaaggaagcctctattggacaagaactttccaaatttaatccatgtggaaaagtcttcaccttaactccaggccttgctgtgcatcttgaaattctcaatggaagacaaccctacaaatgtaaggaatgtggaaaaggctttaagtattttgcaagccttgataatcacatgggaatccacattggagagaaactctgtgaatttcaggaatgtgagagagccatcacaacttcctcacacttaaagcagtgtgtagcagttcatactggaaagaaatccgaaaagactaagaactgtgggaaatccttcactaatttttctcaactttctgcacatgcaaaaactcataaaggagagaagtcctttgaatgtaaagaatgtggaagatcctttagaaattcctcatcctttaatgttcacattcaaattcacactggaataaaaccacacaaatgtacggaatgtgggaaagccttcactagatcaactcaccttactcaacatgtaagaactcacactggaataaaaccctatgaatgtaaggaatgtggccaagccttcactcagtacacgggccttgctatacacatacgaaatcacactggagagaaaccctatcagtgtaaggaatgtgggaaagccttcaatagatcttcaacgcttactcaacatagaagaattcacacaggagagaagccttatgaatgtgttgaatgtgggaagaccttcattacttcttcccatcgtagtaaacatttgaaaactcacagtggagaaaggtaaatgcaagatatgtgggaaagaatttctgtattcctcaccccacctgtgaactcctaccagagagaaaccttttgtatgtaaagaatttgggaaagcatttgctctttcctcatgcctaagtatgcatgaaagaattcacactggggagaaatactatgaatgtaaggatatgagtgttgttaccatttagcccattggttgccatctttaattattggcagtgcaaagatcatcagattagtcctaaatgccttttggaggttgtaatggctcacagattggccttagatgcatcccgagggtctgaaattaaacctacaggttctgaatacaacatcatggttacctgagtctgggcatctgtgaagaagggtcatggatggtgaggtcagtactgcaggctgcctcaccttggtgattagattcctaagatcatagcattaacaagttctgtacgagataaatcatgcagattgatcccagcccctgttggttagtggctgccagtgtggcacattcatgtcaaaatttaccagaagccaagatgatgtaggccccagaggtggattgttaaaaagatgctcctccaaggttctcttctgttcccatggatcctgcagagcatgtcaggagtgaaaccatccataactgccagtgccctttcacagctgattatttctatgtccccttcttgtaaaataagaagtgtgacaaccttgactgttctgttctgtcttctctgtccattttaggtggcacaatgtaagtggcagtgtctcttatagtataatccagtctctcttctcacttctgttaagatggctgatatagtccatgaatcccactcatgatctctttatcaaatgattgttcagccacactttgaggattctcttcagtacaagttttctaatttttgcagtatggataggctgagaattttccaaatctccaagttctggttcctttttccttaacaatttcttctgcaattcaggtctccttttgcatttttgccgagaccagctgggtcgtgga

SEQ ID NO: 9772 - protein, 91 aa, Homo sapiens
MSAFDMSHGFFPREPICPFEEKTKIGTMVEDHRSNSYQDSVTFDDVAVEFTPEEWALLDTTQKYLYRDVMLENYMNLASVADKKLQWMETL

SEQ ID NO: 9773 - DNA, 2535 bp, Homo sapiens
agtgtgccaccgccatctttaccggctgtggctcagcatggtcagtgccgtttaacctttattgtggtggagtccaccccgctgtgggcctcagataaccctgtacaaaggggaatggagattgcctgtatccacctagattcataagctgccctgaggcgatcttggcatcaagaaagacagcattgaggcacatctcaccatcagcttcagaggatgtcagcctttgatatgtcccatgggttttttcccagggaaccaatctgtccttttgaagaaaagacaaagataggaacgatggtagaggaccaccggtcaaattcttaccaggattcagtgacgtttgatgatgtggctgtggagttcaccccagaggagtgggctttactggacacaactcagaaatacctctacagagatgtgatgctggagaactacatgaacctggcctctgtggatttctttttctgcttaacttcagaatgggaaatacaacctagaaccaaacggtcatcacttcagcagggttttttgaagaatcaaatattcactgggatacaaatgcagacaagaagctacagtggatggaaactctgtgagaattgtggagaggtcttcagtgaacagttttgccttaagacacacatgagagctcagaatggagggaacacttttgagggtaattgttatggaaaagacagcatcagtgtgcacaaggaagcctctattggacaagaactttccaaatttaatccatgtggaaaagtcttcaccttaactccaggccttgctgtgcatcttgaaattctcaatggaagacaaccctacaaatgtaaggaatgtggaaaaggctttaagtattttgcaagccttgataatcacatgggaatccacattggagagaaactctgtgaatttcaggaatgtgagagagccatcacaacttcctcacacttaaagcagtgtgtagcagttcatactggaaagaaatccgaaaagactaagaactgtgggaaatccttcactaatttttctcaactttctgcacatgcaaaaactcataaaggagagaagtcctttgaatgtaaagaatgtggaagatcctttagaaattcctcatcctttaatgttcacattcaaattcacactggaataaaaccacacaaatgtacggaatgtgggaaagccttcactagatcaactcaccttactcaacatgtaagaactcacactggaataaaaccctatgaatgtaaggaatgtggccaagccttcactcagtacacgggccttgctatacacatacgaaatcacactggagagaaaccctatcagtgtaaggaatgtgggaaagccttcaatagatcttcaacgcttactcaacatagaagaattcacacaggagagaagccttatgaatgtgttgaatgtgggaagaccttcattacttcttcccatcgtagtaaacatttgaaaactcacagtggagaaaggtaaatgcaagatatgtgggaaagaatttctgtattcctcaccccacctgtgaactcctaccagagagaaaccttttgtatgtaaagaatttgggaaagcatttgctctttcctcatgcctaagtatgcatgaaagaattcacactggggagaaatactatgaatgtaaggatatgagtgttgttaccatttagcccattggttgccatctttaattattggcagtgcaaagatcatcagattagtcctaaatgccttttggaggttgtaatggctcacagattggccttagatgcatcccgagggtctgaaattaaacctacaggttctgaatacaacatcatggttacctgagtctgggcatctgtgaagaagggtcatggatggtgaggtcagtactgcaggctgcctcaccttggtgattagattcctaagatcatagcattaacaagttctgtacgagataaatcatgcagattgatcccagcccctgttggttagtggctgccagtgtggcacattcatgtcaaaatttaccagaagccaagatgatgtaggccccagaggtggattgttaaaaagatgctcctccaaggttctcttctgttcccatggatcctgcagagcatgtcaggagtgaaaccatccataactgccagtgccctttcacagctgattatttctatgtccccttcttgtaaaataagaagtgtgacaaccttgactgttctgttctgtcttctctgtccattttaggtggcacaatgtaagtggcagtgtctcttatagtataatccagtctctcttctcacttctgttaagatggctgatatagtccatgaatcccactcatgatctctttatcaaatgattgttcagccacactttgaggattctcttcagtacaagttttctaatttttgcagtatggataggctgagaattttccaaatctccaagttctggttcctttttccttaacaatttcttctgcaattcaggtctccttttgcatttttgccgagaccagctgggtcgtgga

SEQ ID NO: 9774 - protein, 426 aa, Homo sapiens
MSAFDMSHGFFPREPICPFEEKTKIGTMVEDHRSNSYQDSVTFDDVAVEFTPEEWALLDTTQKYLYRDVMLENYMNLASVDFFFCLTSEWEIQPRTKRSSLQQGFLKNQIFTGIQMQTRSYSGWKLCENCGEVFSEQFCLKTHMRAQNGGNTFEGNCYGKDSISVHKEASIGQELSKFNPCGKVFTLTPGLAVHLEILNGRQPYKCKECGKGFKYFASLDNHMGIHIGEKLCEFQECERAITTSSHLKQCVAVHTGKKSEKTKNCGKSFTNFSQLSAHAKTHKGEKSFECKECGRSFRNSSSFNVHIQIHTGIKPHKCTECGKAFTRSTHLTQHVRTHTGIKPYECKECGQAFTQYTGLAIHIRNHTGEKPYQCKECGKAFNRSSTLTQHRRIHTGEKPYECVECGKTFITSSHRSKHLKTHSGER

SEQ ID NO: 9775 - DNA, 1701 bp, Homo sapiens
gtgtgccaccgccatctttaccggctgtggctcagcatggtcagtgccgtttaacctttattgtggtggagtccaccccgctgtgggcctcagataaccctgtacaaaggggaatggagattgcctgtatccacctagattcataagctgccctgaggcgatcttggcatcaagaaagacagcattgaggcacatctcaccatcagcttcagaggatgtcagcctttgatatgtcccatgggttttttcccagggaaccaatctgtccttttgaagaaaagacaaagataggaacgatggtagaggaccaccggtcaaattcttaccagatttctttttctgcttaacttcagaatgggaaatacaacctagaaccaaacggtcatcacttcagcagggttttttgaagaatcaaatattcactgggatacaaatgcagacaagaagctacagtggatggaaactctgtgagaattgtggagaggtcttcagtgaacagttttgccttaagacacacatgagagctcagaatggagggaacacttttgagggtaattgttatggaaaagacagcatcagtgtgcacaaggaagcctctattggacaagaactttccaaatttaatccatgtggaaaagtcttcaccttaactccaggccttgctgtgcatcttgaaattctcaatggaagacaaccctacaaatgtaaggaatgtggaaaaggctttaagtattttgcaagccttgataatcacatgggaatccacattggagagaaactctgtgaatttcaggaatgtgagagagccatcacaacttcctcacacttaaagcagtgtgtagcagttcatactggaaagaaatccgaaaagactaagaactgtgggaaatccttcactaatttttctcaactttctgcacatgcaaaaactcataaaggagagaagtcctttgaatgtaaagaatgtggaagatcctttagaaattcctcatcctttaatgttcacattcaaattcacactggaataaaaccacacaaatgtacggaatgtgggaaagccttcactagatcaactcaccttactcaacatgtaagaactcacactggaataaaaccctatgaatgtaaggaatgtggccaagccttcactcagtacacgggccttgctatacacatacgaaatcacactggagagaaaccctatcagtgtaaggaatgtgggaaagccttcaatagatcttcaacgcttactcaacatagaagaattcacacaggagagaagccttatgaatgtgttgaatgtgggaagaccttcattacttcttcccatcgtagtaaacatttgaaaactcacagtggagaaaggtaaatgcaagatatgtgggaaagaatttctgtattcctcaccccacctgtgaactcctaccagagagaaaccttttgtatgtaaagaatttgggaaagcatttgctctttcctcatgcctaagtatgcatgaaagaattcacactggggagaaatactatgaatgtaaggatatgagtgttgttaccatttagcccattggttgccatctttaattattggcagtgcaaagatcatcagattagtcctaaatgccttttggaggttgtaatggctcacagattggccttagatgcatcccgagggtctgaaattaaacctacaggttctgaatac

SEQ ID NO: 9776 - protein, 311 aa, Homo sapiens; identical to SEQ ID NO: 9770

SEQ ID NO: 9777 - DNA, 1721 bp, Homo sapiens
gtgtgccaccgccatctttaccggctgtggctcagcatggtcagtgccgtttaacctttattgtggtggagtccaccccgctgtgggcctcagataaccctgtacaaaggggaatggagattgcctgtatccacctagattcataagctgccctgaggcgatcttggcatcaagaaagacagcattgaggcacatctcaccatcagcttcagaggatgtcagcctttgatatgtcccatgggttttttcccagggaaccaatctgtccttttgaagaaaagacaaagataggaacgatggtagaggaccaccggtcaaattcttaccaggattcagtgacgtttgatgatgtggctgtggagttcaccccagaggagtgggctttactggacacaactcagaaatacctctacagagatgtgatgctggagaactacatgaacctggcctctgtggcagacaagaagctacagtggatggaaactctgtgagaattgtggagaggtcttcagtgaacagttttgccttaagacacacatgagagctcagaatggagggaacacttttgagggtaattgttatggaaaagacagcatcagtgtgcacaaggaagcctctattggacaagaactttccaaatttaatccatgtggaaaagtcttcaccttaactccaggccttgctgtgcatcttgaaattctcaatggaagacaaccctacaaatgtaaggaatgtggaaaaggctttaagtattttgcaagccttgataatcacatgggaatccacattggagagaaactctgtgaatttcaggaatgtgagagagccatcacaacttcctcacacttaaagcagtgtgtagcagttcatactggaaagaaatccgaaaagactaagaactgtgggaaatccttcactaatttttctcaactttctgcacatgcaaaaactcataaaggagagaagtcctttgaatgtaaagaatgtggaagatcctttagaaattcctcatcctttaatgttcacattcaaattcacactggaataaaaccacacaaatgtacggaatgtgggaaagccttcactagatcaactcaccttactcaacatgtaagaactcacactggaataaaaccctatgaatgtaaggaatgtggccaagccttcactcagtacacgggccttgctatacacatacgaaatcacactggagagaaaccctatcagtgtaaggaatgtgggaaagccttcaatagatcttcaacgcttactcaacatagaagaattcacacaggagagaagccttatgaatgtgttgaatgtgggaagaccttcattacttcttcccatcgtagtaaacatttgaaaactcacagtggagaaaggtaaatgcaagatatgtgggaaagaatttctgtattcctcaccccacctgtgaactcctaccagagagaaaccttttgtatgtaaagaatttgggaaagcatttgctctttcctcatgcctaagtatgcatgaaagaattcacactggggagaaatactatgaatgtaaggatatgagtgttgttaccatttagcccattggttgccatctttaattattggcagtgcaaagatcatcagattagtcctaaatgccttttggaggttgtaatggctcacagattggccttagatgcatcccgagggtctgaaattaaacctacaggttctgaatac

SEQ ID NO: 9778 - protein, 91 aa, Homo sapiens; identical to SEQ ID NO: 9772

SEQ ID NO: 9779 - DNA, 1612 bp, Homo sapiens
gtgtgccaccgccatctttaccggctgtggctcagcatggtcagtgccgtttaacctttattgtggtggagtccaccccgctgtgggcctcagataaccctgtacaaaggggaatggagattgcctgtatccacctagattcataagctgccctgaggcgatcttggcatcaagaaagacagcattgaggcacatctcaccatcagcttcagaggatgtcagcctttgatatgtcccatgatttctttttctgcttaacttcagaatgggaaatacaacctagaaccaaacggtcatcacttcagcagggttttttgaagaatcaaatattcactgggatacaaatgcagacaagaagctacagtggatggaaactctgtgagaattgtggagaggtcttcagtgaacagttttgccttaagacacacatgagagctcagaatggagggaacacttttgagggtaattgttatggaaaagacagcatcagtgtgcacaaggaagcctctattggacaagaactttccaaatttaatccatgtggaaaagtcttcaccttaactccaggccttgctgtgcatcttgaaattctcaatggaagacaaccctacaaatgtaaggaatgtggaaaaggctttaagtattttgcaagccttgataatcacatgggaatccacattggagagaaactctgtgaatttcaggaatgtgagagagccatcacaacttcctcacacttaaagcagtgtgtagcagttcatactggaaagaaatccgaaaagactaagaactgtgggaaatccttcactaatttttctcaactttctgcacatgcaaaaactcataaaggagagaagtcctttgaatgtaaagaatgtggaagatcctttagaaattcctcatcctttaatgttcacattcaaattcacactggaataaaaccacacaaatgtacggaatgtgggaaagccttcactagatcaactcaccttactcaacatgtaagaactcacactggaataaaaccctatgaatgtaaggaatgtggccaagccttcactcagtacacgggccttgctatacacatacgaaatcacactggagagaaaccctatcagtgtaaggaatgtgggaaagccttcaatagatcttcaacgcttactcaacatagaagaattcacacaggagagaagccttatgaatgtgttgaatgtgggaagaccttcattacttcttcccatcgtagtaaacatttgaaaactcacagtggagaaaggtaaatgcaagatatgtgggaaagaatttctgtattcctcaccccacctgtgaactcctaccagagagaaaccttttgtatgtaaagaatttgggaaagcatttgctctttcctcatgcctaagtatgcatgaaagaattcacactggggagaaatactatgaatgtaaggatatgagtgttgttaccatttagcccattggttgccatctttaattattggcagtgcaaagatcatcagattagtcctaaatgccttttggaggttgtaatggctcacagattggccttagatgcatcccgagggtctgaaattaaacctacaggttctgaatac

SEQ ID NO: 9780 - protein, 354 aa, Homo sapiens; identical to SEQ ID NO: 9766

SEQ ID NO: 9781 - DNA, 1829 bp, Homo sapiens
agtgtgccaccgccatctttaccggctgtggctcagcatggtcagtgccgtttaacctttattgtggtggagtccaccccgctgtgggcctcagataaccctgtacaaaggggaatggagattgcctgtatccacctagattcataagctgccctgaggcgatcttggcatcaagaaagacagcattgaggcacatctcaccatcagcttcagaggatgtcagcctttgatatgtcccatgggttttttcccagggaaccaatctgtccttttgaagaaaagacaaagataggaacgatggtagaggaccaccggtcaaattcttaccaggattcagtgacgtttgatgatgtggctgtggagttcaccccagaggagtgggctttactggacacaactcagaaatacctctacagagatgtgatgctggagaactacatgaacctggcctctgtggatttctttttctgcttaacttcagaatgggaaatacaacctagaaccaaacggtcatcacttcagcagggttttttgaagaatcaaatattcactgggatacaaatgcagacaagaagctacagtggatggaaactctgtgagaattgtggagaggtcttcagtgaacagttttgccttaagacacacatgagagctcagaatggagggaacacttttgagggtaattgttatggaaaagacagcatcagtgtgcacaaggaagcctctattggacaagaactttccaaatttaatccatgtggaaaagtcttcaccttaactccaggccttgctgtgcatcttgaaattctcaatggaagacaaccctacaaatgtaaggaatgtggaaaaggctttaagtattttgcaagccttgataatcacatgggaatccacattggagagaaactctgtgaatttcaggaatgtgagagagccatcacaacttcctcacacttaaagcagtgtgtagcagttcatactggaaagaaatccgaaaagactaagaactgtgggaaatccttcactaatttttctcaactttctgcacatgcaaaaactcataaaggagagaagtcctttgaatgtaaagaatgtggaagatcctttagaaattcctcatcctttaatgttcacattcaaattcacactggaataaaaccacacaaatgtacggaatgtgggaaagccttcactagatcaactcaccttactcaacatgtaagaactcacactggaataaaaccctatgaatgtaaggaatgtggccaagccttcactcagtacacgggccttgctatacacatacgaaatcacactggagagaaaccctatcagtgtaaggaatgtgggaaagccttcaatagatcttcaacgcttactcaacatagaagaattcacacaggagagaagccttatgaatgtgttgaatgtgggaagaccttcattacttcttcccatcgtagtaaacatttgaaaactcacagtggagaaaggtaaatgcaagatatgtgggaaagaatttctgtattcctcaccccacctgtgaactcctaccagagagaaaccttttgtatgtaaagaatttgggaaagcatttgctctttcctcatgcctaagtatgcatgaaagaattcacactggggagaaatactatgaatgtaaggatatgagtgttgttaccatttagcccattggttgccatctttaattattggcagtgcaaagatcatcagattagtcctaaatgccttttggaggttgtaatggctcacagattggccttagatgcatcccgagggtctgaaattaaacctacaggttctgaatac

SEQ ID NO: 9782 - protein, 426 aa, Homo sapiens; identical to SEQ ID NO: 9774

SEQ ID NO: 9783 - DNA, 2371 bp, Homo sapiens
ctgtttaaggcatatgcctgtaggaggtcaaccttgattgtttagacacaagagctcctgagacattaaaccctggagtagatcatgggagacttgagaaccacgtataagtgagtataaggttcccctttcctcattctccagtgaatattggtggaagtgttcattggctcaaaccagcatgtgtttgatgacttaggattcagtgacgtttgatgatgtggctgtggagttcaccccagaggagtgggctttactggacacaactcagaaatacctctacagagatgtgatgctggagaactacatgaacctggcctctgtgggtaagagtaacatcactttgcttggcatggtggcctgcacctgtagtcccagatacttgggaggctgaggtgggagaatcgctggagcctgggagtttgatactagcatgggcaacattgtgaaacctcatctctaaaaaaaaatcctaagaataaagactaggccggtcccggaggttcacgcctgtaatcccagcactttggaaggctgaggcaggcagatcacaaggtcaggaaatcaagaccagcctggctaacatggtgaaaccctgtctctactaaaaatacaaaattagctgtgtgtggtggtgggcacccgttatcctagttactcgggcggctgaggcaggacaattgcttacccagaggccgaggttgctgagtgagccagcactgcaccactgcattccagcttagatgaccaagtgagactccatctaaaaaaaaaaaaaaaaaaaaaaaaaaaaaaaaaaagaaagaaaagaaagtgaatcctgtaatcccagcactttgggatgtggaggtgtgtggatcacttgaggttagcactttgagaccagcctgaccaacatggtgaaactctgtctctactaaaaatacaaaattagccaggtgtggtgggcacctgtaatcccagttacatgggaggctgaggcagaattgcttaaacacgggaggtggagttggcatgaaaaagaaacagcacaaatgagagatacttgagagagaagtagcctgcacccttgagggagcagggtctctggagagatagtctgaatgtgatgaattttctgatgttccatacctgtataacttgtcactgaaaaataccgacaagtacatattcccacatatgtaactagacattgaggatttaaagtttcatgaaaatctgcacaatttggctgggtgcaatggctgacacctgcaatcccagcactttgggaagctgaggcaggagaattgcttgagtctaggagatcaagaccagcctgggcaacagggagactctgtctctacaaaaaaataaaaaattagccgggcacgttggcatgcacctgtaatccaggctcctcaggagactgaggcaggatgatggcttgagcctgggagtttaaggctgcagtgagctgtgattgtgccatggtacccagcctgggtgacagagtgagaccctgtctcaaaccacccccaacaatcaaaaaaagacagtttttttttgaacaattagagccagtggcatagaattctggcaagagatcaagagggtaggaaatgaaaccatggaagaaatattgtaaaaattatggttatcaaagtaggctgacttggtagctcatggctgtaatcccagcagtttgggaggctgagacgggggtttcttgtagagtttgagaccagcctaggctacataccaagaccctgtctctataaaaataaattgaggccgggcgcagtgcctcatgcctgtaattccagcactttcggaggcctaggcaggcggatgagaaggtcaagagtttgagaacaccctggctaacatgatgaagtcccatctgtaggaaaaatacaaaaattagctgggtctggttgcacatgctagttggcaggctgaggcagaagaaccgcttgaacccaggaggcggaggttgcagtgagccgaaatcgtgacactgcactccagccaaagtgagactccatctcaaaaataaataaaataaaataaataaataaatcaaaaaattggatgatgcatgcctctagtcctagctacacagcttttagctagggtgatcacttgaacccagccaggcgtttgaggttacagtgagccatgatcactgcagtgcactatagaccaggcaatggagcaaaaccccagctctgaaaaaagtaaaacatgttgtgcatggtgggtcacgcctgtaatcttaccactttgggaggccaagacaggcagttcacctgaactcaggagtttgagaccagcctgggcaacttggcaaaacccatgtctacaaaaaaagtagaaaaactccccagtg

SEQ ID NO: 9784 - protein, 54 aa, Homo sapiens
MEQNPSSEKSKTCCAWWVTPVILPLWEAKTGSSPELRSLRPAWATWQNPCLQKK

SEQ ID NO: 9785 - DNA, 851 bp, Homo sapiens
cttctgtgtctctcccccgtgggttagggtcagaccgcagaatctaaactgaccctattggctatctgtgaatattttccccaaataaggaagggtagggggatgtgtgagtcatgatggtgggatgtgcagtttcaaagagtggaatagctgcagaatgagtagccaagggaacagatgtgagttattgattagagctgatgggaaggttgtttacagtaactagaggcaaggaggcatggaagaatcactttaacccgggaggcggaggttgcattgagccgagatcccgccactgccctccagcctgggtgacaagagcgaaactgtctaaaaaaaaaaaaaaaaaaaaaagaaaggcaataatactcaactattctcttcatctgaagttcttaggtctgtacttccccacagtgcttcaaaacagaggcctccaggaaccaggaagaaagaatggaggctttattacactgacactagaattatttactattataatcagaatagtattctagtatcagtgtaataaaatatctagtatctgtataatttattaagagcatgtttggactaagtgtagtttttacatttttttctgaaaaatttgatcctaaggaaaacttgaacatctaacacacccagtctagtagatttacttaattttttagcattttatttctttctcctcatgtaaatcttacagtgaacaatttgagtgtaaattgagcataaattgtacatgtgatgcttgacctttaaatactttgtaatgcacctcctaaaaataggcattgtcatactaaaaccacaatactagtatttcacttaaattaaaaataataatgtca

SEQ ID NO: 9786 - protein, 105 aa, Homo sapiens [sequence omitted]

SEQ ID NO: 9787 - DNA, 876 bp, Homo sapiens
gtcaaatacagaatgtgatgttccattccagccaatggaaaccggacgctgcagtagggtggacacgtcaggttataaatgaccctgtttcctttgtttagtgtactctagtggcaaaactgctggctagtgtacctgttctgccaaaagtaaaatgggcttactgaggaaattaaatttatgttcaagtgctatttctttatgcaccggggaacaagcatttctaacaacctggtcctacgtggctgaaactggatcccagaagccccgtccttcccgaagctcgtagcggaagtgacatcagcccgccgccactatcttttcccgcgctggctgcccacggtcagtgctgtttcacctttatcttggtggagtcgaccccggctgtgcagacaagaagctacagtggatggaaactctgagaattgtggagaggtcttcagtgaatggttttgccttaaaacacacatgagagctcagaatggagggaacatctttgagggtaattgttatggaaaagacatcctcagtgtgcacaaggaagcctctattggacaggaactttccaaatttaatccatgtggaaaagtcttcaccttaactccagatcttgctgcacatcttggaattctcaatgcaagacaaccatacaaatgtaaggaatgtagaaaaggctttaagtattttgcaagccttgataatcacatgggaatccacattggagagaaattctgtgaatttcaggaatgtaggagagccatcactcattcctcacacctaaagcagtgtgtaacagttcatactggaaagaaatctaaaaagactaagaaacatgggaaatccttcactaatttttctcaactttctgcacatgtg

SEQ ID NO: 9788 - protein, 135 aa, Homo sapiens
MRAQNGGNIFEGNCYGKDILSVHKEASIGQELSKFNPCGKVFTLTPDLAAHLGILNARQPYKCKECRKGFKYFASLDNHMGIHIGEKFCEFQECRRAITHSSHLKQCVTVHTGKKSKKTKKHGKSFTNFSQLSAH

SEQ ID NO: 9789 - DNA, 587 bp, Homo sapiens
actctagtggcaaaactgctggctagtgtacctgttctgccaaaagtaaaatgggcttactgaggaaattaaatttatgttcaagtgctatttctttatgcaccggggaacaagcatttctaacaacctggtcctacgtggctgaaactggatcccagaagccccgtccttcccgaagctcgtagcggaagtgacatcagcccgccgccactatcttttcccgcgctggctgcccacggtcagtgctgtttcacctttatcttggtggagtcgaccccggctgtggaaaaggatttctgccattctggtaaggttggctctggccccgcatcctcccgcgtcaggaacctggcgattccggagtgttcttggacttcaaataaccctgtacaaagaggaatggagattgcctctattcacctagattcataagttgccctgaggcaatcttggcatcaaggaagagagcattgaggcacaactgaccatcagcttcagagaatggcagtcactgatttgtcccatgggttttttcccagggaaccaatctgcccttttgaagaaaagacaaagataggaacgatggt

SEQ ID NO: 9790 - protein, 44 aa, Homo sapiens
MGLLRKLNLCSSAISLCTGEQAFLTTWSYVAETGSQKPRPSRSS

SEQ ID NO: 9791 - DNA, 578 bp, Homo sapiens
gtcaaatacagaatgtgatgttccattccagccaatggaaaccggacgctgcagtagggtggacacgtcaggttataaatgaccctgtttcctttgtttagtgtactctagtggcaaaactgctggctagtgtacctgttctgccaaaagtaaaatgggcttactgaggaaattaaatttatgttcaagtgctatttctttatgcaccggggaacaagcatttctaacaacctggtcctacgtggctgaaactggatcccagaagccccgtccttcccgaagctcgtagcggaagtgacatcagcccgccgccactatcttttcccgcgctggctgcccacggtcagtgctgtttcacctttatcttggtggagtcgaccccggctgtggacttcaaataaccctgtacaaagaggaatggagattgcctctattcacctagattcataagttgccctgaggcaatcttggcatcaaggaagagagcattgaggcacaactgaccatcagcttcagagaatggcagtcactgatttgtcccatgggttttttcccagggaaccaatctgcccttttga

SEQ ID NO: 9792 - protein, 44 aa, Homo sapiens; identical to SEQ ID NO: 9790

SEQ ID NO: 9793 - DNA, 536 bp, Homo sapiens
gctttcactcaatccacaggacttaaattacacatcagaactcacagtggagaaaaaccatataaatgtaaagagtgtgggaaagccttcacccattcttcataccttactgatcatacaagaatccacagtggaaagaagccctatgtatgtatggaatgtggaaaagccttcactagatccacaggacttattttacacatgcgaattcacactggagaaaagccatatgaatagacgaagtttcatcatgttgtccaggctggtgtcaaactcctgacttcaggtgatccacccaccttggcctcccaaagtgctgggattatggacgtgagccaccacacccgcccttgaaatactgtttctaaaaggtatatggaagaacaataggcaaggataatcaagacccagctgataaaaaaggtggaagaacttgccctaatgaatatcaagattaaaactatagtaattaagatgctgttgcattgtacacagacaactagactattggtacaaaatagtctggaaatagtcac

SEQ ID NO: 9794 - protein, 44 aa, Homo sapiens
MYVWNVEKPSLDPQDLFYTCEFTLEKSHMNRRSFIMLSRLVSNS

SEQ ID NO: 9795 - DNA, 724 bp, Homo sapiens
agacctgtgccagcatgccctgctaatttttgtatttttagtagagaggaagtttcaccacgttggccaggctggtcttgaactcctaacctcaagtgatctccctgccttggcttcccaaagtgctgaggtatgaggcatgagccattatacctgggcaacatttttgttattttaaaaatagttttagtgcatgtattggaaatgttatatgattagtttgctatttgtaaagttacacttgaccatctttagaatccccgaaggcaaaagtattggttccccattgaaggacatggtgttatgtcttgcatgggcctcttcttttgtgcatttttccctccagcagggtctgaattattcaaacgtagtctcatgtctggattggaacaaatggaagagctgaggacaggagtgacaggagttctgcagggagagaagcaatactgcagagaaactgtatgactctaaccattctggaaaagtcttcaatgaacacccatttcttatgactcacatgataactcacattggagagaaaacttctgaggataatcagagtggaaaagccttaagaaagaactttcctcatagtttttacaagaaaagtcatgctgaggggaaaatgcctaagtgtgttaaacatgaaaaagccttcaaccagtttccaaatcttactaggcagaataaaactcacacacaagagaaattgtgtgaatgcaaa

SEQ ID NO: 9796 - protein, 53 aa, Homo sapiens
MSCMGLFFCAFFPPAGSELFKRSLMSGLEQMEELRTGVTGVLQGEKQYCRETV

SEQ ID NO: 9797 - DNA, 1099 bp, Homo sapiens
ctaaaaagagaaattaaaaaagaaaagaaaagcactcgatgagcatcccgctgtctgcaatcgaagccttaggtgacgcctccacgcgtgccccgcccgctgcgccagtccccgcctccaacccggcccttggcgctgggtttcctggtccggcgtcgttcccaatatcgacagattgatctggatcctggtccacctgggatgcgagaaaacgggacttttctgtacgcgtgtcgaagaggtggccccagctcttctctcagcttcacatcatcctcattccaaagctcttggggctcggcccctacacttaatgccgtgcgcaaccggaagcggaagtgccagccggcgcgcagctatacgtattccccgctctccagcagcttcctagctgggttttcacctcagccagcgctcatgctcaacctaggcagggcggggcaggagggcctagcgggaggcggagcgagggtcggagggtgacgctccggacttctgctaggtctgagacgcgccggcctcccgctgctgctccggagaagcggcgcctcctccccgccaggaccccgaggcggggggttcccgccttctcttctgagcgcctcttcccgctgcgcccgcatcagtctgggcctggcccagggtccccggtggagacgtgtttttttctccaaccaccgtgcccctctgtttaaaagcagccagtcaacctttgtgtcctttctccagaaggaaaagcatctcagctgttgtggaaaagggccccagcgtcctcttgtcaccgacagggcgattgcagtgcgttccggagagaagcaatactgcagagaaactgtatgactctaaccattctggaaaagtcttcaatgaacacccatttcttatgactcacatgataactcacattggagagaaaacttctgaggataatcagagtggaaaagccttaagaaagaactttcctcatagtttttacaagaaaagtcatgctgaggggaaaatgcctaagtgtgttaaacatgaaaaagccttcaaccagtttccaaatcttactaggcagaataaaactcacacacaagagaaattgtgtgaatgcaaa

SEQ ID NO: 9798 - protein, 93 aa, Homo sapiens
MRENGTFLYACRRGGPSSSLSFTSSSFQSSWGSAPTLNAVRNRKRKCQPARSYTYSPLSSSFLAGFSPQPALMLNLGRAGQEGLAGGGARVGG

SEQ ID NO: 9799 - DNA, 1496 bp, Homo sapiens
ctaaaaagagaaattaaaaaagaaaagaaaagcactcgatgagcatcccgctgtctgcaatcgaagccttaggtgacgcctccacgcgtgccccgcccgctgcgccagtccccgcctccaacccggcccttggcgctgggtttcctggtccggcgtcgttcccaatatcgacagattgatctggatcctggtccacctgggatgcgagaaaacgggacttttctgtacgcgtgtcgaagaggtggccccagctcttctctcagcttcacatcatcctcattccaaagctcttggggctcggcccctacacttaatgccgtgcgcaaccggaagcggaagtgccagccggcgcgcagctatacgtattccccgctctccagcagcttcctagctgggttttcacctcagccagcgctcatgctcaacctaggcagggcggggcaggagggcctagcgggaggcggagcgagggtcggagggtgacgctccggacttctgctaggtctgagacgcgccggcctcccgctgctgctccggagaagcggcgcctcctccccgccaggaccccgaggcggggggttcccgccttctcttctgagcgcctcttcccgctgcgcccgcatcagtctgggcctggcccagggtccccggtggagacgtgtttttttctccaaccaccgtgcccctctgtttaaaagcagccagtcaacctttgtgtcctttctccagaaggaaaagcatctcagctgttgtggaaaagggccccagcgtcctcttgtcaccgacagggcgattgcagtgcgttccggtcattttttccaggacactttctgtcttcatgacaggaacatcgagaagccaaggctagtggctgggttactgatggattactgatggattcttctcagcacttagtgacctttgaggatgtggctgtggactttacccaggaggagtggactttgttggatcaagcccagagagatctctacagagatgtgatgttggagaactacaagaatctcattatactagcagggtctgaattattcaaacgtagtctcatgtctggattggaacaaatggaagagctgaggacaggagtgacaggagttctgcaggaattggatttgcaactcaaaaccaaaggctccccactgctgcaagatatttctgcagaaagatcaccaaatggagtacaattggagagaagcaatactgcagagaaactgtatgactctaaccattctggaaaagtcttcaatgaacacccatttcttatgactcacatgataactcacattggagagaaaacttctgaggataatcagagtggaaaagccttaagaaagaactttcctcatagtttttacaagaaaagtcatgctgaggggaaaatgcctaagtgtgttaaacatgaaaaagccttcaaccagtttccaaatcttactaggcagaataaaactcacacacaagagaaattgtgtgaatgcaaa

SEQ ID NO: 9800 - protein, 200 aa, Homo sapiens
MDSSQHLVTFEDVAVDFTQEEWTLLDQAQRDLYRDVMLENYKNLIILAGSELFKRSLMSGLEQMEELRTGVTGVLQELDLQLKTKGSPLLQDISAERSPNGVQLERSNTAEKLYDSNHSGKVFNEHPFLMTHMITHIGEKTSEDNQSGKALRKNFPHSFYKKSHAEGKMPKCVKHEKAFNQFPNLTRQNKTHTQEKLCEC

SEQ ID NO: 9801 - DNA, 958 bp, Homo sapiens
ctaaaaagagaaattaaaaaagaaaagaaaagcactcgatgagcatcccgctgtctgcaatcgaagccttaggtgacgcctccacgcgtgccccgcccgctgcgccagtccccgcctccaacccggcccttggcgctgggtttcctggtccggcgtcgttcccaatatcgacagattgatctggatcctggtccacctgggatgcgagaaaacgggacttttctgtacgcgtgtcgaagaggtggccccagctcttctctcagcttcacatcatcctcattccaaagctcttggggctcggcccctacacttaatgccgtgcgcaaccggaagcggaagtgccagccggcgcgcagctatacgtattccccgctctccagcagcttcctagctgggttttcacctcagccagcgctcatgctcaacctaggcagggcggggcaggagggcctagcgggaggcggagcgagggtcggagggtgacgctccggacttctgctaggtctgagacgcgccggcctcccgctgctgctccggagaagcggcgcctcctccccgccaggaccccgaggcggggggttcccgccttctcttctgagcgcctcttcccgctgcgcccgcatcagtctgggcctggcccagggtccccggtggagacgtgtttttttctccaaccaccgtgcccctctgtttaaaagcagccagtcaacctttgtgtcctttctccagaaggaaaagcatctcagctgttgtggaaaagggccccagcgtcctcttgtcaccgacagggcgattgcagtgcgttccggtcattttttccaggacactttctgtcttcatgacaggaacatcgagaagccaaggctagtggctgggttactgatggattactgatggattcttctcaggcaagtggaaagcagacctaacttcaaaatgttatgcttgtagccatcat

SEQ ID NO: 9802 - protein, 93 aa, Homo sapiens; identical to SEQ ID NO: 9798

SEQ ID NO: 9803 - DNA, 920 bp, Homo sapiens
agtttttttttgtgggatctgggattttatatcaagacagtctttcagaagactgtttgcctaacttccacaagcaggtgtctagactaaaattagtttctactttcctggagttcatcagacagcatgaaagataaacagcgcaagtgataaagcgttatgacaagacttataataaaggaatttcaaaggggctatggggtgctgggaggggagggataagagtgcacctaacagtgggtgggacatggtggcccatacctgtaaatccagcactttgggaggccaatgtgggcagatcacttgaggtcaggagttcaagaccagcctggccaacatggtgaaaccccatctctcctaaaaatacaaaaattacagggcgtggtggtgcatgcctgtaattccagctactcaggaggctggggcaggagaattcgcttggacctgggaggcagaggttgcagtgagccaagatccgccactgggctacagagggagattccatctcaaaacaaacaaacaaacaaaaaaacacctaacaggatattttctccagaggaggcaaggttgacttaagttctgaaagatgtgtaggactatatcaagtggacaagaagagcatatgaatgcagaagccaagtcagtaattctcaacctaatccttatagaatgtcctggaaacttgagaaatgtactaagggctgagtcctacctcagaccaattaaaacagcatttatggggatgtgtcatgggtatcagtgtttttaaaagtcctccagtgaatctaatgtgcagccactgttgaaaactactgcataagggcccagctattcttatttttattgacaaaagtgtttaggaatatgaatgttcctttgaccactgcttaaaatgcgtcttgtattatccaaaaaagcca

SEQ ID NO: 9804 - protein, 95 aa, Homo sapiens
MWADHLRSGVQDQPGQHGETPSLLKIQKLQGVVVHACNSSYSGGWGRRIRLDLGGRGCSEPRSATGLQREIPSQNKQTNKKTPNRIFSPEEARLT

SEQ ID NO: 9805 - DNA, 650 bp, Homo sapiens
aggcttttcatacacagatattttattctgatagtcatctaaacaaaaactgaattctgtgtaaatattcaacatgcgagtctcatttatggacgacgtgcctacttgtgagacctctctgtgagtaagcatattttgaataggtttagaatgttccccaagttcatgaaactcagaaactctctcctgaagggtggcttctcttgggcatagacaaggagaaccttgtctccaggttcttcccattgtggggtggctcttccatctcatggcctccctgactcgtgctgcggagaaccggcaatcatcctcctgcatcttactctcttccggccagcagattgttttccccaactttattccgctttgcagctatctttttggtgctacatggtcttctggtctggtcgcaaaggctggtgcaggggaaaccgttggttcagctgcggttcctgggaagggggtgccgctctgatcacgcgcacttctgattcccctctcggggctcggaagcggctgagggctctggacccggtctccgaggcgtgaggcggtgggagggtcggcggccgcgtcctccacgaccctggggagaagtcccagtttccgcgcagccgacaacggttggaccccgtccctccggcttcact

SEQ ID NO: 9806 - protein, 68 aa, Homo sapiens
MASLTRAAENRQSSSCILLSSGQQIVFPNFIPLCSYLFGATWSSGLVAKAGAGETVGSAAVPGKGVPL

SEQ ID NO: 9807 - DNA, 585 bp, Homo sapiens
ctcacggaaacctccaatccctgggctcaagcgatcttccctcaaattcaacagtagctggaactacaggctcgtgacaccacagcaggctaatttttaaatttttcgtggagatgggaggtcacactatattgcccaggctggtcgcgaactcctgagctcaagcgatcttccctctttggcgtcccaaagagctgagattgcaggagttaacctcaccgaaagatacaaccgatttaagaagaaaatgttaaaactctcttcaagggcctatagaagaaacgggatgaatggaaacgtgattcactctgtggactggcagatacctctggaaatctggtgttctattgtaataagttctcgggaaggtagagacttttatttgggacatagaggcttggccaaccagaatggaggacccacccaagtcccgcccccaagcctgagccctctcctttgctccacccactctgcctgaagtcccctcaacccctccgacttcgcagtctcccagcccggccttctggggctggtcttcattggaagccacgcccccaggtctgtcggataaacattttacaacct

SEQ ID NO: 9808 - protein, 76 aa, Homo sapiens
MLKLSSRAYRRNGMNGNVIHSVDWQIPLEIWCSIVISSREGRDFYLGHRGLANQNGGPTQVPPPSLSPLLCSTHSA

SEQ ID NO: 9809 - DNA, 336 bp, Homo sapiens
aagcagcaggaccccaccgtgctgcccctgcttgaatgcatcgtgaggacggatgaagaaggggtggggttaagactcaggggcacctgagggtctgagcccccttatgagtacccaagaaggactgtctatgcatgcacacccacaagcctatacaccatttatatacctacacgcacgcaagagacgcggagagataggcgatgcagactcgcgattcaatgatcgatatgctcataaaagtgctcaattatattttctgtattttgtatgctgtattttccaagacgtatattattttactattaaagaaaaaaatcatttttttttcccgag

SEQ ID NO: 9810 - protein, 75 aa, Homo sapiens
MSTQEGLSMHAHPQAYTPFIYLHARKRRGEIGDADSRFNDRYAHKSAQLYFLYFVCCIFQDVYYFTIKEKNHFFF

SEQ ID NO: 9811 - DNA, 1632 bp, Homo sapiens
cggtgactgagatcgtgccattgcactccagcctgggcaacaagcaaaactccgtctcaaaaaaaaagaaaagaaaagaaacacctttgtaagcacacataaagaatatgttattagacaattttcctttttccattaggccctatgatgccaagtagagaaatccagcaataaaaggcagatatgcgacctaaagtcatgtggcacctccttcgaaggtacatggcatcccggctccattccctgcggatgggtggctacctgttctctggctcccaggccccccagttgtcccctgctctgttgagagccctgggccagaagtgccccaacctgaagcgcctctgcctgcacgtggccgacctgagcatggtgcccatcaccagcctgcccagcaccttgaggaccctggagctgcacagctgcgagatctccatggcctggctccacaagcagcaggaccccaccgtgctgcccctgcttgaatgcatcgtgctggaccgcgtccccgccttccgtgacgagcacctgcagggcctgacgcgcttccgggccttgcgctcgctggtgctgggtggtacctaccgtgtgaccgagacagggctggatgctggcctgcaggagctcagctatctgcagaggcttgaggtgctgggctgcaccctgtctgccgacagcaccctgctggccatcagccgccacctccgagatgtgcgcaagatccggctgaccgtgaggggcctctctgcccctggcctggctgtgctggagggaatgccggccctggagagtctgtgcctgcagggtcccctcgtcaccccagaaatgccctcccccactgaaatcctctcctcctgcctcactatgcccaagctcagagtccttgagctgcaggggctggggtgggagggtcaggaggcggagaagatcctgtgtaaggggctgccccactgtatggtcatcgtcagggcttgccccaaagagtctatggactggtggatgtaactactccacctgcccttgggacccatcccagttttcatcattgagccccagaccctctgagcagcaccttgaagagggcagataatcagacttgaggaaactgaaagccccaggttgagagaacagaggcctagggacctccagaccattggaatcactgtttgccagctgtgtggccttggtcatatcatcagcctctgggaagcctagttcccacatctggaaataaggatgatcatagctacctcacggttacattgcaaagccttactctaaaagctcccagcctccagaggctctcaatgaagagtcaccttcatggtcgtcttcaggaacaggacggatgaagaaggggtggggttaagactcaggggcacctgagggtctgagcccccttatgagtacccaagaaggactgtctatgcatgcacacccacaagcctatacaccatttatatacctacacgcacgcaagagacgcggagagataggcgatgcagactcgcgattcaatgatcgatatgctcataaaagtgctcaattatattttctgtattttgtatgctgtattttccaagacgtatattattttactattaaagaaaaaaatcatttttttttcccgag

SEQ ID NO: 9812 - protein, 273 aa, Homo sapiens
MRPKVMWHLLRRYMASRLHSLRMGGYLFSGSQAPQLSPALLRALGQKCPNLKRLCLHVADLSMVPITSLPSTLRTLELHSCEISMAWLHKQQDPTVLPLLECIVLDRVPAFRDEHLQGLTRFRALRSLVLGGTYRVTETGLDAGLQELSYLQRLEVLGCTLSADSTLLAISRHLRDVRKIRLTVRGLSAPGLAVLEGMPALESLCLQGPLVTPEMPSPTEILSSCLTMPKLRVLELQGLGWEGQEAEKILCKGLPHCMVIVRACPKESMDWWM

SEQ ID NO: 9813 - DNA, 1567 bp, Homo sapiens
aaccggaagcggaagtgcgtgtcggcgggatcatggcgactttggtcgaactgccggactcggtcctgctcgagatcttctcttacctcccggtacgggaccggatccgcatctccagatgcgacctaaagtcatgtggcacctccttcgaaggtacatggcatcccggctccattccctgcggatgggtggctacctgttctctggctcccaggccccccagttgtcccctgctctgttgagagccctgggccagaagtgccccaacctgaagcgcctctgcctgcacgtggccgacctgagcatggtgcccatcaccagcctgcccagcaccttgaggaccctggagctgcacagctgcgagatctccatggcctggctccacaagcagcaggaccccaccgtgctgcccctgcttgaatgcatcgtgctggaccgcgtccccgccttccgtgacgagcacctgcagggcctgacgcgcttccgggccttgcgctcgctggtgctgggtggtacctaccgtgtgaccgagacagggctggatgctggcctgcaggagctcagctatctgcagaggcttgaggtgctgggctgcaccctgtctgccgacagcaccctgctggccatcagccgccacctccgagatgtgcgcaagatccggctgaccgtgaggggcctctctgcccctggcctggctgtgctggagggaatgccggccctggagagtctgtgcctgcagggtcccctcgtcaccccagaaatgccctcccccactgaaatcctctcctcctgcctcactatgcccaagctcagagtccttgagctgcaggggctggggtgggagggtcaggaggcggagaagatcctgtgtaaggggctgccccactgtatggtcatcgtcagggcttgccccaaagagtctatggactggtggatgtaactactccacctgcccttgggacccatcccagttttcatcattgagccccagaccctctgagcagcaccttgaagagggcagataatcagacttgaggaaactgaaagccccaggttgagagaacagaggcctagggacctccagaccattggaatcactgtttgccagctgtgtggccttggtcatatcatcagcctctgggaagcctagttcccacatctggaaataaggatgatcatagctacctcacggttacattgcaaagccttactctaaaagctcccagcctccagaggctctcaatgaagagtcaccttcatggtcgtcttcaggaacaggacggatgaagaaggggtggggttaagactcaggggcacctgagggtctgagcccccttatgagtacccaagaaggactgtctatgcatgcacacccacaagcctatacaccatttatatacctacacgcacgcaagagacgcggagagataggcgatgcagactcgcgattcaatgatcgatatgctcataaaagtgctcaattatattttctgtattttgtatgctgtattttccaagacgtatattattttactattaaagaaaaaaatcatttttttttcccgag

SEQ ID NO: 9814 - protein, 273 aa, Homo sapiens; identical to SEQ ID NO: 9812

SEQ ID NO: 9815 - DNA, 1766 bp, Homo sapiens
ttagttcccagtcgcggccaaatcacgcctcagccacctcccgcaagcctctcactgcctcagccacgctttccaggctggtttctggtccccatccgcggctggtccggccctgggaccgaatcacttcccagcgagaggaaggtcaaatttctcgaccggctacgggaaggtcgcggccgccgccctgtcagccgcctcggcgcccccaggacccctcgggtctctttaaccggaagcggaaggtctgtcaccgctggaagaggctggtggacgaccggtggctgtggcgacatgtcgacctgacgctctacacgatgcgacctaaagtcatgtggcacctccttcgaaggtacatggcatcccggctccattccctgcggatgggtggctacctgttctctggctcccaggccccccagttgtcccctgctctgttgagagccctgggccagaagtgccccaacctgaagcgcctctgcctgcacgtggccgacctgagcatggtgcccatcaccagcctgcccagcaccttgaggaccctggagctgcacagctgcgagatctccatggcctggctccacaagcagcaggaccccaccgtgctgcccctgcttgaatgcatcgtgctggaccgcgtccccgccttccgtgacgagcacctgcagggcctgacgcgcttccgggccttgcgctcgctggtgctgggtggtacctaccgtgtgaccgagacagggctggatgctggcctgcaggagctcagctatctgcagaggcttgaggtgctgggctgcaccctgtctgccgacagcaccctgctggccatcagccgccacctccgagatgtgcgcaagatccggctgaccgtgaggggcctctctgcccctggcctggctgtgctggagggaatgccggccctggagagtctgtgcctgcagggtcccctcgtcaccccagaaatgccctcccccactgaaatcctctcctcctgcctcactatgcccaagctcagagtccttgagctgcaggggctggggtgggagggtcaggaggcggagaagatcctgtgtaaggggctgccccactgtatggtcatcgtcagggcttgccccaaagagtctatggactggtggatgtaactactccacctgcccttgggacccatcccagttttcatcattgagccccagaccctctgagcagcaccttgaagagggcagataatcagacttgaggaaactgaaagccccaggttgagagaacagaggcctagggacctccagaccattggaatcactgtttgccagctgtgtggccttggtcatatcatcagcctctgggaagcctagttcccacatctggaaataaggatgatcatagctacctcacggttacattgcaaagccttactctaaaagctcccagcctccagaggctctcaatgaagagtcaccttcatggtcgtcttcaggaacaggacggatgaagaaggggtggggttaagactcaggggcacctgagggtctgagcccccttatgagtacccaagaaggactgtctatgcatgcacacccacaagcctatacaccatttatatacctacacgcacgcaagagacgcggagagataggcgatgcagactcgcgattcaatgatcgatatgctcataaaagtgctcaattatattttctgtattttgtatgctgtattttccaagacgtatattattttactattaaagaaaaaaatcatttttttttcccgag

SEQ ID NO: 9816 - protein, 273 aa, Homo sapiens; identical to SEQ ID NO: 9812

SEQ ID NO: 9817 - DNA, 1972 bp, Homo sapiens
ggtcttagttcccagtcgcggccaaatcacgcctcagccacctcccgcaagcctctcactgcctcagccacgctttccaggctggtttctggtccccatccgcggctggtccggccctgggaccgaatcacttcccagcgagaggaaggtcaaatttctcgaccggctacgggaaggtcgcggccgccgccctgtcagccgcctcggcgcccccaggacccctcgggtctctttaaccggaagcggaagtgcgtgtcggcgggatcatggcgactttggtcgaactgccggactcggtcctgctcgagatcttctcttacctcccggtacgggaccggatccgcatctccagggtctgtcaccgctggaagaggctggtggacgaccggtggctgtggcgacatgtcgacctgacgctctacacggctggagtgcagtggtatgatctcagctcactgcaacctctgcctcctgggttcaagtgattcccctgcctcagcctcctgagaagctgggactacagatgcgacctaaagtcatgtggcacctccttcgaaggtacatggcatcccggctccattccctgcggatgggtggctacctgttctctggctcccaggccccccagttgtcccctgctctgttgagagccctgggccagaagtgccccaacctgaagcgcctctgcctgcacgtggccgacctgagcatggtgcccatcaccagcctgcccagcaccttgaggaccctggagctgcacagctgcgagatctccatggcctggctccacaagcagcaggaccccaccgtgctgcccctgcttgaatgcatcgtgctggaccgcgtccccgccttccgtgacgagcacctgcagggcctgacgcgcttccgggccttgcgctcgctggtgctgggtggtacctaccgtgtgaccgagacagggctggatgctggcctgcaggagctcagctatctgcagaggcttgaggtgctgggctgcaccctgtctgccgacagcaccctgctggccatcagccgccacctccgagatgtgcgcaagatccggctgaccgtgaggggcctctctgcccctggcctggctgtgctggagggaatgccggccctggagagtctgtgcctgcagggtcccctcgtcaccccagaaatgccctcccccactgaaatcctctcctcctgcctcactatgcccaagctcagagtccttgagctgcaggggctggggtgggagggtcaggaggcggagaagatcctgtgtaaggggctgccccactgtatggtcatcgtcagggcttgccccaaagagtctatggactggtggatgtaactactccacctgcccttgggacccatcccagttttcatcattgagccccagaccctctgagcagcaccttgaagagggcagataatcagacttgaggaaactgaaagccccaggttgagagaacagaggcctagggacctccagaccattggaatcactgtttgccagctgtgtggccttggtcatatcatcagcctctgggaagcctagttcccacatctggaaataaggatgatcatagctacctcacggttacattgcaaagccttactctaaaagctcccagcctccagaggctctcaatgaagagtcaccttcatggtcgtcttcaggaacaggacggatgaagaaggggtggggttaagactcaggggcacctgagggtctgagcccccttatgagtacccaagaaggactgtctatgcatgcacacccacaagcctatacaccatttatatacctacacgcacgcaagagacgcggagagataggcgatgcagactcgcgattcaatgatcgatatgctcataaaagtgctcaattatattttctgtattttgtatgctgtattttccaagacgtatattattttactattaaagaaaaaaatcatttttttttcccgag

SEQ ID NO: 9818 - protein, 273 aa, Homo sapiens; identical to SEQ ID NO: 9812

SEQ ID NO: 9819 - DNA, 1918 bp, Homo sapiens
ggtcttagttcccagtcgcggccaaatcacgcctcagccacctcccgcaagcctctcactgcctcagccacgctttccaggctggtttctggtccccatccgcggctggtccggccctgggaccgaatcacttcccagcgagaggaaggtcaaatttctcgaccggctacgggaaggtcgcggccgccgccctgtcagccgcctcggcgcccccaggacccctcgggtctctttaaccggaagcggaagtgcgtgtcggcgggatcatggcgactttggtcgaactgccggactcggtcctgctcgagatcttctcttacctcccggtacgggaccggatccgcatctccagggtctgtcaccgctggaagaggctggtggacgaccggtggctgtggcgacatgtcgacctgacgctctacacggccctatgatgccaagtagagaaatccagcaataaaaggcagatatgcgacctaaagtcatgtggcacctccttcgaaggtacatggcatcccggctccattccctgcggatgggtggctacctgttctctggctcccaggccccccagttgtcccctgctctgttgagagccctgggccagaagtgccccaacctgaagcgcctctgcctgcacgtggccgacctgagcatggtgcccatcaccagcctgcccagcaccttgaggaccctggagctgcacagctgcgagatctccatggcctggctccacaagcagcaggaccccaccgtgctgcccctgcttgaatgcatcgtgctggaccgcgtccccgccttccgtgacgagcacctgcagggcctgacgcgcttccgggccttgcgctcgctggtgctgggtggtacctaccgtgtgaccgagacagggctggatgctggcctgcaggagctcagctatctgcagaggcttgaggtgctgggctgcaccctgtctgccgacagcaccctgctggccatcagccgccacctccgagatgtgcgcaagatccggctgaccgtgaggggcctctctgcccctggcctggctgtgctggagggaatgccggccctggagagtctgtgcctgcagggtcccctcgtcaccccagaaatgccctcccccactgaaatcctctcctcctgcctcactatgcccaagctcagagtccttgagctgcaggggctggggtgggagggtcaggaggcggagaagatcctgtgtaaggggctgccccactgtatggtcatcgtcagggcttgccccaaagagtctatggactggtggatgtaactactccacctgcccttgggacccatcccagttttcatcattgagccccagaccctctgagcagcaccttgaagagggcagataatcagacttgaggaaactgaaagccccaggttgagagaacagaggcctagggacctccagaccattggaatcactgtttgccagctgtgtggccttggtcatatcatcagcctctgggaagcctagttcccacatctggaaataaggatgatcatagctacctcacggttacattgcaaagccttactctaaaagctcccagcctccagaggctctcaatgaagagtcaccttcatggtcgtcttcaggaacaggacggatgaagaaggggtggggttaagactcaggggcacctgagggtctgagcccccttatgagtacccaagaaggactgtctatgcatgcacacccacaagcctatacaccatttatatacctacacgcacgcaagagacgcggagagataggcgatgcagactcgcgattcaatgatcgatatgctcataaaagtgctcaattatattttctgtattttgtatgctgtattttccaagacgtatattattttactattaaagaaaaaaatcatttttttttcccgag

SEQ ID NO: 9820 - protein, 273 aa, Homo sapiens; identical to SEQ ID NO: 9812

SEQ ID NO: 9821 - DNA, 1995 bp, Homo sapiens
cttctggacttggtcttagttcccagtcgcggccaaatcacgcctcagccacctcccgcaagcctctcactgcctcagccacgctttccaggctggtttctggtccccatccgcggctggtccggccctgggaccgaatcacttcccagcgagaggaaggtcaaatttctcgaccggctacgggaaggtcgcggccgccgccctgtcagccgcctcggcgcccccaggacccctcgggtctctttaaccggaagcggaagtgcgtgtcggcgggatcatggcgactttggtcgaactgccggactcggtcctgctcgagatcttctcttacctcccggtacgggaccggatccgcatctccaggtgcggccccgcctccggggggaagggcagggcggagggcgcagctggcacctggagatgcgatgtggcccggggctggggtcgttctaaccgcgcgtcccctcccccagggtctgtcaccgctggaagaggctggtggacgaccggtggctgtggcgacatgtcgacctgacgctctacacgatgcgacctaaagtcatgtggcacctccttcgaaggtacatggcatcccggctccattccctgcggatgggtggctacctgttctctggctcccaggccccccagttgtcccctgctctgttgagagccctgggccagaagtgccccaacctgaagcgcctctgcctgcacgtggccgacctgagcatggtgcccatcaccagcctgcccagcaccttgaggaccctggagctgcacagctgcgagatctccatggcctggctccacaagcagcaggaccccaccgtgctgcccctgcttgaatgcatcgtgctggaccgcgtccccgccttccgtgacgagcacctgcagggcctgacgcgcttccgggccttgcgctcgctggtgctgggtggtacctaccgtgtgaccgagacagggctggatgctggcctgcaggagctcagctatctgcagaggcttgaggtgctgggctgcaccctgtctgccgacagcaccctgctggccatcagccgccacctccgagatgtgcgcaagatccggctgaccgtgaggggcctctctgcccctggcctggctgtgctggagggaatgccggccctggagagtctgtgcctgcagggtcccctcgtcaccccagaaatgccctcccccactgaaatcctctcctcctgcctcactatgcccaagctcagagtccttgagctgcaggggctggggtgggagggtcaggaggcggagaagatcctgtgtaaggggctgccccactgtatggtcatcgtcagggcttgccccaaagagtctatggactggtggatgtaactactccacctgcccttgggacccatcccagttttcatcattgagccccagaccctctgagcagcaccttgaagagggcagataatcagacttgaggaaactgaaagccccaggttgagagaacagaggcctagggacctccagaccattggaatcactgtttgccagctgtgtggccttggtcatatcatcagcctctgggaagcctagttcccacatctggaaataaggatgatcatagctacctcacggttacattgcaaagccttactctaaaagctcccagcctccagaggctctcaatgaagagtcaccttcatggtcgtcttcaggaacaggacggatgaagaaggggtggggttaagactcaggggcacctgagggtctgagcccccttatgagtacccaagaaggactgtctatgcatgcacacccacaagcctatacaccatttatatacctacacgcacgcaagagacgcggagagataggcgatgcagactcgcgattcaatgatcgatatgctcataaaagtgctcaattatattttctgtattttgtatgctgtattttccaagacgtatattattttactattaaagaaaaaaatcatttttttttcccgag

SEQ ID NO: 9822 - protein, 273 aa, Homo sapiens; identical to SEQ ID NO: 9812

SEQ ID NO: 9823 - DNA, 2200 bp, Homo sapiens
cttctggacttggtcttagttcccagtcgcggccaaatcacgcctcagccacctcccgcaagcctctcactgcctcagccacgctttccaggctggtttctggtccccatccgcggctggtccggccctgggaccgaatcacttcccagcgagaggaaggtcaaatttctcgaccggctacgggaaggtcgcggccgccgccctgtcagccgcctcggcgcccccaggacccctcgggtctctttaaccggaagcggaagtgcgtgtcggcgggatcatggcgactttggtcgaactgccggactcggtcctgctcgagatcttctcttacctcccggtacgggaccggatccgcatctccaggtgcggccccgcctccggggggaagggcagggcggagggcgcagctggcacctggagatgcgatgtggcccggggctggggtcgttctaaccgcgcgtcccctcccccagggtctgtcaccgctggaagaggctggtggacgaccggtggctgtggcgacatgtcgacctgacgctctacacgtagaaacggggttttgtcatgttggccaggatggtctcaatctcctgacctcgtgatccgcccgcatcggccttccaaagtgctgggattatgggcatgagccactgcgcccgggcttctttctcattttctcttgctgccgccatgtaagaagtgcctttcacctcctgccatgattttgaggcctccccagccatgtggaactatgcgacctaaagtcatgtggcacctccttcgaaggtacatggcatcccggctccattccctgcggatgggtggctacctgttctctggctcccaggccccccagttgtcccctgctctgttgagagccctgggccagaagtgccccaacctgaagcgcctctgcctgcacgtggccgacctgagcatggtgcccatcaccagcctgcccagcaccttgaggaccctggagctgcacagctgcgagatctccatggcctggctccacaagcagcaggaccccaccgtgctgcccctgcttgaatgcatcgtgctggaccgcgtccccgccttccgtgacgagcacctgcagggcctgacgcgcttccgggccttgcgctcgctggtgctgggtggtacctaccgtgtgaccgagacagggctggatgctggcctgcaggagctcagctatctgcagaggcttgaggtgctgggctgcaccctgtctgccgacagcaccctgctggccatcagccgccacctccgagatgtgcgcaagatccggctgaccgtgaggggcctctctgcccctggcctggctgtgctggagggaatgccggccctggagagtctgtgcctgcagggtcccctcgtcaccccagaaatgccctcccccactgaaatcctctcctcctgcctcactatgcccaagctcagagtccttgagctgcaggggctggggtgggagggtcaggaggcggagaagatcctgtgtaaggggctgccccactgtatggtcatcgtcagggcttgccccaaagagtctatggactggtggatgtaactactccacctgcccttgggacccatcccagttttcatcattgagccccagaccctctgagcagcaccttgaagagggcagataatcagacttgaggaaactgaaagccccaggttgagagaacagaggcctagggacctccagaccattggaatcactgtttgccagctgtgtggccttggtcatatcatcagcctctgggaagcctagttcccacatctggaaataaggatgatcatagctacctcacggttacattgcaaagccttactctaaaagctcccagcctccagaggctctcaatgaagagtcaccttcatggtcgtcttcaggaacaggacggatgaagaaggggtggggttaagactcaggggcacctgagggtctgagcccccttatgagtacccaagaaggactgtctatgcatgcacacccacaagcctatacaccatttatatacctacacgcacgcaagagacgcggagagataggcgatgcagactcgcgattcaatgatcgatatgctcataaaagtgctcaattatattttctgtattttgtatgctgtattttccaagacgtatattattttactattaaagaaaaaaatcatttttttttcccgag

SEQ ID NO: 9824 - protein, 284 aa, Homo sapiens
MILRPPQPCGTMRPKVMWHLLRRYMASRLHSLRMGGYLFSGSQAPQLSPALLRALGQKCPNLKRLCLHVADLSMVPITSLPSTLRTLELHSCEISMAWLHKQQDPTVLPLLECIVLDRVPAFRDEHLQGLTRFRALRSLVLGGTYRVTETGLDAGLQELSYLQRLEVLGCTLSADSTLLAISRHLRDVRKIRLTVRGLSAPGLAVLEGMPALESLCLQGPLVTPEMPSPTEILSSCLTMPKLRVLELQGLGWEGQEAEKILCKGLPHCMVIVRACPKESMDWWM

SEQ ID NO: 9825 - DNA, 1692 bp, Homo sapiens
actccagccccgccttctggacttggtcttagttcccagtcgcggccaaatcacgcctcagccacctcccgcaagcctctcactgcctcagccacgctttccaggctggtttctggtccccatccgcggctggtccggccctgggaccgaatcacttcccagcgagaggaaggtcaaatttctcgaccggctacgggaaggtcgcggccgccgccctgtcagccgcctcggcgcccccaggacccctcgggtctctttaaccggaagcggaagtgcgtgtcggcgggatcatggcgactttggtcgaactgccggactcggtcctgctcgagatcttctcttacctcccggtacgggaccggatccgcatctccagatgcgacctaaagtcatgtggcacctccttcgaaggtacatggcatcccggctccattccctgcggatgggtggctacctgttctctggctcccaggccccccagttgtcccctgctctgttgagagccctgggccagaagtgccccaacctgaagcgcctctgcttgaatgcatcgtgctggaccgcgtccccgccttccgtgacgagcacctgcagggcctgacgcgcttccgggccttgcgctcgctggtgctgggtggtacctaccgtgtgaccgagacagggctggatgctggcctgcaggagctcagctatctgcagaggcttgaggtgctgggctgcaccctgtctgccgacagcaccctgctggccatcagccgccacctccgagatgtgcgcaagatccggctgaccgtgaggggcctctctgcccctggcctggctgtgctggagggaatgccggccctggagagtctgtgcctgcagggtcccctcgtcaccccagaaatgccctcccccactgaaatcctctcctcctgcctcactatgcccaagctcagagtccttgagctgcaggggctggggtgggagggtcaggaggcggagaagatcctgtgtaaggggctgccccactgtatggtcatcgtcagggcttgccccaaagagtctatggactggtggatgtaactactccacctgcccttgggacccatcccagttttcatcattgagccccagaccctctgagcagcaccttgaagagggcagataatcagacttgaggaaactgaaagccccaggttgagagaacagaggcctagggacctccagaccattggaatcactgtttgccagctgtgtggccttggtcatatcatcagcctctgggaagcctagttcccacatctggaaataaggatgatcatagctacctcacggttacattgcaaagccttactctaaaagctcccagcctccagaggctctcaatgaagagtcaccttcatggtcgtcttcaggaacaggacggatgaagaaggggtggggttaagactcaggggcacctgagggtctgagcccccttatgagtacccaagaaggactgtctatgcatgcacacccacaagcctatacaccatttatatacctacacgcacgcaagagacgcggagagataggcgatgcagactcgcgattcaatgatcgatatgctcataaaagtgctcaattatattttctgtattttgtatgctgtattttccaagacgtatattattttactattaaagaaaaaaatcatttttttttcccgag

SEQ ID NO: 9826 - protein, 74 aa, Homo sapiens
MRPKVMWHLLRRYMASRLHSLRMGGYLFSGSQAPQLSPALLRALGQKCPNLKRLCLNASCWTASPPSVTSTCRA

SEQ ID NO: 9827 - DNA, 1898 bp, Homo sapiens
actccagccccgccttctggacttggtcttagttcccagtcgcggccaaatcacgcctcagccacctcccgcaagcctctcactgcctcagccacgctttccaggctggtttctggtccccatccgcggctggtccggccctgggaccgaatcacttcccagcgagaggaaggtcaaatttctcgaccggctacgggaaggtcgcggccgccgccctgtcagccgcctcggcgcccccaggacccctcgggtctctttaaccggaagcggaagtgcgtgtcggcgggatcatggcgactttggtcgaactgccggactcggtcctgctcgagatcttctcttacctcccggtacgggaccggatccgcatctccagggtctgtcaccgctggaagaggctggtggacgaccggtggctgtggcgacatgtcgacctgacgctctacacgatgcgacctaaagtcatgtggcacctccttcgaaggtacatggcatcccggctccattccctgcggatgggtggctacctgttctctggctcccaggccccccagttgtcccctgctctgttgagagccctgggccagaagtgccccaacctgaagcgcctctgcctgcacgtggccgacctgagcatggtgcccatcaccagcctgcccagcaccttgaggaccctggagctgcacagctgcgagatctccatggcctggctccacaagcagcaggaccccaccgtgctgcccctgcttgaatgcatcgtgctggaccgcgtccccgccttccgtgacgagcacctgcagggcctgacgcgcttccgggccttgcgctcgctggtgctgggtggtacctaccgtgtgaccgagacagggctggatgctggcctgcaggagctcagctatctgcagaggcttgaggtgctgggctgcaccctgtctgccgacagcaccctgctggccatcagccgccacctccgagatgtgcgcaagatccggctgaccgtgaggggcctctctgcccctggcctggctgtgctggagggaatgccggccctggagagtctgtgcctgcagggtcccctcgtcaccccagaaatgccctcccccactgaaatcctctcctcctgcctcactatgcccaagctcagagtccttgagctgcaggggctggggtgggagggtcaggaggcggagaagatcctgtgtaaggggctgccccactgtatggtcatcgtcagggcttgccccaaagagtctatggactggtggatgtaactactccacctgcccttgggacccatcccagttttcatcattgagccccagaccctctgagcagcaccttgaagagggcagataatcagacttgaggaaactgaaagccccaggttgagagaacagaggcctagggacctccagaccattggaatcactgtttgccagctgtgtggccttggtcatatcatcagcctctgggaagcctagttcccacatctggaaataaggatgatcatagctacctcacggttacattgcaaagccttactctaaaagctcccagcctccagaggctctcaatgaagagtcaccttcatggtcgtcttcaggaacaggacggatgaagaaggggtggggttaagactcaggggcacctgagggtctgagcccccttatgagtacccaagaaggactgtctatgcatgcacacccacaagcctatacaccatttatatacctacacgcacgcaagagacgcggagagataggcgatgcagactcgcgattcaatgatcgatatgctcataaaagtgctcaattatattttctgtattttgtatgctgtattttccaagacgtatattattttactattaaagaaaaaaatcatttttttttcccgag

SEQ ID NO: 9828 - protein, 326 aa, Homo sapiens; identical to SEQ ID NO: 1517

SEQ ID NO: 9829 - DNA, 900 bp, Homo sapiens
ctgttctctcaacctggggctttcagtttcctcaagtctgattatctgccctcttcaaggtgctgctcagagggtctggggctcaatgatgaaaactgggatgggtcccaagggcaggtggagtagttacatccaccagtccatagactctttggggcaagccctgacgatgaccatacagtggggcagccccttacacaggatcttctccgcctcctgaccctcccaccccagcccctgcagctcaaggactctgagcttgggcatagtgaggcaggaggagaggatttcagtgggggagggcatttctggggtgacgaggggaccctgcaggcacagactctccagggccggcattccctccagcacagccaggccaggggcagagaggcccctcacggtcagccggatcttgcgcacatctcggaggtggcggctgatggccagcagggtgctgtcggcagacagggtgcagcccagcacctcaagcctctgcagatagctgagctcctgcaggccagcatccagccctgtctcggtcacacggtaggtaccacccagcaccagcgagcgcaaggcccggaagcgcgtcaggccctgcaggtgctcgtcacggaaggcggggacgcggtccagcacgatgcattcaagcaggggcagcacggtggggtcctgctgcttgtggagccaggccatggagatctcgcagctgtgcagctccagggtcctcaaggtgctgggcaggctggtgatgggcaccatgctcaggtcggccacgtgcaggcagaggcgcttcaggttggggcacttctggcccagggctctcaacagagcaggaccgagtccggcagttcgaccaaagtcgccatgatcccgccgacacgcacttccgcttccggt

SEQ ID NO: 9830 - protein, 76 aa, Homo sapiens
MHSSRGSTVGSCCLWSQAMEISQLCSSRVLKVLGRLVMGTMLRSATCRQRRFRLGHFWPRALNRAGPSPAVRPKSP

SEQ ID NO: 9831 - DNA, 626 bp, Homo sapiens
ggtcttagttcccagtcgcggccaaatcacgcctcagccacctcccgcaagcctctcactgcctcagccacgctttccaggctggtttctggtccccatccgcggctggtccggccctgggaccgaatcacttcccagcgagaggaaggtcaaatttctcgaccggctacgggaaggtcgcggccgccgccctgtcagccgcctcggcgcccccaggacccctcgggtctctttaaccggaagcggaagtgcgtgtcggcgggatcatggcgactttggtcgaactgccggactcggtcctgctcgagatcttctcttacctcccggtacgggaccggatccgcatctccagggtctgtcaccgctggaagaggctggtggacgaccggtggctgtggcgacatgtcgacctgacgctctacacgtagaaacggggttttgtcatgttggccaggatggtctcaatctcctgacctcgtgatccgcccgcatcggccttccaaagtgctgggattatgggcatgagccactgcgcccgggcttctttctcattttctcttgctgccgccatgtaagaagtgcctttcacctcctgccatgattttgaggcctccccagccatgtgg

SEQ ID NO: 9832 - protein, 53 aa, Homo sapiens
MATLVELPDSVLLEIFSYLPVRDRIRISRVCHRWKRLVDDRWLWRHVDLTLYT

SEQ ID NO: 9833 - DNA, 582 bp, Homo sapiens
aaccggaagcggaagtgcgtgtcggcgggatcatggcgactttggtcgaactgccggactcggtcctgctcgagatcttctcttacctcccggtacgggaccggatccgcatctccagggtctgtcaccgctggaagaggctggtggacgaccggtggctgtggcgacatgtcgacctgacgctctacacggtacgcgcagctggccgggcgggcctgggccgcggtcgcggtgcccggaccccgaagaccacctctcccaccctgggactgtgtgtcggggcccgggctggggatttagagccaggcgatccggggcctatctcggcatcatcgcttaccagctcctcttcgacctcagggcctcaatttcctcatccctgcaatggggataaaggacagtacctgcctcacggggctattatgggacttcactgagatcacgcagggaaagggcttagaacagtctggcacatatttatcattcgataaatgctaatttatgactatgttatcaagtttttgttttgtttttgagacagagtctcgctctgctgctcaggctggagtgcagtggtgcgat

SEQ ID NO: 9834 - protein, 134 aa, Homo sapiens
MATLVELPDSVLLEIFSYLPVRDRIRISRVCHRWKRLVDDRWLWRHVDLTLYTVRAAGRAGLGRGRGARTPKTTSPTLGLCVGARAGDLEPGDPGPISASSLTSSSSTSGPQFPHPCNGDKGQYLPHGAIMGLH

SEQ ID NO: 9835 - DNA, 457 bp, Homo sapiens
ggcctcgaactttaacttccgcttccggttcctagcgttaactgcgaccggggttcagcgctcgggtgaggagctggtggcgtcggcaggttcgaggcgattcgagctccagctaggatgatcgaggttgtttgcaacgaccgtctggggaagaaggtccgcgttaaatgcaacacggatgataccatcggggaccttaagaagctgattgcagcccaaactggtacccgttggaacaagattgtcctgaagaagtggtacacgatttttaaggaccacgtgtctctgggggactatgaaatccacgatgggatgaacctggagctttattatcaatagatgagaatcctcatcttcctgccccgctttcctctcccatcctcatcccccacactgggatagatgcttgtttgtaaaaactcaccttaataaagacttagatgttgctttgttgttg

SEQ ID NO: 9836 - protein, 73 aa, Homo sapiens; identical to SEQ ID NO: 1519

SEQ ID NO: 9837 - DNA, 520 bp, Homo sapiens
aacttccgcttccggttcctagcgttaactgcgaccggggttcagcgctcgggtgaggagctggtggcgtcggcaggttcgaggcgattcgaggtgagggggtcaagcggagaggctcggagtcggagaaagctgtcgcgacccagccacccagggtctggggtcggtgggagctccagctaggatgatcgaggttgtttgcaacgaccgtctggggaagaaggtccgcgttaaatgcaacacggatgataccatcggggaccttaagaagctgattgcagcccaaactggtacccgttggaacaagattgtcctgaagaagtggtacacgatttttaaggaccacgtgtctctgggggactatgaaatccacgatgggatgaacctggagctttattatcaatagatgagaatcctcatcttcctgccccgctttcctctcccatcctcatcccccacactgggatagatgcttgtttgtaaaaactcaccttaataaagacttagatgttgctttgtt

SEQ ID NO: 9838 - protein, 73 aa, Homo sapiens; identical to SEQ ID NO: 1519

SEQ ID NO: 9839 - DNA, 313 bp, Homo sapiens
tccgcttccggttcctagcgttaactgcgaccggggttcagcgctcgggtgaggagctggtggcgtcggcaggttcgaggcgattcgagctccagctaggatgatcgaggttgtttgcaacgaccgtctggggaagaaggtccgcgttaaatgcaaatgaaatccacgatgggatgaacctggagctttattatcaatagatgagaatcctcatcttcctgccccgctttcctctcccatcctcatcccccacactgggatagatgcttgtttgtaaaaactcaccttaataaagacttagatgttgctttgt

SEQ ID NO: 9840 - protein, 33 aa, Homo sapiens
RFRFLALTATGVQRSGEELVASAGSRRFELQLG

SEQ ID NO: 9841 - DNA, 590 bp, Homo sapiens
ttccggttcctagcgttaactgcgaccggggttcagcgctcgggtgaggagctggtggcgtcggcaggttcgaggcgattcgagctccagctaggatgatcgaggttgtttgcaacgaccgtctggggaagaaggtccgcgttaaatgcaagtatccactggcagccgagaggcagtggtacccgcaggggtgcttggcgtgaggcaggcaactcaatctgtgttgtcggatggttttagttaaacccgggagagggggcggatggggtcctggcagatggtattctgccctagaatgtcctcttcctcgttctaccgcttccatttgccttaactgctctgcgcccagcacggatgataccatcggggaccttaagaagctgattgcagcccaaactggtacccgttggaacaagattgtcctgaagaagtggtacacgatttttaaggaccacgtgtctctgggggactgtatcctttgtgtgactttttgaggaagcatctacatacccagcctcggttatctgttcaaaactaaagtctgcatgagcttatgcatattaagtgtttaacttaatacgtggcacatg

SEQ ID NO: 9842 - protein, 87 aa, Homo sapiens
MVLVKPGRGGGWGPGRWYSALECPLPRSTASICLNCSAPSTDDTIGDLKKLIAAQTGTRWNKIVLKKWYTIFKDHVSLGDCILCVTF

SEQ ID NO: 9843 - DNA, 628 bp, Homo sapiens
ttccggttcctagcgttaactgcgaccggggttcagcgctcgggtgaggagctggtggcgtcggcaggttcgaggcgattcgagctccagctaggatgatcgaggttgtttgcaacgaccgtctggggaagaaggtccgcgttaaatgcaagtatccactggcagccgagaggcagtggtacccgcaggggtgcttggcgtgaggcaggcaactcaatctgtgttgtcggatggttttagttaaacccgggagagggggcggatggggtcctggcagatggtattctgccctagaatgtcctcttcctcgttctaccgcttccatttgccttaactgctctgcgcccagcacggatgataccatcggggaccttaagaagctgattgcagcccaaactggtacccgttggaacaagattgtcctgaagaagtggtacacgatttttaaggaccacgtgtctctgggggactatgaaatccacgatgggatgaacctggagctttattatcaatagatgagaatcctcatcttcctgccccgctttcctctcccatcctcatcccccacactgggatagatgcttgtttgtaaaaactcaccttaataaagacttagatgttgctttgt

SEQ ID NO: 9844 - protein, 94 aa, Homo sapiens
MVLVKPGRGGGWGPGRWYSALECPLPRSTASICLNCSAPSTDDTIGDLKKLIAAQTGTRWNKIVLKKWYTIFKDHVSLGDYEIHDGMNLELYYQ

SEQ ID NO: 9845 - DNA, 1516 bp, Homo sapiens
ggttcctagcgttaactgcgaccggggttcagcgctcgggtgaggagctggtggcgtcggcaggttcgaggcgattcgagctccagctaggatgatcgaggttgtttgcaacgaccgtctggggaagaaggtccgcgttaaatgcaacacggatgataccatcggggaccttaagaagctgattgcagcccaaactggtacccgttggaacaagattgtcctgaagaagtggtacacgatttttaaggaccacgtgtctctgggggactgtatcctttgtgtgactttttgaggaagcatctacatacccagcctcggttatctgttcaaaactaaagtctgcatgagcttatgcatattaagtgtttaacttaatacgtggcacatggtgagcacttagaaaatgggagctaggtaattatttggttggggaggagagtggttggtgaaatagtttgacttcaagttcaaaatatttattactgacctccacctgagtgctggacagtaggtcagggtggggtgagactcaggcatatctattgtgcaaaaggagcagaaactttttacaatttttattttatttatttatttttttgagacagtctggctctgtcgcccaggctggagtgcagtggcacgatcttgacccactgcaacctccacctcccgggttcaagcaattctgcctcagcttcccaagtagctgggattacaggtgtgtgccaccactccctgctagtttttgtatttttagtagagatgaggttccaccatgtatgccaggctagtctcaaactcctggcctcaagtgatcctcccgcctcggcctcccaaagtgctgggattatagccgtgagccactgtgcctggcctagaaggaacagaaacttttttttttttttttgagatggagttttgctcttgttgcccaggctggagtgcagtggtacaatcttggctcactgcagcctctacctcccaggtttaagcgattttcctgtctcagccttccaagtagctgggattacaggtgcccaccaccacacccagctaactttttgtatttttagtagagacagggtttcatcgtgttggccaggctggtctcaaactcctgacgtcaagtgagccacctgcttcgtcctctcaaagtgctgggattacaggtgtgagccactgcacccagccagaaattcttttgtaaagttttggttctctccaaataaaaatggcctggtccaaaatgggcttccttagccctgggctgagacctcaggccacctgacccggctgtgaatggatgagaggggtggggacggaagtcagagtcaggattccttaacacctttccttcagatgaaatccacgatgggatgaacctggagctttattatcaatagatgagaatcctcatcttcctgccccgctttcctctcccatcctcatcccccacactgggatagatgcttgtttgtaaaaactcaccttaataaagacttagatgttgctttgt

SEQ ID NO: 9846 - protein, 66 aa, Homo sapiens
MIEVVCNDRLGKKVRVKCNTDDTIGDLKKLIAAQTGTRWNKIVLKKWYTIFKDHVSLGDCILCVTF

SEQ ID NO: 9847 - DNA, 546 bp, Homo sapiens
aactgcgaccggggttcagcgctcgggtgaggagctggtggcgtcggcaggttcgaggcgattcgagctccagctaggatgatcgaggttgtttgcaacgaccgtctggggaagaaggtccgcgttaaatgcaagtatccactggcagccgagaggcagtggtacccgcaggggtgcttggcgtgaggcaggcaactcaatctgtgttgtcggatggttttagttaaacccgggagagggggcggatggggtcctggcagatggtattctgccctagaatgtcctcttcctcgttctaccgcttccatttgccttaactgctctgcgcccagcacggatgataccatcggggaccttaagaagctgattgcagcccaaactggtacccgttggaacaagattgtcctgaagaagtggtgagtgcagcggtagagccactgggtggactggactaggccggaaggttttggttgggggagcgctgcaggcagccctttgcttaggcttggctacctcatttggcctacagactgaagagcctcctta

SEQ ID NO: 9848 - protein, 68 aa, Homo sapiens
MVLVKPGRGGGWGPGRWYSALECPLPRSTASICLNCSAPSTDDTIGDLKKLIAAQTGTRWNKIVLKKW

SEQ ID NO: 9849 - DNA, 782 bp, Homo sapiens
cgccctttagcgagcgccaaaaaactcccgaccccttcttggcgcgcgtcgccgcagagcccacccaggcgggatagagcttatggattggctaatgccgcagcaactcccgcctgcctgagctgttcccggaggtccgcaagcccccagccctcccatgcggaagagtctggctggtgcagagggctcaacttttccctaggctctggacccaaaggccttccacgtcctttggaacctgcttacttcctttattccctcgcagtctggctccttcctccatcctgggtgaccagtgggtgccgacattgacattcatataagaacacggaggaggtgcaggtgggaggagatgggctcagttttagccaacttaaaatagagtctgcagagcccgtgggacacaggggaggtatttggggacccagagttggggaactgtgggtagatatgggagttgaagacactgacagcaaagggtgcaactacagttcacctagcatagaaccctatgtgaccgttaaaaagaatgaggctcagtgaagtgaactcatagggaaacctgcccacaacaaattagacgcaggatgcagtagaaggctaagagaagtctggagccagacttgggtttaaagcctgggactgacacttgctatgcgaccttgaactgattacttaacgttactctgtacttcggtttcccaatctgcaaagcggggataagcaattacatccttctgtttgatgtgaacattaaataaattaatccacataaagcactc

SEQ ID NO: 9850 - protein, 30 aa, Homo sapiens
MGVEDTDSKGCNYSSPSIEPYVTVKKNEAQ

SEQ ID NO: 9851 - DNA, 1126 bp, Homo sapiens
atccggaccgttagggagcccaatgggcgtcgccgccaggccccgttgcagagcgcgtctagccaataggcagcggcggcgggcgggcgcgggcgacaggcggcgcagctgaggcggagcaggcgctgcggcaggagggaagatggcggacgaggagaagctgccgcccggctgggagaagcgcatgagccgcagctcaggccgagtgtactacttcaaccacatcactaacgccagccagtgggagcggcccagcggcaacagcagcagtggtggcaaaaacgggcagggggagcctgccagggtccgctgctcgcacctgctggtgaagcacagccagtcacggcggccctcgtcctggcggcaggagaagatcacccggaccaaggaggaggccctggagctgatcaacggctacatccagaagatcaagtcgggagaggaggactttgagtctctggcctcacagttcagcgactgcagctcagccaaggccaggggagacctgggtgccttcagcagaggtcagatgcagaagccatttgaagacgcctcgtttgcgctgcggacgggggagatgagcgggcccgtgttcacggattccggcatccacatcatcctccgcactgagtgagggtggggagcccaggcctggcctcggggcagggcagggcggctaggccggccagctcccccttgcccgccagccagtggccgaaccccccactccctgccaccgtcacacagtatttattgttcccacaatggctgggagggggcccttccagattgggggccctggggtccccactccctgtccatccccagttggggctgcgaccgccagattctcccttaaggaattgacttcagcaggggtgggaggctcccagacccagggcagtgtggtgggaggggtgttccaaagagaaggcctggtcagcagagccgccccgtgtccccccaggtgctggaggcagactcgagggccgaattgtttctagttaggccacgctcctctgttcagtcgcaaaggtgaacactcatgcggcccagccatgggccctctgagcaactgtgcagcaccctttcacccccaattaaacccagaaccactgctctgctc

SEQ ID NO: 9852 - protein, 163 aa, Homo sapiens; identical to SEQ ID NO: 1521

SEQ ID NO: 9853 - DNA, 1867 bp, Homo sapiens
agcgcgtctagccaataggcagcggcggcgggcgggcgcgggcgacaggcggcgcagctgaggcggagcaggcgctgcggcaggagggaagatggcggacgaggagaagctgccgcccggctgggagaagcgcatgagccgcagctcaggtgccgcgggggtcggggctggggcgggactgcgcgggcccgcgtaagcagggctcgagctcgccccttgggcgcggcggcagcgctgcctccctcccatggggtcctggctcttccgcgtcgtccccggggtaacggccccggcccgccctgttgtggggactgcgagcctcaggagccgccgggaagcctgaggaagctgaggcagggggctgggcgggtgagggtccggggagtccggggcgatggccctggccctgccggcccggctgatacctctcggcctaatgcacctgacaccccgggggacgtctctgcaccttgctgggcccgggggcacccctgggagggagacaccccagtaccctgcaaagggcgtagggtgttgcccggcctcgggtccacaacctacccctgctaacacccctactgtgtacacctaatgctgagtctgcgacatcgcccgtgacattctgccagacgatggcccctgtgcttaggcccgatttaagggttagccacaatgataatattgccagtaacagggcatgtttttctctgtgtcaagcgctttaagttctctctgaattgccgcaactctgggagccagatgagaaaactgaggtgcagggagattagagcccattgccaaggttttagagtgagtcagtagctcagctgcatttgcacctggaacccgcgctctcgcccaccctgctctagccctggcctgtggctgggacctccagcataaaccggatgctctgcccagctctgggcccatttctgctgtttctgctcagttcaaccctgatggcttcctttatgggtgacactccatgtcacccaggcgaactgtcagcctttggagtggcacccagtagggtctttacttccagtttcttgttcacagtcttcactccttcatacccctcactccctgggtaacatcgggccaccagtaatgctggttcctagctctgcaacaccatgcacggtgtagtagctaagagcagagctttcgggtgtgaagtacctgagtacagttcctgccttcccctgtgtgtgcctggaacagagtaaacactcaggaagcgttacccactgctgccattcccagagatgcaaaaggccgagtgtactacttcaaccacatcactaacgccagccagtgggagcggcccagcggcaacagcagcagtggtggcaaaaacgggcagggggagcctgccagggtccgctgctcgcacctgctggtgaagcacagccagtcacggcggccctcgtcctggcggcaggagaagatcacccggaccaaggaggaggccctggagctgatcaacggctacatccagaagatcaagtcgggagaggaggactttgagtctctggcctcacagttcagcgactgcagctcagccaaggccaggggagacctgggtgccttcagcagaggtcagatgcagaagccatttgaagacgcctcgtttgcgctgcggacgggggagatgagcgggcccgtgttcacggattccggcatccacatcatcctccgcactgagtgagggtgctggaggcagactcgagggccgaattgtttctagttaggccacgctcctctgttcagtcgcaaaggtgaacactcatgcggcccagccatgggccctctgagcaactgtgcagcaccctttcacccccaattaaacccagaaccactg

SEQ ID NO: 9854 - protein, 49 aa, Homo sapiens
MIILPVTGHVFLCVKRFKFSLNCRNSGSQMRKLRCREIRAHCQGFRVSQ

SEQ ID NO: 9855 - DNA, 1015 bp, Homo sapiens
gcgtctagccaataggcagcggcggcgggcgggcgcgggcgacaggcggcgcagctgaggcggagcaggcgctgcggcaggagggaagatggcggacgaggagaagctgccgcccggctgggagaagcgcatgagccgcagctcagatgagaaaactgaggtgcagggagattagagcccattgccaaggttttagagtgagtcagtagctcagctgcatttgcacctggaacccgcgctctcgcccaccctgctctagccctggcctgtggctgggacctccagcataaaccggatgctctgcccagctctgggcccatttctgctgtttctgctcagttcaaccctgatggcttcctttatgggtgacactccatgtcacccaggcgaactgtcagcctttggagtggcacccagtagggtctttacttccagtttcttgttcacagtcttcactccttcatacccctcactccctgggtaacatcgggccaccagtaatgctggttcctagctctgcaacaccatgcacggtgtagtagctaagagcagagctttcgggtgtgaagtacctgagtacagttcctgccttcccctgtgtgtgcctggaacagagtaaacactcaggaagcgttacccactgctgccattcccagagatgcaaaaggtgaggtctccgttttgccatctatacaatagagataataaaggctatcccactcttaatgtgtgccagtttctgtcctaggcattttgtagatgtgtgagcttatttagtgctttcttattattatttttggagatggtctcactgtgtggctcaggctgcagtgcagcctctgcctcccaggcttaagcaatcctcccacctcagcctttcaagtagctgagaccacaggcgtgtaccacccacccatggctaattttttattttttattttttattgtttgtttgtttgttttgagacagaatctcactctgtcacccaggctggagtgcagtggcatgatcttg

SEQ ID NO: 9856 - protein, 62 aa, Homo sapiens
MLCPALGPFLLFLLSSTLMASFMGDTPCHPGELSAFGVAPSRVFTSSFLFTVFTPSYPSLPG

SEQ ID NO: 9857 - DNA, 790 bp, Homo sapiens
gctgaggcggagcaggcgctgcggcaggagggaagatggcggacgaggagaagctgccgcccggctgggagaagcgcatgagccgcagctcaggccgagtgtactacttcaaccacatcactaacgccagccagtgggagcggcccagcggcaacagcagcagtggtggcaaaaacgggcagggggagcctgccagggtccgctgctcgcacctgctggtgaagcacagccagtcacggcggccctcgtcctggcggcaggagaagatcacccggaccaaggaggaggccctggagctgatcaacggctacatccagaagatcaagtcgggagaggaggactttgagtctctggcctcacagttcagcgactgcagctcagccaaggccaggggagacctgggtgccttcagcagaggtcagatgcagaagccatttgaagacgcctcgtttgcgctgcggacgggggagatgagcgggcccgtgttcacggattccggcatccacatcatcctccgcactgagtgagggtggggagcccaggcctggcctcggggcagggcagggcggctaggccggccagctcccccttgcccgccagccagtggccgaaccccccactccctgccaccgtcacacagtgctggaggcagactcgagggccgaattgtttctagttaggccacgctcctctgttcagtcgcaaaggtgaacactcatgcggcccagccatgggccctctgagcaactgtgcagcaccctttcacccccaattaaacccagaaccactg

SEQ ID NO: 9858 - protein, 163 aa, Homo sapiens; identical to SEQ ID NO: 1521

SEQ ID NO: 9859 - DNA, 1660 bp, Homo sapiens
aggcgctgcggcaggagggaagatggcggacgaggagaagctgccgcccggctgggagaagcgcatgagccgcagctcaggccgagtgtactacttcaaccacatcactaacgccagccagtgggagcggcccagcggcaacagcagcagtggtggcaaaaacgggcagggggagcctgccagggtccgctgctcgcacctgctggtgaagcacagccagtcacggcggccctcgtcctggcggcaggagaagatcacccggaccaaggaggaggccctggagctgatcaacggctacatccagaagatcaagtcgggagaggaggactttgagtctctggcctcacagttcagcgactgcagctcagccaaggccaggggagacctgggtgccttcagcagaggtgcgcaaggaatgggcctcaccaggttgggggacccttaccaccctgaggggtagaggccaggagggtctgggcattgggctcccaggtgccacaccggccttcggggtccagcaggtggcagcacagccccttcctcaggcttcagaggctgctctgctgggcagggccagggccacacagggaggggggctgcagcactttcttcctggcatcatctctaccctggggggcatggtctcttgtgtgtctgtgtgcaggtgtcttagtggggtggggcggcagcatggggccagcagctgcccacctcctccgaggaggctggtgggacagatgacatggcagggctgggaaccaggcccagggagacgagttcactaccgaagtggcccctaaatgcacggcggcggccgtagccctgcctgctatccttcatgctgtcctcgggcttcccagggcctccttaatggccctgccacccccagctgggccgccgctcagcactggcaataaacatggtgacggatgagtgtggacgagtgtgaggctcagcgcaggcaggagccccatctgtcgcggctgccacccgccctgcctcatcctggcctctgccagcccagccctgacacccccaccgcccctcctggctcccaggtcagatgcagaagccatttgaagacgcctcgtttgcgctgcggacgggggagatgagcgggcccgtgttcacggattccggcatccacatcatcctccgcactgagtgagggtggggagcccaggcctggcctcggggcagggcagggcggctaggccggccagctcccccttgcccgccagccagtggccgaaccccccactccctgccaccgtcacacagtatttattgttcccacaatggctgggagggggcccttccagattgggggccctggggtccccactccctgtccatccccagttggggctgcgaccgccagattctcccttaaggaattgacttcagcaggggtgggaggctcccagacccagggcagtgtggtgggaggggtgttccaaagagaaggcctggtcagcagagccgccccgtgtccccccaggtgctggaggcagactcgagggccgaattgtttctagttaggccacgctcctctgttcagtcgcaaaggtgaacactcatgcggcccagccatgggccctctgagcaactgtgcagcaccctttcacccccaattaaacccagaaccactgctctgctc

SEQ ID NO: 9860 - protein, 145 aa, Homo sapiens
MADEEKLPPGWEKRMSRSSGRVYYFNHITNASQWERPSGNSSSGGKNGQGEPARVRCSHLLVKHSQSRRPSSWRQEKITRTKEEALELINGYIQKIKSGEEDFESLASQFSDCSSAKARGDLGAFSRGAQGMGLTRLGDPYHPEG

SEQ ID NO: 9861 - DNA, 563 bp, Homo sapiens
ggcgctgcggcaggagggaagatggcggacgaggagaagctgccgcccggctgggagaagcgcatgagccgcagctcaggccgagtgtactacttcaaccacatcactaacgccagccagtgggagcggcccagcggcaacagcagcagtggtggcaaaaacgggcagggggagcctgccagggtccgctgctcgcacctgctggtgaagcacagccagtcacggcggccctcgtcctggcggcaggagaagatcacccggaccaaggaggaggccctggagctgatcaacggctacatccagaagatcaagtcgggagaggaggactttgagtctctggcctcacagttcagcgactgcagctcagccaaggcctggtcagcagagccgccccgtgtccccccaggtgctggaggcagactcgagggccgaattgtttctagttaggccacgctcctctgttcagtcgcaaaggtgaacactcatgcggcccagccatgggccctctgagcaactgtgcagcaccctttcacccccaattaaacccagaaccactgctctgc

SEQ ID NO: 9862 - protein, 141 aa, Homo sapiens
MADEEKLPPGWEKRMSRSSGRVYYFNHITNASQWERPSGNSSSGGKNGQGEPARVRCSHLLVKHSQSRRPSSWRQEKITRTKEEALELINGYIQKIKSGEEDFESLASQFSDCSSAKAWSAEPPRVPPGAGGRLEGRIVSS

SEQ ID NO: 9863 - DNA, 659 bp, Homo sapiens
cggcaggagggaagatggcggacgaggagaagctgccgcccggctgggagaagcgcatgagccgcagctcaggccgagtgtactacttcaaccacatcactaacgccagccagtgggagcggcccagcggcaacagcagcagtggtggcaaaaacgggcagggggagcctgccagggtccgctgctcgcacctgctggtgaagcacagccagtcacggcggccctcgtcctggcggcaggagaagatcacccggaccaaggaggaggccctggagctgatcaacggctacatccagaagatcaagtcgggagaggaggactttgagtctctggcctcacagttcagcgactgcagctcagccaaggccaggggagacctgggtgccttcagcagaggtcagatgcagaagccatttgaagacgcctcgtttgcgctgcggacgggggagatgagcgggcccgtgttcacggattccggcatccacatcatcctccgcactgagtgagggtgctggaggcagactcgagggccgaattgtttctagttaggccacgctcctctgttcagtcgcaaaggtgaacactcatgcggcccagccatgggccctctgagcaactgtgcagcaccctttcacccccaattaaacccagaaccactg

SEQ ID NO: 9864 - protein, 163 aa, Homo sapiens; identical to SEQ ID NO: 1521

SEQ ID NO: 9865 - DNA, 4031 bp, Homo sapiens
cggcaggagggaagatggcggacgaggagaagctgccgcccggctgggagaagcgcatgagccgcagctcaggtgccgcgggggtcggggctggggcgggactgcgcgggcccgcgtaagcagggctcgagctcgccccttgggcgcggcggcagcgctgcctccctcccatggggtcctggctcttccgcgtcgtccccggggtaacggccccggcccgccctgttgtggggactgcgagcctcaggagccgccgggaagcctgaggaagctgaggcagggggctgggcgggtgagggtccggggagtccggggcgatggccctggccctgccggcccggctgatacctctcggcctaatgcacctgacaccccgggggacgtctctgcaccttgctgggcccgggggcacccctgggagggagacaccccagtaccctgcaaagggcgtagggtgttgcccggcctcgggtccacaacctacccctgctaacacccctactgtgtacacctaatgctgagtctgcgacatcgcccgtgacattctgccagacgatggcccctgtgcttaggcccgatttaagggttagccacaatgataatattgccagtaacagggcatgtttttctctgtgtcaagcgctttaagttctctctgaattgccgcaactctgggagccaggtagttattacttccaccttaccagcaaggaaactgaggtcagaaaactgaaggaactcgtccaagatcattcatttcaggggccgggggttggattaggacctaggcagtttgcctacaaatccccctccccgtgtcactgcaaactcctgaggagcaggcccagcatctgtgggcaggtcccgagtcactctgctgcctctagagcccatagcaatcgcatttgcaataataattctccttggttgagtgccaggttctggtgaactgtttggatacatggactctcctcattaaccccatgaggtttgatctccttattctctattccccatttttcagatgagaaaactgaggtgcagggagattagagcccattgccaaggttttagagtgagtcagtagctcagctgcatttgcacctggaacccgcgctctcgcccaccctgctctagccctggcctgtggctgggacctccagcataaaccggatgctctgcccagctctgggcccatttctgctgtttctgctcagttcaaccctgatggcttcctttatgggtgacactccatgtcacccaggcgaactgtcagcctttggagtggcacccagtagggtctttacttccagtttcttgttcacagtcttcactccttcatacccctcactccctgggtaacatcgggccaccagtaatgctggttcctagctctgcaacaccatgcacggtgtagtagctaagagcagagctttcgggtgtgaagtacctgagtacagttcctgccttcccctgtgtgtgcctggaacagagtaaacactcaggaagcgttacccactgctgccattcccagagatgcaaaaggtgaggtctccgttttgccatctatacaatagagataataaaggctatcccactcttaatgtgtgccagtttctgtcctaggcattttgtagatgtgtgagcttatttagtgctttcttattattatttttggagatggtctcactgtgtggctcaggctgcagtgcagcctctgcctcccaggcttaagcaatcctcccacctcagcctttcaagtagctgagaccacaggcgtgtaccacccacccatggctaattttttattttttattttttattgtttgtttgtttgttttgagacagaatctcactctgtcacccaggctggagtgcagtggcatgatcttggcgcactgcaacctctgcctcccgggttcaagtgattctcctgcctcagcctcccgagtagctgggattacaggtgcctgccaccacgtctggctaatttttgtatttttagtagagacgaggtttcaccatgttggccaggctggtctcgagctcctaacctcaggtgatccacctgcctcagcctcccaaagtgctgggattacaggcctgagccactgcgcccagccagcctgttgtttttgtttttgttttgagacaagagtctcactctatcgctcaggctggagtgcagtggcatgatcttggctcactgtagcctccaccttccagattcaagcaattctcctgcctcagcctcccgagtagctgggattacagacatacaccacaacgcccggctaatgttggtttgtttgtttgtttgtgacggagttttgctcttgttgcccaggctggagtgcagtggcacaatctcagctcactgcaacctccatctcccgggttcaagcgattctcctgcttcagcctccccagtagctgggattacaggtgcctgccaccatgccgggctaattttttatatttttagtagagatggggtttcactgtgttggccaggctggtcttgaactcctgacctcaggtgatccaccccaccttggcctcccaaagtgctgggattacaggtgagagccaccgtgcttagcccttttaaaaatgtttaaaaattattatttagtcctttcaatgaccctaaggtaggaactgttatctccattttgcaggtgagaacaccaaggcccagggaagatatatcacatttgaacccagattcagatttgaatccaggtggcctggctgctgagtgcatggtttgagtcactccctgtcccccagcttcctctgttccatcactctgggttattttcctccttgaagttatcagggattgatactatcctgtgtttcatttgcttgtttagcacctgtctgctctcacctagaatgttagctctctaagggcagggactgtatcctgccacattggcccacgtctggagagcctgtggcacatggtggatacaccatggatttgttgaatgaaggcgccccctgcaagccaggccctcaccctggcttctggctgtgggcccaggggtgtcctgggagcacaaccctagctgaattcctgcctgccctcccctccaggccgagtgtactacttcaaccacatcactaacgccagccagtgggagcggcccagcggcaacagcagcagtggtggcaaaaacgggcagggggagcctgccagggtccgctgctcgcacctgctggtgaagcacagccagtcacggcggccctcgtcctggcggcaggagaagatcacccggaccaaggaggaggccctggagctgatcaacggctacatccagaagatcaagtcgggagaggaggactttgagtctctggcctcacagttcagcgactgcagctcagccaaggccaggggagacctgggtgccttcagcagaggtcagatgcagaagccatttgaagacgcctcgtttgcgctgcggacgggggagatgagcgggcccgtgttcacggattccggcatccacatcatcctccgcactgagtgagggtggggagcccaggcctggcctcggggcagggcagggcggctaggccggccagctcccccttgcccgccagccagtggccgaaccccccactccctgccaccgtcacacagtatttattgttcccacaatggctgggagggggcccttccagattgggggccctggggtccccactccctgtccatccccagttggggctgcgaccgccagattctcccttaaggaattgacttcagcaggggtgggaggctcccagacccagggcagtgtggtgggaggggtgttccaaagagaaggcctggtcagcagagccgccccgtgtccccccaggtgctggaggcagactcgagggccgaattgtttctagttaggccacgctcctctgttcagtcgcaaaggtgaacactcatgcggcccagccatgggccctctgagcaactgtgcagcaccctttcacccccaattaaacccagaaccactgctctgctc

SEQ ID NO: 9866 - protein, 110 aa, Homo sapiens [sequence omitted]

SEQ ID NO: 9867 - DNA, 974 bp, Homo sapiens
ggaagatggcggacgaggagaagctgccgcccggctgggagaagcgcatgagccgcagctcaggccgagtgtactacttcaaccacatcactaacgccagccagtgggagcggcccagcggcaacagcagcagtggtggcaaaaacgggcagggggagcctgccagggtccgctgctcgcacctgctggtgaagcacagccagtcacggcggccctcgtcctggcggcaggagaagatcacccggaccaaggaggaggccctggagctgatcaacggctacatccagaagatcaagtcgggagaggaggactttgagtctctggcctcacagttcagcgactgcagctcagccaaggccaggggagacctgggtgccttcagcagaggtgcgcaaggaatgggcctcaccaggttgggggacccttaccaccctgaggggtagaggccaggagggtctgggcattgggctcccaggtgccacaccggccttcggggtccagcaggtggcagcacagccccttcctcaggcttcagaggctgctctgctgggcagggccagggccacacagggaggggggctgcagcactttcttcctggcatcatctctaccctggggggcatggtctcttgtgtgtctgtgcacagatgtcctcatcccaggcccaccaaggtgggtacatcctgtcctctgcctcttcctttttgtggtttaaggttgagggccctgagagtcccagggcctgtcccccagaatccctctcaaaggtggggaaaccaggggtgagaggaggtggccctgagtttaggcctgtctggccaggacagtggaaatcagggacagaggggactaggcctcctcctcttcctcctcttcagtcctcggggtctacagaaaaacatcagggagaggccaggatgggttgcagggtgtggtgtgcaggtgtcttagtggggtggggcggcagcatgggg

SEQ ID NO: 9868 - protein, 145 aa, Homo sapiens; identical to SEQ ID NO: 9860

SEQ ID NO: 9869 - DNA, 703 bp, Homo sapiens
ggaagatggcggacgaggagaagctgccgcccggctgggagaagcgcatgagccgcagctcagagtaaacactcaggaagcgttacccactgctgccattcccagagatgcaaaaggccgagtgtactacttcaaccacatcactaacgccagccagtgggagcggcccagcggcaacagcagcagtggtggcaaaaacgggcagggggagcctgccagggtccgctgctcgcacctgctggtgaagcacagccagtcacggcggccctcgtcctggcggcaggagaagatcacccggaccaaggaggaggccctggagctgatcaacggctacatccagaagatcaagtcgggagaggaggactttgagtctctggcctcacagttcagcgactgcagctcagccaaggccaggggagacctgggtgccttcagcagaggtcagatgcagaagccatttgaagacgcctcgtttgcgctgcggacgggggagatgagcgggcccgtgttcacggattccggcatccacatcatcctccgcactgagtgagggtgctggaggcagactcgagggccgaattgtttctagttaggccacgctcctctgttcagtcgcaaaggtgaacactcatgcggcccagccatgggccctctgagcaactgtgcagcaccctttcacccccaattaaacccagaaccactg

SEQ ID NO: 9870 - protein, 45 aa, Homo sapiens
MQKAECTTSTTSLTPASGSGPAATAAVVAKTGRGSLPGSAARTCW

SEQ ID NO: 9871 - DNA, 784 bp, Homo sapiens
ggaagatggcggacgaggagaagctgccgcccggctgggagaagcgcatgagccgcagctcaggccgagtgtactacttcaaccacatcactaacgccagccagtgggagcggcccagcggcaacagcagcagtggtggcaaaaacgggcagggggagcctgccagggtccgctgctcgcacctgctggtgaagcacagccagtcacggcggccctcgtcctggcggcaggagaagatcacccggaccaaggaggaggccctggagctgatcaacggctacatccagaagatcaagtcgggagaggaggactttgagtctctggcctcacagttcagcgactgcagctcagccaaggccaggggagacctgggtgccttcagcagaggtcagatgcagaagccatttgaagacgcctcgtttgcgctgcggacgggggagatgagcgggcccgtgttcacggattccggcatccacatcatcctccttggggctgcgaccgccagattctcccttaaggaattgacttcagcaggggtgggaggctcccagacccagggcagtgtggtgggaggggtgttccaaagagaaggcctggtcagcagagccgccccgtgtccccccaggtgctggaggcagactcgagggccgaattgtttctagttaggccacgctcctctgttcagtcgcaaaggtgaacactcatgcggcccagccatgggccctctgagcaactgtgcagcaccctttcacccccaattaaacccagaaccactgctctgctc

SEQ ID NO: 9872 - protein, 218 aa, Homo sapiens [sequence omitted]

SEQ ID NO: 9873 - DNA, 1070 bp, Homo sapiens
tggcggacgaggagaagctgccgcccggctgggagaagcgcatgagccgcagctcaggtgagaacaccaaggcccagggaagatatatcacatttgaacccagattcagatttgaatccaggtggcctggctgctgagtgcatggccgagtgtactacttcaaccacatcactaacgccagccagtgggagcggcccagcggcaacagcagcagtggtggcaaaaacgggcagggggagcctgccagggtccgctgctcgcacctgctggtgaagcacagccagtcacggcggccctcgtcctggcggcaggagaagatcacccggaccaaggaggaggccctggagctgatcaacggctacatccagaagatcaagtcgggagaggaggactttgagtctctggcctcacagttcagcgactgcagctcagccaaggccaggggagacctgggtgccttcagcagaggtcagatgcagaagccatttgaagacgcctcgtttgcgctgcggacgggggagatgagcgggcccgtgttcacggattccggcatccacatcatcctccgcactgagtgagggtggggagcccaggcctggcctcggggcagggcagggcggctaggccggccagctcccccttgcccgccagccagtggccgaaccccccactccctgccaccgtcacacagtatttattgttcccacaatggctgggagggggcccttccagattgggggccctggggtccccactccctgtccatccccagttggggctgcgaccgccagattctcccttaaggaattgacttcagcaggggtgggaggctcccagacccagggcagtgtggtgggaggggtgttccaaagagaaggcctggtcagcagagccgccccgtgtccccccaggtgctggaggcagactcgagggccgaattgtttctagttaggccacgctcctctgttcagtcgcaaaggtgaacactcatgcggcccagccatgggccctctgagcaactgtgcagcaccctttcacccccaattaaacccagaaccactgctctgctc

SEQ ID NO: 9874 - protein, 43 aa, Homo sapiens
MAECTTSTTSLTPASGSGPAATAAVVAKTGRGSLPGSAARTCW

SEQ ID NO: 9875 - DNA, 1035 bp, Homo sapiens
ggcggacgaggagaagctgccgcccggctgggagaagcgcatgagccgcagctcagagtaaacactcaggaagcgttacccactgctgccattcccagagatgcaaaaggccgagtgtactacttcaaccacatcactaacgccagccagtgggagcggcccagcggcaacagcagcagtggtggcaaaaacgggcagggggagcctgccagggtccgctgctcgcacctgctggtgaagcacagccagtcacggcggccctcgtcctggcggcaggagaagatcacccggaccaaggaggaggccctggagctgatcaacggctacatccagaagatcaagtcgggagaggaggactttgagtctctggcctcacagttcagcgactgcagctcagccaaggccaggggagacctgggtgccttcagcagaggtcagatgcagaagccatttgaagacgcctcgtttgcgctgcggacgggggagatgagcgggcccgtgttcacggattccggcatccacatcatcctccgcactgagtgagggtggggagcccaggcctggcctcggggcagggcagggcggctaggccggccagctcccccttgcccgccagccagtggccgaaccccccactccctgccaccgtcacacagtatttattgttcccacaatggctgggagggggcccttccagattgggggccctggggtccccactccctgtccatccccagttggggctgcgaccgccagattctcccttaaggaattgacttcagcaggggtgggaggctcccagacccagggcagtgtggtgggaggggtgttccaaagagaaggcctggtcagcagagccgccccgtgtccccccaggtgctggaggcagactcgagggccgaattgtttctagttaggccacgctcctctgttcagtcgcaaaggtgaacactcatgcggcccagccatgggccctctgagcaactgtgcagcaccctttcacccccaattaaacccagaaccactgctctgctc

SEQ ID NO: 9876 - protein, 45 aa, Homo sapiens; identical to SEQ ID NO: 9870

SEQ ID NO: 9877 - DNA, 656 bp, Homo sapiens
agttcaaccctgatggcttcctttatgggtgacactccatgtcacccaggcgaactgtcagcctttggagtggcacccagtagggtctttacttccagtttcttgttcacagtcttcactccttcatacccctcactccctgggtaacatcgggccaccagtaatgctggttcctagctctgcaacaccatgcacggtgtagtagctaagagcagagctttcgggtgtgaagtacctgagtacagttcctgccttcccctgtgtgtgcctggaacagagtaaacactcaggaagcgttacccactgctgccattcccagagatgcaaaaggccgagtgtactacttcaaccacatcactaacgccagccagtgggagcggcccagcggcaacagcagcagtggtggcaaaaacgggcagggggagcctgccagggtccgctgctcgcacctgctggtgaagcacagccagtcacggcggccctcgtcctggcggcaggagaagatcacccggaccaaggaggaggccctggagctgatcaacggctacatccagaagatcaagtcgggagaggaggactttgagtctctggcctcacagttcagcgactgcagctcagccaaggccaggggagacctgggtgccttcagcagaggt

SEQ ID NO: 9878 - protein, 45 aa, Homo sapiens; identical to SEQ ID NO: 9870

SEQ ID NO: 9879 - DNA, 624 bp, Homo sapiens
cgcaaggaatgggcctcaccaggtcagatgcagaagccatttgaagacgcctcgtttgcgctgcggacgggggagatgagcgggcccgtgttcacggattccggcatccacatcatcctccgcactgagtgagggtggggagcccaggcctggcctcggggcagggcagggcggctaggccggccagctcccccttgcccgccagccagtggccgaaccccccactccctgccaccgtcacacagtatttattgttcccacaatggctgggagggggcccttccagattgggggccctggggtccccactccctgtccatccccagttggggctgcgaccgccagattctcccttaaggaattgacttcagcaggggtgggaggctcccagacccagggcagtgtggtgggaggggtgttccaaagagaaggcctggtcagcagagccgccccgtgtccccccaggtgctggaggcagactcgagggccgaattgtttctagttaggccacgctcctctgttcagtcgcaaaggtgaacactcatgcggcccagccatgggccctctgagcaactgtgcagcaccctttcacccccaattaaacccagaaccactgctctgctc

SEQ ID NO: 9880 - protein, 79 aa, Homo sapiens
MAGRGPFQIGGPGVPTPCPSPVGAATARFSLKELTSAGVGGSQTQGSVVGGVFQREGLVSRAAPCPPRCWRQTRGPNCF

SEQ ID NO: 9881 - DNA, 1546 bp, Homo sapiens
agagaattgactacaggggatgaaggtggaactgggagactagggaggaggtccagaacgtctcccagtccatggaggtccttgagttgcggacgtatcgcgacctccagtatgtacgcggcatggagaccctcatgcggagcctggatgcgcggctccgggcagctgatgggtccctctcggccaagagcttccaggagctgaaggacaggatgacggaactgttgcccctgagctcggtcctggagcagtacaaggcagacacgcggaccattgtacgcttgcgggaggaggctgtgggaagctgaccggggtcagtaaccccatcaccgttcgggccatggggtcccgcttcggctcctggatgactgacacgatggcccccagtgcggatagccgggtctggtacatggatggctattacaaaggccgccgggtcctggagttccgtaccctgggagacttcatcaaaggccagaactttatccagcacctgctgccccagccgtgggcgggcacgggccacgtggtgtacaacggctccctgttctataacaagtaccagagcaacgtggtggtcaaataccacttccgctcgcgctctgtgctggtgcagaggagcctcccgggcgccggttacaacaacaccttcccctactcctggggcggcttctccgacatggacttcatggtggacgagagcgggctctgggctgtgtacaccaccaaccagaacgcgggcaacatcgtggtcagccggctggacccgcacaccctcgaggtcatgcggtcctgggacaccggctaccccaagcgcagcgctggcgaggccttcatgatctgcggtgtgctctacgtgaccaactcccacctggctggggccaaggtctacttcgcctattttaccaacacgtccagttacgagtacacggacgtgcccttccacaaccagtattcccacatctcgatgctggattacaacccccgggagcgcgccctctatacctggaacaacggccaccaggtgctctacaatgtcaccctgtttcacgtcatcagcacctctggggacccctgagccaatgctgtggctcgggctgctgcctggggggcctctgggggctgggggcccttttcattctgcctgtgtccctcaagggtgatctctctgtctctgtcacgccctttctccccgcctttttgctgggcttttgttctctgcctatgtatttctgtctattttttcaatttcccctcttctcctttattgatctctgcttttaatacaccacttctttctttctgcctttttatggatgtctttttctttttatggctctggttctccagttctttccgtctctgcctctctctgtctctctctctctgtccttccacccctccctccttgcttcccacccattcctcatccctcactcccacccccacccccacccccaggagttgagtgcatggatctgtttctttttttatttacactttttctttccggtttgccggaataaacaggacctttgacatttga

SEQ ID NO: 9882 - protein, 245 aa, Homo sapiens
MGSRFGSWMTDTMAPSADSRVWYMDGYYKGRRVLEFRTLGDFIKGQNFIQHLLPQPWAGTGHVVYNGSLFYNKYQSNVVVKYHFRSRSVLVQRSLPGAGYNNTFPYSWGGFSDMDFMVDESGLWAVYTTNQNAGNIVVSRLDPHTLEVMRSWDTGYPKRSAGEAFMICGVLYVTNSHLAGAKVYFAYFTNTSSYEYTDVPFHNQYSHISMLDYNPRERALYTWNNGHQVLYNVTLFHVISTSGDP

SEQ ID NO: 9883 - DNA, 1692 bp, Homo sapiens
aagttccttctgtctgctgtgtagagaattgactacaggggatgaaggtggaactgggagactagggaggaggtccagaacgtctcccagtccatggaggtccttgagttgcggacgtatcgcgacctccagtatgtacgcggcatggagaccctcatgcggagcctggatgcgcggctccgggcagctgatgggtccctctcggccaagagcttccaggagctgaaggacaggatgacggaactgttgcccctgagctcggtcctggagcagtacaaggcagacacgcggaccattgtacgcttgcgggaggaggtgaggaatctctccggcagtctggcggccattcaggaggagatgggtgcctacgggtatgaggacctgcagcaacgggtgatggccctggaggcccggctccacgcctgcgcccagaagctgggctgtgggaagctgaccggggtcagtaaccccatcaccgttcgggccatggggtcccgcttcggctcctggatgactgacacgatggcccccagtgcggatagccgggtctggtacatggatggctattacaaaggccgccgggtcctggagttccgtaccctgggagacttcatcaaaggccagaactttatccagcacctgctgccccagccgtgggcgggcacgggccacgtggtgtacaacggctccctgttctataacaagtaccagagcaacgtggtggtcaaataccacttccgctcgcgctctgtgctggtgcagaggagcctcccgggcgccggttacaacaacaccttcccctactcctggggcggcttctccgacatggacttcatggtggacgagagcgggctctgggctgtgtacaccaccaaccagaacgcgggcaacatcgtggtcagccggctggacccgcacaccctcgaggtcatgcggtcctgggacaccggctaccccaagcgcagcgctggcgaggccttcatgatctgcggtgtgctctacgtgaccaactcccacctggctggggccaaggtctacttcgcctattttaccaacacgtccagttacgagtacacggacgtgcccttccacaaccagtattcccacatctcgatgctggattacaacccccgggagcgcgccctctatacctggaacaacggccaccaggtgctctacaatgtcaccctgtttcacgtcatcagcacctctggggacccctgagccaatgctgtggctcgggctgctgcctggggggcctctgggggctgggggcccttttcattctgcctgtgtccctcaagggtgatctctctgtctctgtcacgccctttctccccgcctttttgctgggcttttgttctctgcctatgtatttctgtctattttttcaatttcccctcttctcctttattgatctctgcttttaatacaccacttctttctttctgcctttttatggatgtctttttctttttatggctctggttctccagttctttccgtctctgcctctctctgtctctctctctctgtccttccacccctccctccttgcttcccacccattcctcatccctcactcccacccccacccccacccccaggagttgagtgcatggatctgtttctttttttatttacactttttctttccggtttgccggaataaacaggacctttgacatttga

SEQ ID NO: 9884 - protein, 376 aa, Homo sapiens
MEVLELRTYRDLQYVRGMETLMRSLDARLRAADGSLSAKSFQELKDRMTELLPLSSVLEQYKADTRTIVRLREEVRNLSGSLAAIQEEMGAYGYEDLQQRVMALEARLHACAQKLGCGKLTGVSNPITVRAMGSRFGSWMTDTMAPSADSRVWYMDGYYKGRRVLEFRTLGDFIKGQNFIQHLLPQPWAGTGHVVYNGSLFYNKYQSNVVVKYHFRSRSVLVQRSLPGAGYNNTFPYSWGGFSDMDFMVDESGLWAVYTTNQNAGNIVVSRLDPHTLEVMRSWDTGYPKRSAGEAFMICGVLYVTNSHLAGAKVYFAYFTNTSSYEYTDVPFHNQYSHISMLDYNPRERALYTWNNGHQVLYNVTLFHVISTSGDP

SEQ ID NO: 9885 - DNA, 2079 bp, Homo sapiens
cgcgtccccgagccccccctcaccccgtcccggaccccctgccccgcagctcgcgctcgtgccccctcccccacgcccccccggggcgcctgggtgtcgagggaccgagcgccccgcggcgggccagagaagggacgcgcggcgggcggccgcggggcatgaggcggaggcgcgatgtcggtgccgctgctcaagatcggggccgtgctgagcaccatggccatggtcaccaactggatgtcgcagacgctgccctcgctcgtggggctcaacggcaccgtgtcccgtgcgggcgcctctgagaaaatcactctcttccagaacccagaagagggctggcagctgtacacctcagcccaggcccctgacgggaaatgcatctgcacggccgtgatcccagcgcagagtacctgctctcgagatggcaggagtcgggagctgcggcaactgatggagaaggtccagaacgtctcccagtccatggaggtccttgagttgcggacgtatcgcgacctccagtatgtacgcggcatggagaccctcatgcggagcctggatgcgcggctccgggcagctgatgggtccctctcggccaagagcttccaggagctgaaggacaggatgacggaactgttgcccctgagctcggtcctggagcagtacaaggcagacacgcggaccattgtacgcttgcgggaggaggtgaggaatctctccggcagtctggcggccattcaggaggagatgggtgcctacgggtatgaggacctgcagcaacgggtgatggccctggaggcccggctccacgcctgcgcccagaagctgggctgtgggaagctgaccggggtcagtaaccccatcaccgttcgggccatggggtcccgcttcggctcctggatgactgacacgatggcccccagtgcggatagccgggtctggtacatggatggctattacaaaggccgccgggtcctggagttccgtaccctgggagacttcatcaaaggccagaactttatccagcacctgctgccccagccgtgggcgggcacgggccacgtggtgtacaacggctccctgttctataacaagtaccagagcaacgtggtggtcaaataccacttccgctcgcgctctgtgctggtgcagaggagcctcccgggcgccggttacaacaacaccttcccctactcctggggcggcttctccgacatggacttcatggtggacgagagcgggctctgggctgtgtacaccaccaaccagaacgcgggcaacatcgtggtcagccggctggacccgcacaccctcgaggtcatgcggtcctgggacaccggctaccccaagcgcagcgctggcgaggccttcatgatctgcggtgtgctctacgtgaccaactcccacctggctggggccaaggtctacttcgcctattttaccaacacgtccagttacgagtacacggacgtgcccttccacaaccagtattcccacatctcgatgctggattacaacccccgggagcgcgccctctatacctggaacaacggccaccaggtgctctacaatgtcaccctgtttcacgtcatcagcacctctggggacccctgagccaatgctgtggctcgggctgctgcctggggggcctctgggggctgggggcccttttcattctgcctgtgtccctcaagggtgatctctctgtctctgtcacgccctttctccccgcctttttgctgggcttttgttctctgcctatgtatttctgtctattttttcaatttcccctcttctcctttattgatctctgcttttaatacaccacttctttctttctgcctttttatggatgtctttttctttttatggctctggttctccagttctttccgtctctgcctctctctgtctctctctctctgtccttccacccctccctccttgcttcccacccattcctcatccctcactcccacccccacccccacccccaggagttgagtgcatggatctgtttctttttttatttacactttttctttccggtttgccggaataaacaggacctttgacatttga

SEQ ID NO: 9886 - protein, 478 aa, Homo sapiens
MSVPLLKIGAVLSTMAMVTNWMSQTLPSLVGLNGTVSRAGASEKITLFQNPEEGWQLYTSAQAPDGKCICTAVIPAQSTCSRDGRSRELRQLMEKVQNVSQSMEVLELRTYRDLQYVRGMETLMRSLDARLRAADGSLSAKSFQELKDRMTELLPLSSVLEQYKADTRTIVRLREEVRNLSGSLAAIQEEMGAYGYEDLQQRVMALEARLHACAQKLGCGKLTGVSNPITVRAMGSRFGSWMTDTMAPSADSRVWYMDGYYKGRRVLEFRTLGDFIKGQNFIQHLLPQPWAGTGHVVYNGSLFYNKYQSNVVVKYHFRSRSVLVQRSLPGAGYNNTFPYSWGGFSDMDFMVDESGLWAVYTTNQNAGNIVVSRLDPHTLEVMRSWDTGYPKRSAGEAFMICGVLYVTNSHLAGAKVYFAYFTNTSSYEYTDVPFHNQYSHISMLDYNPRERALYTWNNGHQVLYNVTLFHVISTSGDP

SEQ ID NO: 9887 - DNA, 2019 bp, Homo sapiens
cgcaacaaagactcggagcgagcgagggggcgggggtggggcggaatcccggccgccggcgaggcgggggaggcggcggcgcagggtcgccccggccgggcgggcggggtcgcgcctggtggcggtccccgcgccgaggcgccgctagggcgggcgggggtcgggacgccgggctaggggcgcgtcatgtggccgctcacggtcccgccgccgctgctgctgctgctgtgctcaggcctggccggacagactctcttccagaacccagaagagggctggcagctgtacacctcagcccaggcccctgacgggaaatgcatctgcacggccgtgatcccagcgcagagtacctgctctcgagatggcaggagtcgggagctgcggcaactgatggagaaggtccagaacgtctcccagtccatggaggtccttgagttgcggacgtatcgcgacctccagtatgtacgcggcatggagaccctcatgcggagcctggatgcgcggctccgggcagctgatgggtccctctcggccaagagcttccaggagctgaaggacaggatgacggaactgttgcccctgagctcggtcctggagcagtacaaggcagacacgcggaccattgtacgcttgcgggaggaggtgaggaatctctccggcagtctggcggccattcaggaggagatgggtgcctacgggtatgaggacctgcagcaacgggtgatggccctggaggcccggctccacgcctgcgcccagaagctgggctgtgggaagctgaccggggtcagtaaccccatcaccgttcgggccatggggtcccgcttcggctcctggatgactgacacgatggcccccagtgcggatagccgggtctggtacatggatggctattacaaaggccgccgggtcctggagttccgtaccctgggagacttcatcaaaggccagaactttatccagcacctgctgccccagccgtgggcgggcacgggccacgtggtgtacaacggctccctgttctataacaagtaccagagcaacgtggtggtcaaataccacttccgctcgcgctctgtgctggtgcagaggagcctcccgggcgccggttacaacaacaccttcccctactcctggggcggcttctccgacatggacttcatggtggacgagagcgggctctgggctgtgtacaccaccaaccagaacgcgggcaacatcgtggtcagccggctggacccgcacaccctcgaggtcatgcggtcctgggacaccggctaccccaagcgcagcgctggcgaggccttcatgatctgcggtgtgctctacgtgaccaactcccacctggctggggccaaggtctacttcgcctattttaccaacacgtccagttacgagtacacggacgtgcccttccacaaccagtattcccacatctcgatgctggattacaacccccgggagcgcgccctctatacctggaacaacggccaccaggtgctctacaatgtcaccctgtttcacgtcatcagcacctctggggacccctgagccaatgctgtggctcgggctgctgcctggggggcctctgggggctgggggcccttttcattctgcctgtgtccctcaagggtgatctctctgtctctgtcacgccctttctccccgcctttttgctgggcttttgttctctgcctatgtatttctgtctattttttcaatttcccctcttctcctttattgatctctgcttttaatacaccacttctttctttctgcctttttatggatgtctttttctttttatggctctggttctccagttctttccgtctctgcctctctctgtctctctctctctgtccttccacccctccctccttgcttcccacccattcctcatccctcactcccacccccacccccacccccaggagttgagtgcatggatctgtttctttttttatttacactttttctttccggtttgccggaataaacaggacctttgacatttga

SEQ ID NO: 9888 - protein, 454 aa, Homo sapiens; identical to SEQ ID NO: 1523

SEQ ID NO: 9889 - DNA, 907 bp, Homo sapiens
cccgccaggcgcgccgagccgcagcccgcgtccccgagccccccctcaccccgtcccggaccccctgccccgcagctcgcgctcgtgccccctcccccacgcccccccggggcgcctgggtgtcgagggaccgagcgccccgcggcgggccagagaagggacgcgcggcgggcggccgcggggcatgaggcggaggcgcgatgtcggtgccgctgctcaagatcggggccgtgctgagcaccatggccatggtcaccaactggatgtcgcagacgctgccctcgctcgtggggctcaacggcaccgtgtcccgtgcgggcgcctctgagaaaatcactctcttccagaacccagaagagggctggcagctgtacacctcagcccaggcccctgacgggaaatgcatctgcacggccgtgatcccagcgcagagtacctgctctcgagatggcaggagtcgggagctgcggcaactgatggagaaggtccagaacgtctcccagtccatggaggtccttgagttgcggacgtatcgcgacctccagtatgtacgcggcatggagaccctcatgcggagcctggatgcgcggctccgggcagctgatgggtccctctcggccaagagcttccaggagctgaaggacaggatgacggaactgttgcccctgagctcggtcctggagcagtacaaggcagacacgcggaccattgtacgcttgcgggaggaggtgaggaatctctccggcagtctggcggccattcaggaggagatgggtgcctacgggtatgaggacctgcagcaacgggtgatggccctggaggcccggctccacgcctgcgcccagaagctgggtatgccttggcccttgaccctgacccctgatctctgactgccacacccaactcc

SEQ ID NO: 9890 - protein, 229 aa, Homo sapiens
MSVPLLKIGAVLSTMAMVTNWMSQTLPSLVGLNGTVSRAGASEKITLFQNPEEGWQLYTSAQAPDGKCICTAVIPAQSTCSRDGRSRELRQLMEKVQNVSQSMEVLELRTYRDLQYVRGMETLMRSLDARLRAADGSLSAKSFQELKDRMTELLPLSSVLEQYKADTRTIVRLREEVRNLSGSLAAIQEEMGAYGYEDLQQRVMALEARLHACAQKLGMPWPLTLTPDL

SEQ ID NO: 9891 - DNA, 711 bp, Homo sapiens
cgcgcctggtggcggtccccgcgccgaggcgccgctagggcgggcgggggtcgggacgccgggctaggggcgcgtcatgtggccgctcacggtcccgccgccgctgctgctgctgctgtgctcaggcctggccggacagactctcttccagaacccagaagagggctggcagctgtacacctcagcccaggcccctgacgggaaatgcatctgcacggccgtgatcccagcgcagagtacctgctctcgagatggcaggagtcgggagctgcggcaactgatggagaaggtccagaacgtctcccagtccatggaggtccttgagttgcggacgtatcgcgacctccagtatgtacgcggcatggagaccctcatgcggagcctggatgcgcggctccgggcagctgatgggtccctctcggccaagagcttccaggagctgaaggacaggatgacggaactgttgcccctgagctcggtcctggagcagtacaaggcagacacgcggaccattgtacgcttgcgggaggaggtgaggaatctctccggcagtctggcggccattcaggaggagatgggtgcctacgggtatgaggacctgcagcaacgggtgatggccctggaggcccggctccacgcctgcgcccagaagctgggtatgccttggcccttgaccctgacccctgatctctgactgccacacccaactcc

SEQ ID NO: 9892 - protein, 205 aa, Homo sapiens
MWPLTVPPPLLLLLCSGLAGQTLFQNPEEGWQLYTSAQAPDGKCICTAVIPAQSTCSRDGRSRELRQLMEKVQNVSQSMEVLELRTYRDLQYVRGMETLMRSLDARLRAADGSLSAKSFQELKDRMTELLPLSSVLEQYKADTRTIVRLREEVRNLSGSLAAIQEEMGAYGYEDLQQRVMALEARLHACAQKLGMPWPLTLTPDL

SEQ ID NO: 9893 - DNA, 5217 bp, Homo sapiens
gcgctgccgccgccgcgtctgctgaagcctccgagatgccggcgcgtaccgccccagcccgggtgcccacactggccgtcccggccatctcgctgcccgacgatgtccgcaggcggctcaaagatttggaaagagacagcttaacagaaaaggaatgtgtgaaggagaaattgaatctcttgcacgaatttctgcaaacagaaataaagaatcagttatgtgacttggaaaccaaattacgtaaagaagaattatccgagatttgtccttggagaacggtgctcatgcttacaaccgggaagtgaatggacgtctagaaaacgggaaccaagcaagaagtgaagcccgtagagtgggaatggcagatgccaacagcccccccaaacccctttccaaacctcgcacgcccaggaggagcaagtccgatggagaggctaagcgttcaagagaccctcctgcctcagcctcccaagtaactgggattagagctgaaccttcacctagccccaggattacaaggaaaagcaccaggcaaaccaccatcacatctcattttgcaaagggccctgccaaacggaaacctcaggaagagtctgaaagagccaaatcggatgagtccatcaaggaagaagacaaagaccaggatgagaagagacgtagagttacatccagagaacgagttgctagaccgcttcctgcagaagaacctgaaagagcaaaatcaggaacgcgcactgaaaaggaagaagaaagagatgaaaaagaagaaaagagactccgaagtcaaaccaaagaaccaacacccaaacagaaactgaaggaggagccggacagagaagccagggcaggcgtgcaggctgacgaggacgaagatggagacgagaaagatgagaagaagcacagaagtcaacccaaagatctagctgccaaacggaggcccgaagaaaaagaacctgaaaaagtaaatccacagatttctgatgaaaaagacgaggatgaaaaggaggagaagagacgcaaaacgacccccaaagaaccaacggagaaaaaaatggctcgcgccaaaacagtcatgaactccaagacccaccctcccaagtgcattcagtgcgggcagtacctggacgaccctgacctcaaatatgggcagcacccaccagacgcggtggatgagccacagatgctgacaaatgagaagctgtccatctttgatgccaacgagtctggctttgagagttatgaggcgcttccccagcacaaactgacctgcttcagtgtgtactgtaagcacggtcacctgtgtcccatcgacaccggcctcatcgagaagaatatcgaactcttcttttctggttcagcaaaaccaatctatgatgatgacccatctcttgaaggtggtgttaatggcaaaaatcttggccccataaatgaatggtggatcactggctttgatggaggtgaaaaggccctcatcggcttcagcacctcatttgccgaatacattctgatggatcccagtcccgagtatgcgcccatatttgggctgatgcaggagaagatctacatcagcaagattgtggtggagttcctgcagagcaattccgactcgacctatgaggacctgatcaacaagatcgagaccacggttcctccttctggcctcaacttgaaccgcttcacagaggactccctcctgcgacacgcgcagtttgtggtggagcaggtggagagttatgacgaggccggggacagtgatgagcagcccatcttcctgacaccctgcatgcgggacctgatcaagctggctggggtcacgctgggacagaggcgagcccaggcgaggcggcagaccatcaggcattctaccagggagaaggacaggggacccacgaaagccaccaccaccaagctggtctaccagatcttcgatactttcttcgcagagcaaattgaaaaggatgacagagaagacaaggagaacgcctttaagcgccggcgatgtggcgtctgtgaggtgtgtcagcagcctgagtgtgggaaatgtaaagcctgcaaggacatggttaaatttggtggcagtggacggagcaagcaggcttgccaagagcggaggtgtcccaatatggccatgaaggaggcagatgacgatgaggaagtcgatgataacatcccagagatgccgtcacccaaaaaaatgcaccaggggaagaagaagaaacagaacaagaatcgcatctcttgggtcggagaagccgtcaagactgatgggaagaagagttactataagaaggtgtgcattgatgcggaaaccctggaagtgggggactgtgtctctgttattccagatgattcctcaaaaccgctgtatctagcaagggtcacggcgctgtgggaggacagcagcaacgggcagatgtttcacgcccactggttctgcgctgggacagacacagtcctcggggccacgtcggaccctctggagctgttcttggtggatgaatgtgaggacatgcagctttcatatatccacagcaaagtgaaagtcatctacaaagccccctccgaaaactgggccatggagggaggcatggatcccgagtccctgctggagggggacgacgggaagacctacttctaccagctgtggtatgatcaagactacgcgagattcgagtcccctccaaaaacccagccaacagaggacaacaagttcaaattctgtgtgagctgtgcccgtctggctgagatgaggcaaaaagaaatccccagggtcctggagcagctcgaggacctggatagccgggtcctctactactcagccaccaagaacggcatcctgtaccgagttggtgatggtgtgtacctgccccctgaggccttcacgttcaacatcaagctgtccagtcccgtgaaacgcccacggaaggagcccgtggatgaggacctgtacccagagcactaccggaaatactccgactacatcaaaggcagcaacctggatgcccctgagccctaccgaattggccggatcaaagagatcttctgtcccaagaagagcaacggcaggcccaatgagactgacatcaaaatccgggtcaacaagttctacaggcctgagaacacccacaagtccactccagcgagctaccacgcagacatcaacctgctctactggagcgacgaggaggccgtggtggacttcaaggctgtgcagggccgctgcaccgtggagtatggggaggacctgcccgagtgcgtccaggtgtactccatgggcggccccaaccgcttctacttcctcgaggcctataatgcaaagagcaaaagctttgaagatcctcccaaccatgcccgtagccctggaaacaaagggaagggcaagggaaaagggaagggcaagcccaagtcccaagcctgtgagccgagcgagccagagatagagatcaagctgcccaagctgcggaccctggatgtgttttctggctgcggggggttgtcggagggattccaccaagcaggcatctctgacacgctgtgggccatcgagatgtgggaccctgcggcccaggcgttccggctgaacaaccccggctccacagtgttcacagaggactgcaacatcctgctgaagctggtcatggctggggagaccaccaactcccgcggccagcggctgccccagaagggagacgtggagatgctgtgcggcgggccgccctgccagggcttcagcggcatgaaccgcttcaattcgcgcacctactccaagttcaaaaactctctggtggtttccttcctcagctactgcgactactaccggccccggttcttcctcctggagaatgtcaggaactttgtctccttcaagcgctccatggtcctgaagctcaccctccgctgcctggtccgcatgggctatcagtgcaccttcggcgtgctgcaggccggtcagtacggcgtggcccagactaggaggcgggccatcatcctggccgcggcccctggagagaagctccctctgttcccggagccactgcacgtgtttgctccccgggcctgccagctgagcgtggtggtggatgacaagaagtttgtgagcaacataaccaggttgagctcgggtcctttccggaccatcacggtgcgagacacgatgtccgacctgccggaggtgcggaatggagcctcggcactggagatctcctacaacggggagcctcagtcctggttccagaggcagctccggggcgcacagtaccagcccatcctcagggaccacatctgtaaggacatgagtgcattggtggctgcccgcatgcggcacatccccttggccccagggtcagactggcgcgatctgcccaacatcgaggtgcggctctcagacggcaccatggccaggaagctgcggtatacccaccatgacaggaagaacggccgcagcagctctggggccctccgtggggtctgctcctgcgtggaagccggcaaagcctgcgaccccgcagccaggcagttcaacaccctcatcccctggtgcctgccccacaccgggaaccggcacaaccactgggctggcctctatggaaggctcgagtgggacggcttcttcagcacaaccgtcaccaaccccgagcccatgggcaagcagggccgcgtgctccacccagagcagcaccgtgtggtgagcgtgcgggagtgtgcccgctcccagggcttccctgacacctaccggctcttcggcaacatcctggacaagcaccggcaggtgggcaatgccgtgccaccgcccctggccaaagccattggcttggagatcaagctttgtatgttggccaaagcccgagagagtgcctcagctaaaataaaggaggaggaagctgctaaggactagttctgccctcccgtcacccctgtttctggcaccaggaatccccaacatgcactgatgttgtgtttttaacatgtcaatctgtccgttcacatgtgtggtacatggtgtttgtggccttggctgacatgaagctgttgtgtgaggttcgcttatcaactaatgatttagtgatcaaattgtgcagtactttgtgcattctggattttaaaagttttttattatgcattatatcaaatctaccactgtatgagtggaaattaagactttatgtagtttttatatgttgtaatatttcttcaaataaatctctcctataaaccacc

SEQ ID NO: 9894 - protein, 1511 aa, Homo sapiens
MADANSPPKPLSKPRTPRRSKSDGEAKRSRDPPASASQVTGIRAEPSPSPRITRKSTRQTTITSHFAKGPAKRKPQEESERAKSDESIKEEDKDQDEKRRRVTSRERVARPLPAEEPERAKSGTRTEKEEERDEKEEKRLRSQTKEPTPKQKLKEEPDREARAGVQADEDEDGDEKDEKKHRSQPKDLAAKRRPEEKEPEKVNPQISDEKDEDEKEEKRRKTTPKEPTEKKMARAKTVMNSKTHPPKCIQCGQYLDDPDLKYGQHPPDAVDEPQMLTNEKLSIFDANESGFESYEALPQHKLTCFSVYCKHGHLCPIDTGLIEKNIELFFSGSAKPIYDDDPSLEGGVNGKNLGPINEWWITGFDGGEKALIGFSTSFAEYILMDPSPEYAPIFGLMQEKIYISKIVVEFLQSNSDSTYEDLINKIETTVPPSGLNLNRFTEDSLLRHAQFVVEQVESYDEAGDSDEQPIFLTPCMRDLIKLAGVTLGQRRAQARRQTIRHSTREKDRGPTKATTTKLVYQIFDTFFAEQIEKDDREDKENAFKRRRCGVCEVCQQPECGKCKACKDMVKFGGSGRSKQACQERRCPNMAMKEADDDEEVDDNIPEMPSPKKMHQGKKKKQNKNRISWVGEAVKTDGKKSYYKKVCIDAETLEVGDCVSVIPDDSSKPLYLARVTALWEDSSNGQMFHAHWFCAGTDTVLGATSDPLELFLVDECEDMQLSYIHSKVKVIYKAPSENWAMEGGMDPESLLEGDDGKTYFYQLWYDQDYARFESPPKTQPTEDNKFKFCVSCARLAEMRQKEIPRVLEQLEDLDSRVLYYSATKNGILYRVGDGVYLPPEAFTFNIKLSSPVKRPRKEPVDEDLYPEHYRKYSDYIKGSNLDAPEPYRIGRIKEIFCPKKSNGRPNETDIKIRVNKFYRPENTHKSTPASYHADINLLYWSDEEAVVDFKAVQGRCTVEYGEDLPECVQVYSMGGPNRFYFLEAYNAKSKSFEDPPNHARSPGNKGKGKGKGKGKPKSQACEPSEPEIEIKLPKLRTLDVFSGCGGLSEGFHQAGISDTLWAIEMWDPAAQAFRLNNPGSTVFTEDCNILLKLVMAGETTNSRGQRLPQKGDVEMLCGGPPCQGFSGMNRFNSRTYSKFKNSLVVSFLSYCDYYRPRFFLLENVRNFVSFKRSMVLKLTLRCLVRMGYQCTFGVLQAGQYGVAQTRRRAIILAAAPGEKLPLFPEPLHVFAPRACQLSVVVDDKKFVSNITRLSSGPFRTITVRDTMSDLPEVRNGASALEISYNGEPQSWFQRQLRGAQYQPILRDHICKDMSALVAARMRHIPLAPGSDWRDLPNIEVRLSDGTMARKLRYTHHDRKNGRSSSGALRGVCSCVEAGKACDPAARQFNTLIPWCLPHTGNRHNHWAGLYGRLEWDGFFSTTVTNPEPMGKQGRVLHPEQHRVVSVRECARSQGFPDTYRLFGNILDKHRQVGNAVPPPLAKAIGLEIKLCMLAKARESASAKIKEEEAAKD

SEQ ID NO: 9895 - DNA, 4910 bp, Homo sapiens
tccgcgtggggggggtgtgtgcccgccttgcgcatgcgtgttccctgggcatggccggctccgttccatccttctgcacagggtatcgcctctctccgtttggtacatcccctcctcccccacgcccggactggggtggtagacgccgcctccgctcatcgcccctccccatcgtaaacagctgaaccttcacctagccccaggattacaaggaaaagcaccaggcaaaccaccatcacatctcattttgcaaagggccctgccaaacggaaacctcaggaagagtctgaaagagccaaatcggatgagtccatcaaggaagaagacaaagaccaggatgagaagagacgtagagttacatccagagaacgagttgctagaccgcttcctgcagaagaacctgaaagagcaaaatcaggaacgcgcactgaaaaggaagaagaaagagatgaaaaagaagaaaagagactccgaagtcaaaccaaagaaccaacacccaaacagaaactgaaggaggagccggacagagaagccagggcaggcgtgcaggctgacgaggacgaagatggagacgagaaagatgagaagaagcacagaagtcaacccaaagatctagctgccaaacggaggcccgaagaaaaagaacctgaaaaagtaaatccacagatttctgatgaaaaagacgaggatgaaaaggaggagaagagacgcaaaacgacccccaaagaaccaacggagaaaaaaatggctcgcgccaaaacagtcatgaactccaagacccaccctcccaagtgcattcagtgcgggcagtacctggacgaccctgacctcaaatatgggcagcacccaccagacgcggtggatgagccacagatgctgacaaatgagaagctgtccatctttgatgccaacgagtctggctttgagagttatgaggcgcttccccagcacaaactgacctgcttcagtgtgtactgtaagcacggtcacctgtgtcccatcgacaccggcctcatcgagaagaatatcgaactcttcttttctggttcagcaaaaccaatctatgatgatgacccatctcttgaaggtggtgttaatggcaaaaatcttggccccataaatgaatggtggatcactggctttgatggaggtgaaaaggccctcatcggcttcagcacctcatttgccgaatacattctgatggatcccagtcccgagtatgcgcccatatttgggctgatgcaggagaagatctacatcagcaagattgtggtggagttcctgcagagcaattccgactcgacctatgaggacctgatcaacaagatcgagaccacggttcctccttctggcctcaacttgaaccgcttcacagaggactccctcctgcgacacgcgcagtttgtggtggagcaggtggagagttatgacgaggccggggacagtgatgagcagcccatcttcctgacaccctgcatgcgggacctgatcaagctggctggggtcacgctgggacagaggcgagcccaggcgaggcggcagaccatcaggcattctaccagggagaaggacaggggacccacgaaagccaccaccaccaagctggtctaccagatcttcgatactttcttcgcagagcaaattgaaaaggatgacagagaagacaaggagaacgcctttaagcgccggcgatgtggcgtctgtgaggtgtgtcagcagcctgagtgtgggaaatgtaaagcctgcaaggacatggttaaatttggtggcagtggacggagcaagcaggcttgccaagagcggaggtgtcccaatatggccatgaaggaggcagatgacgatgaggaagtcgatgataacatcccagagatgccgtcacccaaaaaaatgcaccaggggaagaagaagaaacagaacaagaatcgcatctcttgggtcggagaagccgtcaagactgatgggaagaagagttactataagaaggtgtgcattgatgcggaaaccctggaagtgggggactgtgtctctgttattccagatgattcctcaaaaccgctgtatctagcaagggtcacggcgctgtgggaggacagcagcaacgggcagatgtttcacgcccactggttctgcgctgggacagacacagtcctcggggccacgtcggaccctctggagctgttcttggtggatgaatgtgaggacatgcagctttcatatatccacagcaaagtgaaagtcatctacaaagccccctccgaaaactgggccatggagggaggcatggatcccgagtccctgctggagggggacgacgggaagacctacttctaccagctgtggtatgatcaagactacgcgagattcgagtcccctccaaaaacccagccaacagaggacaacaagttcaaattctgtgtgagctgtgcccgtctggctgagatgaggcaaaaagaaatccccagggtcctggagcagctcgaggacctggatagccgggtcctctactactcagccaccaagaacggcatcctgtaccgagttggtgatggtgtgtacctgccccctgaggccttcacgttcaacatcaagctgtccagtcccgtgaaacgcccacggaaggagcccgtggatgaggacctgtacccagagcactaccggaaatactccgactacatcaaaggcagcaacctggatgcccctgagccctaccgaattggccggatcaaagagatcttctgtcccaagaagagcaacggcaggcccaatgagactgacatcaaaatccgggtcaacaagttctacaggcctgagaacacccacaagtccactccagcgagctaccacgcagacatcaacctgctctactggagcgacgaggaggccgtggtggacttcaaggctgtgcagggccgctgcaccgtggagtatggggaggacctgcccgagtgcgtccaggtgtactccatgggcggccccaaccgcttctacttcctcgaggcctataatgcaaagagcaaaagctttgaagatcctcccaaccatgcccgtagccctggaaacaaagggaagggcaagggaaaagggaagggcaagcccaagtcccaagcctgtgagccgagcgagccagagatagagatcaagctgcccaagctgcggaccctggatgtgttttctggctgcggggggttgtcggagggattccaccaagcaggcatctctgacacgctgtgggccatcgagatgtgggaccctgcggcccaggcgttccggctgaacaaccccggctccacagtgttcacagaggactgcaacatcctgctgaagctggtcatggctggggagaccaccaactcccgcggccagcggctgccccagaagggagacgtggagatgctgtgcggcgggccgccctgccagggcttcagcggcatgaaccgcttcaattcgcgcacctactccaagttcaaaaactctctggtggtttccttcctcagctactgcgactactaccggccccggttcttcctcctggagaatgtcaggaactttgtctccttcaagcgctccatggtcctgaagctcaccctccgctgcctggtccgcatgggctatcagtgcaccttcggcgtgctgcaggccggtcagtacggcgtggcccagactaggaggcgggccatcatcctggccgcggcccctggagagaagctccctctgttcccggagccactgcacgtgtttgctccccgggcctgccagctgagcgtggtggtggatgacaagaagtttgtgagcaacataaccaggttgagctcgggtcctttccggaccatcacggtgcgagacacgatgtccgacctgccggaggtgcggaatggagcctcggcactggagatctcctacaacggggagcctcagtcctggttccagaggcagctccggggcgcacagtaccagcccatcctcagggaccacatctgtaaggacatgagtgcattggtggctgcccgcatgcggcacatccccttggccccagggtcagactggcgcgatctgcccaacatcgaggtgcggctctcagacggcaccatggccaggaagctgcggtatacccaccatgacaggaagaacggccgcagcagctctggggccctccgtggggtctgctcctgcgtggaagccggcaaagcctgcgaccccgcagccaggcagttcaacaccctcatcccctggtgcctgccccacaccgggaaccggcacaaccactgggctggcctctatggaaggctcgagtgggacggcttcttcagcacaaccgtcaccaaccccgagcccatgggcaagcagggccgcgtgctccacccagagcagcaccgtgtggtgagcgtgcgggagtgtgcccgctcccagggcttccctgacacctaccggctcttcggcaacatcctggacaagcaccggcaggtgggcaatgccgtgccaccgcccctggccaaagccattggcttggagatcaagctttgtatgttggccaaagcccgagagagtgcctcagctaaaataaaggaggaggaagctgctaaggactagttctgccctcccgtcacccctgtttctggcaccaggaatccccaacatgcactgatgttgtgtttttaacatgtcaatctgtccgttcacatgtgtggtacatggtgtttgtggccttggctgacatgaagctgttgtgtgaggttcgcttatcaactaatgatttagtgatcaaattgtgcagtactttgtgcattctggattttaaaagttttttattatgcattatatcaaatctaccactgtatgagtggaaattaagactttatgtagtttttatatgttgtaatatttcttcaaataaatctctcctataaaccacc

SEQ ID NO: 9896 - protein, 1280 aa, Homo sapiens
MARAKTVMNSKTHPPKCIQCGQYLDDPDLKYGQHPPDAVDEPQMLTNEKLSIFDANESGFESYEALPQHKLTCFSVYCKHGHLCPIDTGLIEKNIELFFSGSAKPIYDDDPSLEGGVNGKNLGPINEWWITGFDGGEKALIGFSTSFAEYILMDPSPEYAPIFGLMQEKIYISKIVVEFLQSNSDSTYEDLINKIETTVPPSGLNLNRFTEDSLLRHAQFVVEQVESYDEAGDSDEQPIFLTPCMRDLIKLAGVTLGQRRAQARRQTIRHSTREKDRGPTKATTTKLVYQIFDTFFAEQIEKDDREDKENAFKRRRCGVCEVCQQPECGKCKACKDMVKFGGSGRSKQACQERRCPNMAMKEADDDEEVDDNIPEMPSPKKMHQGKKKKQNKNRISWVGEAVKTDGKKSYYKKVCIDAETLEVGDCVSVIPDDSSKPLYLARVTALWEDSSNGQMFHAHWFCAGTDTVLGATSDPLELFLVDECEDMQLSYIHSKVKVIYKAPSENWAMEGGMDPESLLEGDDGKTYFYQLWYDQDYARFESPPKTQPTEDNKFKFCVSCARLAEMRQKEIPRVLEQLEDLDSRVLYYSATKNGILYRVGDGVYLPPEAFTFNIKLSSPVKRPRKEPVDEDLYPEHYRKYSDYIKGSNLDAPEPYRIGRIKEIFCPKKSNGRPNETDIKIRVNKFYRPENTHKSTPASYHADINLLYWSDEEAVVDFKAVQGRCTVEYGEDLPECVQVYSMGGPNRFYFLEAYNAKSKSFEDPPNHARSPGNKGKGKGKGKGKPKSQACEPSEPEIEIKLPKLRTLDVFSGCGGLSEGFHQAGISDTLWAIEMWDPAAQAFRLNNPGSTVFTEDCNILLKLVMAGETTNSRGQRLPQKGDVEMLCGGPPCQGFSGMNRFNSRTYSKFKNSLVVSFLSYCDYYRPRFFLLENVRNFVSFKRSMVLKLTLRCLVRMGYQCTFGVLQAGQYGVAQTRRRAIILAAAPGEKLPLFPEPLHVFAPRACQLSVVVDDKKFVSNITRLSSGPFRTITVRDTMSDLPEVRNGASALEISYNGEPQSWFQRQLRGAQYQPILRDHICKDMSALVAARMRHIPLAPGSDWRDLPNIEVRLSDGTMARKLRYTHHDRKNGRSSSGALRGVCSCVEAGKACDPAARQFNTLIPWCLPHTGNRHNHWAGLYGRLEWDGFFSTTVTNPEPMGKQGRVLHPEQHRVVSVRECARSQGFPDTYRLFGNILDKHRQVGNAVPPPLAKAIGLEIKLCMLAKARESASAKIKEEEAAKD

SEQ ID NO: 9897 - DNA, 5410 bp, Homo sapiens
tccgcgtggggggggtgtgtgcccgccttgcgcatgcgtgttccctgggcatggccggctccgttccatccttctgcacagggtatcgcctctctccgtttggtacatcccctcctcccccacgcccggactggggtggtagacgccgcctccgctcatcgcccctccccatcggtttccgcgcgaaaagccggggcgcctgcgctgccgccgccgcgtctgctgaagcctccgagatgccggcgcgtaccgccccagcccgggtgcccacactggccgtcccggccatctcgctgcccgacgatgtccgcaggcggctcaaagatttggaaagagacagcttaacagaaaaggaatgtgtgaaggagaaattgaatctcttgcacgaatttctgcaaacagaaataaagaatcagttatgtgacttggaaaccaaattacgtaaagaagaattatccgaggagggctacctggctaaagtcaaatcccttttaaataaagatttgtccttggagaacggtgctcatgcttacaaccgggaagtgaatggacgtctagaaaacgggaaccaagcaagaagtgaagcccgtagagtgggaatggcagatgccaacagcccccccaaacccctttccaaacctcgcacgcccaggaggagcaagtccgatggagaggctaagcctgaaccttcacctagccccaggattacaaggaaaagcaccaggcaaaccaccatcacatctcattttgcaaagggccctgccaaacggaaacctcaggaagagtctgaaagagccaaatcggatgagtccatcaaggaagaagacaaagaccaggatgagaagagacgtagagttacatccagagaacgagttgctagaccgcttcctgcagaagaacctgaaagagcaaaatcaggaacgcgcactgaaaaggaagaagaaagagatgaaaaagaagaaaagagactccgaagtcaaaccaaagaaccaacacccaaacagaaactgaaggaggagccggacagagaagccagggcaggcgtgcaggctgacgaggacgaagatggagacgagaaagatgagaagaagcacagaagtcaacccaaagatctagctgccaaacggaggcccgaagaaaaagaacctgaaaaagtaaatccacagatttctgatgaaaaagacgaggatgaaaaggaggagaagagacgcaaaacgacccccaaagaaccaacggagaaaaaaatggctcgcgccaaaacagtcatgaactccaagacccaccctcccaagtgcattcagtgcgggcagtacctggacgaccctgacctcaaatatgggcagcacccaccagacgcggtggatgagccacagatgctgacaaatgagaagctgtccatctttgatgccaacgagtctggctttgagagttatgaggcgcttccccagcacaaactgacctgcttcagtgtgtactgtaagcacggtcacctgtgtcccatcgacaccggcctcatcgagaagaatatcgaactcttcttttctggttcagcaaaaccaatctatgatgatgacccatctcttgaaggtggtgttaatggcaaaaatcttggccccataaatgaatggtggatcactggctttgatggaggtgaaaaggccctcatcggcttcagcacctcatttgccgaatacattctgatggatcccagtcccgagtatgcgcccatatttgggctgatgcaggagaagatctacatcagcaagattgtggtggagttcctgcagagcaattccgactcgacctatgaggacctgatcaacaagatcgagaccacggttcctccttctggcctcaacttgaaccgcttcacagaggactccctcctgcgacacgcgcagtttgtggtggagcaggtggagagttatgacgaggccggggacagtgatgagcagcccatcttcctgacaccctgcatgcgggacctgatcaagctggctggggtcacgctgggacagaggcgagcccaggcgaggcggcagaccatcaggcattctaccagggagaaggacaggggacccacgaaagccaccaccaccaagctggtctaccagatcttcgatactttcttcgcagagcaaattgaaaaggatgacagagaagacaaggagaacgcctttaagcgccggcgatgtggcgtctgtgaggtgtgtcagcagcctgagtgtgggaaatgtaaagcctgcaaggacatggttaaatttggtggcagtggacggagcaagcaggcttgccaagagcggaggtgtcccaatatggccatgaaggaggcagatgacgatgaggaagtcgatgataacatcccagagatgccgtcacccaaaaaaatgcaccaggggaagaagaagaaacagaacaagaatcgcatctcttgggtcggagaagccgtcaagactgatgggaagaagagttactataagaaggtgtgcattgatgcggaaaccctggaagtgggggactgtgtctctgttattccagatgattcctcaaaaccgctgtatctagcaagggtcacggcgctgtgggaggacagcagcaacgggcagatgtttcacgcccactggttctgcgctgggacagacacagtcctcggggccacgtcggaccctctggagctgttcttggtggatgaatgtgaggacatgcagctttcatatatccacagcaaagtgaaagtcatctacaaagccccctccgaaaactgggccatggagggaggcatggatcccgagtccctgctggagggggacgacgggaagacctacttctaccagctgtggtatgatcaagactacgcgagattcgagtcccctccaaaaacccagccaacagaggacaacaagttcaaattctgtgtgagctgtgcccgtctggctgagatgaggcaaaaagaaatccccagggtcctggagcagctcgaggacctggatagccgggtcctctactactcagccaccaagaacggcatcctgtaccgagttggtgatggtgtgtacctgccccctgaggccttcacgttcaacatcaagctgtccagtcccgtgaaacgcccacggaaggagcccgtggatgaggacctgtacccagagcactaccggaaatactccgactacatcaaaggcagcaacctggatgcccctgagccctaccgaattggccggatcaaagagatcttctgtcccaagaagagcaacggcaggcccaatgagactgacatcaaaatccgggtcaacaagttctacaggcctgagaacacccacaagtccactccagcgagctaccacgcagacatcaacctgctctactggagcgacgaggaggccgtggtggacttcaaggctgtgcagggccgctgcaccgtggagtatggggaggacctgcccgagtgcgtccaggtgtactccatgggcggccccaaccgcttctacttcctcgaggcctataatgcaaagagcaaaagctttgaagatcctcccaaccatgcccgtagccctggaaacaaagggaagggcaagggaaaagggaagggcaagcccaagtcccaagcctgtgagccgagcgagccagagatagagatcaagctgcccaagctgcggaccctggatgtgttttctggctgcggggggttgtcggagggattccaccaagcaggcatctctgacacgctgtgggccatcgagatgtgggaccctgcggcccaggcgttccggctgaacaaccccggctccacagtgttcacagaggactgcaacatcctgctgaagctggtcatggctggggagaccaccaactcccgcggccagcggctgccccagaagggagacgtggagatgctgtgcggcgggccgccctgccagggcttcagcggcatgaaccgcttcaattcgcgcacctactccaagttcaaaaactctctggtggtttccttcctcagctactgcgactactaccggccccggttcttcctcctggagaatgtcaggaactttgtctccttcaagcgctccatggtcctgaagctcaccctccgctgcctggtccgcatgggctatcagtgcaccttcggcgtgctgcaggccggtcagtacggcgtggcccagactaggaggcgggccatcatcctggccgcggcccctggagagaagctccctctgttcccggagccactgcacgtgtttgctccccgggcctgccagctgagcgtggtggtggatgacaagaagtttgtgagcaacataaccaggttgagctcgggtcctttccggaccatcacggtgcgagacacgatgtccgacctgccggaggtgcggaatggagcctcggcactggagatctcctacaacggggagcctcagtcctggttccagaggcagctccggggcgcacagtaccagcccatcctcagggaccacatctgtaaggacatgagtgcattggtggctgcccgcatgcggcacatccccttggccccagggtcagactggcgcgatctgcccaacatcgaggtgcggctctcagacggcaccatggccaggaagctgcggtatacccaccatgacaggaagaacggccgcagcagctctggggccctccgtggggtctgctcctgcgtggaagccggcaaagcctgcgaccccgcagccaggcagttcaacaccctcatcccctggtgcctgccccacaccgggaaccggcacaaccactgggctggcctctatggaaggctcgagtgggacggcttcttcagcacaaccgtcaccaaccccgagcccatgggcaagcagggccgcgtgctccacccagagcagcaccgtgtggtgagcgtgcgggagtgtgcccgctcccagggcttccctgacacctaccggctcttcggcaacatcctggacaagcaccggcaggtgggcaatgccgtgccaccgcccctggccaaagccattggcttggagatcaagctttgtatgttggccaaagcccgagagagtgcctcagctaaaataaaggaggaggaagctgctaaggactagttctgccctcccgtcacccctgtttctggcaccaggaatccccaacatgcactgatgttgtgtttttaacatgtcaatctgtccgttcacatgtgtggtacatggtgtttgtggccttggctgacatgaagctgttgtgtgaggttcgcttatcaactaatgatttagtgatcaaattgtgcagtactttgtgcattctggattttaaaagttttttattatgcattatatcaaatctaccactgtatgagtggaaattaagactttatgtagtttttatatgttgtaatatttcttcaaataaatctctcctataaaccacc

SEQ ID NO: 9898 - protein, 1678 aa, Homo sapiens
MAGSVPSFCTGYRLSPFGTSPPPPRPDWGGRRRLRSSPLPIGFRAKSRGACAAAAASAEASEMPARTAPARVPTLAVPAISLPDDVRRRLKDLERDSLTEKECVKEKLNLLHEFLQTEIKNQLCDLETKLRKEELSEEGYLAKVKSLLNKDLSLENGAHAYNREVNGRLENGNQARSEARRVGMADANSPPKPLSKPRTPRRSKSDGEAKPEPSPSPRITRKSTRQTTITSHFAKGPAKRKPQEESERAKSDESIKEEDKDQDEKRRRVTSRERVARPLPAEEPERAKSGTRTEKEEERDEKEEKRLRSQTKEPTPKQKLKEEPDREARAGVQADEDEDGDEKDEKKHRSQPKDLAAKRRPEEKEPEKVNPQISDEKDEDEKEEKRRKTTPKEPTEKKMARAKTVMNSKTHPPKCIQCGQYLDDPDLKYGQHPPDAVDEPQMLTNEKLSIFDANESGFESYEALPQHKLTCFSVYCKHGHLCPIDTGLIEKNIELFFSGSAKPIYDDDPSLEGGVNGKNLGPINEWWITGFDGGEKALIGFSTSFAEYILMDPSPEYAPIFGLMQEKIYISKIVVEFLQSNSDSTYEDLINKIETTVPPSGLNLNRFTEDSLLRHAQFVVEQVESYDEAGDSDEQPIFLTPCMRDLIKLAGVTLGQRRAQARRQTIRHSTREKDRGPTKATTTKLVYQIFDTFFAEQIEKDDREDKENAFKRRRCGVCEVCQQPECGKCKACKDMVKFGGSGRSKQACQERRCPNMAMKEADDDEEVDDNIPEMPSPKKMHQGKKKKQNKNRISWVGEAVKTDGKKSYYKKVCIDAETLEVGDCVSVIPDDSSKPLYLARVTALWEDSSNGQMFHAHWFCAGTDTVLGATSDPLELFLVDECEDMQLSYIHSKVKVIYKAPSENWAMEGGMDPESLLEGDDGKTYFYQLWYDQDYARFESPPKTQPTEDNKFKFCVSCARLAEMRQKEIPRVLEQLEDLDSRVLYYSATKNGILYRVGDGVYLPPEAFTFNIKLSSPVKRPRKEPVDEDLYPEHYRKYSDYIKGSNLDAPEPYRIGRIKEIFCPKKSNGRPNETDIKIRVNKFYRPENTHKSTPASYHADINLLYWSDEEAVVDFKAVQGRCTVEYGEDLPECVQVYSMGGPNRFYFLEAYNAKSKSFEDPPNHARSPGNKGKGKGKGKGKPKSQACEPSEPEIEIKLPKLRTLDVFSGCGGLSEGFHQAGISDTLWAIEMWDPAAQAFRLNNPGSTVFTEDCNILLKLVMAGETTNSRGQRLPQKGDVEMLCGGPPCQGFSGMNRFNSRTYSKFKNSLVVSFLSYCDYYRPRFFLLENVRNFVSFKRSMVLKLTLRCLVRMGYQCTFGVLQAGQYGVAQTRRRAIILAAAPGEKLPLFPEPLHVFAPRACQLSVVVDDKKFVSNITRLSSGPFRTITVRDTMSDLPEVRNGASALEISYNGEPQSWFQRQLRGAQYQPILRDHICKDMSALVAARMRHIPLAPGSDWRDLPNIEVRLSDGTMARKLRYTHHDRKNGRSSSGALRGVCSCVEAGKACDPAARQFNTLIPWCLPHTGNRHNHWAGLYGRLEWDGFFSTTVTNPEPMGKQGRVLHPEQHRVVSVRECARSQGFPDTYRLFGNILDKHRQVGNAVPPPLAKAIGLEIKLCMLAKARESASAKIKEEEAAKD

SEQ ID NO: 9899 - DNA, 802 bp, Homo sapiens
gcctgcgctgccgccgccgcgtctgctgaagcctccgagatgccggcgcgtaccgccccagcccgggtgcccacactggccgtcccggccatctcgctgcccgacgatgtccgcaggcggctcaaagatttggaaagagacagcttaacagaaaaggaatgtgtgaaggagaaattgaatctcttgcacgaatttctgcaaacagaaataaagaatcagttatgtgacttggaaaccaaattacgtaaagaagaattatccgaggagggctacctggctaaagtcaaatcccttttaaataaagatttgtccttggagaacggtgctcatgcttacaaccgggaagtgaatggacgtctagaaaacgggaaccaagcaagaagtgaagcccgtagagtgggaatggcagatgccaacagcccccccaaacccctttccaaacctcgcacgcccaggaggagcaagtccgatggagaggctaagcgttcaagagaccctcctgcctcagcctcccaagtaactgggattagagctgaaccttcacctagccccaggattacaaggaaaagcaccaggcaaaccaccatcacatctcattttgcaaagggccctgccaaacggaaacctcaggaagagtctgaaagagccaaatcggatgagtccatcaaggaagaagacaaagaccaggatgagaagagacgtagagttacatccagagaacgagttgctagaccgcttcctgcagaagaacctgaaagagcaaaatcaggaacgcgcactgaaaaggaagaagaaagagatg

SEQ ID NO: 9900 - protein, 253 aa, Homo sapiens
MPARTAPARVPTLAVPAISLPDDVRRRLKDLERDSLTEKECVKEKLNLLHEFLQTEIKNQLCDLETKLRKEELSEEGYLAKVKSLLNKDLSLENGAHAYNREVNGRLENGNQARSEARRVGMADANSPPKPLSKPRTPRRSKSDGEAKRSRDPPASASQVTGIRAEPSPSPRITRKSTRQTTITSHFAKGPAKRKPQEESERAKSDESIKEEDKDQDEKRRRVTSRERVARPLPAEEPERAKSGTRTEKEEER

SEQ ID NO: 9901 - DNA, 613 bp, Homo sapiens
tcaccatgttggccaggctggtctcgaactcctgacctcatgatccgcccgtgttggcctcccaaagtgtgggattacaggcgtaagccacctcacctggcggtacaaagaatttctgcattttcttccctggcccctagtcctgcaccgatttctccttttcgaatgtattcctcctgccaccttctctgggcaacttcgtgcgactacagaaccactgtcctgaggagctagaggcctcctctctgaccatccagagcccaaatccacagcttccccaaatttcatcagctgccacttgacgacttctccccgtctctctgaggcccggaaaccacggctggagctgccaaagtcggggagctctggtcctgcccagacccctttggaattgctggcccatcctcccactggagagctggggtgcagctcaccttggggaaggaaacctcatgcctcagagtaatttcttgtgaatgcaaagcctgggggagcgggtctttggggggcaaggagccagtcaggggcttgtttcccctcatagagctccccagacgtgcctccgcaatgcctgaaacccagacctaggctaataaacggttcaatttctgtt

SEQ ID NO: 9902 - protein, 64 aa, Homo sapiens
MIRPCWPPKVWDYRRKPPHLAVQRISAFSSLAPSPAPISPFRMYSSCHLLWATSCDYRTTVLRS

SEQ ID NO: 9903 - DNA, 1461 bp, Homo sapiens
ttttttttttttttttttttttttgagatgaagtctcgctctgttgcccaggctggagagtgcagtggtacggtctcagctcactgcaacctccacctcccaggttcaagcgattctccagcctgagcctcctgagtagctgggattacaggtgcctaccaccacgcccaggtaattttttttttttttgtatttttagtagagacggggtttcaccatgttggccaggctggtctcgaactcctgacctcatgatccgcccgtgttggcctcccaaagtgtgggattacaggcgtaagccacctcacctggcggtacaaagaatttctgcattttcttccctggcccctagtcctgcaccgatttctccttttcgaatgtattcctcctgccaccttctctgggcaacttcgtgcgactacagaaccactgtcctgaggagctagaggcctcctctctgaccatccagagcccaaatccacagcttccccaaatttcatcagctgccacttgacgacttctccccgtctctctgaggcccggaaaccacggctggaggtggggaggggatggcggctgaggtccattcctcattctcagacctcattgctcagttgcactatttggggcacagaataatcaccaaaagtgagaaaaacgagtttgggtggctggggaggactttgggactcttgatgcaaggcgcaacttgagaaaattctgggtgtgatatttgcacagacaccctcctttcaaaaacagccaccccccaagctattctcagctccacacctgcagccccagctaaggtaccaggtctcctgagcaaggcagagagaagccttgagccttctctgtgtcttctttcaagaaccccgctgtgtcttctttcaagattttttttttgagacagtttcaagattcttctttcaagttatatagaatggagcatgggggtggcagtggctagggacatttcctggggacactctcccctaaccccccagaaggacttcacaaaaacctgtggataatggaagggatgttacggtacaaacgtatatttatgtgtgtgtgtgtgtatgtgtgtgcgcgcgcgcgtgtgcacataggcgtgatgtctgtgaccctcctctcctcgtcacatttcccccagaatgaatgctgtcctgtctgctcatgtttgtgttgaagctgccaaagtcggggagctctggtcctgcccagacccctttggaattgctggcccatcctcccactggagagctggggtgcagctcaccttggggaaggaaacctcatgcctcagagtaatttcttgtgaatgcaaagcctgggggagcgggtctttggggggcaaggagccagtcaggggcttgtttcccctcatagagctccccagacgtgcctccgcaatgcctgaaacccagacctaggctaataaacggttcaatttctgtt

SEQ ID NO: 9904 - protein, 92 aa, Homo sapiens
MNAVLSAHVCVEAAKVGELWSCPDPFGIAGPSSHWRAGVQLTLGKETSCLRVISCECKAWGSGSLGGKEPVRGLFPLIELPRRASAMPETQT

SEQ ID NO: 9905 - DNA, 1087 bp, Homo sapiens
gacgccaaggcccctccggccagggccgggagccgggccggcctagccagttctgaaagccccatggccccagcaggcctctgagccccaccatgggcagcttgtactcggagtacctgaaccccaacaaggtccaggaacactataattataccaaggagacgctggaaacgcaggagacgacctcccgccaggtggcagcgacaagagctgccgcatgcttctgctcatcggggcctcgtggctcatctcgctggtcctcggtggcctgcccatccttggctggaactgcctgggccacctcgaggcctgctccactgtcctgcctctctacgccaagcattatgtgctgtgcgtggtgaccatcttctccatcatcctgttggccatcgtggccctgtacgtgcgcatctactgcgtggtccgctcaagccacgctgacatggccgccccgcagacgctagccctgctcaagacggtcaccatcgtgctaggcgtctttatcgtctgctggctgcccgccttcagcatcctccttctggactatgcctgtcccgtccactcctgcccgatcctctacaaagcccactactttttcgccgtctccaccctgaattccctgctcaaccccgtcatctacacgtggcgcagccgggacctgcggcgggaggtgcttcggccgctgcagtgctggaggccgggggtgggggtgcaaggacggaggcggggcgggaccccgggccaccacctcctgccactccgcagctccagctccctggagaggggcatgcacatgcccacgtcacccacgtttctggagggcaacacggtggtctgagggtgggggtggaccaacaaccaggccagggcagaggggttcatggagaggccactgggtgaccccagatagagacttggggctactgagccagatgcccccgccccacagacctgggtgatgttgcaaatatttcacacctggaaaggccagataaggcactgactagtcacatagcagtgttgcagtgcggtcctgagggccagtccagtggctagtgtgacccctttagaactggatcctggggag

SEQ ID NO: 9906 - protein, 89 aa, Homo sapiens
MGSLYSEYLNPNKVQEHYNYTKETLETQETTSRQVAATRAAACFCSSGPRGSSRWSSVACPSLAGTAWATSRPAPLSCLSTPSIMCCAW

SEQ ID NO: 9907 - DNA, 1422 bp, Homo sapiens
cggccgccctggggacgcagacgccaaggcccctccggccagggccgggagccgggccggcctagccagttctgaaagccccatggccccagcaggcctctgagccccaccatgggcagcttgtactcggagtacctgaaccccaacaaggtccaggaacactataattataccaaggagacgctggaaacgcaggagacgacctcccgccaggtggcctcggccttcatcgtcatcctctgttgcgccattgtggtggaaaaccttctggtgctcattgcggtggcccgaaacagcaagttccactcggcaatgtacctgtttctgggcaacctggccgcctccgatctactggcaggcgtggccttcgtagccaataccttgctctctggctctgtcacgctgaggctgacgcctgtgcagtggtttgcccgggagggctctgccttcatcacgctctcggcctctgtcttcagcctcctggccatcgccattgagcgccacgtggccattgccaaggtcaagctgtatggcagcgacaagagctgccgcatgcttctgctcatcggggcctcgtggctcatctcgctggtcctcggtggcctgcccatccttggctggaactgcctgggccacctcgaggcctgctccactgtcctgcctctctacgccaagcattatgtgctgtgcgtggtgaccatcttctccatcatcctgttggccatcgtggccctgtacgtgcgcatctactgcgtggtccgctcaagccacgctgacatggccgccccgcagacgctagccctgctcaagacggtcaccatcgtgctaggcgtctttatcgtctgctggctgcccgccttcagcatcctccttctggactatgcctgtcccgtccactcctgcccgatcctctacaaagcccactactttttcgccgtctccaccctgaattccctgctcaaccccgtcatctacacgtggcgcagccgggacctgcggcgggaggtgcttcggccgctgcagtgctggaggccgggggtgggggtgcaaggacggaggcggggcgggaccccgggccaccacctcctgccactccgcagctccagctccctggagaggggcatgcacatgcccacgtcacccacgtttctggagggcaacacggtggtctgagggtgggggtggaccaacaaccaggccagggcagaggggttcatggagaggccactgggtgaccccagatagagacttggggctactgagccagatgcccccgccccacagacctgggtgatgttgcaaatatttcacacctggaaaggccagataaggcactgactagtcacatagcagtgttgcagtgcggtcctgagggccagtccagtggctagtgtgacccctttagaactggatcctggggag

SEQ ID NO: 9908 - protein, 353 aa, Homo sapiens; identical to SEQ ID NO: 1529

SEQ ID NO: 9909 - DNA, 789 bp, Homo sapiens
agcagctgcaccgcgagttccgcgcctggccgtgtcgccccacgagggggactgtgggctcagcgcgtggggcccggagcatctgacaaggacagagacagaggagggggtggaaatccccgggtgagtcaacccgtgcctgagaagggggcgagttccgacgctccgcccggctcggggccacgcgaggtccgcgccacgcgcgccttcacccacgacccatccctgagccggagttgaaagaggaggcgtctgagccacgcagtcactttctctttccttacaaaacaaagccacgccccccgccgggggaccggaggaggcaaacaacttggggaaaccgaggcagaaagcccgacgtccgaccgccctcctctcctcccctttccggcggcggctgcaatgaattccagatgtgaccggccggctggccggggcgcacgcgggggccgacaggagctgcacggagggccctttgtccgccccccccacccgatctctcactctgcccctcccagcccccacccgtgagaaccggccggcgcgaaacgtcacgcagcctggtgacgtcacagtactcctggccaggtggcctcaacctgaaacaactgtcttcaaccccaggttacctctgggcttacccctgggaccctggacttggaagaaaacacgaggtcacatttattgactcaacaaagagccttggaagtacctactaggtgtcaacgcagcaaataggcattaagtgcctactgtgtgtccacccaacaaataaattcctactaagtg

SEQ ID NO: 9910 - protein, 42 aa, Homo sapiens
MNSRCDRPAGRGARGGRQELHGGPFVRPPHPISHSAPPSPHP

SEQ ID NO: 9911 - DNA, 1401 bp, Homo sapiens
ggctgaattgggccagagaggtctcattggctgaattcctgcaccggctcgtcggaggcgggacccaaagtaggctaggcctacggaagctgggtcttcttgctgtgagcgcggagtcgcggcgggtagggcggcgtcgcgtgcgtgacgtcatccagcggcgcctcgcgaggctccagtggccttgacctcccgcggcgtgggaggctgcgcggcgatgctgcagttcgtccgggccggggcgcgggcctggcttcggcctaccggcagccagggcctgagttccctggcggaagaggcagcgcgtgcgaccgagaacccggagcaggtggcgagcgagggtctcccggagcccgtgctgcgcaaagtcgagctcccggtacccactcatcgacgcccagtgcaggcctgggtcgagtccttgcggggcttcgagcaggagcgcgtgggcctggccgacctgcaccccgatgttttcgccaccgcgcccaggctggacatactgcaccaggttgctatgtggcagaagaacttcaagagaattagctatgccaagaccaagacgagagccgaggtgcggggcggtggccggaagccttggccgcagaaaggcactgggcgggcccggcatggcagcatccgctctccgctctggcgaggaggaggtgttgcccatggcccccggggccccacaagttactactacatgctgcccatgaaggtgcgggcgctgggtctcaaagtggcactgaccgtcaagctggcccaggacgacctgcacatcatggactccctagagctgcccaccggagacccacagtacctgacagagctggcgcactaccgccgctggggggactccgtactcctcgtggacttaacacacgaggagatgccacagagcatcgtggaggccacctctaggcttaagaccttcaacttgatcccggctgttggcctaaatgtgcacagcatgctcaagcaccagacgctggtcctgacgctgcccaccgtcgccttcctggaggacaagctgctctggcaggactcacgttacagacccctctaccccttcagcctgccctacagcgacttcccccgacccctaccccacgctacccagggcccagcggccaccccgtaccactgttgatgtgaagcacctcttctgagccaggccgagcccctggccgacttgggagcctcaggcccacgcccacccttcgaggaaggtgtcacctggaccccttcattccacggaggaagctgaggccacagggagcggccatcgccattgggaaggggcgactccacggaaagcccagacgggcttctgcatccattccctctttttgtttttaaaataaattgtatttttgaatcaaggaggataaagataac

SEQ ID NO: 9912 - protein, 311 aa, Homo sapiens [sequence omitted]

SEQ ID NO: 9913 - DNA, 1406 bp, Homo sapiens
cgggacccaaagtaggctaggcctacggaagctgggtcttcttgctgtgaggtcgcgttccccagtgttacggagggtccttgaggcaggagtgaaaattgggtctgggggttagtcctggggtggaggtctgggcacgccgggtcggaccccctccatcttcggttttgcacaccccgctttccagcgcggagtcgcggcgggtagggcggcgtcgcgtgcgtgacgtcatccagcggcgcctcgcgaggctccagtggccttgacctcccgcggcgtgggaggctgcgcggcgatgctgcagttcgtccgggccggggcgcgggcctggcttcggcctaccggcagccagggcctgagttccctggcggaagaggcagcgcgtgcgaccgagaacccggagcaggtggcgagcgagggtctcccggagcccgtgctgcgcaaagtcgagctcccggtacccactcatcgacgcccagtgcaggcctgggtcgagtccttgcggggcttcgagcaggagcgcgtgggcctggccgacctgcaccccgatgttttcgccaccgcgcccaggctggacatactgcaccaggttgctatgtggcagaagaacttcaagagaattagctatgccaagaccaagacgagagccgaggtgcggggcggtggccggaagccttggccgcagaaaggcactgggcgggcccggcatggcagcatccgctctccgctctggcgaggaggaggtgttgcccatggcccccggggccccacaagttactactacatgctgcccatgaaggtgcgggcgctgggtctcaaagtggcactgaccgtcaagctggcccaggacgacctgcacatcatggactccctagagctgcccaccggagacccacagtacctgacagagctggcgcactaccgccgctggggggactccgtactcctcgtggacttgtgagggcacagggcagagcaggggcagggggccctgagctccgtactctgagggttcaacccccactccctggcctctcttacagaacacacgaggagatgccacagagcatcgtggaggccacctctaggcttaagaccttcaacttgatcccggctgttggtgagcaaagagcccaggcccctagagtgcgcatgtgcaggctccgctgttagaatcacagcggttcaaatccggcatctggtcgctgagtggcctcaggcagtgaccacgctcccggacccaaccttcagcttgcccaaagcaataatctttcctaaagaagtgcttggctggggatggtggctcacgcttgtaatcccagtactttgggaggccaaggcagtctgggcaatatagtgaggctcccatctgtactaaaaataaaaaagttaggcgtggcgatgtg

SEQ ID NO: 9914 - protein, 221 aa, Homo sapiens [sequence omitted]

SEQ ID NO: 9915 - DNA, 1447 bp, Homo sapiens
cgggacccaaagtaggctaggcctacggaagctgggtcttcttgctgtgaggtcgcgttccccagtgttacggagggtccttgaggcaggagtgaaaattgggtctgggggttagtcctggggtggaggtctgggcacgccgggtcggaccccctccatcttcggttttgcacaccccgctttccagcgcggagtcgcggcgggtagggcggcgtcgcgtgcgtgacgtcatccagcggcgcctcgcgaggctccagtggccttgacctcccgcggcgtgggaggctgcgcggcgatgctgcagttcgtccgggccggggcgcgggcctggcttcggcctaccggcagccagggcctgagttccctggcggaagaggcagcgcgtgcgaccgagaacccggagcaggtggcgagcgagggtctcccggagcccgtgctgcgcaaagtcgagctcccggtacccactcatcgacgcccagtgcaggcctgggtcgagtccttgcggggcttcgagcaggagcgcgtgggcctggccgacctgcaccccgatgttttcgccaccgcgcccaggctggacatactgcaccaggttgctatgtggcagaagaacttcaagagaattagctatgccaagaccaagacgagagccgaggtgcggggcggtggccggaagccttggccgcagaaaggcactgggcgggcccggcatggcagcatccgctctccgctctggcgaggaggaggtgttgcccatggcccccggggccccacaagttactactacatgctgcccatgaaggtgcgggcgctgggtctcaaagtggcactgaccgtcaagctggcccaggacgacctgcacatcatggactccctagagctgcccaccggagacccacagtacctgacagagctggcgcactaccgccgctggggggactccgtactcctcgtggacttaacacacgaggagatgccacagagcatcgtggaggccacctctaggcttaagaccttcaacttgatcccggctgttggtgagcaaagagcccaggcccctagagtgcgcatgtgcaggctccgctgttagaatcacagcggttcaaatccggcatctggtcgctgagtggcctcaggcagtgaccacgctcccggacccaaccttcagcttgcccaaagcaataatctttcctaaagaagtgcttggctggggatggtggctcacgcttgtaatcccagtactttgggaggccaaggcagtctgggcaatatagtgaggctcccatctgtactaaaaataaaaaagttaggcgtggcgatgtgcacctgtagtcccagctactcgggggctgagccaggcggatagcttgagctcagggggccaaggctgcagtgagtcatgatcgcaccactgcacccaaacctggggagagagctagactcttgtctc

SEQ ID NO: 9916 - protein, 263 aa, Homo sapiens; identical to SEQ ID NO: 1535

SEQ ID NO: 9917 - DNA, 1533 bp, Homo sapiens
cgggacccaaagtaggctaggcctacggaagctgggtcttcttgctgtgaggtcgcgttccccagtgttacggagggtccttgaggcaggagtgaaaattgggtctgggggttagtcctggggtggaggtctgggcacgccgggtcggaccccctccatcttcggttttgcacaccccgctttccagcgcggagtcgcggcgggtagggcggcgtcgcgtgcgtgacgtcatccagcggcgcctcgcgaggctccagtggccttgacctcccgcggcgtgggaggctgcgcggcgatgctgcagttcgtccgggccggggcgcgggcctggcttcggcctaccggcagccagggcctgagttccctggcggaagaggcagcgcgtgcgaccgagaacccggagcaggtggcgagcgagggtctcccggagcccgtgctgcgcaaagtcgagctcccggtacccactcatcgacgcccagtgcaggcctgggtcgagtccttgcggggcttcgagcaggagcgcgtgggcctggccgacctgcaccccgatgttttcgccaccgcgcccaggctggacatactgcaccaggttgctatgtggcagaagaacttcaagagaattagctatgccaagaccaagacgagagccgaggtgcggggcggtggccggaagccttggccgcagaaaggcactgggcgggcccggcatggcagcatccgctctccgctctggcgaggaggaggtgttgcccatggcccccggggccccacaagttactactacatgctgcccatgaaggtgcgggcgctgggtctcaaagtggcactgaccgtcaagctggcccaggacgacctgcacatcatggactccctagagctgcccaccggagacccacagtacctgacagagctggcgcactaccgccgctggggggactccgtactcctcgtggacttgtgagggcacagggcagagcaggggcagggggccctgagctccgtactctgagggttcaacccccactccctggcctctcttacagaacacacgaggagatgccacagagcatcgtggaggccacctctaggcttaagaccttcaacttgatcccggctgttggtgagcaaagagcccaggcccctagagtgcgcatgtgcaggctccgctgttagaatcacagcggttcaaatccggcatctggtcgctgagtggcctcaggcagtgaccacgctcccggacccaaccttcagcttgcccaaagcaataatctttcctaaagaagtgcttggctggggatggtggctcacgcttgtaatcccagtactttgggaggccaaggcagtctgggcaatatagtgaggctcccatctgtactaaaaataaaaaagttaggcgtggcgatgtgcacctgtagtcccagctactcgggggctgagccaggcggatagcttgagctcagggggccaaggctgcagtgagtcatgatcgcaccactgcacccaaacctggggagagagctagactcttgtctc

SEQ ID NO: 9918 - protein, 221 aa, Homo sapiens [sequence omitted]

SEQ ID NO: 9919 - DNA, 2409 bp, Homo sapiens
cgggacccaaagtaggctaggcctacggaagctgggtcttcttgctgtgaggtcgcgttccccagtgttacggagggtccttgaggcaggagtgaaaattgggtctgggggttagtcctggggtggaggtctgggcacgccgggtcggaccccctccatcttcggttttgcacaccccgctttccagcgcggagtcgcggcgggtagggcggcgtcgcgtgcgtgacgtcatccagcggcgcctcgcgaggctccagtggccttgacctcccgcggcgtgggaggctgcgcggcgatgctgcagttcgtccgggccggggcgcgggcctggcttcggcctaccggcagccagggcctgagttccctggcggaagaggcagcgcgtgcgaccgagaacccggagcaggtggcgagcgagggtctcccggagcccgtgctgcgcaaagtcgagctcccggtacccactcatcgacgcccagtgcaggcctgggtcgagtccttgcggggcttcgagcaggagcgcgtgggcctggccgacctgcaccccgatgttttcgccaccgcgcccaggctggacatactgcaccaggttgctatgtggcagaagaacttcaagagaattagctatgccaagaccaagacgagagccgaggtgcggggcggtggccggaagccttggccgcagaaaggcactgggcgggcccggcatggcagcatccgctctccgctctggcgaggaggaggtgttgcccatggcccccggggccccacaagttactactacatgctgcccatgaaggtgcgggcgctgggtctcaaagtggcactgaccgtcaagctggcccaggacgacctgcacatcatggactccctagagctgcccaccggagacccacagtacctgacagagctggcgcactaccgccgctggggggactccgtactcctcgtggacttaacacacgaggagatgccacagagcatcgtggaggccacctctaggcttaagaccttcaacttgatcccggctgttggtgagcaaagagcccaggcccctagagtgcgcatgtgcaggctccgctgttagaatcacagcggttcaaatccggcatctggtcgctgagtggcctcaggcagtgaccacgctcccggacccaaccttcagcttgcccaaagcaataatctttcctaaagaagtgcttggctggggatggtggctcacgcttgtaatcccagtactttgggaggccaaggcagtctgggcaatatagtgaggctcccatctgtactaaaaataaaaaagttaggcgtggcgatgtgcacctgtagtcccagctactcgggggctgagccaggcggatagcttgagctcagggggccaaggctgcagtgagtcatgatcgcaccactgcacccaaacctggggagagagctagactcttgtctcaaaaaaaaaaaaaaaaaaaaaaaaaaagctccaaagtcacctctgtcaaagccacagtctgttccttccacagccacaagatggcgacatgagcctaagtcaagtcctgtccctcaacccacgcccctcgctggcttccccacctctctcaggatgaaagcccaagtcatcagggtggcacgtcaggccctgcacgatgtgccccgtcacctccctgccctcccgtcatttgccctgggtctcccccaccagaatgggagccaggagtcccagccaggcacaggaccgagcctggctctcggtcagcaggtgatgagctgggagcagctccttggccagaggcttacaggcaacaagcggccaggcagggtctggccccgggctgctgggctcacaaagtcacactagaccacagtgacgatctctgtaagcacaaagggactccgatgtgggtggggtgaggagagaggcagccccggcctgaccggccccccgccccgcccccaccccgcccccaggcctaaatgtgcacagcatgctcaagcaccagacgctggtcctgacgctgcccaccgtcgccttcctggaggacaagctgctctggcaggactcacgttacagacccctctaccccttcagcctgccctacagcgacttcccccgacccctaccccacgctacccagggcccagcggccaccccgtaccactgttgatgtgaagcacctcttctgagccaggccgagcccctggccgacttgggagcctcaggcccacgcccacccttcgaggaaggtgtcacctggaccccttcattccacggaggaagctgaggccacagggagcggccatcgccattgggaaggggcgactccacggaaagcccagacgggcttctgcatccattccctctttttgtttttaaaataaattgtatttttgaatcaaggaggataaagataa

SEQ ID NO: 9920 - protein, 263 aa, Homo sapiens; identical to SEQ ID NO: 1535

SEQ ID NO: 9921 - DNA, 1479 bp, Homo sapiens
cgggacccaaagtaggctaggcctacggaagctgggtcttcttgctgtgaggtcgcgttccccagtgttacggagggtccttgaggcaggagtgaaaattgggtctgggggttagtcctggggtggaggtctgggcacgccgggtcggaccccctccatcttcggttttgcacaccccgctttccagcgcggagtcgcggcgggtagggcggcgtcgcgtgcgtgacgtcatccagcggcgcctcgcgaggctccagtggccttgacctcccgcggcgtgggaggctgcgcggcgatgctgcagttcgtccgggccggggcgcgggcctggcttcggcctaccggcagccagggcctgagttccctggcggaagaggcagcgcgtgcgaccgagaacccggagcaggtggcgagcgagggtctcccggagcccgtgctgcgcaaagtcgagctcccggtacccactcatcgacgcccagtgcaggcctgggtcgagtccttgcggggcttcgagcaggagcgcgtgggcctggccgacctgcaccccgatgttttcgccaccgcgcccaggctggacatactgcaccaggttgctatgtggcagaagaacttcaagagaattagctatgccaagaccaagacgagagccgaggtgcggggcggtggccggaagccttggccgcagaaaggcactgggcgggcccggcatggcagcatccgctctccgctctggcgaggaggaggtgttgcccatggcccccggggccccacaagttactactacatgctgcccatgaaggtgcgggcgctgggtctcaaagtggcactgaccgtcaagctggcccaggacgacctgcacatcatggactccctagagctgcccaccggagacccacagtacctgacagagctggcgcactaccgccgctggggggactccgtactcctcgtggacttaacacacgaggagatgccacagagcatcgtggaggccacctctaggcttaagaccttcaacttgatcccggctgttggcctaaatgtgcacagcatgctcaagcaccagacgctggtcctgacgctgcccaccgtcgccttcctggaggacaagctgctctggcaggactcacgttacagacccctctaccccttcagcctgccctacagcgacttcccccgacccctaccccacgctacccagggcccagcggccaccccgtaccactgttgatgtgaagcacctcttctgagccaggccgagcccctggccgacttgggagcctcaggcccacgcccacccttcgaggaaggtgtcacctggaccccttcattccacggaggaagctgaggccacagggagcggccatcgccattgggaaggggcgactccacggaaagcccagacgggcttctgcatccattccctctttttgtttttaaaataaattgtatttttgaatcaaggaggataaagataac

SEQ ID NO: 9922 - protein, 311 aa, Homo sapiens [sequence omitted]

SEQ ID NO: 9923 - DNA, 1741 bp, Homo sapiens
tgtgaggtcgcgttccccagtgttacggagggtccttgaggcaggagtgaaaattgggtctgggggttagtcctggggtggaggtctgggcacgccgggtcggaccccctccatcttcggttttgcacaccccgctttccagcgcggagtcgcggcgggtagggcggcgtcgcgtgcgtgacgtcatccagcggcgcctcgcgaggctccagtggccttgacctcccgcggcgtgggaggctgcgcggcgatgctgcagttcgtccgggccggggcgcgggcctggcttcggcctaccggcagccagggcctgagttccctggcggaagaggcagcgcgtgcgaccgagaacccggagcaggtggcgagcgagggtaaggcaaccggggtggctccaggaggggcggcgacagagaggtctgacccttgaccctaacctctgacccccgcaatcgctccaggtctcccggagcccgtgctgcgcaaagtcgagctcccggtacccactcatcgacgcccagtgcaggcctgggtcgagtccttgcggggcttcgagcaggagcgcgtgggcctggccgacctgcaccccgatgttttcgccaccgcgcccaggctggacatactgcaccaggttgctatgtggcagaagaacttcaagagaattgtgagtgcctaaatggagcaaggtggtgggaaggagcttcctggggaggttggggataggacccagaggaagcccatcgctgggttttctctggactgctcggctggggcctcatctgtctcctgaactattcaccgatgggtccatttttggttctcttttttttgtttgtttttgagatggagatggagtctcactctgtcacccaggctggagtgcagtggcgcaatcttggttcactgcaacctccgcttcctgggttcaagcgattctcctgcctctgcctcctgagtagctgggattacaggtgtgcaccaccatgcaggctaatttttgtatttttagtagagatggagtttcaccatgttggtcaggctggtctcaaactcctgacctcaaggaacctacctgccttggcctcccaaagtgctgggattacaggcgtgagccaccgtgcccagctcattttcagttgttttctgatcactcactgatgtgggcattgtggtgggtgagaggatatagcagggaccacgaggacaaaacaggcaaggtccggctgtgtgcaagtggctcaggcctgtaatcccagcactggaagctgaggtgggtgggttgcttggggccaggaaagaccagcctgggaaacagcaagacccagtctctaccccttcccccacaaccccaagaaaaagatgggcaaagtccctattctaatgaaggtcacagtgtcatgggaggagaagtgaaggtgagtcagatggtcatacgtaatgtgtaattatgagcatgtcccagagaatgggacgttcaaccttgggtctactgtagaagctaaccagatcaaggaggcagtggggctagtgtggagataacaggaacagggtgtgcaaaggccctgtggcagggaccacaaggaagccagtgttgccacagaggccagtgggagcagtggggaggagtctgggttttgtgccaagaacattgaagaatccattaccagtcagggtcttatccatccaccccagaggtctggccagtcctccccctgctcacaccttccctggctccccatca

SEQ ID NO: 9924 - protein, 59 aa, Homo sapiens
MLQFVRAGARAWLRPTGSQGLSSLAEEAARATENPEQVASEGKATGVAPGGAATERSDP

SEQ ID NO: 9925 - DNA, 880 bp, Homo sapiens
tgtgaggtcgcgttccccagtgttacggagggtccttgaggcaggagtgaaaattgggtctgggggttagtcctggggtggaggtctgggcacgccgggtcggaccccctccatcttcggttttgcacaccccgctttccagcgcggagtcgcggcgggtagggcggcgtcgcgtgcgtgacgtcatccagcggcgcctcgcgaggctccagtggccttgacctcccgcggcgtgggaggctgcgcggcgatgctgcagttcgtccgggccggggcgcgggcctggcttcggcctaccggcagccagggcctgagttccctggcggaagaggcagcgcgtgcgaccgagaacccggagcaggtggcgagcgagggtctcccggagcccgtgctgcgcaaagtcgagctcccggtacccactcatcgacgcccagtgcaggcctgggtcgagtccttgcggggcttcgagcaggagcgcgtgggcctggccgacctgcaccccgatgttttcgccaccgcgcccaggctggacatactgcaccaggttgctatgtggcagaagaacttcaagagaattagctatgccaagacccctaccccacgctacccagggcccagcggccaccccgtaccactgttgatgtgaagcacctcttctgagccaggccgagcccctggccgacttgggagcctcaggcccacgcccacccttcgaggaaggtgtcacctggaccccttcattccacggaggaagctgaggccacagggagcggccatcgccattgggaaggggcgactccacggaaagcccagacgggcttctgcatccattccctctttttgtttttaaaataaattgtatttttgaatcaaggaggat

SEQ ID NO: 9926 - protein, 131 aa, Homo sapiens
MLQFVRAGARAWLRPTGSQGLSSLAEEAARATENPEQVASEGLPEPVLRKVELPVPTHRRPVQAWVESLRGFEQERVGLADLHPDVFATAPRLDILHQVAMWQKNFKRISYAKTPTPRYPGPSGHPVPLLM

SEQ ID NO: 9927 - DNA, 972 bp, Homo sapiens
tgtgaggtcgcgttccccagtgttacggagggtccttgaggcaggagtgaaaattgggtctgggggttagtcctggggtggaggtctgggcacgccgggtcggaccccctccatcttcggttttgcacaccccgctttccagcgcggagtcgcggcgggtagggcggcgtcgcgtgcgtgacgtcatccagcggcgcctcgcgaggctccagtggccttgacctcccgcggcgtgggaggctgcgcggcgatgctgcagttcgtccgggccggggcgcgggcctggcttcggcctaccggcagccagggcctgagttccctggcggaagaggcagcgcgtgcgaccgagaacccggagcaggtggcgagcgagggtctcccggagcccgtgctgcgcaaagtcgagctcccggtacccactcatcgacgcccagtgcaggcctgggtcgagtccttgcggggcttcgagcaggagcgcgtgggcctggccgacctgcaccccgatgttttcgccaccgcgcccaggctggacatactgcaccaggttgctatgtggcagaagaacttcaagagaattagctatgccaagaccaagacgagagccgaggtgcggggcggtggccggaagccttggccgcagaaaggcactgggcgggcccggcatggcagcatccgctctccgctctggcgaggaggaggtgttgcccatgcggccaccccgtaccactgttgatgtgaagcacctcttctgagccaggccgagcccctggccgacttgggagcctcaggcccacgcccacccttcgaggaaggtgtcacctggaccccttcattccacggaggaagctgaggccacagggagcggccatcgccattgggaaggggcgactccacggaaagcccagacgggcttctgcatccattccctctttttgtttttaaaataaattgtatttttgaatcaaggaggat

SEQ ID NO: 9928 - protein, 160 aa, Homo sapiens
MLQFVRAGARAWLRPTGSQGLSSLAEEAARATENPEQVASEGLPEPVLRKVELPVPTHRRPVQAWVESLRGFEQERVGLADLHPDVFATAPRLDILHQVAMWQKNFKRISYAKTKTRAEVRGGGRKPWPQKGTGRARHGSIRSPLWRGGGVAHAATPYHC

SEQ ID NO: 9929 - DNA, 1442 bp, Homo sapiens
ggtcgcgttccccagtgttacggagggtccttgaggcaggagtgaaaattgggtctgggggttagtcctggggtggaggtctgggcacgccgggtcggaccccctccatcttcggttttgcacaccccgctttccagcgcggagtcgcggcgggtagggcggcgtcgcgtgcgtgacgtcatccagcggcgcctcgcgaggctccagtggccttgacctcccgcggcgtgggaggctgcgcggcgatgctgcagttcgtccgggccggggcgcgggcctggcttcggcctaccggcagccaggtgaggccaggggctggaggcgtggtcgaaggatgaaatttgggggtgtccaggggtcgtctctcactttcgcccaacccttgcagggcctgagttccctggcggaagaggcagcgcgtgcgaccgagaacccggagcaggtggcgagcgagggtctcccggagcccgtgctgcgcaaagtcgagctcccggtacccactcatcgacgcccagtgcaggcctgggtcgagtccttgcggggcttcgagcaggagcgcgtgggcctggccgacctgcaccccgatgttttcgccaccgcgcccaggctggacatactgcaccaggttgctatgtggcagaagaacttcaagagaattagctatgccaagaccaagacgagagccgaggtgcggggcggtggccggaagccttggccgcagaaaggcactgggcgggcccggcatggcagcatccgctctccgctctggcgaggaggaggtgttgcccatggcccccggggccccacaagttactactacatgctgcccatgaaggtgcgggcgctgggtctcaaagtggcactgaccgtcaagctggcccaggacgacctgcacatcatggactccctagagctgcccaccggagacccacagtacctgacagagctggcgcactaccgccgctggggggactccgtactcctcgtggacttgtgagggcacagggcagagcaggggcagggggccctgagctccgtactctgagggttcaacccccactccctggcctctcttacagaacacacgaggagatgccacagagcatcgtggaggccacctctaggcttaagaccttcaacttgatcccggctgttggtgagcaaagagcccaggcccctagagtgcgcatgtgcaggctccgctgttagaatcacagcggttcaaatccggcatctggtcgctgagtggcctcaggcagtgaccacgctcccggacccaaccttcagcttgcccaaagcaataatctttcctaaagaagtgcttggctggggatggtggctcacgcttgtaatcccagtactttgggaggccaaggcagtctgggcaatatagtgaggctcccatctgtactaaaaataaaaaagttaggcgtggcgatgtg

SEQ ID NO: 9930 - protein, 220 aa, Homo sapiens
MKFGGVQGSSLTFAQPLQGLSSLAEEAARATENPEQVASEGLPEPVLRKVELPVPTHRRPVQAWVESLRGFEQERVGLADLHPDVFATAPRLDILHQVAMWQKNFKRISYAKTKTRAEVRGGGRKPWPQKGTGRARHGSIRSPLWRGGGVAHGPRGPTSYYYMLPMKVRALGLKVALTVKLAQDDLHIMDSLELPTGDPQYLTELAHYRRWGDSVLLVDL

SEQ ID NO: 9931 - DNA, 1569 bp, Homo sapiens
ggtcgcgttccccagtgttacggagggtccttgaggcaggagtgaaaattgggtctgggggttagtcctggggtggaggtctgggcacgccgggtcggaccccctccatcttcggttttgcacaccccgctttccagcgcggagtcgcggcgggtagggcggcgtcgcgtgcgtgacgtcatccagcggcgcctcgcgaggctccagtggccttgacctcccgcggcgtgggaggctgcgcggcgatgctgcagttcgtccgggccggggcgcgggcctggcttcggcctaccggcagccaggtgaggccaggggctggaggcgtggtcgaaggatgaaatttgggggtgtccaggggtcgtctctcactttcgcccaacccttgcagggcctgagttccctggcggaagaggcagcgcgtgcgaccgagaacccggagcaggtggcgagcgagggtctcccggagcccgtgctgcgcaaagtcgagctcccggtacccactcatcgacgcccagtgcaggcctgggtcgagtccttgcggggcttcgagcaggagcgcgtgggcctggccgacctgcaccccgatgttttcgccaccgcgcccaggctggacatactgcaccaggttgctatgtggcagaagaacttcaagagaattagctatgccaagaccaagacgagagccgaggtgcggggcggtggccggaagccttggccgcagaaaggcactgggcgggcccggcatggcagcatccgctctccgctctggcgaggaggaggtgttgcccatggcccccggggccccacaagttactactacatgctgcccatgaaggtgcgggcgctgggtctcaaagtggcactgaccgtcaagctggcccaggacgacctgcacatcatggactccctagagctgcccaccggagacccacagtacctgacagagctggcgcactaccgccgctggggggactccgtactcctcgtggacttgtgagggcacagggcagagcaggggcagggggccctgagctccgtactctgagggttcaacccccactccctggcctctcttacagaacacacgaggagatgccacagagcatcgtggaggccacctctaggcttaagaccttcaacttgatcccggctgttggtgagcaaagagcccaggcccctagagtgcgcatgtgcaggctccgctgttagaatcacagcggttcaaatccggcatctggtcgctgagtggcctcaggcagtgaccacgctcccggacccaaccttcagcttgcccaaagcaataatctttcctaaagaagtgcttggctggggatggtggctcacgcttgtaatcccagtactttgggaggccaaggcagtctgggcaatatagtgaggctcccatctgtactaaaaataaaaaagttaggcgtggcgatgtgcacctgtagtcccagctactcgggggctgagccaggcggatagcttgagctcagggggccaaggctgcagtgagtcatgatcgcaccactgcacccaaacctggggagagagctagactcttgtctc

SEQ ID NO: 9932 - protein, 220 aa, Homo sapiens; identical to SEQ ID NO: 9930

SEQ ID NO: 9933 - DNA, 512 bp, Homo sapiens
gcgttccccagtgttacggagggtccttgaggcaggagtgaaaattgggtctgggggttagtcctggggtggaggtctgggcacgccgggtcggaccccctccatcttcggttttgcacaccccgcgtcgccttcctggaggacaagctgctctggcaggactcacgttacagacccctctaccccttcagcctgccctacagcgacttcccccgacccctaccccacgctacccagggcccagcggccaccccgtaccactgttgatgtgaagcacctcttctgagccaggccgagcccctggccgacttgggagcctcaggcccacgcccacccttcgaggaaggtgtcacctggaccccttcattccacggaggaagctgaggccacagggagcggccatcgccattgggaaggggcgactccacggaaagcccagacgggcttctgcatccattccctctttttgtttttaaaataaattgtatttttgaatcaaggaggataaagat

SEQ ID NO: 9934 - protein, 78 aa, Homo sapiens
GRSENWVWGLVLGWRSGHAGSDPLHLRFCTPRVAFLEDKLLWQDSRYRPLYPFSLPYSDFPRPLPHATQGPAATPYHC

SEQ ID NO: 9935 - DNA, 812 bp, Homo sapiens
ggaggatacaacaggcggtgaggattgcattaggtccatggcccctgcccccacccagctctgcccgccggctcactcacagagcacattcacggtcaccttgcgggtgacctccccttgagtgctcctggcccgacagaggaagtcactctgaaaactcaggtttacacaacatctacttgtacaatcaagcacacactctcaggctgcatgaagtactgtcgcagacaggactgcaaaccctctcaggggtgagaatggctggcagcagtgctcaggagagggatgtggcaggagtcagctcctaggaagtgccagcgcccacgcacctgtgagctcctggagtctgactcaccgggtggagaaacggaggctgtagaaatacagcactttcccaagggtacaagcccaaagtcatcgtgactcctgaaatcccgctcttcatccctctgccactcagttcaccattacagccctcgctcacctgggcgcggtggcgaaaacatcggggtgcaggtcggccaggcccacgcgctcctgctcgaagccccgcaaggactcgacccaggcctgcactgggcgtcgatgagtgggtaccgggagctcgactttgcgcagcacgggctccgggagacctggagcgattgcgggggtcagaggttagggtcaagggtcagacctctctgtcgccgcccctcctggagccaccccggttgccttaccctcgctcgccacctgctccgggttctcggtcgcacgcgctgcctcttccgccagggaactcaggccctgcaagggttgggcgaaagtga

SEQ ID NO: 9936 - protein, 45 aa, Homo sapiens
MWQESAPRKCQRPRTCELLESDSPGGETEAVEIQHFPKGTSPKSS

SEQ ID NO: 9937 - DNA, 1065 bp, Homo sapiens
tccaggtctcccggagcccgtgctgcgcaaagtcgagctcccggtacccactcatcgacgcccagtgcaggcctgggtcgagtccttgcggggcttcgagcaggagcgcgtgggcctggccgacctgcaccccgatgttttcgccaccgcgcccaggctggacatactgcaccaggttgctatgtggcagaagaacttcaagagaattagctatgccaagaccaagacgagagccgaggtgcggggcggtggccggaagccttggccgcagaaaggcactgggcgggcccggcatggcagcatccgctctccgctctggcgaggaggaggtgttgcccatggcccccggggccccacaagttactactacatgctgcccatgaaggtgcgggcgctgggtctcaaagtggcactgaccgtcaagctggcccaggacgacctgcacatcatggactccctagagctgcccaccggagacccacagtacctgacagagctggcgcactaccgccgctggggggactccgtactcctcgtggacttaacacacgaggagatgccacagagcatcgtggaggccacctctaggcttaagaccttcaacttgatcccggctgttggcctaaatgtgcacagcatgctcaagcaccagacgctggtcctgacgctgcccaccgtcgccttcctggaggacaagctgctctggcaggactcacgttacagacccctctaccccttcagcctgccctacagcgacttcccccgacccctaccccacgctacccagggcccagcggccaccccgtaccactgttgatgtgaagcacctcttctgagccaggccgagcccctggccgacttgggagcctcaggcccacgcccacccttcgaggaaggtgtcacctggaccccttcattccacggaggaagctgaggccacagggagcggccatcgccattgggaaggggcgactccacggaaagcccagacgggcttctgcatccattccctctttttgtttttaaaataaattgtatttttgaatcaaggaggataaagataac

SEQ ID NO: 9938 - protein, 211 aa, Homo sapiens
MWQKNFKRISYAKTKTRAEVRGGGRKPWPQKGTGRARHGSIRSPLWRGGGVAHGPRGPTSYYYMLPMKVRALGLKVALTVKLAQDDLHIMDSLELPTGDPQYLTELAHYRRWGDSVLLVDLTHEEMPQSIVEATSRLKTFNLIPAVGLNVHSMLKHQTLVLTLPTVAFLEDKLLWQDSRYRPLYPFSLPYSDFPRPLPHATQGPAATPYHC

SEQ ID NO: 9939 - DNA, 362 bp, Homo sapiens
aaaaaaaaaaaaaaaaagctccaaagtcacctctgtcaaagccacagtctgttccttccacagccacaagatggcgacatgagcctaagtcaagtcctgtccctcaacccacgcccctcgctggcttccccacctcttctgagccaggccgagcccctggccgacttgggagcctcaggcccacgcccacccttcgaggaaggtgtcacctggaccccttcattccacggaggaagctgaggccacagggagcggccatcgccattgggaaggggcgactccacggaaagcccagacgggcttctgcatccattccctctttttgtttttaaaataaattgtatttttgaatcaaggaggat

SEQ ID NO: 9940 - protein, 53 aa, Homo sapiens
MSLSQVLSLNPRPSLASPPLLSQAEPLADLGASGPRPPFEEGVTWTPSFHGGS

SEQ ID NO: 9941 - DNA, 1336 bp, Homo sapiens
ctgggagctgtaaagacgcctccgcggccaaggccgaaaggggaagcgaggaggccgccggggtgagtgccctcgggtgtagagagaggacgccgatttccccggacgtggtgagaccgcgcttcgtcactcccacggttagcggtcgccgggaggtgcctggctctgctctggccgcttctcgagaaatgcccgtgtcagctaggtgtggacgtgacctagggggaggggcatccctcagtggagggagcccggggaggattcctgggcccccacccaggcagggggctcatccactcgattaaagaggcctgcgtaagctggagagggaggacttgagttcggaccccctcgcagcctggagtctcagtttaccgctttgtgaaatggacacaataacagtctccactctccggggaagttggcagtatttaaaagtacttaataaaccgcttagcgcggtgtagaccgtgattcaagcttagcctggccgggaaacgggaggcgtggaggccgggagcagcccccggggtcatcgccctgccaccgccgcccgattgctttagcttggaaattccggagctgaagcggccagcgagggaggatgaccctctcggcccgggcaccctgtcagtccggaaataactgcagcatttgttccggaggggaaggcgcgaggtttccgggaaagcagcaccgccccttggcccccaggtggctagcgctataaaggatcacgcgccccagtcgacgctgagctcctctgctactcagagttgcaacctcagcctcgctatggctcccagcagcccccggcccgcgctgcccgcactcctggtcctgctcggggctctgttcccaggacctggcaatgcccagacatctgtgtccccctcaaaagtcatcctgccccggggaggctccgtgctggtgacatgcagcacctcctgtgaccagcccaagttgttgggcatagagaccccgttgcctaaaaaggagttgctcctgcctgggaacaaccggaaggtgtatgaactgagcaatgtgcaagaagatagccaaccaatgtgctattcaaactgccctgatgggcagtcaacagctaaaaccttcctcaccgtggtgctgctccgtggggagaaggagctgaaacgggagccagctgtgggggagcccgctgaggtcacgaccacggtgctggtgaggagagatcaccatggagccaatttctcgtgccgcactgaactggacctgcggccccaagggctggagctgtttgagaacacctcggccccctaccagctccagacctttgtcctgccagcgactcccccac

SEQ ID NO: 9942 - protein, 179 aa, Homo sapiens
MAPSSPRPALPALLVLLGALFPGPGNAQTSVSPSKVILPRGGSVLVTCSTSCDQPKLLGIETPLPKKELLLPGNNRKVYELSNVQEDSQPMCYSNCPDGQSTAKTFLTVVLLRGEKELKREPAVGEPAEVTTTVLVRRDHHGANFSCRTELDLRPQGLELFENTSAPYQLQTFVLPATP

SEQ ID NO: 9943 - DNA, 2292 bp, Homo sapiens
gtcagtccggaaataactgcagcatttgttccggaggggaaggcgcgaggtttccgggaaagcagcaccgccccttggcccccaggtggctagcgctataaaggatcacgcgccccagtcgacgctgagctcctctgctactcagagttgcaacctcagcctcgctatggctcccagcagcccccggcccgcgctgcccgcactcctggtcctgctcggggctctgttcccaggacctggcaatgcccagacatctgtgtccccctcaaaagtcatcctgccccggggaggctccgtgctggtgacatgcagcacctcctgtgaccagcccaagttgttgggcatagagaccccgttgcctaaaaaggagttgctcctgcctgggaacaaccggaaggtgtatgaactgagcaatgtgcaagaagatagccaaccaatgtgctattcaaactgccctgatgggcagtcaacagctaaaaccttcctcaccgtgtactggactccagaacgggtggaactggcacccctcccctcttggcagccagtgggcaagaaccttaccctacgctgccaggtggagggtggggcaccccgggccaacctcaccgtggtgctgctccgtggggagaaggagctgaaacgggagccagctgtgggggagcccgctgaggtcacgaccacggtgctggtgaggagagatcaccatggagccaatttctcgtgccgcactgaactggacctgcggccccaagggctggagctgtttgagaacacctcggccccctaccagctccagacctttgtcctgccagcgactcccccacaacttgtcagcccccgggtcctagaggtggacacgcaggggaccgtggtctgttccctggacgggctgttcccagtctcggaggcccaggtccacctggcactgggggaccagaggttgaaccccacagtcacctatggcaacgactccttctcggccaaggcctcagtcagtgtgaccgcagaggacgagggcacccagcggctgacgtgtgcagtaatactggggaaccagagccaggagacactgcagacagtgaccatctacagctttccggcgcccaacgtgattctgacgaagccagaggtctcagaagggaccgaggtgacagtgaagtgtgaggcccaccctagagccaaggtgacgctgaatggggttccagcccagccactgggcccgagggcccagctcctgctgaaggccaccccagaggacaacgggcgcagcttctcctgctctgcaaccctggaggtggccggccagcttatacacaagaaccagacccgggagcttcgtgtcctgtatggcccccgactggacgagagggattgtccgggaaactggacgtggccagaaaattcccagcagactccaatgtgccaggcttgggggaacccattgcccgagctcaagtgtctaaaggatggcactttcccactgcccatcggggaatcagtgactgtcactcgagatcttgagggcacctacctctgtcgggccaggagcactcaaggggaggtcacccgcaaggtgaccgtgaatgtgctctccccccggtatgagattgtcatcatcactgtggtagcagccgcagtcataatgggcactgcaggcctcagcacgtacctctataaccgccagcggaagatcaagaaatacagactacaacaggcccaaaaagggacccccatgaaaccgaacacacaagccacgcctccctgaacctatcccgggacagggcctcttcctcggccttcccatattggtggcagtggtgccacactgaacagagtggaagacatatgccatgcagctacacctaccggccctgggacgccggaggacagggcattgtcctcagtcagatacaacagcatttggggccatggtacctgcacacctaaaacactaggccacgcatctgatctgtagtcacatgactaagccaagaggaaggagcaagactcaagacatgattgatggatgttaaagtctagcctgatgagaggggaagtggtgggggagacatagccccaccatgaggacatacaactgggaaatactgaaacttgctgcctattgggtatgctgaggccccacagacttacagaagaagtggccctccatagacatgtgtagcatcaaaacacaaaggcccacacttcctgacggatgccagcttgggcactgctgtctactgaccccaacccttgatgatatgtatttattcatttgttattttaccagct

SEQ ID NO: 9944 - protein, 532 aa, Homo sapiens; identical to SEQ ID NO: 1537

SEQ ID NO: 9945 - DNA, 3095 bp, Homo sapiens
gtcagtccggaaataactgcagcatttgttccggaggggaaggcgcgaggtttccgggaaagcagcaccgccccttggcccccaggtggctagcgctataaaggatcacgcgccccagtcgacgctgagctcctctgctactcagagttgcaacctcagcctcgctatggctcccagcagcccccggcccgcgctgcccgcactcctggtcctgctcggggctctgttcccaggacctggcaatgcccagacatctgtgtccccctcaaaagtcatcctgccccggggaggctccgtgctggtgacatgcagcacctcctgtgaccagcccaagttgttgggcatagagaccccgttgcctaaaaaggagttgctcctgcctgggaacaaccggaaggtgtatgaactgagcaatgtgcaagaagatagccaaccaatgtgctattcaaactgccctgatgggcagtcaacagctaaaaccttcctcaccgtgtactggactccagaacgggtggaactggcacccctcccctcttggcagccagtgggcaagaaccttaccctacgctgccaggtggagggtggggcaccccgggccaacctcaccgtggtgctgctccgtggggagaaggagctgaaacgggagccagctgtgggggagcccgctgaggtcacgaccacggtgctggtgaggagagatcaccatggagccaatttctcgtgccgcactgaactggacctgcggccccaagggctggagctgtttgagaacacctcggccccctaccagctccagacctttgtcctgccagcgactcccccacaacttgtcagcccccgggtcctagaggtggacacgcaggggaccgtggtctgttccctggacgggctgttcccagtctcggaggcccaggtccacctggcactgggggaccagaggttgaaccccacagtcacctatggcaacgactccttctcggccaaggcctcagtcagtgtgaccgcagaggacgagggcacccagcggctgacgtgtgcagtaatactggggaaccagagccaggagacactgcagacagtgaccatctacagctttccggcgcccaacgtgattctgacgaagccagaggtctcagaagggaccgaggtgacagtgaagtgtgaggcccaccctagagccaaggtgacgctgaatggggttccagcccagccactgggcccgagggcccagctcctgctgaaggccaccccagaggacaacgggcgcagcttctcctgctctgcaaccctggaggtggccggccagcttatacacaagaaccagacccgggagcttcgtgtcctgtatggcccccgactggacgagagggattgtccgggaaactggacgtggccagaaaattcccagcagactccaatgtgccaggcttgggggaacccattgcccgagctcaagtgtctaaaggatggcactttcccactgcccatcggggaatcagtgactgtcactcgagatcttgagggcacctacctctgtcgggccaggagcactcaaggggaggtcacccgcaaggtgaccgtgaatgtgctctccccccggtatgagattgtcatcatcactgtggtagcagccgcagtcataatgggcactgcaggcctcagcacgtacctctataaccgccagcggaagatcaagaaatacagactacaacaggcccaaaaagggacccccatgaaaccgaacacacaagccacgcctccctgaacctatcccgggacagggcctcttcctcggccttcccatattggtggcagtggtgccacactgaacagagtggaagacatatgccatgcagctacacctaccggccctgggacgccggaggacagggcattgtcctcagtcagatacaacagcatttggggccatggtacctgcacacctaaaacactaggccacgcatctgatctgtagtcacatgactaagccaagaggaaggagcaagactcaagacatgattgatggatgttaaagtctagcctgatgagaggggaagtggtgggggagacatagccccaccatgaggacatacaactgggaaatactgaaacttgctgcctattgggtatgctgaggccccacagacttacagaagaagtggccctccatagacatgtgtagcatcaaaacacaaaggcccacacttcctgacggatgccagcttgggcactgctgtctactgaccccaacccttgatgatatgtatttattcatttgttattttaccagctatttattgagtgtcttttatgtaggctaaatgaacataggtctctggcctcacggagctcccagtcctaatcacattcaaggtcaccaggtacagttgtacaggttgtacactgcaggagagtgcctggcaaaaagatcaaatggggctgggacttctcattggccaacctgcctttccccagaaggagtgatttttctatcggcacaaaagcactatatggactggtaatggttacaggttcagagattacccagtgaggccttattcctcccttccccccaaaactgacacctttgttagccacctccccacccacatacatttctgccagtgttcacaatgacactcagcggtcatgtctggacatgagtgcccagggaatatgcccaagctatgccttgtcctcttgtcctgtttgcatttcactgggagcttgcactatgcagctccagtttcctgcagtgatcagggtcctgcaagcagtggggaagggggccaaggtattggaggactccctcccagctttggaagcctcatccgcgtgtgtgtgtgtgtgtatgtgtagacaagctctcgctctgtcacccaggctggagtgcagtggtgcaatcatggttcactgcagtcttgaccttttgggctcaagtgatcctcccacctcagcctcctgagtagctgggaccataggctcacaacaccacacctggcaaatttgattttttttttttttccagagacggggtctcgcaacattgcccagacttcctttgtgttagttaataaagctttctcaactgcctc

SEQ ID NO: 9946 - protein, 532 aa, Homo sapiens; identical to SEQ ID NO: 1537

SEQ ID NO: 9947 - DNA, 3870 bp, Homo sapiens
gtcagtccggaaataactgcagcatttgttccggaggggaaggcgcgaggtttccgggaaagcagcaccgccccttggcccccaggtggctagcgctataaaggatcacgcgccccagtcgacgctgagctcctctgctactcagagttgcaacctcagcctcgctatggctcccagcagcccccggcccgcgctgcccgcactcctggtcctgctcggggctctgttcccaggacctggcaatgcccagacatctgtgtccccctcaaaagtcatcctgccccggggaggctccgtgctggtgacatgcagcacctcctgtgaccagcccaagttgttgggcatagagaccccgttgcctaaaaaggagttgctcctgcctgggaacaaccggaaggtgtatgaactgagcaatgtgcaagaagatagccaaccaatgtgctattcaaactgccctgatgggcagtcaacagctaaaaccttcctcaccgtgtactggactccagaacgggtggaactggcacccctcccctcttggcagccagtgggcaagaaccttaccctacgctgccaggtggagggtggggcaccccgggccaacctcaccgtggtgctgctccgtggggagaaggagctgaaacgggagccagctgtgggggagcccgctgaggtcacgaccacggtgctggtgaggagagatcaccatggagccaatttctcgtgccgcactgaactggacctgcggccccaagggctggagctgtttgagaacacctcggccccctaccagctccagacctttgtcctgccagcgactcccccacaacttgtcagcccccgggtcctagaggtggacacgcaggggaccgtggtctgttccctggacgggctgttcccagtctcggaggcccaggtccacctggcactgggggaccagaggttgaaccccacagtcacctatggcaacgactccttctcggccaaggcctcagtcagtgtgaccgcagaggacgagggcacccagcggctgacgtgtgcagtaatactggggaaccagagccaggagacactgcagacagtgaccatctacagctttccggcgcccaacgtgattctgacgaagccagaggtctcagaagggaccgaggtgacagtgaagtgtgaggcccaccctagagccaaggtgacgctgaatggggttccagcccagccactgggcccgagggcccagctcctgctgaaggccaccccagaggacaacgggcgcagcttctcctgctctgcaaccctggaggtggccggccagcttatacacaagaaccagacccgggagcttcgtgtcctgtatggcccccgactggacgagagggattgtccgggaaactggacgtggccagaaaattcccagcagactccaatgtgccaggcttgggggaacccattgcccgagctcaagtgtctaaaggatggcactttcccactgcccatcggggaatcagtgactgtcactcgagatcttgagggcacctacctctgtcgggccaggagcactcaaggggaggtcacccgcaaggtgaccgtgaatgtgctctccccccggtatgagattgtcatcatcactgtggtagcagccgcagtcataatgggcactgcaggcctcagcacgtacctctataaccgccagcggaagatcaagaaatacagactacaacaggcccaaaaagggacccccatgaaaccgaacacacaagccacgcctccctgaacctatcccgggacagggcctcttcctcggccttcccatattggtggcagtggtgccacactgaacagagtggaagacatatgccatgcagctacacctaccggccctgggacgccggaggacagggcattgtcctcagtcagatacaacagcatttggggccatggtacctgcacacctaaaacactaggccacgcatctgatctgtagtcacatgactaagccaagaggaaggagcaagactcaagacatgattgatggatgttaaagtctagcctgatgagaggggaagtggtgggggagacatagccccaccatgaggacatacaactgggaaatactgaaacttgctgcctattgggtatgctgaggccccacagacttacagaagaagtggccctccatagacatgtgtagcatcaaaacacaaaggcccacacttcctgacggatgccagcttgggcactgctgtctactgaccccaacccttgatgatatgtatttattcatttgttattttaccagctatttattgagtgtcttttatgtaggctaaatgaacataggtctctggcctcacggagctcccagtcctaatcacattcaaggtcaccaggtacagttgtacaggttgtacactgcaggagagtgcctggcaaaaagatcaaatggggctgggacttctcattggccaacctgcctttccccagaaggagtgatttttctatcggcacaaaagcactatatggactggtaatggttacaggttcagagattacccagtgaggccttattcctcccttccccccaaaactgacacctttgttagccacctccccacccacatacatttctgccagtgttcacaatgacactcagcggtcatgtctggacatgagtgcccagggaatatgcccaagctatgccttgtcctcttgtcctgtttgcatttcactgggagcttgcactatgcagctccagtttcctgcagtgatcagggtcctgcaagcagtggggaagggggccaaggtattggaggactccctcccagctttggaagcctcatccgcgtgtgtgtgtgtgtgtatgtgtagacaagctctcgctctgtcacccaggctggagtgcagtggtgcaatcatggttcactgcagtcttgaccttttgggctcaagtgatcctcccacctcagcctcctgagtagctgggaccataggctcacaacaccacacctggcaaatttgattttttttttttttccagagacggggtctcgcaacattgcccagacttcctttgtgttagttaataaagctttctcaactgcctcagccttgtgtgagttgaggggaggtgtcacatccagctggagtcctttctaagcagccacagcctgatcctcccacttcctcccccaagaaaacattgtgggttgatggccataccctgaggttctggtccaaatcggactttctatgaccttctgggtctctagtgaaaactaaagactcctctccagaaaaaaacatttggtttctaatgaggcctggaatcttattcttgacctggggagcggaatccctttttgcagtactcccgggccctctgttggggcctccccttcctctccagggtggagtcgaggaggcggggctgcgggcctccttatctctagagccggccctggctctctggcgcggggccccttagtccgggctttttgccatggggtctctgttccctctgtcgctgctgttttttttggcggccgcctacccgggagttgggagcgcgctgggacgccggactaagcgggcgcaaagccccaagggtagccctctcgcgccctccgggacctcagtgcccttctgggtgcgcatgagcccggagttcgtggctgtgcagccggggaagtcagtgcagctcaattgcagcaacagctgtccccagccgcagaattccagcctccgcaccccgctgcggcaaggcaagacgctcagagggccgggttgggtgtcttaccagctgctcgacgtgagggcctggagctccctcgcgcactgcctcgtgacctgcgcaggaaaaacacgctgggccacctccag

SEQ ID NO: 9948 - protein, 532 aa, Homo sapiens; identical to SEQ ID NO: 1537

SEQ ID NO: 9949 - DNA, 638 bp, Homo sapiens
gagctcctctgctactcagagttgcaacctcagcctcgctatggctcccagcagcccccggcccgcgctgcccgcactcctggtcctgctcggggctctgttcccaggacctggcaatgcccagacatctgtgtccccctcaaaagtcatcctgccccggggaggctccgtgctggtgacatgcagcacctcctgtgaccagcccaagttgttgggcatagagaccccgttgcctaaaaaggagttgctcctgcctgggaacaaccggaaggtgtatgaactgagcaatgtgcaagaagatagccaaccaatgtgctattcaaactgccctgatgggcagtcaacagctaaaaccttcctcaccgtgtactgtgagtaactgagcccggagggctggactaggcagacccggtgggagagacgtgcaggggcacctgcagaggcctgggggaatctttgccacttgctcgtagggtcaaggaggggctccttgcagggcaggtggggacatccttggaaagtccctttgtgaatttctttgggtacaattaaagtatttacaggctgggtgcggtggctcatgcctgtaatcccagcactttgagaggctgaggctggcggatcacctgagatcagga

SEQ ID NO: 9950 - protein, 112 aa, Homo sapiens
MAPSSPRPALPALLVLLGALFPGPGNAQTSVSPSKVILPRGGSVLVTCSTSCDQPKLLGIETPLPKKELLLPGNNRKVYELSNVQEDSQPMCYSNCPDGQSTAKTFLTVYCE

SEQ ID NO: 9951 - DNA, 582 bp, Homo sapiens
gagctcctctgctactcagagttgcaacctcagcctcgctatggctcccagcagcccccggcccgcgctgcccgcactcctggtcctgctcggggctctgttcccaggacctggcaatgcccagacatctgtgtccccctcaaaagtcatcctgccccggggaggctccgtgctggtgacatgcagcacctcctgtgaccagcccaagttgttgggcatagagaccccgttgcctaaaaaggagttgctcctgcctgggaacaaccggaaggtgtatgaactgagcaatgtgcaagaagatagccaaccaatgtgctattcaaactgccctgatgggcagtcaacagctaaaaccttcctcaccgtgtactggactccagaacgggtggagggtggggcaccccgggccaacctcaccgtggtgctgctccgtggggagaaggagctgaaacgggagccagctgtgggggagcccgctgaggtcacgaccacggtgctggtgaggagagatcaccatggagccaatttctcgtgccgcactgaactggacctgcggccccaagggctggagctgtttgagaa

SEQ ID NO: 9952 - protein, 179 aa, Homo sapiens
MAPSSPRPALPALLVLLGALFPGPGNAQTSVSPSKVILPRGGSVLVTCSTSCDQPKLLGIETPLPKKELLLPGNNRKVYELSNVQEDSQPMCYSNCPDGQSTAKTFLTVYWTPERVEGGAPRANLTVVLLRGEKELKREPAVGEPAEVTTTVLVRRDHHGANFSCRTELDLRPQGLELF

SEQ ID NO: 9953 - DNA, 1208 bp, Homo sapiens
gagctcctctgctactcagagttgcaacctcagcctcgctatggctcccagcagcccccggcccgcgctgcccgcactcctggtcctgctcggggctctgttcccaggacctggcaatgcccagacatctgtgtccccctcaaaagtcatcctgccccggggaggctccgtgctggtgacatgcacttctcctgctctgcaaccctggaggtggccggccagcttatacacaagaaccagacccgggagcttcgtgtcctgtatggcccccgactggacgagagggattgtccgggaaactggacgtggccagaaaattcccagcagactccaatgtgccaggcttgggggaacccattgcccgagctcaagtgtctaaaggatggcactttcccactgcccatcggggaatcagtgactgtcactcgagatcttgagggcacctacctctgtcgggccaggagcactcaaggggaggtcacccgcaaggtgaccgtgaatgtgctctccccccggtatgagattgtcatcatcactgtggtagcagccgcagtcataatgggcactgcaggcctcagcacgtacctctataaccgccagcggaagatcaagaaatacagactacaacaggcccaaaaagggacccccatgaaaccgaacacacaagccacgcctccctgaacctatcccgggacagggcctcttcctcggccttcccatattggtggcagtggtgccacactgaacagagtggaagacatatgccatgcagctacacctaccggccctgggacgccggaggacagggcattgtcctcagtcagatacaacagcatttggggccatggtacctgcacacctaaaacactaggccacgcatctgatctgtagtcacatgactaagccaagaggaaggagcaagactcaagacatgattgatggatgttaaagtctagcctgatgagaggggaagtggtgggggagacatagccccaccatgaggacatacaactgggaaatactgaaacttgctgcctattgggtatgctgaggccccacagacttacagaagaagtggccctccatagacatgtgtagcatcaaaacacaaaggcccacacttcctgacggatgccagcttgggcactgctgtctactgaccccaacccttgatgatatgtatttattcatttgttattttaccagct

SEQ ID NO: 9954 - protein, 166 aa, Homo sapiens
MHFSCSATLEVAGQLIHKNQTRELRVLYGPRLDERDCPGNWTWPENSQQTPMCQAWGNPLPELKCLKDGTFPLPIGESVTVTRDLEGTYLCRARSTQGEVTRKVTVNVLSPRYEIVIITVVAAAVIMGTAGLSTYLYNRQRKIKKYRLQQAQKGTPMKPNTQATPP

SEQ ID NO: 9955 - DNA, 2011 bp, Homo sapiens
gagctcctctgctactcagagttgcaacctcagcctcgctatggctcccagcagcccccggcccgcgctgcccgcactcctggtcctgctcggggctctgttcccaggacctggcaatgcccagacatctgtgtccccctcaaaagtcatcctgccccggggaggctccgtgctggtgacatgcacttctcctgctctgcaaccctggaggtggccggccagcttatacacaagaaccagacccgggagcttcgtgtcctgtatggcccccgactggacgagagggattgtccgggaaactggacgtggccagaaaattcccagcagactccaatgtgccaggcttgggggaacccattgcccgagctcaagtgtctaaaggatggcactttcccactgcccatcggggaatcagtgactgtcactcgagatcttgagggcacctacctctgtcgggccaggagcactcaaggggaggtcacccgcaaggtgaccgtgaatgtgctctccccccggtatgagattgtcatcatcactgtggtagcagccgcagtcataatgggcactgcaggcctcagcacgtacctctataaccgccagcggaagatcaagaaatacagactacaacaggcccaaaaagggacccccatgaaaccgaacacacaagccacgcctccctgaacctatcccgggacagggcctcttcctcggccttcccatattggtggcagtggtgccacactgaacagagtggaagacatatgccatgcagctacacctaccggccctgggacgccggaggacagggcattgtcctcagtcagatacaacagcatttggggccatggtacctgcacacctaaaacactaggccacgcatctgatctgtagtcacatgactaagccaagaggaaggagcaagactcaagacatgattgatggatgttaaagtctagcctgatgagaggggaagtggtgggggagacatagccccaccatgaggacatacaactgggaaatactgaaacttgctgcctattgggtatgctgaggccccacagacttacagaagaagtggccctccatagacatgtgtagcatcaaaacacaaaggcccacacttcctgacggatgccagcttgggcactgctgtctactgaccccaacccttgatgatatgtatttattcatttgttattttaccagctatttattgagtgtcttttatgtaggctaaatgaacataggtctctggcctcacggagctcccagtcctaatcacattcaaggtcaccaggtacagttgtacaggttgtacactgcaggagagtgcctggcaaaaagatcaaatggggctgggacttctcattggccaacctgcctttccccagaaggagtgatttttctatcggcacaaaagcactatatggactggtaatggttacaggttcagagattacccagtgaggccttattcctcccttccccccaaaactgacacctttgttagccacctccccacccacatacatttctgccagtgttcacaatgacactcagcggtcatgtctggacatgagtgcccagggaatatgcccaagctatgccttgtcctcttgtcctgtttgcatttcactgggagcttgcactatgcagctccagtttcctgcagtgatcagggtcctgcaagcagtggggaagggggccaaggtattggaggactccctcccagctttggaagcctcatccgcgtgtgtgtgtgtgtgtatgtgtagacaagctctcgctctgtcacccaggctggagtgcagtggtgcaatcatggttcactgcagtcttgaccttttgggctcaagtgatcctcccacctcagcctcctgagtagctgggaccataggctcacaacaccacacctggcaaatttgattttttttttttttccagagacggggtctcgcaacattgcccagacttcctttgtgttagttaataaagctttctcaactgcctc

SEQ ID NO: 9956 - protein, 166 aa, Homo sapiens; identical to SEQ ID NO: 9954

SEQ ID NO: 9957 - DNA, 2786 bp, Homo sapiens
gagctcctctgctactcagagttgcaacctcagcctcgctatggctcccagcagcccccggcccgcgctgcccgcactcctggtcctgctcggggctctgttcccaggacctggcaatgcccagacatctgtgtccccctcaaaagtcatcctgccccggggaggctccgtgctggtgacatgcacttctcctgctctgcaaccctggaggtggccggccagcttatacacaagaaccagacccgggagcttcgtgtcctgtatggcccccgactggacgagagggattgtccgggaaactggacgtggccagaaaattcccagcagactccaatgtgccaggcttgggggaacccattgcccgagctcaagtgtctaaaggatggcactttcccactgcccatcggggaatcagtgactgtcactcgagatcttgagggcacctacctctgtcgggccaggagcactcaaggggaggtcacccgcaaggtgaccgtgaatgtgctctccccccggtatgagattgtcatcatcactgtggtagcagccgcagtcataatgggcactgcaggcctcagcacgtacctctataaccgccagcggaagatcaagaaatacagactacaacaggcccaaaaagggacccccatgaaaccgaacacacaagccacgcctccctgaacctatcccgggacagggcctcttcctcggccttcccatattggtggcagtggtgccacactgaacagagtggaagacatatgccatgcagctacacctaccggccctgggacgccggaggacagggcattgtcctcagtcagatacaacagcatttggggccatggtacctgcacacctaaaacactaggccacgcatctgatctgtagtcacatgactaagccaagaggaaggagcaagactcaagacatgattgatggatgttaaagtctagcctgatgagaggggaagtggtgggggagacatagccccaccatgaggacatacaactgggaaatactgaaacttgctgcctattgggtatgctgaggccccacagacttacagaagaagtggccctccatagacatgtgtagcatcaaaacacaaaggcccacacttcctgacggatgccagcttgggcactgctgtctactgaccccaacccttgatgatatgtatttattcatttgttattttaccagctatttattgagtgtcttttatgtaggctaaatgaacataggtctctggcctcacggagctcccagtcctaatcacattcaaggtcaccaggtacagttgtacaggttgtacactgcaggagagtgcctggcaaaaagatcaaatggggctgggacttctcattggccaacctgcctttccccagaaggagtgatttttctatcggcacaaaagcactatatggactggtaatggttacaggttcagagattacccagtgaggccttattcctcccttccccccaaaactgacacctttgttagccacctccccacccacatacatttctgccagtgttcacaatgacactcagcggtcatgtctggacatgagtgcccagggaatatgcccaagctatgccttgtcctcttgtcctgtttgcatttcactgggagcttgcactatgcagctccagtttcctgcagtgatcagggtcctgcaagcagtggggaagggggccaaggtattggaggactccctcccagctttggaagcctcatccgcgtgtgtgtgtgtgtgtatgtgtagacaagctctcgctctgtcacccaggctggagtgcagtggtgcaatcatggttcactgcagtcttgaccttttgggctcaagtgatcctcccacctcagcctcctgagtagctgggaccataggctcacaacaccacacctggcaaatttgattttttttttttttccagagacggggtctcgcaacattgcccagacttcctttgtgttagttaataaagctttctcaactgcctcagccttgtgtgagttgaggggaggtgtcacatccagctggagtcctttctaagcagccacagcctgatcctcccacttcctcccccaagaaaacattgtgggttgatggccataccctgaggttctggtccaaatcggactttctatgaccttctgggtctctagtgaaaactaaagactcctctccagaaaaaaacatttggtttctaatgaggcctggaatcttattcttgacctggggagcggaatccctttttgcagtactcccgggccctctgttggggcctccccttcctctccagggtggagtcgaggaggcggggctgcgggcctccttatctctagagccggccctggctctctggcgcggggccccttagtccgggctttttgccatggggtctctgttccctctgtcgctgctgttttttttggcggccgcctacccgggagttgggagcgcgctgggacgccggactaagcgggcgcaaagccccaagggtagccctctcgcgccctccgggacctcagtgcccttctgggtgcgcatgagcccggagttcgtggctgtgcagccggggaagtcagtgcagctcaattgcagcaacagctgtccccagccgcagaattccagcctccgcaccccgctgcggcaaggcaagacgctcagagggccgggttgggtgtcttaccagctgctcgacgtgagggcctggagctccctcgcgcactgcctcgtgacctgcgcaggaaaaacacgctgggccacctccag

SEQ ID NO: 9958 - protein, 166 aa, Homo sapiens; identical to SEQ ID NO: 9954

SEQ ID NO: 9959 - DNA, 1700 bp, Homo sapiens
ccagagacggggtctcgcaacattgcccagacttcctttgtgttagttaataaagctttctcaactgcctcagccttgtgtgagttgaggggaggtgtcacatccagctggagtcctttctaagcagccacagcctgatcctcccacttcctcccccaagaaaacattgtgggttgatggccataccctgaggttctggtccaaatcggactttctatgaccttctgggtctctagtgaaaactaaagactcctctccagaaaaaaacatttggtttctaatgaggcctggaatcttattcttgacctggggagcggaatccctttttgcagtactcccgggccctctgttggggcctccccttcctctccagggtggagtcgaggaggcggggctgcgggcctccttatctctagagccggccctggctctctggcgcggggccccttagtccgggctttttgccatggggtctctgttccctctgtcgctgctgttttttttggcggccgcctacccgggagttgggagcgcgctgggacgccggactaagcgggcgcaaagccccaagggtagccctctcgcgccctccgggacctcagtgcccttctgggtgcgcatgagcccggagttcgtggctgtgcagccggggaagtcagtgcagctcaattgcagcaacagctgtccccagccgcagaattccagcctccgcaccccgctgcggcaaggcaagacgctcagagggccgggttgggtgtcttaccagctgctcgacgtgagggcctggagctccctcgcgcactgcctcgtgacctgcgcaggaaaaacacgctgggccacctccaggatcaccgcctacaaaccgccccacagcgtgattttggagcctccggtcttaaagggcaggaaatacactttgcgctgccacgtgacgcaggtgttcccggtgggctacttggtggtgaccctgaggcatggaagccgggtcatctattccgaaagcctggagcgcttcaccggcctggatctggccaacgtgaccttgacctacgagtttgctgctggaccccgcgacttctggcagcccgtgatctgccacgcgcgcctcaatctcgacggcctggtggtccgcaacagctcggcacccattacactgatgctcgcttggagccccgcgcccacagctttggcctccggttccatcgctgcccttgtagggatcctcctcactgtgggcgctgcgtacctatgcaagtgcctagctatgaagtcccaggcgtaaagggggatgttctatgccggctgagcgagaaaaagaggaatatgaaacaatctggggaaatggccatacatggtggctgacgcctgtaatcccagcactttgggaggccgaggcaggagaatcgcttgagcccaggagttcgagaccagcctggacaacatagtgagaccccgtctatgcaaaaaatacacaaattagcctggtgtggtggcccgcacctgtggtcccagctacccgggaggctgagttgggaggatcctttgagccctgaaagtcgaggttgcagtgagccttgatcgtgccactgcactccagcctgggggacagagcacgaccctgtctccaaaaataaaataaaaataaaaataaatattggcgggggaaccctctggaatcaataaaggcttccttaaccagc

SEQ ID NO: 9960 - protein, 271 aa, Homo sapiens; identical to SEQ ID NO: 1541

SEQ ID NO: 9961 - DNA, 1623 bp, Homo sapiens
ccagagacggggtctcgcaacattgcccagacttcctttgtgttagttaataaagctttctcaactgcctcagccttgtgtgagttgaggggaggtgtcacatccagctggagtcctttctaagcagccacagcctgatcctcccacttcctcccccaagaaaacattgtgggttgatggccataccctgaggttctggtccaaatcggactttctatgaccttctgggtctctagtgaaaactaaagactcctctccagaaaaaaacatttggtttctaatgaggcctggaatcttattcttgacctggggagcggaatccctttttgcagtactcccgggccctctgttggggcctccccttcctctccagggtggagtcgaggaggcggggctgcgggcctccttatctctagagccggccctggctctctggcgcggggccccttagtccgggctttttgccatggggtctctgttccctctgtcgctgctgttttttttggcggccgcctacccgggagttgggagcgcgctgggacgccggactaagcgggcgcaaagccccaagggtagccctctcgcgccctccgggacctcagtgcccttctgggtgcgcatgagcccggagttcgtggctgtgcagccggggaagtcagtgcagctcaattgcagcaacagctgtccccagccgcagaattccagcctccgcaccccgctgcggcaaggcaagacgctcagagggccgggttgggtgtcttaccagctgctcgacgtgagggcctggagctccctcgcgcactgcctcgtgacctgcgcaggaaaaacacgctgggccacctccaggatcaccgcctacagtgttcccggtgggctacttggtggtgaccctgaggcatggaagccgggtcatctattccgaaagcctggagcgcttcaccggcctggatctggccaacgtgaccttgacctacgagtttgctgctggaccccgcgacttctggcagcccgtgatctgccacgcgcgcctcaatctcgacggcctggtggtccgcaacagctcggcacccattacactgatgctcgcttggagccccgcgcccacagctttggcctccggttccatcgctgcccttgtagggatcctcctcactgtgggcgctgcgtacctatgcaagtgcctagctatgaagtcccaggcgtaaagggggatgttctatgccggctgagcgagaaaaagaggaatatgaaacaatctggggaaatggccatacatggtggctgacgcctgtaatcccagcactttgggaggccgaggcaggagaatcgcttgagcccaggagttcgagaccagcctggacaacatagtgagaccccgtctatgcaaaaaatacacaaattagcctggtgtggtggcccgcacctgtggtcccagctacccgggaggctgagttgggaggatcctttgagccctgaaagtcgaggttgcagtgagccttgatcgtgccactgcactccagcctgggggacagagcacgaccctgtctccaaaaataaaataaaaataaaaataaatattggcgggggaaccctctggaatcaataaaggcttccttaaccagc

SEQ ID NO: 9962 - protein, 272 aa, Homo sapiens; identical to SEQ ID NO: 1539

SEQ ID NO: 9963 - DNA, 1847 bp, Homo sapiens
ccagagacggggtctcgcaacattgcccagacttcctttgtgttagttaataaagctttctcaactgcctcagccttgtgtgagttgaggggaggtgtcacatccagctggagtcctttctaagcagccacagcctgatcctcccacttcctcccccaagaaaacattgtgggttgatggccataccctgaggttctggtccaaatcggactttctatgaccttctgggtctctagtgaaaactaaagactcctctccagaaaaaaacatttggtttctaatgaggcctggaatcttattcttgacctggggagcggaatccctttttgcagtactcccgggccctctgttggggcctccccttcctctccagggtggagtcgaggaggcggggctgcgggcctccttatctctagagccggccctggctctctggcgcggggccccttagtccgggctttttgccatggggtctctgttccctctgtcgctgctgttttttttggcggccgcctacccgggagttgggagcgcgctgggacgccggactaagcgggcgcaaagccccaagggtagccctctcgcgccctccgggacctcagtgcccttctgggtgcgcatgagcccggagttcgtggctgtgcagccggggaagtcagtgcagctcaattgcagcaacagctgtccccagccgcagaattccagcctccgcaccccgctgcggcaaggcaagacgctcagagggccgggttgggtgtcttaccagctgctcgacgtgagggcctggagctccctcgcgcactgcctcgtgacctgcgcaggaaaaacacgctgggccacctccaggatcaccgcctacaaaccgccccacagcgtgattttggagcctccggtcttaaagggcaggaaatacactttgcgctgccacgtgacgcaggtgttcccggtgggctacttggtggtgaccctgaggcatggaagccgggtcatctattccgaaagcctggagcgcttcaccggcctggatctggccaacgtgaccttgacctacgagtttgctgctggaccccgcgacttctggcagcccgtgatctgccacgcgcgcctcaatctcgacggcctggtggtccgcaacagctcggcacccattacactgatgctcggtgaggcacccctgtaaccctggggactaggaggaagggggcagagagagttatgaccccgagagggcgcacagaccaagcgtgagctccacgcgggtcgacagacctccctgtgttccgttcctaattctcgccttctgctcccagcttggagccccgcgcccacagctttggcctccggttccatcgctgcccttgtagggatcctcctcactgtgggcgctgcgtacctatgcaagtgcctagctatgaagtcccaggcgtaaagggggatgttctatgccggctgagcgagaaaaagaggaatatgaaacaatctggggaaatggccatacatggtggctgacgcctgtaatcccagcactttgggaggccgaggcaggagaatcgcttgagcccaggagttcgagaccagcctggacaacatagtgagaccccgtctatgcaaaaaatacacaaattagcctggtgtggtggcccgcacctgtggtcccagctacccgggaggctgagttgggaggatcctttgagccctgaaagtcgaggttgcagtgagccttgatcgtgccactgcactccagcctgggggacagagcacgaccctgtctccaaaaataaaataaaaataaaaataaatattggcgggggaaccctctggaatcaataaaggcttccttaaccagc

SEQ ID NO: 9964 - protein, 237 aa, Homo sapiens; identical to SEQ ID NO: 1543

SEQ ID NO: 9965 - DNA, 3001 bp, Homo sapiens
ccgtcctctagcccagctcctcggctcgcgctctcctcgcctcctgtgctttccccgccgcggcgatgccagggccttcgccagggctgcgccgggcgctactcggcctctgggctgctctgggcctggggctcttcggcctctcagcggtctcgcaggagcccttctgggcggacctgcagcctcgcgtggcgttcgtggagcgcgggggctcgctgtggctgaattgcagcaccaactgccctcggccggagcgcggtggcctggagacctcgctgcgccgaaacgggacccagaggggtttgcgttggttggcgcggcagctggtggacattcgcgagccggagactcagcccgtctgcttcttccgctgcgcgcggcgcacactacaggcgcgtgggctcattcgcactttccagcgaccagatcgcgtagagctgatgccgctgcctccctggcagccggtgggcgagaacttcaccctgagctgtagggtccccggcgccgggccccgtgcgagcctcacgctgaccctgctgcggggcgcccaggagctgatccgccgcagcttcgccggtgaaccaccccgagcgcggggcgcggtgctcacagccacggtactggctcggagggaggaccatggagccaatttctcgtgtcgcgccgagctggacctgcggccgcacggactgggactgtttgaaaacagctcggcccccagagagctccgaaccttctccctgtctccggatgccccgcgcctcgctgctccccggctcttggaagttggctcggaaaggcccgtgagctgcactctggacggactgtttccagcctcagaggccagggtctacctcgcactgggggaccagaatctgagtcctgatgtcaccctcgaaggggacgcattcgtggccactgccacagccacagctagcgcagagcaggagggtgccaggcagctggtctgcaacgtcaccctggggggcgaaaaccgggagacccgggagaacgtgaccatctacagcttcccggcaccactcctgaccctgagcgaacccagcgtctccgaggggcagatggtgacagtaacctgcgcagctggggcccaagctctggtcacactggagggagttccagccgcggtcccggggcagcccgcccagcttcagctaaatgccaccgagaacgacgacagacgcagcttcttctgcgacgccaccctcgatgtggacggggagaccctgatcaagaacaggagcgcagagcttcgtgtcctatacgctccccggctagacgattcggactgccccaggagttggacgtggcccgagggcccagagcagacgctgcgctgcgaggcccgcgggaacccagaaccctcagtgcactgtgcgcgctccgacggcggggccgtgctggctctgggcctgctgggtccagtcactcgggcgctctcaggcacttaccgctgcaaggcggccaatgatcaaggcgaggcggtcaaggacgtaacgctaacggtggagtacgcaccagcgctggacagcgtgggctgcccagaacgcattacttggctggagggaacagaagcctcgctgagctgtgtggcgcacggggtaccgccgcctgatgtgatctgcgtgcgctctggagaactcggggccgtcatcgaggggctgttgcgtgtggcccgggagcatgcgggcacttaccgctgcgaagccaccaaccctcggggctctgcggccaaaaatgtggccgtcacggtggaatatggccccaggtttgaggagccgagctgccccagcaattggacatgggtggaaggatctgggcgcctgttttcctgtgaggtcgatgggaagccacagccaagcgtgaagtgcgtgggctccgggggcgccactgagggggtgctgctgccgctggcacccccagaccctagtcccagagctcccagaatccctagagtcctggcacccggtatctacgtctgcaacgccaccaaccgccacggctccgtggccaaaacagtcgtcgtgagcgcggagtcgccaccggagatggatgaatctacctgcccaagtcaccagacgtggctggaaggggctgaggcttccgcgctggcctgcgccgcccggggtcgcccttccccaggagtgcgctgctctcgggaaggcatcccatggcctgagcagcagcgcgtgtcccgagaggacgcgggcacttaccactgtgtggccaccaatgcgcatggcacggactcccggaccgtcactgtgggcgtggaataccggccagtggtggccgaacttgctgcctcgccccctggaggcgtgcgcccaggaggaaacttcacgttgacctgccgcgcggaggcctggcctccagcccagatcagctggcgcgcgcccccgggggccctcaacatcggcctgtcgagcaacaacagcacactgagcgtggcaggcgccatgggaagccacggcggcgagtacgagtgcgcagccaccaacgcgcacgggcgccacgcgcggcgcatcacggtgcgcgtggccggtccgtggctatgggtcgccgtgggcggcgcggcggggggcgcggcgctgctggccgcgggggccggcctggccttctacgtgcagtccaccgcctgcaagaagggcgagtacaacgtgcaggaggccgagagctcaggcgaggccgtgtgtctgaacggagcgggcggcggcgctggcggggcggcaggcgcggagggcggacccgaggcggcggggggcgcggccgagtcgccggcggagggcgaggtcttcgccatacagctgacatcggcgtgagcccgctcccctctccccgcgggccgggggacgccccccagactcacacgggggcttatttattgctttatttatttacttattcatttatttatgtattcaactccaagggcgtcacccccattttctacccatcccctcaataaagtttttataaagga

SEQ ID NO: 9966 - protein, 924 aa, Homo sapiens
MPGPSPGLRRALLGLWAALGLGLFGLSAVSQEPFWADLQPRVAFVERGGSLWLNCSTNCPRPERGGLETSLRRNGTQRGLRWLARQLVDIREPETQPVCFFRCARRTLQARGLIRTFQRPDRVELMPLPPWQPVGENFTLSCRVPGAGPRASLTLTLLRGAQELIRRSFAGEPPRARGAVLTATVLARREDHGANFSCRAELDLRPHGLGLFENSSAPRELRTFSLSPDAPRLAAPRLLEVGSERPVSCTLDGLFPASEARVYLALGDQNLSPDVTLEGDAFVATATATASAEQEGARQLVCNVTLGGENRETRENVTIYSFPAPLLTLSEPSVSEGQMVTVTCAAGAQALVTLEGVPAAVPGQPAQLQLNATENDDRRSFFCDATLDVDGETLIKNRSAELRVLYAPRLDDSDCPRSWTWPEGPEQTLRCEARGNPEPSVHCARSDGGAVLALGLLGPVTRALSGTYRCKAANDQGEAVKDVTLTVEYAPALDSVGCPERITWLEGTEASLSCVAHGVPPPDVICVRSGELGAVIEGLLRVAREHAGTYRCEATNPRGSAAKNVAVTVEYGPRFEEPSCPSNWTWVEGSGRLFSCEVDGKPQPSVKCVGSGGATEGVLLPLAPPDPSPRAPRIPRVLAPGIYVCNATNRHGSVAKTVVVSAESPPEMDESTCPSHQTWLEGAEASALACAARGRPSPGVRCSREGIPWPEQQRVSREDAGTYHCVATNAHGTDSRTVTVGVEYRPVVAELAASPPGGVRPGGNFTLTCRAEAWPPAQISWRAPPGALNIGLSSNNSTLSVAGAMGSHGGEYECAATNAHGRHARRITVRVAGPWLWVAVGGAAGGAALLAAGAGLAFYVQSTACKKGEYNVQEAESSGEAVCLNGAGGGAGGAAGAEGGPEAAGGAAESPAEGEVFAIQLTSA

SEQ ID NO: 9967 - DNA, 2377 bp, Homo sapiens
agcggtgatcaggccattccactccagcctgggtgacagagtgaggccctgtctcaaaaaaaaaaaaaacaaaaacaaaaacaaaccacacctgcatctgctgtgctgggcccccggttctcttttccctctgggatctaagatgccgctggggatccaaggcagaggcctgggagcccccatttccgagggggagggctagcgtggaaggccccgccccggcagctgcggagggatttggtggggtccaggccgcccttgccacgcaggggtgcgcggatgacctgaaaaaagccagaaagaggaaaggtgccgccgaggctggtcgctctcagctggggctcatcgcatcctctaccaagagcgctcccaccacacaggtcccgcccctcccaggtgggtttcatcgggtgggcccagcgggacagggccgggtgaaattagggagggggctgggctggggcgcaatggaggccgagccaatcccggactcctcaatgccagcaaagcttctggcgccgccctgtctgaacctggagcggctgggaggatccccctcccaggagaagccgaggaccccaggatgctgcagaatcagtgagaggtgcgtaaggccaaaccccattccccggaccccgctagcacttcaccacctggctcagtgatcaaggggtcatgacctctctttgctggggttatcgagaagtggcaattttataatagttactgaaacttacaaagaggttctggtgcccagagacacttggggtcatctagggatcagaggccatgcaattccatgtctctggggctgatgtaggcactccccagggatcatccaggggttatggagggcaactcaataataatgaaaatgataaaaatcgtaatcatattatggcaagccagcggcgtggtggcgcgtgcctgtaagtcccagctactcgggaggctgaggcggaaggatcggtcgagcccaggagttctaggctgcactgagtcctgatcacgcccctgcactccaggcgggggtacagagtgaggctcggtctctaaaagaaacacaaagaaaaaaagtaacctttttctcgatcctgcagccagaggcttgatatcctgcctcggtcacctagggcggtccctgcctgggtgatctacgggtgccgtaaggggttgattgatgtggagggctgggcgtgcctgggaggcccacagtgggcgaggtgagttgcaattactgcaactcttaaaccttccacccagagttagaaatgactgaacctcaggtggggtgtgtagcctgtccaagggtacacaaagagccggcccaagttggaaccccctggccggctaaacccaggagtcacccaagaaaacgtgaccccactgcccttctccccaggtccctctggcctgcatgccaggagtcggtcaccgccctgtgcttcctccaagagacagtggagaggctgggtcagtcccctgcccaggacaccccggtcctggggccttgctgggacccgatggctctggggactcagggccgcctgctgctggacagggattccaaggacacacagaccaggatcagccaaaagggccgccgtctgcagcccccggggactccctcggccccaccccagagaaggccccggaaacagctgaacccctgccggggcaccgagagagtggaccctgggttcgagggggtgactctgaagtttcagataaagccggactccagcctgcagatcatccccacgtacagcctgccctgcagtagccgttctcaggaatcccctgcagatgctgttgggggccctgcagcccacccaggaggcaccgaggcccactcagcaggcagcgaggccctggagccccggcgctgtgcttcctgtcggacccagaggaccccgctctggagagacgctgaagatgggacccctctctgcaacgcctgtgggatcaggtacaagaaatacggcactcgctgctccagctgctggctggtgcccaggaaaaatgtccagcccaagaggctatgtggcagatgtggagtgtccctggaccccattcaggaaggttaaacccagcttcaccctgctgagctgctgcttctgcctccgtttcaccagtgggagaatgggcagaagcagctctcctaggaggattggggaaagagccggcctgcctcctctctgccatctccagattcaaggatcccgggggaagacccaggcctcaggtggcagagcctgctaggggtcaccagccccttctccagtcagccttggccgaggccccctcaggagacgctctcaggaaggatgagcattgttacagcagggacaataaagtacagagatatgccgagaga

SEQ ID NO: 9968 - protein, 271 aa, Homo sapiens
MTEPQVGCVACPRVHKEPAQVGTPWPAKPRSHPRKRDPTALLPRSLWPACQESVTALCFLQETVERLGQSPAQDTPVLGPCWDPMALGTQGRLLLDRDSKDTQTRISQKGRRLQPPGTPSAPPQRRPRKQLNPCRGTERVDPGFEGVTLKFQIKPDSSLQIIPTYSLPCSSRSQESPADAVGGPAAHPGGTEAHSAGSEALEPRRCASCRTQRTPLWRDAEDGTPLCNACGIRYKKYGTRCSSCWLVPRKNVQPKRLCGRCGVSLDPIQEG

SEQ ID NO: 9969 - DNA, 2703 bp, Homo sapiens
tctgtgggagtcggacattgtgcccatctcccggagcctctgctgtcactcgcttgttgaagatgaattcttgaattctgcctgcccacccccggccagatccctggagctggcctccttccagcccagtgccagaaaccagcactccatgaagataaactctgggcccgcccaccagcaggacctgtcgacctgaggtgaccctgggccttgcccccagccaactgggccaccagcttccctcccttgactctgggggtccacatccactccaaggggactattcccccgaccccaccccagtctccccacacggacctttgctgaattaaagtttgtaagtaaatggttttaaagaaatcagagttggctggttcttgggacaaacagtgggcttgagtgggaggtctgggatggccccgcgggtttacctgagatggattccgccctgctcttcccacctggtcaccgcaggccctaagcaaacatctgcgcttatgttccattgattatgggctttccctcgcctccctggcgcggcgcatgctcagtcggtgagtcacgtgatgcatgtcatggccgcctccatggcccggggaggcgtgagtgccagggttctactgcaggctgccaggggcacctggtggaacagacctgggggcacttccgggtcgggggagggggtggcgctggggacaaccagaaagtttcaagcgacaggctcgcgcccggctggagaggaggacgcgggcggcccggagcggcccggggacgtggtgaacgtggtgttcgtagaccgctcaggccagcggatcccagtgagtggcagagtcggggacaatgttcttcacctggcccagcgccacggggtggacctggaaggggcctgtgaagcctccctggcctgctccacctgccatgtgtatgtgagtgaagaccacctggatctcctgcctcctcccgaggagaggagaactcgcggctgggctgccagattgtgctgacaccggagctggaaggagcggaattcaccctgcccaagatcaccaggaacttctacgtggatggccatgtccccaagccccactgacatgaacacctggaccattccacattgccatggccccagggcccagattgagggaatagccaggtgccagccctgcccagagtgcggacaggcccgggagagacgtggaagcccctgtgaaggacaacacccctgcttgggagagagtcccatgtccaggctctggtggggacagggcccctagtggggtggccttccccaggcccctgagaatcagggtttgagtaggagtggactcatattggagctgcaataaatcgataacacaggccccagcatgttgagtgtccttgggggacagatctggggtctacaccacacctgcatctgctgtgctgggcccccggttctcttttccctctgggatctaagatgccgctggggatccaaggcagaggcctgggagcccccatttccgagggggagggctagcgtggaaggccccgccccggcagctgcggagggatttggtggggtccaggccgcccttgccacgcaggggtgcgcggatgacctgaaaaaagccagaaagaggaaaggtgccgccgaggctggtcgctctcagctggggctcatcgcatcctctaccaagagcgctcccaccacacaggtcccgcccctcccagcaaagcttctggcgccgccctgtctgaacctggagcggctgggaggatccccctcccaggagaagccgaggaccccaggatgctgcagaatcagtgagaggtccctctggcctgcatgccaggagtcggtcaccgccctgtgcttcctccaagagacagtggagaggctggggattccaaggacacacagaccaggatcagccaaaagggccgccgtctgcagcccccggggactccctcggccccaccccagagaaggccccggaaacagctgaacccctgccggggcaccgagagagtggaccctgggttcgagggggtgactctgaagtttcagataaagccggactccagcctgcagatcatccccacgtacagcctgccctgcagtagccgttctcaggaatcccctgcagatgctgttgggggccctgcagcccacccaggaggcaccgaggcccactcagcaggcagcgaggccctggagccccggcgctgtgcttcctgtcggacccagaggaccccgctctggagagacgctgaagatgggacccctctctgcaacgcctgtgggatcaggtacaagaaatacggcactcgctgctccagctgctggctggtgcccaggaaaaatgtccagcccaagaggctatgtggcagatgtggagtgtccctggaccccattcaggaaggttaaacccagcttcaccctgctgagctgctgcttctgcctccgtttcaccagtgggagaatgggcagaagcagctctcctaggaggattggggaaagagccggcctgcctcctctctgccatctccagattcaaggatcccgggggaagacccaggcctcaggtggcagagcctgctaggggtcaccagccccttctccagtcagccttggccgaggccccctcaggagacgctctcaggaaggatgagcattgttacagcagggacaataaagtacagagatatgccgagaga

SEQ ID NO: 9970 - protein, 207 aa, Homo sapiens [sequence omitted]

SEQ ID NO: 9971 - DNA, 629 bp, Homo sapiens
tcccagggctgatccagagctaggtggggcctttactgagacccccacaaaatgcccgactccgcacaggcatcccgagctcacatgcttggcctctgacccctgccctttgacctctgacccttcagagccccggcgctgtgcttcctgtcggacccagaggaccccgctctggagagacgctgaagatgggacccctctctgcaacgcctgtgggatcaggtacaagaaatacggcactcgctgctccagctgctggctggtgcccaggaaaaatgtccagcccaagaggctatgtggcagatgtggagtgtccctggaccccattcaggaaggttaaacccagcttcaccctgctgagctgctgcttctgcctccgtttcaccagtgggagaatgggcagaagcagctctcctaggaggattggggaaagagccggcctgcctcctctctgccatctccagattcaaggatcccgggggaagacccaggcctcaggtggcagagcctgctaggggtcaccagccccttctccagtcagccttggccgaggccccctcaggagacgctctcaggaaggatgagcattgttacagcagggacaataaagtacagagatatgccgagag

SEQ ID NO: 9972 - protein, 108 aa, Homo sapiens
MGPLSATPVGSGTRNTALAAPAAGWCPGKMSSPRGYVADVECPWTPFRKVKPSFTLLSCCFCLRFTSGRMGRSSSPRRIGERAGLPPLCHLQIQGSRGKTQASGGRAC

SEQ ID NO: 9973 - DNA, 1748 bp, Homo sapiens
accctagggaagacgacatgctagacatggcccccctcctccaggagaactcgcggctgggctgccagattgtgctgacaccggagctggaaggagcggaattcaccctgcccaagatcaccaggaacttctacgtggatggccatgtccccaacccctgtgaaggacaacacccctgcttgggagagagtcccatgtccaggctctggtggggacagggcccctagtggggtggccttccccaggcccctgagaatcagggtttgagtaggagtggactcatattggagctgcaataaatcgataacacaggccccagcatgttgagtgtccttgggggacagatctggggtctacaggtggctcacacctgtaatcctagcactttgggaagccaagatgggaggatcacttgaggccaggagcttaagaccatcctgggcaacatggcgagacctcgtctctataaaaacagtaaaaattagcgtggagtggtggtaagtgcctgtagtcccagctactcgggagactgaggtgggaggatcacttgagcccaggggatttaggctgcagtggagcggtgatcaggccattccactccagcctgggtgacagagtgaggccctgtctcaaaaaaaaaaaaaacaaaaacaaaaacaaaccacacctgcatctgctgtgctgggcccccggttctcttttccctctgggatctaagatgccgctggggatccaaggcagaggcctgggagcccccatttccgagggggagggctagcgtggaaggccccgccccggcagctgcggagggatttggtggggtccaggccgcccttgccacgcaggggtgcgcggatgacctgaaaaaagccagaaagaggaaaggtgccgccgaggctggtcgctctcagctggggctcatcgcatcctctaccaagagcgctcccaccacacaggtcccgcccctcccaggtgggtttcatcgggtgggcccagcgggacagggccgggtgaaattagggagggggctgggctggggcgcaatggaggccgagccaatcccggactcctcaatgccagcaaagcttctggcgccgccctgtctgaacctggagcggctgggaggatccccctcccaggagaagccgaggaccccaggatgctgcagaatcagtgagaggtgcgtaaggccaaaccccattccccggaccccgctagcacttcaccacctggctcagtgatcaaggggtcatgacctctctttgctggggttatcgagaagtggcaattttataatagttactgaaacttacaaagaggttctggtgcccagagacacttggggtcatctagggatcagaggccatgcaattccatgtctctggggctgatgtaggcactccccagggatcatccaggggttatggagggcaactcaataataatgaaaatgataaaaatcgtaatcatattatggcaagccagcggcgtggtggcgcgtgcctgtaagtcccagctactcgggaggctgaggcggaaggatcggtcgagcccaggagttctaggctgcactgagtcctgatcacgcccctgcactccaggcgggggtacagagtgaggctcggtctctaaaagaaacacaaagaaaaaaagtaacctttttctcgatcctgcagccagaggcttgatatcctgcctcggtcacctagggcggtccctgcctgggtgatctacgggtgccgtaaggg

SEQ ID NO: 9974 - protein, 69 aa, Homo sapiens
MLDMAPLLQENSRLGCQIVLTPELEGAEFTLPKITRNFYVDGHVPNPCEGQHPCLGESPMSRLWWGQGP

SEQ ID NO: 9975 - DNA, 2209 bp, Homo sapiens
gctcggcgcagccgctcaccgaaccgtgttttccaggctcgcgcccggctggagaggaggacgcgggcggcccggagcggcccggggacgtattctacccgggccctgagcccatcatccagttcggcattcgcacttccatctgtccccagggtgaacgtggtgttcgtagaccgctcaggccagcggatcccagtgagtggcagagtcggggacaatgttcttcacctggcccagcgccacggggtggacctggaaggggcctgtgaagcctccctggcctgctccacctgccatgtgtatgtgagtgaagaccacctggatctcctgcctcctcccgaggagagggaagacgacatgctagacatggcccccctcctccaggagaactcgcggctgggctgccagattgtgctgacaccggagctggaaggagcggaattcaccctgcccaagatcaccaggaacttctacgtggatggccatgtccccaagccccactgacatgaacacctggaccattccacattgccatggccccagggcccagattgagggaatagccaggtgccagccctgcccagagtgcggacaggcccgggagagacgtggaagcccctgtgaaggacaacacccctgcttgggagagagtcccatgtccaggctctggtggggacagggcccctagtggggtggccttccccaggcccctgagaatcagggtttgagtaggagtggactcatattggagctgcaataaatcgataacacaggccccagcatgttgagtgtccttgggggacagatctggggtctacaggtggctcacacctgtaatcctagcactttgggaagccaagatgggaggatcacttgaggccaggagcttaagaccatcctgggcaacatggcgagacctcgtctctataaaaacagtaaaaattagcgtggagtggtggtaagtgcctgtagtcccagctactcgggagactgaggtgggaggatcacttgagcccaggggatttaggctgcagtggagcggtgatcaggccattccactccagcctgggtgacagagtgaggccctgtctcaaaaaaaaaaaaaacaaaaacaaaaacaaaccacacctgcatctgctgtgctgggcccccggttctcttttccctctgggatctaagatgccgctggggatccaaggcagaggcctgggagcccccatttccgagggggagggctagcgtggaaggccccgccccggcagctgcggagggatttggtggggtccaggccgcccttgccacgcaggggtgcgcggatgacctgaaaaaagccagaaagaggaaaggtgccgccgaggctggtcgctctcagctggggctcatcgcatcctctaccaagagcgctcccaccacacaggtcccgcccctcccaggtgggtttcatcgggtgggcccagcgggacagggccgggtgaaattagggagggggctgggctggggcgcaatggaggccgagccaatcccggactcctcaatgccagcaaagcttctggcgccgccctgtctgaacctggagcggctgggaggatccccctcccaggagaagccgaggaccccaggatgctgcagaatcagtgagaggtgcgtaaggccaaaccccattccccggaccccgctagcacttcaccacctggctcagtgatcaaggggtcatgacctctctttgctggggttatcgagaagtggcaattttataatagttactgaaacttacaaagaggttctggtgcccagagacacttggggtcatctagggatcagaggccatgcaattccatgtctctggggctgatgtaggcactccccagggatcatccaggggttatggagggcaactcaataataatgaaaatgataaaaatcgtaatcatattatggcaagccagcggcgtggtggcgcgtgcctgtaagtcccagctactcgggaggctgaggcggaaggatcggtcgagcccaggagttctaggctgcactgagtcctgatcacgcccctgcactccaggcgggggtacagagtgaggctcggtctctaaaagaaacacaaagaaaaaaagtaacctttttctcgatcctgcagccagaggcttgatatcctgcctcggtcacctagggcggtccctgcctgggtgatctacgggtgccgtaaggg

SEQ ID NO: 9976 - protein, 69 aa, Homo sapiens
MAMSPSPTDMNTWTIPHCHGPRAQIEGIARCQPCPECGQARERRGSPCEGQHPCLGESPMSRLWWGQGP

SEQ ID NO: 9977 - DNA, 2183 bp, Homo sapiens
caagcgacaggctcgcgcccggctggagaggaggacgcgggcggcccggagcggcccggggacgtattctacccgggccctgagcccatcatccagttcggcattcgcacttccatctgtccccagggtgaacgtggtgttcgtagaccgctcaggccagcggatcccagtgagtggcagagtcggggacaatgttcttcacctggcccagcgccacggggtggacctggaaggggcctgtgaagcctccctggcctgctccacctgccatgtgtatgtgagtgaagaccacctggatctcctgcctcctcccgaggagagggaagacgacatgctagacatggcccccctcctccaggagaactcgcggctgggctgccagattgtgctgacaccggagctggaaggagcggaattcaccctgcccaagatcaccaggaacttctacgtggatggccatgtccccaagccccactgacatgaacacctggaccattccacattgccatggccccagggcccagattgagggaatagccaggtgccagccctgcccagagtgcggacaggcccgggagagacgtggaagcccctgtgaaggacaacacccctgcttgggagagagtcccatgtccaggctctggtggggacagggcccctagtggggtggccttccccaggcccctgagaatcagggtttgagtaggagtggactcatattggagctgcaataaatcgataacacaggccccagcatgttgagtgtccttgggggacagatctggggtctacaggtggctcacacctgtaatcctagcactttgggaagccaagatgggaggatcacttgaggccaggagcttaagaccatcctgggcaacatggcgagacctcgtctctataaaaacagtaaaaattagcgtggagtggtggtaagtgcctgtagtcccagctactcgggagactgaggtgggaggatcacttgagcccaggggatttaggctgcagtggagcggtgatcaggccattccactccagcctgggtgacagagtgaggccctgtctcaaaaaaaaaaaaaacaaaaacaaaaacaaaccacacctgcatctgctgtgctgggcccccggttctcttttccctctgggatctaagatgccgctggggatccaaggcagaggcctgggagcccccatttccgagggggagggctagcgtggaaggccccgccccggcagctgcggagggatttggtggggtccaggccgcccttgccacgcaggggtgcgcggatgacctgaaaaaagccagaaagaggaaaggtgccgccgaggctggtcgctctcagctggggctcatcgcatcctctaccaagagcgctcccaccacacaggtcccgcccctcccaggtgggtttcatcgggtgggcccagcgggacagggccgggtgaaattagggagggggctgggctggggcgcaatggaggccgagccaatcccggactcctcaatgccagcaaagcttctggcgccgccctgtctgaacctggagcggctgggaggatccccctcccaggagaagccgaggaccccaggatgctgcagaatcagtgagaggtgcgtaaggccaaaccccattccccggaccccgctagcacttcaccacctggctcagtgatcaaggggtcatgacctctctttgctggggttatcgagaagtggcaattttataatagttactgaaacttacaaagaggttctggtgcccagagacacttggggtcatctagggatcagaggccatgcaattccatgtctctggggctgatgtaggcactccccagggatcatccaggggttatggagggcaactcaataataatgaaaatgataaaaatcgtaatcatattatggcaagccagcggcgtggtggcgcgtgcctgtaagtcccagctactcgggaggctgaggcggaaggatcggtcgagcccaggagttctaggctgcactgagtcctgatcacgcccctgcactccaggcgggggtacagagtgaggctcggtctctaaaagaaacacaaagaaaaaaagtaacctttttctcgatcctgcagccagaggcttgatatcctgcctcggtcacctagggcggtccctgcctgggtgatctacgggtgccgtaaggg

SEQ ID NO: 9978 - protein, 69 aa, Homo sapiens; identical to SEQ ID NO: 9976

SEQ ID NO: 9979 - DNA, 2294 bp, Homo sapiens
ccaggggcacctggtggaacagacctgggggcacttccgggtcgggggagggggtggcgctggggacaaccagaaagtttcaagcgacaggtacctggggcgcccggggcgggcagcgttaatccgtcagatgccggcggggcggggctcggcgcagccgctcaccgaaccgtgttttccaggctcgcgcccggctggagaggaggacgcgggcggcccggagcggcccggggacgtggtgaacgtggtgttcgtagaccgctcaggccagcggatcccagtgagtggcagagtcggggacaatgttcttcacctggcccagcgccacggggtggacctggaaggggcctgtgaagcctccctggcctgctccacctgccatgtgtatgtgagtgaagaccacctggatctcctgcctcctcccgaggagagggaagacgacatgctagacatggcccccctcctccaggagaactcgcggctgggctgccagattgtgctgacaccggagctggaaggagcggaattcaccctgcccaagatcaccaggaacttctacgtggatggccatgtccccaagccccactgacatgaacacctggaccattccacattgccatggccccagggcccagattgagggaatagccaggtgccagccctgcccagagtgcggacaggcccgggagagacgtggaagcccctgtgaaggacaacacccctgcttgggagagagtcccatgtccaggctctggtggggacagggcccctagtggggtggccttccccaggcccctgagaatcagggtttgagtaggagtggactcatattggagctgcaataaatcgataacacaggccccagcatgttgagtgtccttgggggacagatctggggtctacaggtggctcacacctgtaatcctagcactttgggaagccaagatgggaggatcacttgaggccaggagcttaagaccatcctgggcaacatggcgagacctcgtctctataaaaacagtaaaaattagcgtggagtggtggtaagtgcctgtagtcccagctactcgggagactgaggtgggaggatcacttgagcccaggggatttaggctgcagtggagcggtgatcaggccattccactccagcctgggtgacagagtgaggccctgtctcaaaaaaaaaaaaaacaaaaacaaaaacaaaccacacctgcatctgctgtgctgggcccccggttctcttttccctctgggatctaagatgccgctggggatccaaggcagaggcctgggagcccccatttccgagggggagggctagcgtggaaggccccgccccggcagctgcggagggatttggtggggtccaggccgcccttgccacgcaggggtgcgcggatgacctgaaaaaagccagaaagaggaaaggtgccgccgaggctggtcgctctcagctggggctcatcgcatcctctaccaagagcgctcccaccacacaggtcccgcccctcccaggtgggtttcatcgggtgggcccagcgggacagggccgggtgaaattagggagggggctgggctggggcgcaatggaggccgagccaatcccggactcctcaatgccagcaaagcttctggcgccgccctgtctgaacctggagcggctgggaggatccccctcccaggagaagccgaggaccccaggatgctgcagaatcagtgagaggtgcgtaaggccaaaccccattccccggaccccgctagcacttcaccacctggctcagtgatcaaggggtcatgacctctctttgctggggttatcgagaagtggcaattttataatagttactgaaacttacaaagaggttctggtgcccagagacacttggggtcatctagggatcagaggccatgcaattccatgtctctggggctgatgtaggcactccccagggatcatccaggggttatggagggcaactcaataataatgaaaatgataaaaatcgtaatcatattatggcaagccagcggcgtggtggcgcgtgcctgtaagtcccagctactcgggaggctgaggcggaaggatcggtcgagcccaggagttctaggctgcactgagtcctgatcacgcccctgcactccaggcgggggtacagagtgaggctcggtctctaaaagaaacacaaagaaaaaaagtaacctttttctcgatcctgcagccagaggcttgatatcctgcctcggtcacctagggcggtccctgcctgggtgatctacgggtgccgtaaggg

SEQ ID NO: 9980 - protein, 152 aa, Homo sapiens [sequence omitted]

SEQ ID NO: 9981 - DNA, 2128 bp, Homo sapiens
gaggcgtgagtgccagggttctactgcaggctgccaggggcacctggtggaacagacctgggggcacttccgggtcgggggagggggtggcgctggggacaaccagaaagtttcaagcgacaggctcgcgcccggctggagaggaggacgcgggcggcccggagcggcccggggacgtgggcctgtgaagcctccctggcctgctccacctgccatgtgtatgtgagtgaagaccacctggatctcctgcctcctcccgaggagagggaagacgacatgctagacatggcccccctcctccaggagaactcgcggctgggctgccagattgtgctgacaccggagctggaaggagcggaattcaccctgcccaagatcaccaggaacttctacgtggatggccatgtccccaagccccactgacatgaacacctggaccattccacattgccatggccccagggcccagattgagggaatagccaggtgccagccctgcccagagtgcggacaggcccgggagagacgtggaagcccctgtgaaggacaacacccctgcttgggagagagtcccatgtccaggctctggtggggacagggcccctagtggggtggccttccccaggcccctgagaatcagggtttgagtaggagtggactcatattggagctgcaataaatcgataacacaggccccagcatgttgagtgtccttgggggacagatctggggtctacaggtggctcacacctgtaatcctagcactttgggaagccaagatgggaggatcacttgaggccaggagcttaagaccatcctgggcaacatggcgagacctcgtctctataaaaacagtaaaaattagcgtggagtggtggtaagtgcctgtagtcccagctactcgggagactgaggtgggaggatcacttgagcccaggggatttaggctgcagtggagcggtgatcaggccattccactccagcctgggtgacagagtgaggccctgtctcaaaaaaaaaaaaaacaaaaacaaaaacaaaccacacctgcatctgctgtgctgggcccccggttctcttttccctctgggatctaagatgccgctggggatccaaggcagaggcctgggagcccccatttccgagggggagggctagcgtggaaggccccgccccggcagctgcggagggatttggtggggtccaggccgcccttgccacgcaggggtgcgcggatgacctgaaaaaagccagaaagaggaaaggtgccgccgaggctggtcgctctcagctggggctcatcgcatcctctaccaagagcgctcccaccacacaggtcccgcccctcccaggtgggtttcatcgggtgggcccagcgggacagggccgggtgaaattagggagggggctgggctggggcgcaatggaggccgagccaatcccggactcctcaatgccagcaaagcttctggcgccgccctgtctgaacctggagcggctgggaggatccccctcccaggagaagccgaggaccccaggatgctgcagaatcagtgagaggtgcgtaaggccaaaccccattccccggaccccgctagcacttcaccacctggctcagtgatcaaggggtcatgacctctctttgctggggttatcgagaagtggcaattttataatagttactgaaacttacaaagaggttctggtgcccagagacacttggggtcatctagggatcagaggccatgcaattccatgtctctggggctgatgtaggcactccccagggatcatccaggggttatggagggcaactcaataataatgaaaatgataaaaatcgtaatcatattatggcaagccagcggcgtggtggcgcgtgcctgtaagtcccagctactcgggaggctgaggcggaaggatcggtcgagcccaggagttctaggctgcactgagtcctgatcacgcccctgcactccaggcgggggtacagagtgaggctcggtctctaaaagaaacacaaagaaaaaaagtaacctttttctcgatcctgcagccagaggcttgatatcctgcctcggtcacctagggcggtccctgcctgggtgatctacgggtgccgtaaggg

SEQ ID NO: 9982 - protein, 69 aa, Homo sapiens; identical to SEQ ID NO: 9976

SEQ ID NO: 9983 - DNA, 2714 bp, Homo sapiens
tctgtgggagtcggacattgtgcccatctcccggagcctctgctgtcactcgcttgttgaagatgaattcttgaattctgcctgcccacccccggccagatccctggagctggcctccttccagcccagtgccagaaaccagcactccatgaagataaactctgggcccgcccaccagcaggacctgtcgacctgaggtgaccctgggccttgcccccagccaactgggccaccagcttccctcccttgactctgggggtccacatccactccaaggggactattcccccgaccccaccccagtctccccacacggacctttgctgaattaaagtttgtaagtaaatggttttaaagaaatcagagttggctggttcttgggacaaacagtgggcttgagtgggaggtctgggatggccccgcgggtttacctgagatggattccgccctgctcttcccacctggtcaccgcaggccctaagcaaacatctgcgcttatgttccattgattatgggctttccctcgcctccctggcgcggcgcatgctcagtcggtgagtcacgtgatgcatgtcatggccgcctccatggcccggggaggcgctcgcgcccggctggagaggaggacgcgggcggcccggagcggcccggggacgtggtgaacgtggtgttcgtagaccgctcaggccagcggatcccagtgagtggcagagtcggggacaatgttcttcacctggcccagcgccacggggtggacctggaaggggcctgtgaagcctccctggcctgctccacctgccatgtgtatgtgagtgaagaccacctggatctcctgcctcctcccgaggagagggaagacgacatgctagacatggcccccctcctccaggagaactcgcggctgggctgccagattgtgctgacaccggagctggaaggagcggaattcaccctgcccaagatcaccaggaacttctacgtggatggccatgtccccaagccccactgacatgaacacctggaccattccacattgccatggccccagggcccagattgagggaatagccaggtgccagccctgcccagagtgcggacaggcccgggagagacgtggaagcccctgtgaaggacaacacccctgcttgggagagagtcccatgtccaggctctggtggggacagggcccctagtggggtggccttccccaggcccctgagaatcagggtttgagtaggagtggactcatattggagctgcaataaatcgataacacaggccccagcatgttgagtgtccttgggggacagatctggggtctacaggtggctcacacctgtaatcctagcactttgggaagccaagatgggaggatcacttgaggccaggagcttaagaccatcctgggcaacatggcgagacctcgtctctataaaaacagtaaaaattagcgtggagtggtggtaagtgcctgtagtcccagctactcgggagactgaggtgggaggatcacttgagcccaggggatttaggctgcagtggagcggtgatcaggccattccactccagcctgggtgacagagtgaggccctgtctcaaaaaaaaaaaaaacaaaaacaaaaacaaaccacacctgcatctgctgtgctgggcccccggttctcttttccctctgggatctaagatgccgctggggatccaaggcagaggcctgggagcccccatttccgagggggagggctagcgtggaaggccccgccccggcagctgcggagggatttggtggggtccaggccgcccttgccacgcaggggtgcgcggatgacctgaaaaaagccagaaagaggaaaggtgccgccgaggctggtcgctctcagctggggctcatcgcatcctctaccaagagcgctcccaccacacaggtcccgcccctcccaggtgggtttcatcgggtgggcccagcgggacagggccgggtgaaattagggagggggctgggctggggcgcaatggaggccgagccaatcccggactcctcaatgccagcaaagcttctggcgccgccctgtctgaacctggagcggctgggaggatccccctcccaggagaagccgaggaccccaggatgctgcagaatcagtgagaggtgcgtaaggccaaaccccattccccggaccccgctagcacttcaccacctggctcagtgatcaaggggtcatgacctctctttgctggggttatcgagaagtggcaattttataatagttactgaaacttacaaagaggttctggtgcccagagacacttggggtcatctagggatcagaggccatgcaattccatgtctctggggctgatgtaggcactccccagggatcatccaggggttatggagggcaactcaataataatgaaaatgataaaaatcgtaatcatattatggcaagccagcggcgtggtggcgcgtgcctgtaagtcccagctactcgggaggctgaggcggaaggatcggtcgagcccaggagttctaggctgcactgagtcctgatcacgcccctgcactccaggcgggggtacagagtgaggctcggtctctaaaagaaacacaaagaaaaaaagtaacctttttctcgatcctgcagccagaggcttgatatcctgcctcggtcacctagggcggtccctgcctgggtgatctacgggtgccgtaaggg

SEQ ID NO: 9984 - protein, 165 aa, Homo sapiens
MGFPSPPWRGACSVGESRDACHGRLHGPGRRSRPAGEEDAGGPERPGDVVNVVFVDRSGQRIPVSGRVGDNVLHLAQRHGVDLEGACEASLACSTCHVYVSEDHLDLLPPPEEREDDMLDMAPLLQENSRLGCQIVLTPELEGAEFTLPKITRNFYVDGHVPKPH

SEQ ID NO: 9985 - DNA, 2832 bp, Homo sapiens
tctgtgggagtcggacattgtgcccatctcccggagcctctgctgtcactcgcttgttgaagatgaattcttgaattctgcctgcccacccccggccagatccctggagctggcctccttccagcccagtgccagaaaccagcactccatgaagataaactctgggcccgcccaccagcaggacctgtcgacctgaggtgaccctgggccttgcccccagccaactgggccaccagcttccctcccttgactctgggggtccacatccactccaaggggactattcccccgaccccaccccagtctccccacacggacctttgctgaattaaagtttgtaagtaaatggttttaaagaaatcagagttggctggttcttgggacaaacagtgggcttgagtgggaggtctgggatggccccgcgggtttacctgagatggattccgccctgctcttcccacctggtcaccgcaggccctaagcaaacatctgcgcttatgttccattgattatgggctttccctcgcctccctggcgcggcgcatgctcagtcggtgagtcacgtgatgcatgtcatggccgcctccatggcccggggaggcgtgagtgccagggttctactgcaggctgccaggggcacctggtggaacagacctgggggcacttccgggtcgggggagggggtggcgctggggacaaccagaaagtttcaagcgacaggctcgcgcccggctggagaggaggacgcgggcggcccggagcggcccggggacgtggtgaacgtggtgttcgtagaccgctcaggccagcggatcccagtgagtggcagagtcggggacaatgttcttcacctggcccagcgccacggggtggacctggaaggggcctgtgaagcctccctggcctgctccacctgccatgtgtatgtgagtgaagaccacctggatctcctgcctcctcccgaggagagggaagacgacatgctagacatggcccccctcctccaggagaactcgcggctgggctgccagattgtgctgacaccggagctggaaggagcggaattcaccctgcccaagatcaccaggaacttctacgtggatggccatgtccccaagccccactgacatgaacacctggaccattccacattgccatggccccagggcccagattgagggaatagccaggtgccagccctgcccagagtgcggacaggcccgggagagacgtggaagcccctgtgaaggacaacacccctgcttgggagagagtcccatgtccaggctctggtggggacagggcccctagtggggtggccttccccaggcccctgagaatcagggtttgagtaggagtggactcatattggagctgcaataaatcgataacacaggccccagcatgttgagtgtccttgggggacagatctggggtctacaggtggctcacacctgtaatcctagcactttgggaagccaagatgggaggatcacttgaggccaggagcttaagaccatcctgggcaacatggcgagacctcgtctctataaaaacagtaaaaattagcgtggagtggtggtaagtgcctgtagtcccagctactcgggagactgaggtgggaggatcacttgagcccaggggatttaggctgcagtggagcggtgatcaggccattccactccagcctgggtgacagagtgaggccctgtctcaaaaaaaaaaaaaacaaaaacaaaaacaaaccacacctgcatctgctgtgctgggcccccggttctcttttccctctgggatctaagatgccgctggggatccaaggcagaggcctgggagcccccatttccgagggggagggctagcgtggaaggccccgccccggcagctgcggagggatttggtggggtccaggccgcccttgccacgcaggggtgcgcggatgacctgaaaaaagccagaaagaggaaaggtgccgccgaggctggtcgctctcagctggggctcatcgcatcctctaccaagagcgctcccaccacacaggtcccgcccctcccaggtgggtttcatcgggtgggcccagcgggacagggccgggtgaaattagggagggggctgggctggggcgcaatggaggccgagccaatcccggactcctcaatgccagcaaagcttctggcgccgccctgtctgaacctggagcggctgggaggatccccctcccaggagaagccgaggaccccaggatgctgcagaatcagtgagaggtgcgtaaggccaaaccccattccccggaccccgctagcacttcaccacctggctcagtgatcaaggggtcatgacctctctttgctggggttatcgagaagtggcaattttataatagttactgaaacttacaaagaggttctggtgcccagagacacttggggtcatctagggatcagaggccatgcaattccatgtctctggggctgatgtaggcactccccagggatcatccaggggttatggagggcaactcaataataatgaaaatgataaaaatcgtaatcatattatggcaagccagcggcgtggtggcgcgtgcctgtaagtcccagctactcgggaggctgaggcggaaggatcggtcgagcccaggagttctaggctgcactgagtcctgatcacgcccctgcactccaggcgggggtacagagtgaggctcggtctctaaaagaaacacaaagaaaaaaagtaacctttttctcgatcctgcagccagaggcttgatatcctgcctcggtcacctagggcggtccctgcctgggtgatctacgggtgccgtaaggg

SEQ ID NO: 9986 - protein, 186 aa, Homo sapiens
MHVMAASMARGGVSARVLLQAARGTWWNRPGGTSGSGEGVALGTTRKFQATGSRPAGEEDAGGPERPGDVVNVVFVDRSGQRIPVSGRVGDNVLHLAQRHGVDLEGACEASLACSTCHVYVSEDHLDLLPPPEEREDDMLDMAPLLQENSRLGCQIVLTPELEGAEFTLPKITRNFYVDGHVPKPH

SEQ ID NO: 9987 - DNA, 2887 bp, Homo sapiens
tctgtgggagtcggacattgtgcccatctcccggagcctctgctgtcactcgcttgttgaagatgaattcttgaattctgcctgcccacccccggccagatccctggagctggcctccttccagcccagtgccagaaaccagcactccatgaagataaactctgggcccgcccaccagcaggacctgtcgacctgaggtgaccctgggccttgcccccagccaactgggccaccagcttccctcccttgactctgggggtccacatccactccaaggggactattcccccgaccccaccccagtctccccacacggacctttgctgaattaaagtttgtaagtaaatggttttaaagaaatcagagttggctggttcttgggacaaacagtgggcttgagtgggaggtctgggatggccccgcgggtttacctgagatggattccgccctgctcttcccacctggtcaccgcaggccctaagcaaacatctgcgcttatgttccattgattatgggctttccctcgcctccctggcgcggcgcatgctcagtcggtgagtcacgtgatgcatgtcatggccgcctccatggcccggggaggcgtgagtgccagggttctactgcaggctgccaggggcacctggtggaacagacctgggggcacttccgggtcgggggagggggtggcgctggggacaaccagaaagtttcaagcgacaggtacctggggcgcccggggcgggcagcgttaatccgtcagatgccggcggggcggggctcggcgcagccgctcaccgaaccgtgttttccaggctcgcgcccggctggagaggaggacgcgggcggcccggagcggcccggggacgtggtgaacgtggtgttcgtagaccgctcaggccagcggatcccagtgagtggcagagtcggggacaatgttcttcacctggcccagcgccacggggtggacctggaaggggcctgtgaagcctccctggcctgctccacctgccatgtgtatgtgagtgaagaccacctggatctcctgcctcctcccgaggagaggagaactcgcggctgggctgccagattgtgctgacaccggagctggaaggagcggaattcaccctgcccaagatcaccaggaacttctacgtggatggccatgtccccaagccccactgacatgaacacctggaccattccacattgccatggccccagggcccagattgagggaatagccaggtgccagccctgcccagagtgcggacaggcccgggagagacgtggaagcccctgtgaaggacaacacccctgcttgggagagagtcccatgtccaggctctggtggggacagggcccctagtggggtggccttccccaggcccctgagaatcagggtttgagtaggagtggactcatattggagctgcaataaatcgataacacaggccccagcatgttgagtgtccttgggggacagatctggggtctacaggtggctcacacctgtaatcctagcactttgggaagccaagatgggaggatcacttgaggccaggagcttaagaccatcctgggcaacatggcgagacctcgtctctataaaaacagtaaaaattagcgtggagtggtggtaagtgcctgtagtcccagctactcgggagactgaggtgggaggatcacttgagcccaggggatttaggctgcagtggagcggtgatcaggccattccactccagcctgggtgacagagtgaggccctgtctcaaaaaaaaaaaaaacaaaaacaaaaacaaaccacacctgcatctgctgtgctgggcccccggttctcttttccctctgggatctaagatgccgctggggatccaaggcagaggcctgggagcccccatttccgagggggagggctagcgtggaaggccccgccccggcagctgcggagggatttggtggggtccaggccgcccttgccacgcaggggtgcgcggatgacctgaaaaaagccagaaagaggaaaggtgccgccgaggctggtcgctctcagctggggctcatcgcatcctctaccaagagcgctcccaccacacaggtcccgcccctcccaggtgggtttcatcgggtgggcccagcgggacagggccgggtgaaattagggagggggctgggctggggcgcaatggaggccgagccaatcccggactcctcaatgccagcaaagcttctggcgccgccctgtctgaacctggagcggctgggaggatccccctcccaggagaagccgaggaccccaggatgctgcagaatcagtgagaggtgcgtaaggccaaaccccattccccggaccccgctagcacttcaccacctggctcagtgatcaaggggtcatgacctctctttgctggggttatcgagaagtggcaattttataatagttactgaaacttacaaagaggttctggtgcccagagacacttggggtcatctagggatcagaggccatgcaattccatgtctctggggctgatgtaggcactccccagggatcatccaggggttatggagggcaactcaataataatgaaaatgataaaaatcgtaatcatattatggcaagccagcggcgtggtggcgcgtgcctgtaagtcccagctactcgggaggctgaggcggaaggatcggtcgagcccaggagttctaggctgcactgagtcctgatcacgcccctgcactccaggcgggggtacagagtgaggctcggtctctaaaagaaacacaaagaaaaaaagtaacctttttctcgatcctgcagccagaggcttgatatcctgcctcggtcacctagggcggtccctgcctgggtgatctacgggtgccgtaaggg

SEQ ID NO: 9988 - protein, 194 aa, Homo sapiens
MGFPSPPWRGACSVGESRDACHGRLHGPGRRECQGSTAGCQGHLVEQTWGHFRVGGGGGAGDNQKVSSDRYLGRPGRAALIRQMPAGRGSAQPLTEPCFPGSRPAGEEDAGGPERPGDVVNVVFVDRSGQRIPVSGRVGDNVLHLAQRHGVDLEGACEASLACSTCHVYVSEDHLDLLPPPEERRTRGWAARLC

SEQ ID NO: 9989 - DNA, 1567 bp, Homo sapiens
tctgtgggagtcggacattgtgcccatctcccggagcctctgctgtcactcgcttgttgaagatgaattcttgaattctgcctgcccacccccggccagatccctggagctggcctccttccagcccagtgccagaaaccagcactccatgaagataaactctgggcccgcccaccagcaggacctgtcgacctgaggtgaccctgggccttgcccccagccaactgggccaccagcttccctcccttgactctgggggtccacatccactccaaggggactattcccccgaccccaccccagtctccccacacggacctttgctgaattaaagtttgtaagtaaatggttttaaagaaatcagagttggctggttcttgggacaaacagtgggcttgagtgggaggtctgggatggccccgcgggtttacctgagatggattccgccctgctcttcccacctggtcaccgcaggccctaagcaaacatctgcgcttatgttccattgattatgggctttccctcgcctccctggcgcggcgcatgctcagtcggtgagtcacgtgatgcatgtcatggccgcctccatggcccggggaggcgtgagtgccagggttctactgcaggctgccaggggcacctggtggaacagacctgggggcacttccgggtcgggggagggggtggcgctggggacaaccagaaagtttcaagcgacaggctcgcgcccggctggagaggaggacgcgggcggcccggagcggcccggggacgtggtgaacgtggtgttcgtagaccgctcaggccagcggatcccagtgagtggcagagtcggggacaatgttcttcacctggcccagcgccacggggtggacctggaaggggcctgtgaagcctccctggcctgctccacctgccatgtgtatgtgagtgaagaccacctggatctcctgcctcctcccgaggagagggaagacgacatgctagacatggcccccctcctccaggagaactcgcggctgggctgccagattgtgctgacaccggagctggaaggagcggaattcaccctgcccaagatcaccaggaacttctacgtggatggccatgtccccaagccccactgacatgaacacctggaccattccacattgccatggccccagggcccagattgagggaatagccaggtgccagccctgcccagagtgcggacaggcccgggagagacgtggaagcccctgtgaaggacaacacccctgcttgggagagagtcccatgtccaggctctggtggggacagggcccctagtggggtggccttccccaggcccctgagaatcagggtttgagtaggagtggactcatattggagctgcaataaatcgataacacaggccccagcatgttgagtgtccttgggggacagatctggggtctacaggtggctcacacctgtaatcctagcactttgggaagccaagatgggaggatcacttgaggccaggagcttaagaccatcctgggcaacatggcgagacctcgtctctataaaaacagtaaaaatt

SEQ ID NO: 9990 - protein, 186 aa, Homo sapiens; identical to SEQ ID NO: 9986

SEQ ID NO: 9991 - DNA, 455 bp, Homo sapiens
ggccagcggatcccagtgagtggcagagtcggggacaatgttcttcacctggcccagcgccacggggtggacctggaaggggcctgtgaagcctccctggcctgctccacctgccatgtgtatgtgagtgaagaccaccaggaacttctacgtggatggccatgtccccaagccccactgacatgaacacctggaccattccacattgccatggccccagggcccagattgagggaatagccaggtgccagccctgcccagagtgcggacaggcccgggagagacgtggaagcccctgtgaaggacaacacccctgcttgggagagagtcccatgtccaggctctggtggggacagggcccctagtggggtggccttccccaggcccctgagaatcagggtttgagtaggagtggactcatattggagctgcaataaatcgataacacaggcccc

SEQ ID NO: 9992 - protein, 69 aa, Homo sapiens; identical to SEQ ID NO: 9976

SEQ ID NO: 9993 - DNA, 778 bp, Homo sapiens
gctcggcgcagccgctcaccgaaccgtgttttccaggctcgcgcccggctggagaggaggacgcgggcggcccggagcggcccggggacgtattctacccgggccctgagcccatcatccagttcggcattcgcacttccatctgtccccagggtgaacgtggtgttcgtagaccgctcaggccagcggatcccagtgagtggcagagtcggggacaatgttcttcacctggcccagcgccacggggtggacctggaaggggcctgtgaagcctccctggcctgctccacctgccatgtgtatgtgagtgaagaccacctggatctcctgcctcctcccgaggagagggaagacgacatgctagacatggcccccctcctccaggagaactcgcggctgggctgccagattgtgctgacaccggagctggaaggagcggaattcaccctgcccaagatcaccaggaacttctacgtggatggccatgtccccaagccccactgacatgaacacctggaccattccacattgccatggccccagggcccagattgagggaatagccaggtgccagccctgcccagagtgcggacaggcccgggagagacgtggaagcccctgtgaaggacaacacccctgcttgggagagagtcccatgtccaggctctggtggggacagggcccctagtggggtggccttccccaggcccctgagaatcagggtttgagtaggagtggactcatattggagctgcaataaatcgataacacaggcccc

SEQ ID NO: 9994 - protein, 69 aa, Homo sapiens; identical to SEQ ID NO: 9976

SEQ ID NO: 9995 - DNA, 752 bp, Homo sapiens
caagcgacaggctcgcgcccggctggagaggaggacgcgggcggcccggagcggcccggggacgtattctacccgggccctgagcccatcatccagttcggcattcgcacttccatctgtccccagggtgaacgtggtgttcgtagaccgctcaggccagcggatcccagtgagtggcagagtcggggacaatgttcttcacctggcccagcgccacggggtggacctggaaggggcctgtgaagcctccctggcctgctccacctgccatgtgtatgtgagtgaagaccacctggatctcctgcctcctcccgaggagagggaagacgacatgctagacatggcccccctcctccaggagaactcgcggctgggctgccagattgtgctgacaccggagctggaaggagcggaattcaccctgcccaagatcaccaggaacttctacgtggatggccatgtccccaagccccactgacatgaacacctggaccattccacattgccatggccccagggcccagattgagggaatagccaggtgccagccctgcccagagtgcggacaggcccgggagagacgtggaagcccctgtgaaggacaacacccctgcttgggagagagtcccatgtccaggctctggtggggacagggcccctagtggggtggccttccccaggcccctgagaatcagggtttgagtaggagtggactcatattggagctgcaataaatcgataacacaggcccc

SEQ ID NO: 9996 - protein, 69 aa, Homo sapiens; identical to SEQ ID NO: 9976

SEQ ID NO: 9997 - DNA, 863 bp, Homo sapiens
ccaggggcacctggtggaacagacctgggggcacttccgggtcgggggagggggtggcgctggggacaaccagaaagtttcaagcgacaggtacctggggcgcccggggcgggcagcgttaatccgtcagatgccggcggggcggggctcggcgcagccgctcaccgaaccgtgttttccaggctcgcgcccggctggagaggaggacgcgggcggcccggagcggcccggggacgtggtgaacgtggtgttcgtagaccgctcaggccagcggatcccagtgagtggcagagtcggggacaatgttcttcacctggcccagcgccacggggtggacctggaaggggcctgtgaagcctccctggcctgctccacctgccatgtgtatgtgagtgaagaccacctggatctcctgcctcctcccgaggagagggaagacgacatgctagacatggcccccctcctccaggagaactcgcggctgggctgccagattgtgctgacaccggagctggaaggagcggaattcaccctgcccaagatcaccaggaacttctacgtggatggccatgtccccaagccccactgacatgaacacctggaccattccacattgccatggccccagggcccagattgagggaatagccaggtgccagccctgcccagagtgcggacaggcccgggagagacgtggaagcccctgtgaaggacaacacccctgcttgggagagagtcccatgtccaggctctggtggggacagggcccctagtggggtggccttccccaggcccctgagaatcagggtttgagtaggagtggactcatattggagctgcaataaatcgataacacaggcccc

SEQ ID NO: 9998 - protein, 152 aa, Homo sapiens [sequence omitted]

SEQ ID NO: 9999 - DNA, 697 bp, Homo sapiens
gaggcgtgagtgccagggttctactgcaggctgccaggggcacctggtggaacagacctgggggcacttccgggtcgggggagggggtggcgctggggacaaccagaaagtttcaagcgacaggctcgcgcccggctggagaggaggacgcgggcggcccggagcggcccggggacgtgggcctgtgaagcctccctggcctgctccacctgccatgtgtatgtgagtgaagaccacctggatctcctgcctcctcccgaggagagggaagacgacatgctagacatggcccccctcctccaggagaactcgcggctgggctgccagattgtgctgacaccggagctggaaggagcggaattcaccctgcccaagatcaccaggaacttctacgtggatggccatgtccccaagccccactgacatgaacacctggaccattccacattgccatggccccagggcccagattgagggaatagccaggtgccagccctgcccagagtgcggacaggcccgggagagacgtggaagcccctgtgaaggacaacacccctgcttgggagagagtcccatgtccaggctctggtggggacagggcccctagtggggtggccttccccaggcccctgagaatcagggtttgagtaggagtggactcatattggagctgcaataaatcgataacacaggcccc

SEQ ID NO: 10000 - protein, 69 aa, Homo sapiens; identical to SEQ ID NO: 9976

SEQ ID NO: 10001 - DNA, 1401 bp, Homo sapiens
tctgtgggagtcggacattgtgcccatctcccggagcctctgctgtcactcgcttgttgaagatgaattcttgaattctgcctgcccacccccggccagatccctggagctggcctccttccagcccagtgccagaaaccagcactccatgaagataaactctgggcccgcccaccagcaggacctgtcgacctgaggtgaccctgggccttgcccccagccaactgggccaccagcttccctcccttgactctgggggtccacatccactccaaggggactattcccccgaccccaccccagtctccccacacggacctttgctgaattaaagtttgtaagtaaatggttttaaagaaatcagagttggctggttcttgggacaaacagtgggcttgagtgggaggtctgggatggccccgcgggtttacctgagatggattccgccctgctcttcccacctggtcaccgcaggccctaagcaaacatctgcgcttatgttccattgattatgggctttccctcgcctccctggcgcggcgcatgctcagtcggtgagtcacgtgatgcatgtcatggccgcctccatggcccggggaggcgtgagtgccagggttctactgcaggctgccaggggcacctggtggaacagacctgggggcacttccgggtcgggggagggggtggcgctggggacaaccagaaagtttcaagcgacaggctcgcgcccggctggagaggaggacgcgggcggcccggagcggcccggggacgtggtgaacgtggtgttcgtagaccgctcaggccagcggatcccagtgagtggcagagtcggggacaatgttcttcacctggcccagcgccacggggtggacctggaaggggcctgtgaagcctccctggcctgctccacctgccatgtgtatgtgagtgaagaccacctggatctcctgcctcctcccgaggagagggaagacgacatgctagacatggcccccctcctccaggagaactcgcggctgggctgccagattgtgctgacaccggagctggaaggagcggaattcaccctgcccaagatcaccaggaacttctacgtggatggccatgtccccaagccccactgacatgaacacctggaccattccacattgccatggccccagggcccagattgagggaatagccaggtgccagccctgcccagagtgcggacaggcccgggagagacgtggaagcccctgtgaaggacaacacccctgcttgggagagagtcccatgtccaggctctggtggggacagggcccctagtggggtggccttccccaggcccctgagaatcagggtttgagtaggagtggactcatattggagctgcaataaatcgataacacaggcccc

SEQ ID NO: 10002 - protein, 186 aa, Homo sapiens; identical to SEQ ID NO: 9986

SEQ ID NO: 10003 - DNA, 1364 bp, Homo sapiens
tctgtgggagtcggacattgtgcccatctcccggagcctctgctgtcactcgcttgttgaagatgaattcttgaattctgcctgcccacccccggccagatccctggagctggcctccttccagcccagtgccagaaaccagcactccatgaagataaactctgggcccgcccaccagcaggacctgtcgacctgaggtgaccctgggccttgcccccagccaactgggccaccagcttccctcccttgactctgggggtccacatccactccaaggggactattcccccgaccccaccccagtctccccacacggacctttgctgaattaaagtttgtaagtaaatggttttaaagaaatcagagttggctggttcttgggacaaacagtgggcttgagtgggaggtctgggatggccccgcgggtttacctgagatggattccgccctgctcttcccacctggtcaccgcaggccctaagcaaacatctgcgcttatgttccattgattatgggctttccctcgcctccctggcgcggcgcatgctcagtcggtgagtcacgtgatgcatgtcatggccgcctccatggcccggggaggcgtgagtgccagggttctactgcaggctgccaggggcacctggtggaacagacctgggggcacttccgggtcgggggagggggtggcgctggggacaaccagaaagtttcaagcgacaggctcgcgcccggctggagaggaggacgcgggcggcccggagcggcccggggacgtggtgaacgtggtgttcgtagaccgctcaggccagcggatcccagtgagtggcagagtcggggacaatgttcttcacctggcccagcgccacggggtggacctggaaggggcctgtgaagcctccctggcctgctccacctgccatgtgtatgtgagtgaagaccacctggatctcctgcctcctcccgaggagaggagaactcgcggctgggctgccagattgtgctgacaccggagctggaaggagcggaattcaccctgcccaagatcaccaggaacttctacgtggatggccatgtccccaagccccactgacatgaacacctggaccattccacattgccatggccccagggcccagattgagggaatagccaggtgccagccctgcccagagtgcggacaggcccgggagagacgtggaagcccctgtgaaggacaacacccctgcttgggagagagtcccatgtccaggctctggtggggacagggcccctagtggggtggccttccccaggcccctgagaatcagggtttgagtaggagtggactcatattggagctgcaataaatcgataacacaggcccc

SEQ ID NO: 10004 - protein, 145 aa, Homo sapiens
MHVMAASMARGGVSARVLLQAARGTWWNRPGGTSGSGEGVALGTTRKFQATGSRPAGEEDAGGPERPGDVVNVVFVDRSGQRIPVSGRVGDNVLHLAQRHGVDLEGACEASLACSTCHVYVSEDHLDLLPPPEERRTRGWAARLC

SEQ ID NO: 10005 - DNA, 1456 bp, Homo sapiens
tctgtgggagtcggacattgtgcccatctcccggagcctctgctgtcactcgcttgttgaagatgaattcttgaattctgcctgcccacccccggccagatccctggagctggcctccttccagcccagtgccagaaaccagcactccatgaagataaactctgggcccgcccaccagcaggacctgtcgacctgaggtgaccctgggccttgcccccagccaactgggccaccagcttccctcccttgactctgggggtccacatccactccaaggggactattcccccgaccccaccccagtctccccacacggacctttgctgaattaaagtttgtaagtaaatggttttaaagaaatcagagttggctggttcttgggacaaacagtgggcttgagtgggaggtctgggatggccccgcgggtttacctgagatggattccgccctgctcttcccacctggtcaccgcaggccctaagcaaacatctgcgcttatgttccattgattatgggctttccctcgcctccctggcgcggcgcatgctcagtcggtgagtcacgtgatgcatgtcatggccgcctccatggcccggggaggcgtgagtgccagggttctactgcaggctgccaggggcacctggtggaacagacctgggggcacttccgggtcgggggagggggtggcgctggggacaaccagaaagtttcaagcgacaggtacctggggcgcccggggcgggcagcgttaatccgtcagatgccggcggggcggggctcggcgcagccgctcaccgaaccgtgttttccaggctcgcgcccggctggagaggaggacgcgggcggcccggagcggcccggggacgtggtgaacgtggtgttcgtagaccgctcaggccagcggatcccagtgagtggcagagtcggggacaatgttcttcacctggcccagcgccacggggtggacctggaaggggcctgtgaagcctccctggcctgctccacctgccatgtgtatgtgagtgaagaccacctggatctcctgcctcctcccgaggagaggagaactcgcggctgggctgccagattgtgctgacaccggagctggaaggagcggaattcaccctgcccaagatcaccaggaacttctacgtggatggccatgtccccaagccccactgacatgaacacctggaccattccacattgccatggccccagggcccagattgagggaatagccaggtgccagccctgcccagagtgcggacaggcccgggagagacgtggaagcccctgtgaaggacaacacccctgcttgggagagagtcccatgtccaggctctggtggggacagggcccctagtggggtggccttccccaggcccctgagaatcagggtttgagtaggagtggactcatattggagctgcaataaatcgataacacaggcccc

SEQ ID NO: 10006 - protein, 194 aa, Homo sapiens; identical to SEQ ID NO: 9988

SEQ ID NO: 10007 - DNA, 1283 bp, Homo sapiens
tctgtgggagtcggacattgtgcccatctcccggagcctctgctgtcactcgcttgttgaagatgaattcttgaattctgcctgcccacccccggccagatccctggagctggcctccttccagcccagtgccagaaaccagcactccatgaagataaactctgggcccgcccaccagcaggacctgtcgacctgaggtgaccctgggccttgcccccagccaactgggccaccagcttccctcccttgactctgggggtccacatccactccaaggggactattcccccgaccccaccccagtctccccacacggacctttgctgaattaaagtttgtaagtaaatggttttaaagaaatcagagttggctggttcttgggacaaacagtgggcttgagtgggaggtctgggatggccccgcgggtttacctgagatggattccgccctgctcttcccacctggtcaccgcaggccctaagcaaacatctgcgcttatgttccattgattatgggctttccctcgcctccctggcgcggcgcatgctcagtcggtgagtcacgtgatgcatgtcatggccgcctccatggcccggggaggcgctcgcgcccggctggagaggaggacgcgggcggcccggagcggcccggggacgtggtgaacgtggtgttcgtagaccgctcaggccagcggatcccagtgagtggcagagtcggggacaatgttcttcacctggcccagcgccacggggtggacctggaaggggcctgtgaagcctccctggcctgctccacctgccatgtgtatgtgagtgaagaccacctggatctcctgcctcctcccgaggagagggaagacgacatgctagacatggcccccctcctccaggagaactcgcggctgggctgccagattgtgctgacaccggagctggaaggagcggaattcaccctgcccaagatcaccaggaacttctacgtggatggccatgtccccaagccccactgacatgaacacctggaccattccacattgccatggccccagggcccagattgagggaatagccaggtgccagccctgcccagagtgcggacaggcccgggagagacgtggaagcccctgtgaaggacaacacccctgcttgggagagagtcccatgtccaggctctggtggggacagggcccctagtggggtggccttccccaggcccctgagaatcagggtttgagtaggagtggactcatattggagctgcaataaatcgataacacaggcccc

SEQ ID NO: 10008 - protein, 165 aa, Homo sapiens; identical to SEQ ID NO: 9984

SEQ ID NO: 10009 - DNA, 1141 bp, Homo sapiens
tctgtgggagtcggacattgtgcccatctcccggagcctctgctgtcactcgcttgttgaagatgaattcttgaattctgcctgcccacccccggccagatccctggagctggcctccttccagcccagtgccagaaaccagcactccatgaagataaactctgggcccgcccaccagcaggacctgtcgacctgaggtgaccctgggccttgcccccagccaactgggccaccagcttccctcccttgactctgggggtccacatccactccaaggggactattcccccgaccccaccccagtctccccacacggacctttgctgaattaaagtttgtaagtaaatggttttaaagaaatcagagttggctggttcttgggacaaacagtgggcttgagtgggaggtctgggatggccccgcgggtttacctgagatggattccgccctgctcttcccacctggtcaccgcaggccctaagcaaacatctgcgcttatgttccattgattatgggctttccctcgcctccctggcgcggcgcatgctcagtcggtgagtcacgtgatgcatgtcatggccgcctccatggcccggggaggcgtgagtgccagggttctactgcaggctgccaggggcacctggtggaacagacctgggggcacttccgggtcgggggagggggtggcgctggggacaaccagaaagtttcaagcgacaggctcgcgcccggctggagaggaggacgcgggcggcccggagcggcccggggacgtgtgagtgcagggggccaagtcccccattcctcatcccacggaattcctctggtccccatcttgccctgtagcttcatctcgaggtcccccttctgctttgccctattcagtacctgtgcgtcaagcctcaattcctacttcctaaccctagattctacccgggccctgagcccatcatccagttcggcattcgcacttccatctgtccccagggtgaacgtggtgttcgtagaccgctcaggccagcggatcccagtgagtggcagagtcggggacaatgttcttcacctggcccagcgccacggggtggacctggaaggtaggaaccgggcagagggaattaaggaggtccttatacatttgtcc

SEQ ID NO: 10010 - protein, 209 aa, Homo sapiens
MGFPSPPWRGACSVGESRDACHGRLHGPGRRECQGSTAGCQGHLVEQTWGHFRVGGGGGAGDNQKVSSDRLAPGWRGGRGRPGAARGRVSAGGQVPHSSSHGIPLVPILPCSFISRSPFCFALFSTCASSLNSYFLTLDSTRALSPSSSSAFALPSVPRVNVVFVDRSGQRIPVSGRVGDNVLHLAQRHGVDLEGRNRAEGIKEVLIHL

SEQ ID NO: 10011 - DNA, 5739 bp, Homo sapiens
cgagcgcggcggcggcggcggcagcggcggccccggagccggcggggccgagcttgcgagcggcgagcgcggagcggcgccgggccgagcgcggggccgcgggccgggcgggcgcagcgcggcggaggccggaggagccgagccggagcccgagcccgagcgcggccgccgcctgccgggcctcccctcgccgcggccggccgccgcgctcccgcccgggcgcccagctatgtactccccgtactgcctcacccaggatgagttccacccgttcatcgaggcactgctgcctcacgtccgcgctttctcctacacctggttcaacctgcaggcgcggaagcgcaagtacttcaagaagcatgaaaagcggatgtcgaaggacgaggagcgggcggtgaaggacgagctgctgggcgagaagcccgagatcaagcagaagtgggcatcccggctgctggccaagctgcgcaaggacatccggcccgagttccgcgaggacttcgtgctgaccatcacgggcaagaagcccccctgctgcgtgctctccaaccccgaccagaagggcaagatccggcggattgactgcctgcgccaggctgacaaggtgtggcggctggacctggtcatggtgattttgtttaaggggatccccctggaaagtactgatggggagcggctctacaagtcgcctcagtgctcgaaccccggcctgtgcgtccagccacatcacattggagtcacaatcaaagaactggatctttatctggcttactttgtccacactccggaatccggacaatcagatagttcaaaccagcaaggagatgcggacatcaaaccactgcccaacgggcacttaagtttccaggactgttttgtgacttccggggtctggaatgtgacggagctggtgagagtatcacagactcctgttgcaacagcatcagggcccaacttctccctggcggacctggagagtcccagctactacaacatcaaccaggtgaccctggggcggcggtccatcacctcccctccttccaccagcaccaccaagcgccccaagtccatcgatgacagtgagatggagagccctgttgatgacgtgttctatcccgggacaggccgttccccagcagctggcagcagccagtccagcgggtggcccaacgatgtggatgcaggcccggcttctctaaagaagtcaggaaagctggacttctgcagtgccctctcctctcagggcagctccccgcgcatggctttcacccaccacccgctgcctgtgcttgctggagtcagaccagggagcccccgggccacagcatcagccctgcacttcccctccacgtccatcatccagcagtcgagcccgtatttcacgcacccgaccatccgctaccaccaccaccacgggcaggactcactgaaggagtttgtgcagtttgtgtgctcggatggctcgggccaggccaccggacagcattcgcaacgacaggcgcctcctctgccaaccggtttgtcagcatcggaccccgggacggcaactttctgaacatcccacagcagtctcagtcctggttcctctgataagatcgacaaaagaaacaacaaaatgagaagaagaggttcctcgaaaggggggagaagaaattttgagaatggaaaaatcccccagcccagcccagccccaccgaaaagcaaaaattacacgtcgtcagccactcagcccttctctcctccagcccggggacccccgcgggccccagaagcagcccagttctcagagagcccttggaaggggtctcggtggagctgtgcaccagcagccaagcagaaagaaacacgcgacatggactctgtcaagtagaggacagaaagcaagaaaggatgcagaactgccttcctccccctgaccccgccccggccttctggggaaggaacaaagtccccaaacaaagcaaccagcacaattctgaaggggcctggcctccaccctcaccccttcctaggggaaccccaccctccacacagccggagctgccctagggagcctggagggccagcttgtaaagatgatggggtttagatccctcaggctctcccctccagactccgcccttccctccctccctccctccctccctctctgccaaggctccagcttcttcccccagctgctcccgaccaggagggggagagcagcctccacttaccccaccccacccttgggctaaaagcccccaggcgggcagggggtgacccctggagctagttgcgtgtcccagaatggagggtgttctgacaccccaccctgagccgcaagagcagtcctggggccctggacccctctgtacagtccgtaggaaaaagtcggaatgctctcgacggcctcgtcccagcctgggacaggccccctttcccctctctctgcaggccaggagggcctccttcctgccacgagggaggggagtcgggccccaggtcgcccccgcccccagccctgcatgcaggtgccctcgctccgccccatcagttcctgcccctgcccctcatgcagactgccctgctggggccgggccggagggtggagcagaaaggggaccccggagccgagcgaggaggaccaggcagccgccgctgccgcgctaagccaccacctgcgcttaggtaggcgtcctgctcgccgactttcagttccttgggagggtgttgggtgtcgtccttttcaaaagtgttttggagctttctgtgccccccgactttcccccgcctccccgccccccacgtggccacttttctctggattttagctgtaatgtctttactctttatttaggggtggggcattcattgtttgggtcttttgctgttggaatgggaactcctcctccatttgagcaacttgggaacaatttggtaacacaccacaggaagtagctctcccccccagccccctcctccctcaagggagggttggggggcctgtccagagggtcttcagaagcccccctgggagggaggggaggatgagcacgcccagctcccctccagggtgtgacttggcccctctggcttgtctttctgtgccttactcctcctcctgcgtctcccgttcctggccccttcttgagtccttgtgcctctctctttctctctctttcttaattgtatgaaaacacaaagcacaggtcaggatcctctgagagaaaatcaacattgcaccacgtaggggtgggctatgggctgtatttattgtgaatctagtttgtgaggctgtggccccgagctggcggagggagggaagaggagggagtgacgggaggggaggaggtcagcgacctggggccgtagcggcaggcgaacggtgcctgctacccagctggaagccacaaggtggctggctccaggggcggcttttgttggaagttgagtgaagccctccccctgtcctcagcgtgcagccctagaggaccccagggctgaggggcagtggatcctgcgggagtctcccggggcgtggggagtaaggccccgggggtggggggccgggtgggccgggcgtgacgcgcggtcaaagtgcaatgatttttcagttcggttggctaaacagggtcagagctgagagcgaagcagaaggggctccctgtccggcccacgtgccctttccctcgacgacagtcgagggctcgggctctgtgggactgtgggagctagggtctgcggggcgcctgcccgggcgaggtcggaagctgcaggccagctgggcccgggccggagcgtgcccggcggggctgcccgggcgggcagggggtgggggctgctcctttcccaagtggtgttgtgaggggcaatgagggcaacaggagatgtggggacgtgttaggagagaaaaaaaaaaaaacaaaaatatatatgggggaaattaacttttttttttcattgaaccaagtgcaatgcatcagagagttttcctatctttgtatgttaagagattaagaaaaaaaaattctatttttgttgtaatgtcctcgcggctctggggacgctaaaagaaccgggcctgccccgccctgcgcggggataacgaaagctgagtgtttttcccttttttttgttcgtttttagtttttttttttttaagtcgttttcctgcgttgacgaggatgatctggggtttttatttgtttcgtcgttcgttctgtttcggtgggagggctgaaggaaacgttcacattttagagtttaaaaaaaacacctcgacatttaaaaaatcaaccaacacaagatcaaaaaggaaaaggacgagagaaaaattatttttaagataattaaacataaaaccctggtgcttcttacattataaagtacgttttaaagaacccacaaactattatacataagtttatgaatcaattaaatatcctgcacttgttaggaatacgcatatcccttctttgttgagtttaacggaacgggacagcggcgtgcccccggcggctggactgctccggccgcgggtctccccgggcgcccctccctggggcccagcacccctcctcgccccatccccgtccgggtacgggggcgcggcaggggtccccggcccctcccccgcagaggtcaatgccaacgaacaaacgtcccctccctccctccctctccgccccgagcgcccttctttgagccagacgccaacttgaccctcaccagcattatcaggagcgcgctcagcaagttggtagtttcctcccccctttcccggcgcccctcccgcccccattcaacatctctcatcctatccccgaccccctccggggaacaccgggaaggctcgacgctccaggacaggaccagccacgcagacaggtcgatttgcccaggcccgcgcccgcacgcacgcacgcacacggccccgcacacagccccgccccaccccgcaaccagccctgtcgactgccttatacacccgcccccgcgctggccggccgacctagtgccttgttctcacccccgtgctggcggagcggacgccgcgctctgggtcccagaggggccgggtggctcagacgacccaccactcccccaccctgaccgtgctgaacagacccccccacacgagagaaaataaaggagcaataaagtcacgagaactttcgtcccccaatcgagagcccgaggggcaccccagccccgcctctgctcccccccaccccacccaccctcggggcgcccccctccccccgcaagccagcctgggccagccccgcttcggcccctcccgggagatccgtgcgcccgaccagcaccagcatcgcggaccgcaaaggccgcccgtcccgtcaaacaagtttcttcttaggctaagaaacgcagtatatacgagtatctctatatatagtactaatggatttggtgtgcttcccccttagcgtccccctccctctgctcctcctccttcagcctggtctccccctcttctctgccctccacccccgtctctgcactgagatacataagaaacaagggtagtttactgtctgttttgttttctgggttttcagtgtcctagcggaatgcaagtaggcagccagcccgtctgttccctctccgccccgccccgccccgcccccgtcactgcgcttctgttataccatctttgcctgactctctccggcttctccattgaatggctaatgtgtatgtgaaataaagaaataaagaaaaacaaacgcgaga

SEQ ID NO: 10012 - protein, 441 aa, Homo sapiens; identical to SEQ ID NO: 1549

SEQ ID NO: 10013 - DNA, 431 bp, Homo sapiens
gcggccgccgcctgccgggcctcccctcgccgcggccggccgccgcgctcccgcccgggcgcccagctatgtactccccgtactgcctcacccaggatgagttccacccgttcatcgaggcactgctgcctcacgtccgcgctttctcctacacctggttcaacctgcaggcgcggaagcgcaagtacttcaagaagcatgaaaagcggatgtcgaaggacgaggagcgggcggtgaaggacgagctgctgggcgagaagcccgagatcaagcagaagtgggcagccagcccgtctgttccctctccgccccgccccgccccgcccccgtcactgcgcttctgttataccatctttgcctgactctctccggcttctccattgaatggctaatgtgtatgtgaaataaagaaataaagaaaaacaaacgcg

SEQ ID NO: 10014 - protein, 97 aa, Homo sapiens
MYSPYCLTQDEFHPFIEALLPHVRAFSYTWFNLQARKRKYFKKHEKRMSKDEERAVKDELLGEKPEIKQKWAASPSVPSPPRPAPPPSLRFCYTIFA

SEQ ID NO: 10015 - DNA, 2003 bp, Homo sapiens
tcgataacaaagctgaaatcacatatttaggatttaggtctgattaaaaaatgttggggtggatgttccaactggatcaggagaaaagaaaatgaaaacagcctggggagagggaagcctgatctgtttcctcactcgcttgctcgtggatgtcattttctgtcttcttgggggcggccaaaaatcgaccggtgtcggggaccagaggcggccccgcacgcccccgcgtgtgcgtccacgggcgtctgtgcagacggacactgtgccggggcgagctgacaggagttcacggctgcgatagaacatggagatgtcatgggcgcgacagagcctggcggggataccagcagcgtgatgagttccacccgttcatcgaggcactgctgcctcacgtccgcgctttctcctacacctggttcaacctgcaggcgcggaagcgcaagtacttcaagaagcatgaaaagcggatgtcgaaggacgaggagcgggcggtgaaggacgagctgctgggcgagaagcccgagatcaagcagaagtgggcatcccggctgctggccaagctgcgcaaggacatccggcccgagttccgcgaggacttcgtgctgaccatcacgggcaagaagcccccctgctgcgtgctctccaaccccgaccagaagggcaagatccggcggattgactgcctgcgccaggctgacaaggtgtggcggctggacctggtcatggtgattttgtttaaggggatccccctggaaagtactgatggggagcggctctacaagtcgcctcagtgctcgaaccccggcctgtgcgtccagccacatcacattggagtcacaatcaaagaactggatctttatctggcttactttgtccacactccggaatccggacaatcagatagttcaaaccagcaaggagatgcggacatcaaaccactgcccaacgggcacttaagtttccaggactgttttgtgacttccggggtctggaatgtgacggagctggtgagagtatcacagactcctgttgcaacagcatcagggcccaacttctccctggcggacctggagagtcccagctactacaacatcaaccaggtgaccctggggcggcggtccatcacctcccctccttccaccagcaccaccaagcgccccaagtccatcgatgacagtgagatggagagccctgttgatgacgtgttctatcccgggacaggccgttccccagcagctggcagcagccagtccagcgggtggcccaacgatgtggatgcagggagcccccgggccacagcatcagccctgcacttcccctccacgtccatcatccagcagtcgagcccgtatttcacgcacccgaccatccgctaccaccaccaccacgggcaggactcactgaaggagtttgtgcagtttgtgtgctcggatggctcgggccaggccaccggacagcattcgcaacgacaggcgcctcctctgccaaccggtttgtcagcatcggaccccgggacggcaactttctgaacatcccacagcagtctcagtcctggttcctctgataagatcgacaaaagaaacaacaaaatgagaagaagaggttcctcgaaaggggggagaagaaattttgagaatggaaaaatcccccagcccagcccagccccaccgaaaagcaaaaattacacgtcgtcagccactcagcccttctctcctccagcccggggacccccgcgggccccagaagcagcccagttctcagagagcccttggaaggggtctcggtggagctgtgcaccagcagccaagcagaaagaaacacgcgacatggactctgtcaagtagaggacagaaagcaagaaaggatgcagaactgccttcctccccctgaccccgccccggctgcgcttctgttataccatctttgcctgactctctccggcttctccattgaatggctaatgtgtatgtgaaataaagaaataaagaaaaacaaacgcgaga

SEQ ID NO: 10016 - protein, 459 aa, Homo sapiens
MSFSVFLGAAKNRPVSGTRGGPARPRVCVHGRLCRRTLCRGELTGVHGCDRTWRCHGRDRAWRGYQQRDEFHPFIEALLPHVRAFSYTWFNLQARKRKYFKKHEKRMSKDEERAVKDELLGEKPEIKQKWASRLLAKLRKDIRPEFREDFVLTITGKKPPCCVLSNPDQKGKIRRIDCLRQADKVWRLDLVMVILFKGIPLESTDGERLYKSPQCSNPGLCVQPHHIGVTIKELDLYLAYFVHTPESGQSDSSNQQGDADIKPLPNGHLSFQDCFVTSGVWNVTELVRVSQTPVATASGPNFSLADLESPSYYNINQVTLGRRSITSPPSTSTTKRPKSIDDSEMESPVDDVFYPGTGRSPAAGSSQSSGWPNDVDAGSPRATASALHFPSTSIIQQSSPYFTHPTIRYHHHHGQDSLKEFVQFVCSDGSGQATGQHSQRQAPPLPTGLSASDPGTATF

SEQ ID NO: 10017 - DNA, 4618 bp, Homo sapiens
acagcccagacaggctggcacagagcgggcgacagcgtcagggcagacctcccccctctgggttgccaggcactgcctctgagcataaagaatccggacaatcagatagttcaaaccagcaaggagatgcggacatcaaaccactgcccaacgggcacttaagtttccaggactgttttgtgacttccggggtctggaatgtgacggagctggtgagagtatcacagactcctgttgcaacagcatcagggcccaacttctccctggcggacctggagagtcccagctactacaacatcaaccaggtgaccctggggcggcggtccatcacctcccctccttccaccagcaccaccaagcgccccaagtccatcgatgacagtgagatggagagccctgttgatgacgtgttctatcccgggacaggccgttccccagcagctggcagcagccatcctggttcctctgataagatcgacaaaagaaacaacaaaatgagaagaagaggttcctcgaaaggggggagaagaaattttgagaatggaaaaatcccccagcccagcccagccccaccgaaaagcaaaaattacacgtcgtcagccactcagcccttctctcctccagcccggggacccccgcgggccccagaagcagcccagttctcagagagcccttggaaggggtctcggtggagctgtgcaccagcagccaagcagaaagaaacacgcgacatggactctgtcaagtagaggacagaaagcaagaaaggatgcagaactgccttcctccccctgaccccgccccggccttctggggaaggaacaaagtccccaaacaaagcaaccagcacaattctgaaggggcctggcctccaccctcaccccttcctaggggaaccccaccctccacacagccggagctgccctagggagcctggagggccagcttgtaaagatgatggggtttagatccctcaggctctcccctccagactccgcccttccctccctccctccctccctccctctctgccaaggctccagcttcttcccccagctgctcccgaccaggagggggagagcagcctccacttaccccaccccacccttgggctaaaagcccccaggcgggcagggggtgacccctggagctagttgcgtgtcccagaatggagggtgttctgacaccccaccctgagccgcaagagcagtcctggggccctggacccctctgtacagtccgtaggaaaaagtcggaatgctctcgacggcctcgtcccagcctgggacaggccccctttcccctctctctgcaggccaggagggcctccttcctgccacgagggaggggagtcgggccccaggtcgcccccgcccccagccctgcatgcaggtgccctcgctccgccccatcagttcctgcccctgcccctcatgcagactgccctgctggggccgggccggagggtggagcagaaaggggaccccggagccgagcgaggaggaccaggcagccgccgctgccgcgctaagccaccacctgcgcttaggtaggcgtcctgctcgccgactttcagttccttgggagggtgttgggtgtcgtccttttcaaaagtgttttggagctttctgtgccccccgactttcccccgcctccccgccccccacgtggccacttttctctggattttagctgtaatgtctttactctttatttaggggtggggcattcattgtttgggtcttttgctgttggaatgggaactcctcctccatttgagcaacttgggaacaatttggtaacacaccacaggaagtagctctcccccccagccccctcctccctcaagggagggttggggggcctgtccagagggtcttcagaagcccccctgggagggaggggaggatgagcacgcccagctcccctccagggtgtgacttggcccctctggcttgtctttctgtgccttactcctcctcctgcgtctcccgttcctggccccttcttgagtccttgtgcctctctctttctctctctttcttaattgtatgaaaacacaaagcacaggtcaggatcctctgagagaaaatcaacattgcaccacgtaggggtgggctatgggctgtatttattgtgaatctagtttgtgaggctgtggccccgagctggcggagggagggaagaggagggagtgacgggaggggaggaggtcagcgacctggggccgtagcggcaggcgaacggtgcctgctacccagctggaagccacaaggtggctggctccaggggcggcttttgttggaagttgagtgaagccctccccctgtcctcagcgtgcagccctagaggaccccagggctgaggggcagtggatcctgcgggagtctcccggggcgtggggagtaaggccccgggggtggggggccgggtgggccgggcgtgacgcgcggtcaaagtgcaatgatttttcagttcggttggctaaacagggtcagagctgagagcgaagcagaaggggctccctgtccggcccacgtgccctttccctcgacgacagtcgagggctcgggctctgtgggactgtgggagctagggtctgcggggcgcctgcccgggcgaggtcggaagctgcaggccagctgggcccgggccggagcgtgcccggcggggctgcccgggcgggcagggggtgggggctgctcctttcccaagtggtgttgtgaggggcaatgagggcaacaggagatgtggggacgtgttaggagagaaaaaaaaaaaaacaaaaatatatatgggggaaattaacttttttttttcattgaaccaagtgcaatgcatcagagagttttcctatctttgtatgttaagagattaagaaaaaaaaattctatttttgttgtaatgtcctcgcggctctggggacgctaaaagaaccgggcctgccccgccctgcgcggggataacgaaagctgagtgtttttcccttttttttgttcgtttttagtttttttttttttaagtcgttttcctgcgttgacgaggatgatctggggtttttatttgtttcgtcgttcgttctgtttcggtgggagggctgaaggaaacgttcacattttagagtttaaaaaaaacacctcgacatttaaaaaatcaaccaacacaagatcaaaaaggaaaaggacgagagaaaaattatttttaagataattaaacataaaaccctggtgcttcttacattataaagtacgttttaaagaacccacaaactattatacataagtttatgaatcaattaaatatcctgcacttgttaggaatacgcatatcccttctttgttgagtttaacggaacgggacagcggcgtgcccccggcggctggactgctccggccgcgggtctccccgggcgcccctccctggggcccagcacccctcctcgccccatccccgtccgggtacgggggcgcggcaggggtccccggcccctcccccgcagaggtcaatgccaacgaacaaacgtcccctccctccctccctctccgccccgagcgcccttctttgagccagacgccaacttgaccctcaccagcattatcaggagcgcgctcagcaagttggtagtttcctcccccctttcccggcgcccctcccgcccccattcaacatctctcatcctatccccgaccccctccggggaacaccgggaaggctcgacgctccaggacaggaccagccacgcagacaggtcgatttgcccaggcccgcgcccgcacgcacgcacgcacacggccccgcacacagccccgccccaccccgcaaccagccctgtcgactgccttatacacccgcccccgcgctggccggccgacctagtgccttgttctcacccccgtgctggcggagcggacgccgcgctctgggtcccagaggggccgggtggctcagacgacccaccactcccccaccctgaccgtgctgaacagacccccccacacgagagaaaataaaggagcaataaagtcacgagaactttcgtcccccaatcgagagcccgaggggcaccccagccccgcctctgctcccccccaccccacccaccctcggggcgcccccctccccccgcaagccagcctgggccagccccgcttcggcccctcccgggagatccgtgcgcccgaccagcaccagcatcgcggaccgcaaaggccgcccgtcccgtcaaacaagtttcttcttaggctaagaaacgcagtatatacgagtatctctatatatagtactaatggatttggtgtgcttcccccttagcgtccccctccctctgctcctcctccttcagcctggtctccccctcttctctgccctccacccccgtctctgcactgagatacataagaaacaagggtagtttactgtctgttttgttttctgggttttcagtgtcctagcggaatgcaagtaggcagccagcccgtctgttccctctccgccccgccccgccccgcccccgtcactgcgcttctgttataccatctttgcctgactctctccggcttctccattgaatggctaatgtgtatgtgaaataaagaaataaagaaaaacaaacgcgaga

SEQ ID NO: 10018 - protein, 120 aa, Homo sapiens [sequence omitted]

SEQ ID NO: 10019 - DNA, 2370 bp, Homo sapiens
cagtcctggttcctctgataagatcgacaaaagaaacaacaaaatgagaagaagaggttcctcgaaaggggggagaagaaattttgagaatggaaaaatcccccagcccagcccagccccaccgaaaagcaaaaattacacgtcgtcagccactcagcccttctctcctccagcccggggacccccgcgggccccagaagcagcccagttctcagagagcccttggaaggggtctcggtggagctgtgcaccagcagccaagcagaaagaaacacgcgacatggactctgtcaagtagaggacagaaagcaagaaaggatgcagaactgccttcctccccctgaccccgccccggccttctggggaaggaacaaagtccccaaacaaagcaaccagcacaattctgaaggggcctggcctccaccctcaccccttcctaggggaaccccacctgctcctttcccaagtggtgttgtgaggggcaatgagggcaacaggagatgtggggacgtgttaggagagaaaaaaaaaaaaacaaaaatatatatgggggaaattaacttttttttttcattgaaccaagtgcaatgcatcagagagttttcctatctttgtatgttaagagattaagaaaaaaaaattctatttttgttgtaatgtcctcgcggctctggggacgctaaaagaaccgggcctgccccgccctgcgcggggataacgaaagctgagtgtttttcccttttttttgttcgtttttagtttttttttttttaagtcgttttcctgcgttgacgaggatgatctggggtttttatttgtttcgtcgttcgttctgtttcggtgggagggctgaaggaaacgttcacattttagagtttaaaaaaaacacctcgacatttaaaaaatcaaccaacacaagatcaaaaaggaaaaggacgagagaaaaattatttttaagataattaaacataaaaccctggtgcttcttacattataaagtacgttttaaagaacccacaaactattatacataagtttatgaatcaattaaatatcctgcacttgttaggaatacgcatatcccttctttgttgagtttaacggaacgggacagcggcgtgcccccggcggctggactgctccggccgcgggtctccccgggcgcccctccctggggcccagcacccctcctcgccccatccccgtccgggtacgggggcgcggcaggggtccccggcccctcccccgcagaggtcaatgccaacgaacaaacgtcccctccctccctccctctccgccccgagcgcccttctttgagccagacgccaacttgaccctcaccagcattatcaggagcgcgctcagcaagttggtagtttcctcccccctttcccggcgcccctcccgcccccattcaacatctctcatcctatccccgaccccctccggggaacaccgggaaggctcgacgctccaggacaggaccagccacgcagacaggtcgatttgcccaggcccgcgcccgcacgcacgcacgcacacggccccgcacacagccccgccccaccccgcaaccagccctgtcgactgccttatacacccgcccccgcgctggccggccgacctagtgccttgttctcacccccgtgctggcggagcggacgccgcgctctgggtcccagaggggccgggtggctcagacgacccaccactcccccaccctgaccgtgctgaacagacccccccacacgagagaaaataaaggagcaataaagtcacgagaactttcgtcccccaatcgagagcccgaggggcaccccagccccgcctctgctcccccccaccccacccaccctcggggcgcccccctccccccgcaagccagcctgggccagccccgcttcggcccctcccgggagatccgtgcgcccgaccagcaccagcatcgcggaccgcaaaggccgcccgtcccgtcaaacaagtttcttcttaggctaagaaacgcagtatatacgagtatctctatatatagtactaatggatttggtgtgcttcccccttagcgtccccctccctctgctcctcctccttcagcctggtctccccctcttctctgccctccacccccgtctctgcactgagatacataagaaacaagggtagtttactgtctgttttgttttctgggttttcagtgtcctagcggaatgcaagtaggcagccagcccgtctgttccctctccgccccgccccgccccgcccccgtcactgcgcttctgttataccatctttgcctgactctctccggcttctccattgaatggctaatgtgtatgtgaaataaagaaataaagaaaaacaaacgcgaga

SEQ ID NO: 10020 - protein, 103 aa, Homo sapiens
MQNCLPPPDPAPAFWGRNKVPKQSNQHNSEGAWPPPSPLPRGTPPAPFPSGVVRGNEGNRRCGDVLGEKKKKTKIYMGEINFFFSLNQVQCIREFSYLCMLRD

SEQ ID NO: 10021 - DNA, 2570 bp, Homo sapiens
aggttcctcgaaaggggggagaagaaattttgagaatggaaaaatcccccagcccagcccagccccaccgaaaagcaaaaattacacgtcgtcagccactcagcccttctctcctccagcccggggacccccgcgggccccagaagcagcccagttctcagagagcccttggaaggggtctcggtggagctgtgcaccagcagccaagcagaaagaaacacgcgacatggactctgtcaagtagaggacagaaagcaagaaaggatgcagaactgccttcctccccctgaccccgccccggccttctggggaaggaacaaagtccccaaacaaagcaaccagcacaattctgaaggggcctggcctccaccctcaccccttcctagggccgggcgtgacgcgcggtcaaagtgcaatgatttttcagttcggttggctaaacagggtcagagctgagagcgaagcagaaggggctccctgtccggcccacgtgccctttccctcgacgacagtcgagggctcgggctctgtgggactgtgggagctagggtctgcggggcgcctgcccgggcgaggtcggaagctgcaggccagctgggcccgggccggagcgtgcccggcggggctgcccgggcgggcagggggtgggggctgctcctttcccaagtggtgttgtgaggggcaatgagggcaacaggagatgtggggacgtgttaggagagaaaaaaaaaaaaacaaaaatatatatgggggaaattaacttttttttttcattgaaccaagtgcaatgcatcagagagttttcctatctttgtatgttaagagattaagaaaaaaaaattctatttttgttgtaatgtcctcgcggctctggggacgctaaaagaaccgggcctgccccgccctgcgcggggataacgaaagctgagtgtttttcccttttttttgttcgtttttagtttttttttttttaagtcgttttcctgcgttgacgaggatgatctggggtttttatttgtttcgtcgttcgttctgtttcggtgggagggctgaaggaaacgttcacattttagagtttaaaaaaaacacctcgacatttaaaaaatcaaccaacacaagatcaaaaaggaaaaggacgagagaaaaattatttttaagataattaaacataaaaccctggtgcttcttacattataaagtacgttttaaagaacccacaaactattatacataagtttatgaatcaattaaatatcctgcacttgttaggaatacgcatatcccttctttgttgagtttaacggaacgggacagcggcgtgcccccggcggctggactgctccggccgcgggtctccccgggcgcccctccctggggcccagcacccctcctcgccccatccccgtccgggtacgggggcgcggcaggggtccccggcccctcccccgcagaggtcaatgccaacgaacaaacgtcccctccctccctccctctccgccccgagcgcccttctttgagccagacgccaacttgaccctcaccagcattatcaggagcgcgctcagcaagttggtagtttcctcccccctttcccggcgcccctcccgcccccattcaacatctctcatcctatccccgaccccctccggggaacaccgggaaggctcgacgctccaggacaggaccagccacgcagacaggtcgatttgcccaggcccgcgcccgcacgcacgcacgcacacggccccgcacacagccccgccccaccccgcaaccagccctgtcgactgccttatacacccgcccccgcgctggccggccgacctagtgccttgttctcacccccgtgctggcggagcggacgccgcgctctgggtcccagaggggccgggtggctcagacgacccaccactcccccaccctgaccgtgctgaacagacccccccacacgagagaaaataaaggagcaataaagtcacgagaactttcgtcccccaatcgagagcccgaggggcaccccagccccgcctctgctcccccccaccccacccaccctcggggcgcccccctccccccgcaagccagcctgggccagccccgcttcggcccctcccgggagatccgtgcgcccgaccagcaccagcatcgcggaccgcaaaggccgcccgtcccgtcaaacaagtttcttcttaggctaagaaacgcagtatatacgagtatctctatatatagtactaatggatttggtgtgcttcccccttagcgtccccctccctctgctcctcctccttcagcctggtctccccctcttctctgccctccacccccgtctctgcactgagatacataagaaacaagggtagtttactgtctgttttgttttctgggttttcagtgtcctagcggaatgcaagtaggcagccagcccgtctgttccctctccgccccgccccgccccgcccccgtcactgcgcttctgttataccatctttgcctgactctctccggcttctccattgaatggctaatgtgtatgtgaaataaagaaataaagaaaaacaaacgcgaga

SEQ ID NO: 10022 - protein, 63 aa, Homo sapiens
MQNCLPPPDPAPAFWGRNKVPKQSNQHNSEGAWPPPSPLPRAGRDARSKCNDFSVRLAKQGQS

SEQ ID NO: 10023 - DNA, 3848 bp, Homo sapiens
cgcgggccccagaagcagcccagttctcagagagcccttggaaggggtctcggtggagctgtgcaccagcagccaagcagaaagaaacacgcgacatggactctgtcaagtagaggacagaaagcaagaaaggatgcagaactgccttcctccccctgaccccgccccggccttctggggaaggaacaaagtccccaaacaaagcaaccagcacaattctgaaggggcctggcctccaccctcaccccttcctaggggaaccccaccctccacacagccggagctgccctagggagcctggagggccagcttgtaaagatgatggggtttagatccctcaggctctcccctccagactccgcccttccctccctccctccctccctccctctctgccaaggctccagcttcttcccccagctgctcccgaccaggagggggagagcagcctccacttaccccaccccacccttgggctaaaagcccccaggcgggcagggggtgacccctggagctagttgcgtgtcccagaatggagggtgttctgacaccccaccctgagccgcaagagcagtcctggggccctggacccctctgtacagtccgtaggaaaaagtcggaatgctctcgacggcctcgtcccagcctgggacaggccccctttcccctctctctgcaggccaggagggcctccttcctgccacgagggaggggagtcgggccccaggtcgcccccgcccccagccctgcatgcaggtgccctcgctccgccccatcagttcctgcccctgcccctcatgcagactgccctgctggggccgggccggagggtggagcagaaaggggaccccggagccgagcgaggaggaccaggcagccgccgctgccgcgctaagccaccacctgcgcttaggtaggcgtcctgctcgccgactttcagttccttgggagggtgttgggtgtcgtccttttcaaaagtgttttggagctttctgtgccccccgactttcccccgcctccccgccccccacgtggccacttttctctggattttagctgtaatgtctttactctttatttaggggtggggcattcattgtttggggtcttcagaagcccccctgggagggaggggaggatgagcacgcccagctcccctccagggtgtgacttggcccctctggcttgtctttctgtgccttactcctcctcctgcgtctcccgttcctggccccttcttgagtccttgtgcctctctctttctctctctttcttaattgtatgaaaacacaaagcacaggtcaggatcctctgagagaaaatcaacattgcaccacgtaggggtgggctatgggctgtatttattgtgaatctagtttgtgaggctgtggccccgagctggcggagggagggaagaggagggagtgacgggaggggaggaggtcagcgacctggggccgtagcggcaggcgaacggtgcctgctacccagctggaagccacaaggtggctggctccaggggcggcttttgttggaagttgagtgaagccctccccctgtcctcagcgtgcagccctagaggaccccagggctgaggggcagtggatcctgcgggagtctcccggggcgtggggagtaaggccccgggggtggggggccgggtgggccgggcgtgacgcgcggtcaaagtgcaatgatttttcagttcggttggctaaacagggtcagagctgagagcgaagcagaaggggctccctgtccggcccacgtgccctttccctcgacgacagtcgagggctcgggctctgtgggactgtgggagctagggtctgcggggcgcctgcccgggcgaggtcggaagctgcaggccagctgggcccgggccggagcgtgcccggcggggctgcccgggcgggcagggggtgggggctgctcctttcccaagtggtgttgtgaggggcaatgagggcaacaggagatgtggggacgtgttaggagagaaaaaaaaaaaaacaaaaatatatatgggggaaattaacttttttttttcattgaaccaagtgcaatgcatcagagagttttcctatctttgtatgttaagagattaagaaaaaaaaattctatttttgttgtaatgtcctcgcggctctggggacgctaaaagaaccgggcctgccccgccctgcgcggggataacgaaagctgagtgtttttcccttttttttgttcgtttttagtttttttttttttaagtcgttttcctgcgttgacgaggatgatctggggtttttatttgtttcgtcgttcgttctgtttcggtgggagggctgaaggaaacgttcacattttagagtttaaaaaaaacacctcgacatttaaaaaatcaaccaacacaagatcaaaaaggaaaaggacgagagaaaaattatttttaagataattaaacataaaaccctggtgcttcttacattataaagtacgttttaaagaacccacaaactattatacataagtttatgaatcaattaaatatcctgcacttgttaggaatacgcatatcccttctttgttgagtttaacggaacgggacagcggcgtgcccccggcggctggactgctccggccgcgggtctccccgggcgcccctccctggggcccagcacccctcctcgccccatccccgtccgggtacgggggcgcggcaggggtccccggcccctcccccgcagaggtcaatgccaacgaacaaacgtcccctccctccctccctctccgccccgagcgcccttctttgagccagacgccaacttgaccctcaccagcattatcaggagcgcgctcagcaagttggtagtttcctcccccctttcccggcgcccctcccgcccccattcaacatctctcatcctatccccgaccccctccggggaacaccgggaaggctcgacgctccaggacaggaccagccacgcagacaggtcgatttgcccaggcccgcgcccgcacgcacgcacgcacacggccccgcacacagccccgccccaccccgcaaccagccctgtcgactgccttatacacccgcccccgcgctggccggccgacctagtgccttgttctcacccccgtgctggcggagcggacgccgcgctctgggtcccagaggggccgggtggctcagacgacccaccactcccccaccctgaccgtgctgaacagacccccccacacgagagaaaataaaggagcaataaagtcacgagaactttcgtcccccaatcgagagcccgaggggcaccccagccccgcctctgctcccccccaccccacccaccctcggggcgcccccctccccccgcaagccagcctgggccagccccgcttcggcccctcccgggagatccgtgcgcccgaccagcaccagcatcgcggaccgcaaaggccgcccgtcccgtcaaacaagtttcttcttaggctaagaaacgcagtatatacgagtatctctatatatagtactaatggatttggtgtgcttcccccttagcgtccccctccctctgctcctcctccttcagcctggtctccccctcttctctgccctccacccccgtctctgcactgagatacataagaaacaagggtagtttactgtctgttttgttttctgggttttcagtgtcctagcggaatgcaagtaggcagccagcccgtctgttccctctccgccccgccccgccccgcccccgtcactgcgcttctgttataccatctttgcctgactctctccggcttctccattgaatggctaatgtgtatgtgaaataaagaaataaagaaaaacaaacgcgaga

SEQ ID NO: 10024 - protein, 144 aa, Homo sapiens [sequence omitted]

SEQ ID NO: 10025 - DNA, 734 bp, Homo sapiens
ccaaggctccagcttcttcccccagctgctcccgaccaggagggggagagcagcctccacttaccccaccccacccttgggctaaaagcccccaggcgggcagggggtgacccctggagctagttgcgtgtcccagaatggagggtgttctgacaccccaccctgagccgcaagagcagtcctggggccctggacccctctgtacagtccgtaggaaaaagtcggaatgctctcgacggcctcgtcccagcctgggacaggccccctttcccctctctctgcaggccaggagggcctccttcctgccacgagggaggggagtcgggccccaggtcgcccccgcccccagccctgcatgcaggtgccctcgctccgccccatcagttcctgcccctgcccctcatgcagactgccctgctggggccgggccggagggtggagcagaaaggggaccccggagccgagcgaggaggaccaggcagccgccgctgccgcgctaagccaccacctgcgcttaggtaggcgtcctgctcgccgactttcagttccttgggagggtgttgggtgtcgtccttttcaaaagtgttttggagctttctgtgccccccgactttcccccgcctccccgccccccactgcgcttctgttataccatctttgcctgactctctccggcttctccattgaatggctaatgtgtatgtgaaataaagaaataaagaaaaacaaacgcg

SEQ ID NO: 10026 - protein, 159 aa, Homo sapiens
MLSTASSQPGTGPLSPLSAGQEGLLPATREGSRAPGRPRPQPCMQVPSLRPISSCPCPSCRLPCWGRAGGWSRKGTPEPSEEDQAAAAAALSHHLRLGRRPARRLSVPWEGVGCRPFQKCFGAFCAPRLSPASPPPTALLLYHLCLTLSGFSIEWLMCM

SEQ ID NO: 10027 - DNA, 989 bp, Homo sapiens
agcagaaggggctccctgtccggcccacgtgccctttccctcgacgacagtcgagggctcgggctctgtgggactgtgggagctagggtctgcggggcgcctgcccgggcgaggtcggaagctgcaggccagctgggcccgggccggagcgtgcccggcggggctgcccgggcgggcagggggtgggggctgctcctttcccaagtggtgttgtgaggggcaatgagggcaacaggagatgtggggacgtgttaggagagaaaaaaaaaaaaacaaaaatatatatgggggaaattaacttttttttttcattgaaccaagtgcaatgcatcagagagttttcctatctttgtatgttaagagattaagaaaaaaaaattctatttttgttgtaatgtcctcgcggctctggggacgctaaaagaaccgggcctgccccgccctgcgcggggataacgaaagctgagtgtttttcccttttttttgttcgtttttagtttttttttttttaagtcgttttcctgcgttgacgaggatgatctggggtttttatttgtttcgtcgttcgttctgtttcggtgggagggctgaaggaaacgttcacattttagagtttaaaaaaaacacctcgacatttaaaaaatcaaccaacacaagatcaaaaaggaaaaggacgagagaaaaattatttttaagataattaaacataaaaccctggtgcttcttacattataaagtacgttttaaagaacccacaaactattatacataagaaacaagggtagtttactgtctgttttgttttctgggttttcagtgtcctagcggaatgcaagtaggcagccagcccgtctgttccctctccgccccgccccgccccgcccccgtcactgcgcttctgttataccatctttgcctgactctctccggcttctccattgaatggctaatgtgtatgtgaaataaagaaataaagaaaaacaaacgcg

SEQ ID NO: 10028 - protein, 54 aa, Homo sapiens
MIWGFYLFRRSFCFGGRAEGNVHILEFKKNTSTFKKSTNTRSKRKRTREKLFLR

SEQ ID NO: 10029 - DNA, 800 bp, Homo sapiens
ggggaaattaacttttttttttcattgaaccaagtgcaatgcatcagagagttttcctatctttgtatgttaagagattaagaaaaaaaaattctatttttgttgtaatgtcctcgcggctctggggacgctaaaagaaccgggcctgccccgccctgcgcggggataacgaaagctgagtgtttttcccttttttttgttcgtttttagtttttttttttttaagtcgttttcctgcgttgacgaggatgatctggggtttttatttgtttcgtcgttcgttctgtttcggtgggagggctgaaggaaacgttcacattttagagtttaaaaaaaacacctcgacatttaaaaaatcaaccaacacaagatcaaaaaggaaaaggacgagagaaaaattatttttaagataattaaacataaaaccctggtgcttcttacattataaagtacgttttaaagaacccacaaactattatacataagtttatgaatcaattaaatatcctgcacttgttaggaatacgcatatcccttctttgttgagtttaacggaacgggacagcggcgtgcccccggcggctggactgctccggccgcgggtctccccgggcgcccctccctggggcccagcacccctcctcgccccatccccgtccgggtacgggggcgcggcaggggtccccggcccctcccccgcagagcgcttctgttataccatctttgcctgactctctccggcttctccattgaatggctaatgtgtatgtgaaataaagaaataaagaaaaacaaacgcg

SEQ ID NO: 10030 - protein, 54 aa, Homo sapiens; identical to SEQ ID NO: 10028

SEQ ID NO: 10031 - DNA, 1461 bp, Homo sapiens
cattgaaccaagtgcaatgcatcagagagttttcctatctttgtatgttaagagattaagaaaaaaaaattctatttttgttgtaatgtcctcgcggctctggggacgctaaaagaaccgggcctgccccgccctgcgcggggataacgaaagctgagtgtttttcccttttttttgttcgtttttagtttttttttttttaagtcgttttcctgcgttgacgaggatgatctggggtttttatttgtttcgtcgttcgttctgtttcggtgggagggctgaaggaaacgttcacattttagagtttaaaaaaaacacctcgacatttaaaaaatcaaccaacacaagatcaaaaaggaaaaggacgagagaaaaattatttttaagataattaaacataaaaccctggtgcttcttacattataaagtacgttttaaagaacccacaaactattatacataagtttatgaatcaattaaatatcctgcacttgttaggaatacgcatatcccttctttgttgagtttaacggaacgggacagcggcgtgcccccggcggctggactgctccggccgcgggtctccccgggcgcccctccctggggcccagcacccctcctcgccccatccccgtccgggtacgggggcgcggcaggggtccccggcccctcccccgcagaggtcaatgccaacgaacaaacgtcccctccctccctccctctccgccccgagcgcccttctttgagccagacggccgcgctctgggtcccagaggggccgggtggctcagacgacccaccactcccccaccctgaccgtgctgaacagacccccccacacgagagaaaataaaggagcaataaagtcacgagaactttcgtcccccaatcgagagcccgaggggcaccccagccccgcctctgctcccccccaccccacccaccctcggggcgcccccctccccccgcaagccagcctgggccagccccgcttcggcccctcccgggagatccgtgcgcccgaccagcaccagcatcgcggaccgcaaaggccgcccgtcccgtcaaacaagtttcttcttaggctaagaaacgcagtatatacgagtatctctatatatagtactaatggatttggtgtgcttcccccttagcgtccccctccctctgctcctcctccttcagcctggtctccccctcttctctgccctccacccccgtctctgcactgagatacataagaaacaagggtagtttactgtctgttttgttttctgggttttcagtgtcctagcggaatgcaagtaggcagccagcccgtctgttccctctccgccccgccccgccccgcccccgtcactgcgcttctgttataccatctttgcctgactctctccggcttctccattgaatggctaatgtgtatgtgaaataaagaaataaagaaaaacaaacgcgaga

SEQ ID NO: 10032 - protein, 54 aa, Homo sapiens; identical to SEQ ID NO: 10028

SEQ ID NO: 10033 - DNA, 1172 bp, Homo sapiens
aatgcatcagagagttttcctatctttgtatgttaagagattaagaaaaaaaaattctatttttgttgtaatgtcctcgcggctctggggacgctaaaagaaccgggcctgccccgccctgcgcggggataacgaaagctgagtgtttttcccttttttttgttcgtttttagtttttttttttttaagtcgttttcctgcgttgacgaggatgatctggggtttttatttgtttcgtcgttcgttctgtttcggtgggagggctgaaggaaacgttcacattttagagtttaaaaaaaacacctcgacatttaaaaaatcaaccaacacaagatcaaaaaggaaaaggacgagagaaaaattatttttaagataattaaacataaaaccctggtgcttcttacattataaagtacgttttaaagaacccacaaactattatacataagtttatgaatcaattaaatatcctgcacttgttaggaatacgcatatcccttctttgttgagtttaacggaacgggacagcggcgtgcccccggcggctggactgctccggccgcgggtctccccgggcgcccctccctggggcccagcacccctcctcgccccatccccgtccgggtacgggggcgcggcaggggtccccggcccctcccccgcagaggtcaatgccaacgaacaaacgtcccctccctccctccctctccgccccgagcgcccttctttgagccagacgccaacttgaccctcaccagcattatcaggagcgcgctcagcaagttggtagtttcctcccccctttcccggcgcccctcccgcccccattcaacatctctcatcctatccccgaccccctccggggaacaccgggaaggctcgacgtcctcctccttcagcctggtctccccctcttctctgccctccacccccgtctctgcactgagatacataagaaacaagggtagtttactgtctgttttgttttctgggttttcagtgtcctagcggaatgcaagtaggcagccagcccgtctgttccctctccgccccgccccgccccgcccccgtcactgcgcttctgttataccatctttgcctgactctctccggcttctccattgaatggctaatgtgtatgtgaaataaagaaataaagaaaaacaaacgcg

SEQ ID NO: 10034 - protein, 54 aa, Homo sapiens; identical to SEQ ID NO: 10028

SEQ ID NO: 10035 - DNA, 970 bp, Homo sapiens
tgcttcttacattataaagtacgttttaaagaacccacaaactattatacataagtttatgaatcaattaaatatcctgcacttgttaggaatacgcatatcccttctttgttgagtttaacggaacgggacagcggcgtgcccccggcggctggactgctccggccgcgggtctccccgggcgcccctccctggggcccagcacccctcctcgccccatccccgtccgggtacgggggcgcggcaggggtccccggcccctcccccgcagaggtcaatgccaacgaacaaacgtcccctccctccctccctctccgccccgagcgcccttctttgagccagacgccaacttgaccctcaccagcattatcaggagcgcgctcagcaagttggtagtttcctcccccctttcccggcgcccctcccgcccccattcaacatctctcatcctatccccgaccccctccggggaacaccgggaaggctcgacgctccaggacaggaccagccacgcagacaggtcgatttgcccaggcccgcgcccgcacgcacgcacgcacacggccccgcacacagccccgccccaccccgcaaccagccctgtcgactgccttatacacccgcccccgcgctggccggccgacctagtgccttgttctcacccccgtgctggcggagcggacgccgcgctctgggtcccagaggggccgggtggctcagacgacccaccactcccccacctgagatacataagaaacaagggtagtttactgtctgttttgttttctgggttttcagtgtcctagcggaatgcaagtaggcagccagcccgtctgttccctctccgccccgccccgccccgcccccgtcactgcgcttctgttataccatctttgcctgactctctccggcttctccattgaatggctaatgtgtatgtgaaataaagaaataaagaaaaacaaacgcg

SEQ ID NO: 10036 - protein, 43 aa, Homo sapiens
MQVGSQPVCSLSAPPRPAPVTALLLYHLCLTLSGFSIEWLMCM

SEQ ID NO: 10037 - DNA, 1788 bp, Homo sapiens
ggagtgtgcaaagccaaagggcagactcggacataagaggaggcagcttccctgcctcagtttaccccctgcgtgcatccaggcacctccctccccggctgccctggggcccgggtccccagaggcccggggtccctacagtggctgggggagcggaaggcgaagccctgaggggtggcggaccgagtcctgccagcgccggctgggggcggggccgggaggcccgcgctgctaggtccccgcccgctggtttcctccggggtcagccaggctccttatcaggcgcggccaggcagcctggcccttatctgcactgggccagcatcctccggccgctgcgccgccaggggtgagagggaggaaaccgggccgccgggggcggggagaaggcgggccggcccgggagccgctcactttccctgggggggacctacgcggagacctcggctatcctggccttccgaggcccacgaggaggcgcggcccaacgccggggcctggagcattgaggccggaccctcgcgagacagcagagcctggcctgacgctggaaaccacaccctggcccagactgccagccctgacgggacagagccagggcactcaccaggctgcaagaacagtgctggggtgagtacccccacgtcggggtccatgtgcccgcctcaggcacaggcagaggtgggccccaccatgactgagaaggcagagatggtgtgtgcccccagcccagcgcctgccccaccccctaagcctgcctcgcctgggcccccgcaggtggaggaggtgggccaccgaggaggctcctcgccccccaggctgccacctggtgtaccagtgatcagcctgggccacagcaggcccccaggggtagccatgcccaccacagagctgggcactctgcggcccccgctgctgcaactctccaccctgggaactgccccgcccactttggccctgcactaccaccctcaccccttcctcaacagtgtctacattgggccagcaggaccttttagcatcttccctagcagccggttgaagcggagaccaagccactgtgagctggacctggctgaggggcaccagccccagaaggtggcccggcgcgtgttcaccaacagccgggagcgctggcggcagcagaacgttaacggcgccttcgccgagctgaggaagctgctgccgacgcacccgcccgaccggaagctgagcaagaacgaggtgctccgcctagccatgaagtacatcggcttcctggtgcggctgctgcgcgaccaagccgcagctctggccgcaggccccacccctcccgggcctcgcaaacggccggtgcaccgggtcccagacgacggcgcccgccggggatccggacgcagggccgaggcggcagcgcgctcgcagcccgcgcccccggccgaccccgacggcagccccggtggagcggcccggcccatcaagatggagcaaaccgctttgagcccagaggtgcggtgaccgcacgcggcagcacctctgagccggagggcaccagggactcggcccagggccgtcaaggaaagggcagtggacgtgctgcgcatgttcgggagcgaactcccccgaagaaggaccagtgaagacgtcaggggcaaggtctcgggggtccggaagggtgatcatcgacccccaagggacccgcagacccttaaaaaaatcacccacaaccctctggaagtggccttgcccggtccccttcccaggggcgaggtcggcaaagcaacatggcagagcagtcataggacccaa

SEQ ID NO: 10038 - protein, 280 aa, Homo sapiens; identical to SEQ ID NO: 1551

SEQ ID NO: 10039 - DNA, 1642 bp, Homo sapiens
gggagtgtgcaaagccaaagggcagactcggacataagaggaggcagcttccctgcctcagtttaccccctgcgtgcatccaggcacctccctccccggctgccctggggcccgggtccccagaggcccggggtccctacagtggctgggggagcggaaggcgaagccctgaggggtggcggaccgagtcctgccagcgccggctgggggcggggccgggaggcccgcgctgctaggtccccgcccgctggtttcctccggggtcagccaggctccttatcaggcgcggccaggcagcctggcccttatctgcactgggccagcatcctccggccgctgcgccgccaggggtgagagggaggaaaccgggccgccgggggcggggagaaggcgggccggcccgggagccgctcactttccctgggggggacctacgcggagacctcggctatcctggccttccgaggcccacgaggaggcgcggcccaacgccggggcctggagcattgaggccggaccctcgcgagacagcagagcctggcctgacgctggaaaccacaccctggcccagactgccagccctgacgggacagagccagggcactcaccaggctgcaagaacagtgctggggtggaggaggtgggccaccgaggaggctcctcgccccccaggctgccacctggtgtaccagtgatcagcctgggccacagcaggcccccaggggtagccatgcccaccacagagctgggcactctgcggcccccgctgctgcaactctccaccctgggaactgccccgcccactttggccctgcactaccaccctcaccccttcctcaacagtgtctacattgggccagcaggaccttttagcatcttccctagcagccggttgaagcggagaccaagccactgtgagctggacctggctgaggggcaccagccccagaaggtggcccggcgcgtgttcaccaacagccgggagcgctggcggcagcagaacgttaacggcgccttcgccgagctgaggaagctgctgccgacgcacccgcccgaccggaagctgagcaagaacgaggtgctccgcctagccatgaagtacatcggcttcctggtgcggctgctgcgcgaccaagccgcagctctggccgcaggccccacccctcccgggcctcgcaaacggccggtgcaccgggtcccagacgacggcgcccgccggggatccggacgcagggccgaggcggcagcgcgctcgcagcccgcgcccccggccgaccccgacggcagccccggtggagcggcccggcccatcaagatggagcaaaccgctttgagcccagaggtgcggtgaccgcacgcggcagcacctctgagccggagggcaccagggactcggcccagggccgtcaaggaaagggcagtggacgtgctgcgcatgttcgggagcgaactcccccgaagaaggaccagtgaagacgtcaggggcaaggtctcgggggtccggaagggtgatcatcgacccccaagggacccgcagacccttaaaaaaatcacccacaaccctctggaagtggccttgcccggtccccttcccaggggcgaggtcggcaaagcaacatggcagagcagtcataggacccaa

SEQ ID NO: 10040 - protein, 206 aa, Homo sapiens
MPTTELGTLRPPLLQLSTLGTAPPTLALHYHPHPFLNSVYIGPAGPFSIFPSSRLKRRPSHCELDLAEGHQPQKVARRVFTNSRERWRQQNVNGAFAELRKLLPTHPPDRKLSKNEVLRLAMKYIGFLVRLLRDQAAALAAGPTPPGPRKRPVHRVPDDGARRGSGRRAEAAARSQPAPPADPDGSPGGAARPIKMEQTALSPEVR

SEQ ID NO: 10041 - DNA, 541 bp, Homo sapiens
agctgaggaagctgctgccgacgcacccgcccgaccggaagctgagcaagaacgaggtgctccgcctagccatgaagtacatcggcttcctggtgcggctgctgcgcgaccaagccgcagctctggccgcaggccccacccctcccgggcctcgcaaacggccggtgcaccgggtcccagacgacggcccccggtggagcggcccggcccatcaagatggagcaaaccgctttgagcccagaggtgcggtgaccgcacgcggcagcacctctgagccggagggcaccagggactcggcccagggccgtcaaggaaagggcagtggacgtgctgcgcatgttcgggagcgaactcccccgaagaaggaccagtgaagacgtcaggggcaaggtctcgggggtccggaagggtgatcatcgacccccaagggacccgcagacccttaaaaaaatcacccacaaccctctggaagtggccttgcccggtccccttcccaggggcgaggtcggcaaagcaacatggcagagcagtcataggaccc

SEQ ID NO: 10042 - protein, 100 aa, Homo sapiens
MKYIGFLVRLLRDQAAALAAGPTPPGPRKRPVHRVPDDGPRWSGPAHQDGANRFEPRGAVTARGSTSEPEGTRDSAQGRQGKGSGRAAHVRERTPPKKDQ

SEQ ID NO: 10043 - DNA, 386 bp, Homo sapiens
gacagagccagggcactcaccaggctgcaagaacagtgctggggtaagaggggagcgggcctaaaggtggaggatcccgggcctgggacccagcctgcattcctttgttcattccttcattcattcattcaccagcagggacccactagtgaggggccaggcctgcttccccagggcctagctgaggaagacagggcagaggggccaacagtctcacaccttgctgggacatcctggactctggaaccaagagcaaacagggatgtcaaaacagtatgcaaaactgtggatgatcaaaagcgtggatgctgatgaggatgggggcttccaagccagagggagggttggggcatgactggactggactgggcagtggggtcagtgtt

SEQ ID NO: 10044 - protein, 30 aa, Homo sapiens
MSKQYAKLWMIKSVDADEDGGFQARGRVGA

SEQ ID NO: 10045 - DNA, 2337 bp, Homo sapiens
actatcatgtgattcgcccacccactgtgccaacatggcggcgcccaggtcctaattcgggaaacgtgcaccttgactaattcggttttctgtggctacgagagcaggcttggcgggcggaggcgccagcggatgtctcatgcaaggatcgtctctgtggctaagcctcactttccgctccgcccgggtgctctctagagcccggtttttcgagtggcagtctccagggctgccgaatacagcagcgatggagaacggcaccgggccctacggagaagaacgtccacgtgaagtccaggagacgacagtcaccgagggggctgccaaaatcgcctttcccagtgccaacgaggtcttttataacccggtgcaggaattcaatcgggacctgacgtgagcaggggtcagacgttagcctggcatcggctagtgggtcagtgtggatggcgggggcggggtatgagctagtcctctgtctcccaccagatgtgctgtgatcaccgagtttgctcgcattcagcttggggccaaaggaatccagatcaaggttccaggagagaaggacacgcaaaaagtggtcgtggacttgtcagagcaagaggaggaaaaggttgaactgaaagagagtgaaaacctggcctcaggagaccaacctcgcacagcggccgtgggggagatctgtgaggaaggcctgcatgtgctggaaggcctggcagcttcaggcctacgttccattcgatttgccctagaggtgcctgggctcagatctgtggttgcaaacgatgcctccacccgggctgtggatctcatacgccggaatgtccagctcaatgacgtggcccacctggtacagccgagccaagcagatgcccggatgctgatgtaccagcaccagagggtgtcggagaggtttgacgtcatcgatctggacccctatggcagcccagccaccttcctggatgcagctgtgcaggctgtgagtgaaggagggttgctgtgtgtgacctgcacagacatggcggtgttggcggggaacagcggggagacgtgctacagcaagtacggggccatggccctcaagagccgggcctgccacgagatggccctgagaatcgtcctgcacagcctggacctccgcgccaactgctaccagcgcttcgtggtgccgctgctcagcatcagcgctgacttctacgtgcgtgtttttgtccgtgtcttcaccggccaggccaaggtcaaggcctcagccagcaagcaggcgctggtgttccagtgtgtgggctgcggggccttccaccttcagcgtctcggcaaagcgtcaggagtccccagcggccgggccaagttctctgcagcctgtggtccccctgtgacccccgagtgtgaacactgtgggcaacgacaccagcttggtggccccatgtgggcagagcccatccatgacctggattttgtgggccgtgtcctggaggctgtgagcgctaaccccggccgcttccacacctcggagcggatccgaggggtcctgagcgtcatcactgaggagctcccggacgtgcctctgtactacaccctggaccagctgagcagcaccatccactgcaacacaccaagcctcctgcagttgcggtcggccctcctccacgctgacttccgggtctcactctcccacgcctgtaagaacgctgtgaagacggatgcccctgcctctgccctctgggacatcatgcgttgctgggagaaggaatgtccggtgaaacgggagcgactatcagagactagcccagcgttccgcattctcagtgtggagcccaggctgcaggccaacttcaccatccgggaagatgccaaccccagctcccgacagcgaggactcaagcgcttccaggctaacccggaggccaactggggtccccggcctcgtgcccggccagggtgagtggtggtaaggtgggggtggggctcagccagggaaagaaggggtaaagggcagatggggtcccacctactcctcccctcgcacaggggcaaggcggccgacgaagctatggaggagagacgcaggctgcttcagaacaagcggaaggagccgccggaagatgtggcccagcgggctgcccggctcaagacatttccttgcaagaggtttaaggagggcacctgtcaacgcggggaccagtgctgctactcccacagccccccgacacccagggtttctgctgatgctgcccctgactgtccagagacctccaaccagaccccccctggacctggggctgccgctgggccaggcatagactgaaccaataaagagatgtcacgtcaccttctcccgat

SEQ ID NO: 10046 - protein, 354 aa, Homo sapiens
MLMYQHQRVSERFDVIDLDPYGSPATFLDAAVQAVSEGGLLCVTCTDMAVLAGNSGETCYSKYGAMALKSRACHEMALRIVLHSLDLRANCYQRFVVPLLSISADFYVRVFVRVFTGQAKVKASASKQALVFQCVGCGAFHLQRLGKASGVPSGRAKFSAACGPPVTPECEHCGQRHQLGGPMWAEPIHDLDFVGRVLEAVSANPGRFHTSERIRGVLSVITEELPDVPLYYTLDQLSSTIHCNTPSLLQLRSALLHADFRVSLSHACKNAVKTDAPASALWDIMRCWEKECPVKRERLSETSPAFRILSVEPRLQANFTIREDANPSSRQRGLKRFQANPEANWGPRPRARPG

SEQ ID NO: 10047 - DNA, 2259 bp, Homo sapiens
cgggctaggcagcgcggggagggattcggactcggggcgggcctgcacgagggcatcggctccacagggaccagtcatccccaaaacgaggggatatcagcttaccgaggccgcaggttttcctagtccctacctcatagatatgtaggacatccccgggcccggaatgcggctctctgaccctctctgtgccctcccccgccccccgaaccaggcttggcgggcggaggcgccagcggatgtctcatgcaaggatcgtctctgtggctaagcctcactttccgctccgcccgggtgctctctagagcccggtttttcgagtggcagtctccagggctgccgaatacagcagcgatggagaacggcaccgggccctacggagaagaacgtccacgtgaagtccaggagacgacagtcaccgagggggctgccaaaatcgcctttcccagtgccaacgaggtcttttataacccggtgcaggaattcaatcgggacctgacatgtgctgtgatcaccgagtttgctcgcattcagcttggggccaaaggaatccagatcaaggttccaggagagaaggacacgcaaaaagtggtcgtggacttgtcagagcaagaggaggaaaaggttgaactgaaagagagtgaaaacctggcctcaggagaccaacctcgcacagcggccgtgggggagatctgtgaggaaggcctgcatgtgctggaaggcctggcagcttcaggcctacgttccattcgatttgccctagaggtgcctgggctcagatctgtggttgcaaacgatgcctccacccgggctgtggatctcatacgccggaatgtccagctcaatgacgtggcccacctggtacagccgagccaagcagatgcccggatgctgatgtaccagcaccagagggtgtcggagaggtttgacgtcatcgatctggacccctatggcagcccagccaccttcctggatgcagctgtgcaggctgtgagtgaaggagggttgctgtgtgtgacctgcacagacatggcggtgttggcggggaacagcggggagacgtgctacagcaagtacggggccatggccctcaagagccgggcctgccacgagatggccctgagaatcgtcctgcacagcctggacctccgcgccaactgctaccagcgcttcgtggtgccgctgctcagcatcagcgctgacttctacgtgcgtgtttttgtccgtgtcttcaccggccaggccaaggtcaaggcctcagccagcaagcaggcgctggtgttccagtgtgtgggctgcggggccttccaccttcagcgtctcggcaaagcgtcaggagtccccagcggccgggccaagttctctgcagcctgtggtccccctgtgacccccgagtgtgaacactgtgggcaacgacaccagcttggtggccccatgtgggcagagcccatccatgacctggattttgtgggccgtgtcctggaggctgtgagcgctaaccccggccgcttccacacctcggagcggatccgaggggtcctgagcgtcatcactgaggagctcccggacgtgcctctgtactacaccctggaccagctgagcagcaccatccactgcaacacaccaagcctcctgcagttgcggtcggccctcctccacgctgacttccgggtctcactctcccacgcctgtaagaacgctgtgaagacggatgcccctgcctctgccctctgggacatcatgcgttgctgggagaaggaatgtccggtgaaacgggagcgactatcagagactagcccagcgttccgcattctcagtgtggagcccaggctgcaggccaacttcaccatccgggaagatgccaaccccagctcccgacagcgaggactcaagcgcttccaggctaacccggaggccaactggggtccccggcctcgtgcccggccagggggcaaggcggccgacgaagctatggaggagagacgcaggctgcttcagaacaagcggaaggagccgccggaagatgtggcccagcgggctgcccggctcaagacatttccttgcaagaggtttaaggagggcacctgtcaacgcggggaccagtgctgctactcccacagccccccgacacccagggtttctgctgatgctgcccctgactgtccagagacctccaaccagaccccccctggacctggggctgccgctgggccaggcatagactgaaccaataaagagatgtcacgtcaccttctcccg

SEQ ID NO: 10048 - protein, 659 aa, Homo sapiens; identical to SEQ ID NO: 1553

SEQ ID NO: 10049 - DNA, 2172 bp, Homo sapiens
cgggctaggcagcgcggggagggattcggactcggggcgggcctgcacgagggcatcggctccacagggaccagtcatccccaaaacgaggggatatcagcttaccgaggccgcaggttttcctagtccctacctcatagatatgtaggacatccccgggcccggaatgcggctctctgaccctctctgtgccctcccccgccccccgaaccaggcttggcgggcggaggcgccagcggatgtctcatgcaaggatcgtctctgtggctaagcctcactttccgctccgcccgggtgctctctagagcccggtttttcgagtggcagtctccagggctgccgaatacagcagcgatggagaacggcaccgggccctacggagaagaacgtccacgtgaagtccaggagacgacagtcaccgagggggctgccaaaatcgcctttcccagtgccaacgaggtcttttataacccggtgcaggaattcaatcgggacctgacatgtgctgtgatcaccgagtttgctcgcattcagcttggggccaaaggaatccagatcaaggttccaggagagaaggacacgcaaaaagtggtcgtggacttgtcagagcaagaggaggaaaaggttgaactgaaagagagtgaaaacctggcctcaggagaccaacctcgcacagcggccgtgggggagatctgtgaggaaggcctgcatgtgctggaaggcctggcagcttcaggcctacgttccattcgatttgccctagaggtgcctgggctcagatctgtggttgcaaacgatgcctccacccgggctgtggatctcatacgccggaatgtccagctcaatgacgtggcccacctggtacagccgagccaagcagatgcccggatgctgatgtaccagcaccagagggtgtcggagaggtttgacgtcatcgatctggacccctatggcagcccagccaccttcctggatgcagctgtgcaggctgtgagtgaaggagggttgctgtgtgtgacctgcacagacatggcggtgttggcggggaacagcggggagacgtgctacagcaagtacggggccatggccctcaagagccgggcctgccacgagatggccctgagaatcgtcctgcacagcctggacctccgcgccaactgctaccagcgcttcgtggtgccgctgctcagcatcagcgctgacttctacgtgcgtgtttttgtccgtgtcttcaccggccaggccaaggtcaaggcctcagccagggccaagttctctgcagcctgtggtccccctgtgacccccgagtgtgaacactgtgggcaacgacaccagcttggtggccccatgtgggcagagcccatccatgacctggattttgtgggccgtgtcctggaggctgtgagcgctaaccccggccgcttccacacctcggagcggatccgaggggtcctgagcgtcatcactgaggagctcccggacgtgcctctgtactacaccctggaccagctgagcagcaccatccactgcaacacaccaagcctcctgcagttgcggtcggccctcctccacgctgacttccgggtctcactctcccacgcctgtaagaacgctgtgaagacggatgcccctgcctctgccctctgggacatcatgcgttgctgggagaaggaatgtccggtgaaacgggagcgactatcagagactagcccagcgttccgcattctcagtgtggagcccaggctgcaggccaacttcaccatccgggaagatgccaaccccagctcccgacagcgaggactcaagcgcttccaggctaacccggaggccaactggggtccccggcctcgtgcccggccagggggcaaggcggccgacgaagctatggaggagagacgcaggctgcttcagaacaagcggaaggagccgccggaagatgtggcccagcgggctgcccggctcaagacatttccttgcaagaggtttaaggagggcacctgtcaacgcggggaccagtgctgctactcccacagccccccgacacccagggtttctgctgatgctgcccctgactgtccagagacctccaaccagaccccccctggacctggggctgccgctgggccaggcatagactgaaccaataaagagatgtcacgtcaccttctcccg

SEQ ID NO: 10050 - protein, 630 aa, Homo sapiens
MQGSSLWLSLTFRSARVLSRARFFEWQSPGLPNTAAMENGTGPYGEERPREVQETTVTEGAAKIAFPSANEVFYNPVQEFNRDLTCAVITEFARIQLGAKGIQIKVPGEKDTQKVVVDLSEQEEEKVELKESENLASGDQPRTAAVGEICEEGLHVLEGLAASGLRSIRFALEVPGLRSVVANDASTRAVDLIRRNVQLNDVAHLVQPSQADARMLMYQHQRVSERFDVIDLDPYGSPATFLDAAVQAVSEGGLLCVTCTDMAVLAGNSGETCYSKYGAMALKSRACHEMALRIVLHSLDLRANCYQRFVVPLLSISADFYVRVFVRVFTGQAKVKASARAKFSAACGPPVTPECEHCGQRHQLGGPMWAEPIHDLDFVGRVLEAVSANPGRFHTSERIRGVLSVITEELPDVPLYYTLDQLSSTIHCNTPSLLQLRSALLHADFRVSLSHACKNAVKTDAPASALWDIMRCWEKECPVKRERLSETSPAFRILSVEPRLQANFTIREDANPSSRQRGLKRFQANPEANWGPRPRARPGGKAADEAMEERRRLLQNKRKEPPEDVAQRAARLKTFPCKRFKEGTCQRGDQCCYSHSPPTPRVSADAAPDCPETSNQTPPGPGAAAGPGID

SEQ ID NO: 10051 - DNA, 365 bp, Homo sapiens
agcggatgtctcatgcaaggatcgtctctgtggctaagcctcactttccgctccgcccgggtgctctctagagcccggtttttcgagtggcagtctccagggctgccgaatacagcagcgatggagaacggcaccgggccctacggagaagaacgtccacgtgaagtccaggagacgacagtcaccgagggggctgccaaaatcgcctttcccatgctgctactcccacagccccccgacacccagggtttctgctgatgctgcccctgactgtccagagacctccaaccagaccccccctggacctggggctgccgctgggccaggcatagactgaaccaataaagagatgtcacgtcaccttc

SEQ ID NO: 10052 - protein, 81 aa, Homo sapiens
MQGSSLWLSLTFRSARVLSRARFFEWQSPGLPNTAAMENGTGPYGEERPREVQETTVTEGAAKIAFPMLLLPQPPDTQGFC

SEQ ID NO: 10053 - DNA, 404 bp, Homo sapiens
tgactaattcggttttctgtggctacgagagcaggcttggcgggcggaggcgccagcggatgtctcatgcaaggatcgtctctgtggctaagcctcactttccgctccgcccgggtgctctctagagcccggtttttcgagtggcagtctccagggctgccgaatacagcagcgatggagaacggcaccgggccctacggagaagaacgtccacgtgaagtccaggagacgacagtcaccgagggggctgccaaaatcgcctttcccagtgccaacgaggtcttttataacccggtgcaggaattcaatcgggacctgacgtgagcaggggtcagacaccccccctggacctggggctgccgctgggccaggcatagactgaaccaataaagagatgtcacgtc

SEQ ID NO: 10054 - protein, 85 aa, Homo sapiens
MQGSSLWLSLTFRSARVLSRARFFEWQSPGLPNTAAMENGTGPYGEERPREVQETTVTEGAAKIAFPSANEVFYNPVQEFNRDLT

SEQ ID NO: 10055 - DNA, 741 bp, Homo sapiens
attcgcccacccactgtgccaacatggcggcgcccaggtcctaattcgggaaacgtgcaccttgactaattcggttttctgtggctacgagagcagagcccggtttttcgagtggcagtctccagggctgccgaatacagcagcgatggagaacggcaccgggccctacggagaagaacgtccacgtgaagtccaggagacgacagtcaccgagggggctgccaaaatcgcctttcccagtgccaacgaggtcttttataacccggtgcaggaattcaatcgggacctgacatgtgctgtgatcaccgagtttgctcgcattcagcttggggccaaaggaatccagatcaaggttccaggagagaaggacacgcaaaaagtggtcgtggacttgtcagagcaagaggaggaaaaggttgaactgaaagagagtgaaaacctggcctcaggagaccaacctcgcacagcggccgtgggggagatctgtgaggaaggcctgcatgtgctggaaggcctggcagcttcaggcctacgttccattcgatttgccctagaggtgcctgggctcagatctgtggttgcaaacgatgcctccacccgggctgtggatctcatacgccggaatgtccagctcaatgacgtggcccacctggtacagccgagccaagcagatgcccggatgctgatgtaccagcaccagagggtgtcggagaggtttgacgtcatcgatctggaccccta

SEQ ID NO: 10056 - protein, 197 aa, Homo sapiens
MENGTGPYGEERPREVQETTVTEGAAKIAFPSANEVFYNPVQEFNRDLTCAVITEFARIQLGAKGIQIKVPGEKDTQKVVVDLSEQEEEKVELKESENLASGDQPRTAAVGEICEEGLHVLEGLAASGLRSIRFALEVPGLRSVVANDASTRAVDLIRRNVQLNDVAHLVQPSQADARMLMYQHQRVSERFDVIDLD

SEQ ID NO: 10057 - DNA, 890 bp, Homo sapiens
gattcgcccacccactgtgccaacatggcggcgcccaggtcctaattcgggaaacgtgcaccttgactaattcggttttctgtggctacgagagcaggcttggcgggcggaggcgccagcggatgtctcatgcaaggatcgtctctgtggctaagcctcactttccgctccgcccgggtgctctctagagcccggtttttcgagtggcagtctccagggctgccgaatacagcagcgatggagaacggcaccgggccctacggagaagaacgtccacgtgaagtccaggagacgacagtcaccgagggggctgccaaaatcgcctttcccagtgccaacgaggtcttttataacccggtgcaggaattcaatcgggacctgacgtgagcaggggtcagacgttagcctggcatcggctagtgggtcagtgtggatggcgggggcggggtatgagctagtcctctgtctcccaccagatgtgctgtgatcaccgagtttgctcgcattcagcttggggccaaaggaatccagagtgagtggaggtccaggcttctggtgggcgggggtcacacaagtttatctccctgcctgggctcttctgccgcccaaatccagaggggcttcagccacatagcaggccctgggttctgctccttcagcctttccgcagggatttcagggacgatattttggagattaaggggaggtttctcagaggggaccttgttattctctgacttgtgcctctgggtggctgcagtcaaggttccaggagagaaggacacgcaaaaagtggtcgtggacttgtcagagcaagaggaggaaaaggttgaactgaaagagagtgaaaacctggcctcaggagaccaacctcgcacagcggccgtggg

SEQ ID NO: 10058 - protein, 85 aa, Homo sapiens; identical to SEQ ID NO: 10054

SEQ ID NO: 10059 - DNA, 809 bp, Homo sapiens
actatcatgtgattcgcccacccactgtgccaacatggcggcgcccaggtcctaattcgggaaacgtgcaccttgactaattcggttttctgtggctacgagagcagagcccggtttttcgagtggcagtctccagggctgccgaatacagcagcgatggagaacggcaccgggccctacggagaagaacgtccacgtgaagtccaggagacgacagtcaccgagggggctgccaaaatcgcctttcccagtgccaacgaggtcttttataacccggtgcaggaattcaatcgggacctgacgtgagcaggggtcagacgttagcctggcatcggctagtgggtcagtgtggatggcgggggcggggtatgagctagtcctctgtctcccaccagatgtgctgtgatcaccgagtttgctcgcattcagcttggggccaaaggaatccagagtgagtggaggtccaggcttctggtgggcgggggtcacacaagtttatctccctgcctgggctcttctgccgcccaaatccagaggggcttcagccacatagcaggccctgggttctgctccttcagcctttccgcagggatttcagggacgatattttggagattaaggggaggtttctcagaggggaccttgttattctctgacttgtgcctctgggtggctgcagtcaaggttccaggagagaaggacacgcaaaaagtggtcgtggacttgtcagagcaagaggaggaaaaggttgaactgaaagagagtgaaaacctggcctcaggagaccaacctcgcacagcggccgtggg

SEQ ID NO: 10060 - protein, 49 aa, Homo sapiens
MENGTGPYGEERPREVQETTVTEGAAKIAFPSANEVFYNPVQEFNRDLT

SEQ ID NO: 10061 - DNA, 661 bp, Homo sapiens
ggacgggctaggcagcgcggggagggattcggactcggggcgggcctgcacgagggcatcggctccacagggaccagtcatccccaaaacgaggggatatcagcttaccgaggccgcaggttttcctagtccctacctcatagatatgtaggacatccccgggcccggaatgcggctctctgaccctctctgtgccctcccccgccccccgaaccaggcttggcgggcggaggcgccagcggatgtctcatgcaaggatcgtctctgtggctaagcctcactttccgctccgcccgggtgctctctagagcccggtttttcgagtggcagtctccagggctgccgaatacagcagcgatggagaacggcaccgggccctacggagaagaacgtccacgtgaagtccaggagacgacagtcaccgagggggctgccaaaatcgcctttcccagtgccaacgaggtcttttataacccggtgcaggaattcaatcgggacctgacatgtgctgtgatcaccgagtttgctcgcattcagcttggggccaaaggaatccagatcaaggttccaggagagaaggacacgcaaaaagtggtcgtggacttgtcagagcaagaggaggaaaaggttgaactgaaagagagtgaaaacctggcctcag

SEQ ID NO: 10062 - protein, 136 aa, Homo sapiens
MQGSSLWLSLTFRSARVLSRARFFEWQSPGLPNTAAMENGTGPYGEERPREVQETTVTEGAAKIAFPSANEVFYNPVQEFNRDLTCAVITEFARIQLGAKGIQIKVPGEKDTQKVVVDLSEQEEEKVELKESENLA

SEQ ID NO: 10063 - DNA, 607 bp, Homo sapiens
actatcatgtgattcgcccacccactgtgccaacatggcggcgcccaggtcctaattcgggaaacgtgcaccttgactaattcggttttctgtggctacgagagcaggcttggcgggcggaggcgccagcggatgtctcatgcaaggatcgtctctgtggctaagcctcactttccgctccgcccgggtgctctctagagcccggtttttcgagtggcagtctccagggctgccgaatacagcagcgatggagaacggcaccgggccctacggagaagaacgtccacgtgaagtccaggagacgacagtcaccgagggggctgccaaaatcgcctttcccagtgccaacgaggtcttttataacccggtgcaggaattcaatcgggacctgacgtgagcaggggtcagacgttagcctggcatcggctagtgggtcagtgtggatggcgggggcggggtatgagctagtcctctgtctcccaccagatgtgctgtgatcaccgagtttgctcgcattcagcttggggccaaaggaatccagatcaaggttccaggagagaaggacacgcaaaaagtggtcgtggacttgtcagagcaagaggaggaa

SEQ ID NO: 10064 - protein, 39 aa, Homo sapiens
MCCDHRVCSHSAWGQRNPDQGSRREGHAKSGRGLVRARG

SEQ ID NO: 10065 - DNA, 4500 bp, Homo sapiens
caatgaatggccgccgcggctgccgctgctgctgaggcggaggccgcggaggccgcggaggcggaggccgaggccccggcgcagcggggcgcgccccgggcccaggcccggccccagccgccgctgcggagcccgccgggaccccccggagcgcggccacggcgcagccgctgccatggcccagacactgcagatggagatcccgaacttcggcaacagcatcctggagtgcctcaatgaacagcggctgcagggcctgtactgtgacgtgtcagtggtggtcaagggccatgccttcaaggcccaccgggccgtgcttgctgccagcagctcctacttccgggacctgttcaacaacagccgcagcgccgtggtggagctgccggcggctgtgcagccccagtctttccagcagatcctcagcttctgctacacgggccggctgagcatgaacgtgggcgaccagttcctgctcatgtacacggctggcttcctgcagatccaggagatcatggagaagggcaccgagttcttcctcaaggtgagctccccgagctgcgactcccagggcctgcatgcggaggaggccccatcgtcggagccccagagccccgtggcgcagacatcgggctggccagcctgtagcaccccgctgcccctcgtgtcgcgggtgaagacggagcagcaggagtcggactccgtgcagtgcatgcccgtggccaagcggctgtgggacagtggccagaaggaggctgggggcggcggcaatggcagccgcaagatggccaagttctccacgccggacctggctgccaaccggcctcaccagcccccgccaccccaacaggctccggtggtggcagcagcccagcccgccgtggctgcgggagcagggcagccagccggtggggtggcagcagcagggggtgtggtgagtgggcccagcacgtcggagcggaccagcccaggcacctcaagcgcctacaccagcgacagccctggctcctaccacaatgaggaggacgaggaggaggatggtggcgaggagggcatggatgagcagtaccggcagatctgcaacatgtacaccatgtacagcatgatgaacgtcggccagacagccgagaaggtggaggccctcccggagcaggtagcccccgagtcccgaaatcgcatccgggttcggcaagacctggcgtctctcccggctgaacttatcaaccagattgggaaccgctgccaccccaagctctacgacgagggcgacccctctgagaagctggagctggtgacaggcaccaacgtgtacatcacaagggcgcagctgatgaactgccacgtcagcgcaggcacgcggcacaaggtcctactgcggcggctcctggcctccttctttgaccggaacacgctggccaacagctgcggcaccggcatccgctcttctaccaacgatccccgtcggaagcccctggacagccgcgtgctccacgctgtcaagtactactgccagaacttcgcccccaacttcaaggagagcgagatgaatgccatcgcggccgacatgtgcaccaacgcccgccgcgtcgtgcgcaagagctggatgcccaaggtcaaggtgctcaaggctgaggatgacgcctacaccaccttcatcagtgaaacgggcaagatcgagccggacatgatgggtgtggagcatggcttcgagaccgccagccacgagggcgaggcgggtccctcggctgaagccctgcagtaacccgcccagcctcccgcggggccacacacttcccctcccaacacacacacacacctgccatcttggtcatgagctactgtctgtccctccccaggacccgcggtgggtgctgcatgttcccggccctctgcccctcctgtcctaccccctttccccaccgagagctgggccgggagaggaccgcagggcaggtggcgtgaggtccgtgttgccttctttaacacacactcgtgcagtgggggagttctggctccccaacctaacccctagccgtcatctccacactcaccaggcccaccaggggagggggctggcctgggggtcttgggaaggcccctccccaggccctaggccacctcgcggaagccttcagcctccgcccctcactgcagccccttgggacttgaggggggccccaggggttctcaggacccctcccaccacctcccagtgcttccacgtctccaaaagcgccttcctgtcaccctcgtctatccctgcgcctgggggctggggtaggcgaggccgtggggactacccattttatagctggggaaacaggctccgagaaattgcacaaccgacctcaggtggccggcagtggcgtgcctggtgccctttctcctcttccgcctctgttgctccctttggtcctctggggcctcagagaggcaggtcctaaaggagggggggtctcctgggggcagaccgagggtctcggaggatagaatgagaggtttccagggctggcagagtgtgtgcgtgtgtgtgtgcagaagttttgctttcaaacaaatgaagatacaagaggcagtaggacctgggttggaacccaggggagcagactggggggctgttgcccctccctccatctccccacacccaccccaccccacagcagggctcctggcccccacccccctgtacataatttttaaaacctttttttagcgaatgaaatattgaagtataagattccttttatttttcaaaccaatggggctgtgtctattgtccccctcggtccccaggggtggggggccttggaaggcagggcggtgttggggggctggggggcaggctgaatgtgtgtgtgtgggtgtgtatgtgtggagtgtgtgtgtgtgtttccatggtaggactccagtcccagctgctgcctaggctcctgtgggtcctgtgggtccccctcccctgttcaccttccccaacagggctatagtttaagggtgtcccaggccttggctggttggctgggcccagctcctgggggctgggcagggcagggcagggccgggtccacttccattgttagcagttgtttgcagaattttctcttttaccattcctctctttttgttctcgcccagagtgggtggttttttgttgttgttttagattttcatgtgaaggcagttttttttcttttttaactccccatccccctatgcagggtgtcatttcaccatccacatccacatccttgtttgtgtttctggccctcgtcctccctgcctctcatctgcctccccaacccccacctacccactgctcccaggggtctctccaggggcagggggattttaggagatggggtgggggccagcccctactggacccttgtaatctgatttggagaccatccccccgatgggaccagcagccccgccggcccactgggggtccctcttaacatctgcttgttgcgggggtcagtcatgagtgccagggtctggctggggtcttggcactgtcttcctggccggggcctgaaaccttagcccccagccggcctgagtgggggatattgacacccccagctaaagcacaagcaccttagtcacccctcctctccccccgcctcctggcctgccaccccaccccagcgtttaccccaaagcacaatgccctggtcacttggcaagcggctgggcctgacggaggccgaggggcagaccggggctccagccagacccctgaaaggaaggtgctcccccacttccaggccttagttggggtgggggggccagctcctgggcctggggtcttctcacccccacccccttgtcctgggtaggcccctgcctgcccctctctgccttttcctcgggtgtccctcctcgagcccctgtggcattggcttgggtggcagagcccacttgtttcagggaccccaggaggtgccccctggctcccaggactgtgtgtgggtccggggggtgggggggtggggagaagggtcgggcagggggtgcaggggaggaaactcctcaccaggagagccaaagacagggttgtgccttaccccaggagccacccctgtaccccccttgccctgccattcaccctccacccctacccctgggcggcctgctgctttttccttctcttcctcccctgccctgagctgcatggttcccccaccctgggcagccaggaaggaatctgaatggagaatcaccaaccaccagagaaaaaagactgtggggccctcccctgccaactccccttccctggccgcccactcaacccacacctctttcacgcaggacaggctgcccaccctgtccacgtgaagtgccaacgccctccccaccctgggccgagcccccacccctccctgggcccccaagtgagattgcacatttaactactgtaaggagaggagcggcgttggcaaatgtgaaccatgagaatatcagtgatactgatgagaataaactaaacgcctttgtaacagc

SEQ ID NO: 10066 - protein, 527 aa, Homo sapiens; identical to SEQ ID NO: 1555

SEQ ID NO: 10067 - DNA, 1565 bp, Homo sapiens
gccgcggctgccgctgctgctgaggcggaggccgcggaggccgcggaggcggaggccgaggccccggcgcagcggggcgcgccccgggcccaggcccggccccagccgccgctgcggagcccgccgggaccccccggagcgcggccacggcgcagccgctgccatggcccagacactgcagatggagatcccgaacttcggcaacagcatcctggagtgcctcaatgaacagcggctgcagggcctgtactgtgacgtgtcagtggtggtcaagggccatgccttcaaggcccaccgggccgtgcttgctgccagcagctcctacttccgggacctgttcaacaacagccgcagcgccgtggtggagctgccggcggctgtgcagccccagtctttccagcagatcctcagcttctgctacacgggccagcccctactggacccttgtaatctgatttggagaccatccccccgatgggaccagcagccccgccggcccactgggggtccctcttaacatctgcttgttgcgggggtcagtcatgagtgccagggtctggctggggtcttggcactgtcttcctggccggggcctgaaaccttagcccccagccggcctgagtgggggatattgacacccccagctaaagcacaagcaccttagtcacccctcctctccccccgcctcctggcctgccaccccaccccagcgtttaccccaaagcacaatgccctggtcacttggcaagcggctgggcctgacggaggccgaggggcagaccggggctccagccagacccctgaaaggaaggtgctcccccacttccaggccttagttggggtgggggggccagctcctgggcctggggtcttctcacccccacccccttgtcctgggtaggcccctgcctgcccctctctgccttttcctcgggtgtccctcctcgagcccctgtggcattggcttgggtggcagagcccacttgtttcagggaccccaggaggtgccccctggctcccaggactgtgtgtgggtccggggggtgggggggtggggagaagggtcgggcagggggtgcaggggaggaaactcctcaccaggagagccaaagacagggttgtgccttaccccaggagccacccctgtaccccccttgccctgccattcaccctccacccctacccctgggcggcctgctgctttttccttctcttcctcccctgccctgagctgcatggttcccccaccctgggcagccaggaaggaatctgaatggagaatcaccaaccaccagagaaaaaagactgtggggccctcccctgccaactccccttccctggccgcccactcaacccacacctctttcacgcaggacaggctgcccaccctgtccacgtgaagtgccaacgccctccccaccctgggccgagcccccacccctccctgggcccccaagtgagattgcacatttaactactgtaaggagaggagcggcgttggcaaatgtgaaccatgagaatatcagtgatactgatgagaataaactaaacgcctttgtaacagc

SEQ ID NO: 10068 - protein, 117 aa, Homo sapiens
MAQTLQMEIPNFGNSILECLNEQRLQGLYCDVSVVVKGHAFKAHRAVLAASSSYFRDLFNNSRSAVVELPAAVQPQSFQQILSFCYTGQPLLDPCNLIWRPSPRWDQQPRRPTGGPS

SEQ ID NO: 10069 - DNA, 621 bp, Homo sapiens
agagtgaagccctgtctctgggtctcctggatctgcccatcacccccagatggaagttcagaaccccttggcctgcatctagggtatttaaaaaatctggcctcctggccgggcagcagggagccccagcaggttcttgagctgggctttgaggagatgtgagttttggtcagccttacagggtctattgaaggagtctgcctggaggcccgggggtttggagagagtttggggttggcccaacattgtctgaccctagatttcatcagtgtcattgccagagcctgtgtggagagagggatcccatcaggcttggtggggcatattgcttttgggatggtggtgagccaccggggctgtacatataactcttaaaatgctgccctgaccctggggctcactttcaaagatgtccacactctgtaggccaggaccccacctgtcccatacccttcctggcagccctgtccctgctacatcgcccttcagctacaccagctttctttgggtccctggaccacacctgataccttcccgcccagaagtgttatctctgtcctggcagttgctcaaccttttatggtccctaccaccaaggccatctgcttggttgacataccc

SEQ ID NO: 10070 - protein, 69 aa, Homo sapiens
MSTLCRPGPHLSHTLPGSPVPATSPFSYTSFLWVPGPHLIPSRPEVLSLSWQLLNLLWSLPPRPSAWLT

SEQ ID NO: 10071 - DNA, 340 bp, Homo sapiens
tgagtttgagctcctgggcggagatttttgttgccttgtaactgggattcctagatccagcctccaccctctgattgccctaaggaggttttggggttttgttttgttttgtttgtgttttcgtaggatggtggcagtgattttgaggaggggaagaggaaggaagatacaagcaagggaagtcacaggctgtggtgcctaggcagaccctggtttgaatcttggccttaccactttttgcatgtaagtggtaggggcagcagatagctcaggacatatcttgggtttttttgtttgtttttgttttgagacatagtctcactctgttgcagtgagccga

SEQ ID NO: 10072 - protein, 46 aa, Homo sapiens
DGGSDFEEGKRKEDTSKGSHRLWCLGRPWFESWPYHFLHVSGRGSR

SEQ ID NO: 10073 - DNA, 1166 bp, Homo sapiens
cctgggggctggggtaggcgaggccgtggggactacccattttatagctggggaaacaggctccgagaaattgcacaaccgacctcaggtggccggcagtggcgtgcctggtgccctttctcctcttccgcctctgttgctccctttggtcctctggggcctcagagaggcaggtcctaaaggagggggggtctcctgggggcagaccgagggtctcggaggatagaatgagaggtttccagggctggcagagtgtgtgcgtgtgtgtgtgcagaagttttgctttcaaacaaatgaagatacaagaggcagtaggacctgggttggaacccaggggagcagactggggggctgttgcccctccctccatctccccacacccaccccaccccacagcagggctcctggcccccacccccctgtacataatttttaaaacctttttttagcgaatgaaatattgaagtataagattccttttatttttcaaaccaatggggctgtgtctattgtccccctcggtccccaggggtggggggccttggaaggcagggcggtgttggggggctggggggcaggctgaatgtgtgtgtgtgggtgtgtatgtgtggagtgtgtgtgtgtgtttccatggtaggactccagtcccagctgctgcctaggctcctgtgggtcctgtgggtccccctcccctgttcaccttccccaacagggctatagtttaagggtgtcccaggccttggctggttggctgggcccagctcctgggggctgggcagggcagggcagggccgggtccacttccattgttagcagttgtttgcagaattttctcttttaccattcctctctttttgttctcgcccagagtgggtggttttttgttgttgttttagattttcatgtgaaggcagttttttttcttttttaactccccatccccctatgcagggtgtcatttcaccatccacatccacatccttgtttgtgtttctggccctcgtcctccctgcctctcatctgcctccccaacccccacccctccctgggcccccaagtgagattgcacatttaactactgtaaggagaggagcggcgttggcaaatgtgaaccatgagaatatcagtgatactgatgagaataaactaaacgcctttgtaacagc

SEQ ID NO: 10074 - protein, 72 aa, Homo sapiens
MQGVISPSTSTSLFVFLALVLPASHLPPQPPPLPGPPSEIAHLTTVRRGAALANVNHENISDTDENKLNAFV

SEQ ID NO: 10075 - DNA, 1584 bp, Homo sapiens
ccccctgtacataatttttaaaacctttttttagcgaatgaaatattgaagtataagattccttttatttttcaaaccaatggggctgtgtctattgtccccctcggtccccaggggtggggggccttggaaggcagggcggtgttggggggctggggggcaggctgaatgtgtgtgtgtgggtgtgtatgtgtggagtgtgtgtgtgtgtttccatggtaggactccagtcccagctgctgcctaggctcctgtgggtcctgtgggtccccctcccctgttcaccttccccaacagggctatagtttaagggtgtcccaggccttggctggttggctgggcccagctcctgggggctgggcagggcagggcagggccgggtccacttccattgttagcagttgtttgcagaattttctcttttaccattcctctctttttgttctcgcccagagtgggtggttttttgttgttgttttagattttcatgtgaaggcagttttttttcttttttaactccccatccccctatgcagggtgtcatttcaccatccacatccacatccttgtttgtgtttctggccctcgtcctccctgcctctcatctgcctccccaacccccacctacccactgctcccaggggtctctccaggggcagggggattttaggagatggggtgggggccagcccctactggacccttgtaatctgatttggagaccatccccccgatgggaccagcagccccgccggcccactgggggtccctcttaacatctgcttgttgcgggggtcagtcatgagtgccagggtctggctggggtcttggcactgtcttcctggccggggcctgaaaccttagcccccagccggcctgagtgggggatattgacacccccagccccttgtcctgggtaggcccctgcctgcccctctctgccttttcctcgggtgtccctcctcgagcccctgtggcattggcttgggtggcagagcccacttgtttcagggaccccaggaggtgccccctggctcccaggactgtgtgtgggtccggggggtgggggggtggggagaagggtcgggcagggggtgcaggggaggaaactcctcaccaggagagccaaagacagggttgtgccttaccccaggagccacccctgtaccccccttgccctgccattcaccctccacccctacccctgggcggcctgctgctttttccttctcttcctcccctgccctgagctgcatggttcccccaccctgggcagccaggaaggaatctgaatggagaatcaccaaccaccagagaaaaaagactgtggggccctcccctgccaactccccttccctggccgcccactcaacccacacctctttcacgcaggacaggctgcccaccctgtccacgtgaagtgccaacgccctccccaccctgggccgagcccccacccctccctgggcccccaagtgagattgcacatttaactactgtaaggagaggagcggcgttggcaaatgtgaaccatgagaatatcagtgatactgatgagaataaactaaacgcctttgtaacagc

SEQ ID NO: 10076 - protein, 81 aa, Homo sapiens
MQGVISPSTSTSLFVFLALVLPASHLPPQPPPTHCSQGSLQGQGDFRRWGGGQPLLDPCNLIWRPSPRWDQQPRRPTGGPS

SEQ ID NO: 10077 - DNA, 1630 bp, Homo sapiens
ccccctgtacataatttttaaaacctttttttagcgaatgaaatattgaagtataagattccttttatttttcaaaccaatggggctgtgtctattgtccccctcggtccccaggggtggggggccttggaaggcagggcggtgttggggggctggggggcaggctgaatgtgtgtgtgtgggtgtgtatgtgtggagtgtgtgtgtgtgtttccatggtaggactccagtcccagctgctgcctaggctcctgtgggtcctgtgggtccccctcccctgttcaccttccccaacagggctatagtttaagggtgtcccaggccttggctggttggctgggcccagctcctgggggctgggcagggcagggcagggccgggtccacttccattgttagcagttgtttgcagaattttctcttttaccattcctctctttttgttctcgcccagagtgggtggttttttgttgttgttttagattttcatgtgaaggcagttttttttcttttttaactccccatccccctatgcagggtgtcatttcaccatccacatccacatccttgtttgtgtttctggccctcgtcctccctgcctctcatctgcctccccaacccccacctacccactgctcccaggggtctctccaggggcagggggattttaggagatggggtgggggccagcccctactggacccttgtaatctgatttggagaccatccccccgatgggaccagcagccccgccggcccactgggggtccctcttaacatctgcttgttgcgggggtcagtcatgagtgccagggtctggctggggtcttggcactgtcttcctgaccggggctccagccagacccctgaaaggaaggtgctcccccacttccaggccttagttggggtgggggggccagctcctgggcctggggtcttctcacccccacccccttgtcctgggtaggcccctgcctgcccctctctgccttttcctcgggtgtccctcctcgagcccctgtggcattggcttgggtggcagagcccacttgtttcagggaccccaggaggtgccccctggctcccaggactgtgtgtgggtccggggggtgggggggtggggagaagggtcgggcagggggtgcaggggaggaaactcctcaccaggagagccaaagacagggttgtgccttaccccaggagccacccctgtaccccccttgccctgccattcaccctccacccctacccctgggcggcctgctgctttttccttctcttcctcccctgccctgagctgcatggttcccccaccctgggcagccaggaaggaatctgaatggagaatcaccaaccaccagagaaaaaagactgtggggccctcccctgccaactccccttccctggccgcccactcaacccacacctctttcacgcaggacaggctgcccaccctgtccacgtgaagtgccaacgccctccccaccctgggccgagcccccacccctccctgggcccccaagtgagattgcacatttaactactgtaaggagaggagcggcgttggcaaatgtgaaccatgagaatatcagtgatactgatgagaataaactaaacgcctttgtaacagc

SEQ ID NO: 10078 - protein, 54 aa, Homo sapiens
MSARVWLGSWHCLPDRGSSQTPERKVLPHFQALVGVGGPAPGPGVFSPPPPCPG

SEQ ID NO: 10079 - DNA, 1055 bp, Homo sapiens
ccccctgtacataatttttaaaacctttttttagcgaatgaaatattgaagtataagattccttttatttttcaaaccaatggggctgtgtctattgtccccctcggtccccaggggtggggggccttggaaggcagggcggtgttggggggctggggggcaggctgaatgtgtgtgtgtgggtgtgtatgtgtggagtgtgtgtgtgtgtttccatggtaggactccagtcccagctgctgcctaggctcctgtgggtcctgtgggtccccctcccctgttcaccttccccaacagggctatagtttaagggtgtcccaggccttggctggttggctgggcccagctcctgggggctgggcagggcagggcagggccgggtccacttccattgttagcagttgtttgcagaattttctcttttaccattcctctctttttgttctcgcccagagtgggtggttttttgttgttgttttagattttcatgtgaaggcagttttttttcttttttaactccccatccccctatgcagggtgtcatttcaccatccacatccacatccttgtttgtgtttctggccctcgtcctccctgcctctcatctgcctccccaacccccacctacccactgctcccaggggtctctccaggggcagggggattttaggagatggggtgggggccagcccctactggacccttgtaatctgatttggagaccatccccccgatgggaccagcagccccgccggcccactgggggtccctcttaacatctgcttgttgcgggggtcagtcatgagtgccagggtctggctggggtcttggcactgtcttcctggccggggcctgaaaccttagcccccagccggcctgagtgggggatattgacacccccagctaaagcacaagcaccttagtcacccctcctctccccccgcaagtgagattgcacatttaactactgtaaggagaggagcggcgttggcaaatgtgaaccatgagaatatcagtgatactgatgagaataaactaaacgcctttgtaacagc

SEQ ID NO: 10080 - protein, 81 aa, Homo sapiens; identical to SEQ ID NO: 10076

SEQ ID NO: 10081 - DNA, 1526 bp, Homo sapiens
tgtctattgtccccctcggtccccaggggtggggggccttggaaggcagggcggtgttggggggctggggggcaggctgaatgtgtgtgtgtgggtgtgtatgtgtggagtgtgtgtgtgtgtttccatggtaggactccagtcccagctgctgcctaggctcctgtgggtcctgtgggtccccctcccctgttcaccttccccaacagggctatagtttaagggtgtcccaggccttggctggttggctgggcccagctcctgggggctgggcagggcagggcagggccgggtccacttccattgttagcagttgtttgcagaattttctcttttaccattcctctctttttgttctcgcccagagtgggtggttttttgttgttgttttagattttcatgtgaaggcagttttttttcttttttaactccccatccccctatgcagggtgtcatttcaccatccacatccacatccttgtttgtgtttctggccctcgtcctccctgcctctcatctgcctccccaacccccacctacccactgctcccaggggtctctccaggggcagggggattttaggagatggggtgggggccagcccctactggacccttgtaatctgatttggagaccatccccccgatgggaccagcagccccgccggcccactgggggtccctcttaacatctgcttgttgcgggggtcagtcatgagtgccagggtctggctggggtcttggcactgtcttcctggccggggcctgaaaccttagcccccagccggcctgagtgggggatattgacacccccagctaaagcacaagcaccttagtcacccctcctctccccccgcctcctggcccctgcctgcccctctctgccttttcctcgggtgtccctcctcgagcccctgtggcattggcttgggtggcagagcccacttgtttcagggaccccaggaggtgccccctggctcccaggactgtgtgtgggtccggggggtgggggggtggggagaagggtcgggcagggggtgcaggggaggaaactcctcaccaggagagccaaagacagggttgtgccttaccccaggagccacccctgtaccccccttgccctgccattcaccctccacccctacccctgggcggcctgctgctttttccttctcttcctcccctgccctgagctgcatggttcccccaccctgggcagccaggaaggaatctgaatggagaatcaccaaccaccagagaaaaaagactgtggggccctcccctgccaactccccttccctggccgcccactcaacccacacctctttcacgcaggacaggctgcccaccctgtccacgtgaagtgccaacgccctccccaccctgggccgagcccccacccctccctgggcccccaagtgagattgcacatttaactactgtaaggagaggagcggcgttggcaaatgtgaaccatgagaatatcagtgatactgatgagaataaactaaacgcctttgtaacagc

SEQ ID NO: 10082 - protein, 81 aa, Homo sapiens; identical to SEQ ID NO: 10076

SEQ ID NO: 10083 - DNA, 426 bp, Homo sapiens
caatccgaggaactgggccttgaaccgaaattccgaactcggacccgaataggcccagacagaactccgacaccgccccctacggtgcggcacgagagggctaaggggcgggggcatgtgcaccggaagctgcctctgcccacaaccaagatggctgaggagagggcggaagtgtccgcacgtcgggcctccgaggcttctcttttgtccccatggctctcccctagagccagtgggacccttcaggaccctgggctggaaccaccaccactggtcctgtctcaagtgcacttagggggtggtggaggcagggacacctgagacacacctgtctccatttccagttccaggaccccaaagccatttgcccctgtgccttatacacgtgccaacctggaaataaaatgtcagccttttttatacgta

SEQ ID NO: 10084 - protein, 59 aa, Homo sapiens
MCTGSCLCPQPRWLRRGRKCPHVGPPRLLFCPHGSPLEPVGPFRTLGWNHHHWSCLKCT

SEQ ID NO: 10085 - DNA, 2042 bp, Homo sapiens
ggcagaactccccggaggagcaggcccgctcctcaccgcgcccccgcagggagaagggaggaccacctctcccccagaccctagccaaacctgacactcgggaccctgggatgggacgatctcccaggtgccagctcagggagtccatgaaaagcttcaacgaatcgaatgagccccttccccagccataatacccagccgccagagatgagggaggctatcattatttacattgcccgtgcctggaagggaaactgaagttgcgcaggaacaatccgaggaactgggccttgaaccgaaattccgaactcggacccgaataggcccagacagaactccgacaccgccccctacggtgcggcacgagagggctaaggggcgggggcatgtgcaccggaagctgcctctgcccacaaccaagatggctgaggagagggcggaagtgtccgcacgtcgggcctccgaggcttctctttctcccctggcggtccggctctcgatggtggcgtgacgggggcgggggtggcggcgcgttctcctcggttgggagggaaccagcccgcgaacccaggccgggaggggggttcggcctgggggggaagggactgacatgtctctcgaagaccccttttttgtagtccgagggtgagtgacaacgacgggggagggcggagggtgctctgtacccaagccagccagtgcccgggtgccggccccagcgtgcccggcgggctgggcaaggccgtcggggtgcagagtgggaggcgcacgcaggggtatataggggtctccggagtcccccatgcgtttgggtttgcagtcgggggcagaggcaggcgggaggaccgcctgcccccagccgcgcccgccgtgcccctgcccgcagcgaggtgcagaaggcggtgaacacggcccgcgggctgtaccagcgctggtgcgagctcctgcaggaaagcgcggcggtcggacgcgaggagctggactggacgaccaatgagctgcggaatggcctgcgcagcatcgagtgggacctcgaggacctggaagagaccatcgatatctggaagccaacccaggcaagttcaagctcccagccggggacctgcaggagagaaaggtgttcgtggagcggatgcgagaggcagtccaggaaatgaaggaccatatggtcagcccaacagccgtagcatttttggagaggaataacagagagatactcgcaggcaagccagctgcccagaagtcacccagcgacctgctggatgccagcgcagtctcggccacatctcgctacatcgaggagcagcaggccacacagcagctgatcatggatgaacaggatcaacagctggagatggtgtctgggagcatccaggttctgaagcacatgtccggccgcgttggagaagagctggacgagcagggcatcatgctggatgccttcgcccaagagatggaccacacccagtcccgcatggacggggtcctcaggaagttggccaaagtatcccacatgacgagtggtgagtcccctcaggggaggggtcagtcctggtgggggcaggttgtaggtggtaccctctccccgtgacccctgaccttctcgttcccagaccgccgacagtggtgtgccatcgccgtgctagtgggggtgcttctcctcgttctcatcttactattctctctctgaccccagccctccctggcaggctggtcccttaagcctggggagccaccaagcactttggagctggcctcgccccctaggaggagagggtccctcctgggtagctggagagtagagggtcccgcctggggagctgtccccatggctctcccctagagccagtgggacccttcaggaccctgggctggaaccaccaccactggtcctgtctcaagtgcacttagggggtggtggaggcagggacacctgagacacacctgtctccatttccagttccaggaccccaaagccatttgcccctgtgccttatacacgtgccaacctggaaataaaatgtcagccttttttatacgta

SEQ ID NO: 10086 - protein, 152 aa, Homo sapiens
MREAVQEMKDHMVSPTAVAFLERNNREILAGKPAAQKSPSDLLDASAVSATSRYIEEQQATQQLIMDEQDQQLEMVSGSIQVLKHMSGRVGEELDEQGIMLDAFAQEMDHTQSRMDGVLRKLAKVSHMTSGESPQGRGQSWWGQVVGGTLSP

SEQ ID NO: 10087 - DNA, 1564 bp, Homo sapiens
ggcagaactccccggaggagcaggcccgctcctcaccgcgcccccgcagggagaagggaggaccacctctcccccagaccctagccaaacctgacactcgggaccctgggatgggacgatctcccaggtgccagctcagggagtccatgaaaagcttcaacgaatcgaatgagccccttccccagccataatacccagccgccagagatgagggaggctatcattatttacattgcccgtgcctggaagggaaactgaagttgcgcaggaacaatccgaggaactgggccttgaaccgaaattccgaactcggacccgaataggcccagacagaactccgacaccgccccctacggtgcggcacgagagggctaaggggcgggggcatgtgcaccggaagctgcctctgcccacaaccaagatggctgaggagagggcggaagtgtccgcacgtcgggcctccgaggcttctctttctcccctggcggtccggctctcgatggtggcgtgacgggggcgggggtggcggcgcgttctcctcggttgggagggaaccagcccgcgaacccaggccgggaggggggttcggcctgggggggaagggactgacatgtctctcgaagaccccttttttgtagtccgaggcgaggtgcagaaggcggtgaacacggcccgcgggctgtaccagcgctggtgcgagctcctgcaggaaagcgcggcggtcggacgcgaggagctggactggacgaccaatgagctgcggaatggcctgcgcagcatcgagtgggacctcgaggacctggaagagaccatcgatatctggaagccaacccaggcaagccagctgcccagaagtcacccagcgacctgctggatgccagcgcagtctcggccacatctcgctacatcgaggagcagcaggccacacagcagctgatcatggatgaacaggatcaacagctggagatggtgtctgggagcatccaggttctgaagcacatgtccggccgcgttggagaagagctggacgagcagggcatcatgctggatgccttcgcccaagagatggaccacacccagtcccgcatggacggggtcctcaggaagttggccaaagtatcccacatgacgagtgaccgccgacagtggtgtgccatcgccgtgctagtgggggtgcttctcctcgttctcatcttactattctctctctgaccccagccctccctggcaggctggtcccttaagcctggggagccaccaagcactttggagctggcctcgccccctaggaggagagggtccctcctgggtagctggagagtagagggtcccgcctggggagctgtccccatggctctcccctagagccagtgggacccttcaggaccctgggctggaaccaccaccactggtcctgtctcaagtgcacttagggggtggtggaggcagggacacctgagacacacctgtctccatttccagttccaggaccccaaagccatttgcccctgtgccttatacacgtgccaacctggaaataaaatgtcagccttttttatacgta

SEQ ID NO: 10088 - protein, 108 aa, Homo sapiens
MSLEDPFFVVRGEVQKAVNTARGLYQRWCELLQESAAVGREELDWTTNELRNGLRSIEWDLEDLEETIDIWKPTQASQLPRSHPATCWMPAQSRPHLATSRSSRPHSS

SEQ ID NO: 10089 - DNA, 1569 bp, Homo sapiens
ggcagaactccccggaggagcaggcccgctcctcaccgcgcccccgcagggagaagggaggaccacctctcccccagaccctagccaaacctgacactcgggaccctgggatgggacgatctcccaggtgccagctcagggagtccatgaaaagcttcaacgaatcgaatgagccccttccccagccataatacccagccgccagagatgagggaggctatcattatttacattgcccgtgcctggaagggaaactgaagttgcgcaggaacaatccgaggaactgggccttgaaccgaaattccgaactcggacccgaataggcccagacagaactccgacaccgccccctacggtgcggcacgagagggctaaggggcgggggcatgtgcaccggaagctgcctctgcccacaaccaagatggctgaggagagggcggaagtgtccgcacgtcgggcctccgaggcttctctttctcccctggcggtccggctctcgatggtggcgtgacgggggcgggggtggcggcgcgttctcctcggttgggagggaaccagcccgcgaacccaggccgggaggggggttcggcctgggggggaagggactgacatgtctctcgaagaccccttttttgtagtccgaggcgaggtgcagaaggcggtgaacacggcccgcgggctgtaccagcgctggtgcgagctcctgcaggaaagcgcggcggtcggacgcgaggagctggactggacgaccaatgagctgcggaatggcctgcgcagcatcgagtgggacctcgaggacctggaagagaccatcgatatcctggggctttatactcgcaggcaagccagctgcccagaagtcacccagcgacctgctggatgccagcgcagtctcggccacatctcgctacatcgaggagcagcaggccacacagcagctgatcatggatgaacaggatcaacagctggagatggtgtctgggagcatccaggttctgaagcacatgtccggccgcgttggagaagagctggacgagcagggcatcatgctggatgccttcgcccaagagatggaccacacccagtcccgcatggacggggtcctcaggaagttggccaaagtatcccacatgacgagtgaccgccgacagtggtgtgccatcgccgtgctagtgggggtgcttctcctcgttctcatcttactattctctctctgaccccagccctccctggcaggctggtcccttaagcctggggagccaccaagcactttggagctggcctcgccccctaggaggagagggtccctcctgggtagctggagagtagagggtcccgcctggggagctgtccccatggctctcccctagagccagtgggacccttcaggaccctgggctggaaccaccaccactggtcctgtctcaagtgcacttagggggtggtggaggcagggacacctgagacacacctgtctccatttccagttccaggaccccaaagccatttgcccctgtgccttatacacgtgccaacctggaaataaaatgtcagccttttttatacgta

SEQ ID NO: 10090 - protein, 154 aa, Homo sapiens
MSCGMACAASSGTSRTWKRPSISWGFILAGKPAAQKSPSDLLDASAVSATSRYIEEQQATQQLIMDEQDQQLEMVSGSIQVLKHMSGRVGEELDEQGIMLDAFAQEMDHTQSRMDGVLRKLAKVSHMTSDRRQWCAIAVLVGVLLLVLILLFSL

SEQ ID NO: 10091 - DNA, 1952 bp, Homo sapiens
ggcagaactccccggaggagcaggcccgctcctcaccgcgcccccgcagggagaagggaggaccacctctcccccagaccctagccaaacctgacactcgggaccctgggatgggacgatctcccaggtgccagctcagggagtccatgaaaagcttcaacgaatcgaatgagccccttccccagccataatacccagccgccagagatgagggaggctatcattatttacattgcccgtgcctggaagggaaactgaagttgcgcaggaacaatccgaggaactgggccttgaaccgaaattccgaactcggacccgaataggcccagacagaactccgacaccgccccctacggtgcggcacgagagggctaaggggcgggggcatgtgcaccggaagctgcctctgcccacaaccaagatggctgaggagagggcggaagtgtccgcacgtcgggcctccgaggcttctctttctcccctggcggtccggctctcgatggtggcgtgacgggggcgggggtggcggcgcgttctcctcggttgggagggaaccagcccgcgaacccaggccgggaggggggttcggcctgggggggaagggactgacatgtctctcgaagaccccttttttgtagtccgagggtgagtgacaacgacgggggagggcggagggtgctctgtacccaagccagccagtgcccgggtgccggccccagcgtgcccggcgggctgggcaaggccgtcggggtgcagagtgggaggcgcacgcaggggtatataggggtctccggagtcccccatgcgtttgggtttgcagtcgggggcagaggcaggcgggaggaccgcctgcccccagccgcgcccgccgtgcccctgcccgcagcgaggtgcagaaggcggtgaacacggcccgcgggctgtaccagcgctggtgcgagctcctgcaggaaagcgcggcggtcggacgcgaggagctggactggacgaccaatgagctgcggaatggcctgcgcagcatcgagtgggacctcgaggacctggaagagaccatcgatatctggaagccaacccaggcaagttcaagctcccagccggggacctgcaggagagaaaggtgttcgtggagcggatgcgagaggcagtccaggaaatgaaggaccatatggtcagcccaacagccgtagcatttttggagaggaataacagagagatactcgcaggcaagccagctgcccagaagtcacccagcgacctgctggatgccagcgcagtctcggccacatctcgctacatcgaggagcagcaggccacacagcagctgatcatggatgaacaggatcaacagctggagatggtgtctgggagcatccaggttctgaagcacatgtccggccgcgttggagaagagctggacgagcagggcatcatgctggatgccttcgcccaagagatggaccacacccagtcccgcatggacggggtcctcaggaagttggccaaagtatcccacatgacgagtgaccgccgacagtggtgtgccatcgccgtgctagtgggggtgcttctcctcgttctcatcttactattctctctctgaccccagccctccctggcaggctggtcccttaagcctggggagccaccaagcactttggagctggcctcgccccctaggaggagagggtccctcctgggtagctggagagtagagggtcccgcctggggagctgtccccatggctctcccctagagccagtgggacccttcaggaccctgggctggaaccaccaccactggtcctgtctcaagtgcacttagggggtggtggaggcagggacacctgagacacacctgtctccatttccagttccaggaccccaaagccatttgcccctgtgccttatacacgtgccaacctggaaataaaatgtcagccttttttatacgta

SEQ ID NO: 10092 - protein, 155 aa, Homo sapiens
MREAVQEMKDHMVSPTAVAFLERNNREILAGKPAAQKSPSDLLDASAVSATSRYIEEQQATQQLIMDEQDQQLEMVSGSIQVLKHMSGRVGEELDEQGIMLDAFAQEMDHTQSRMDGVLRKLAKVSHMTSDRRQWCAIAVLVGVLLLVLILLFSL

SEQ ID NO: 10093 - DNA, 1801 bp, Homo sapiens
ggcagaactccccggaggagcaggcccgctcctcaccgcgcccccgcagggagaagggaggaccacctctcccccagaccctagccaaacctgacactcgggaccctgggatgggacgatctcccaggtgccagctcagggagtccatgaaaagcttcaacgaatcgaatgagccccttccccagccataatacccagccgccagagatgagggaggctatcattatttacattgcccgtgcctggaagggaaactgaagttgcgcaggaacaatccgaggaactgggccttgaaccgaaattccgaactcggacccgaataggcccagacagaactccgacaccgccccctacggtgcggcacgagagggctaaggggcgggggcatgtgcaccggaagctgcctctgcccacaaccaagatggctgaggagagggcggaagtgtccgcacgtcgggcctccgaggcttctctttctcccctggcggtccggctctcgatggtggcgtgacgggggcgggggtggcggcgcgttctcctcggttgggagggaaccagcccgcgaacccaggccgggaggggggttcggcctgggggggaagggactgacatgtctctcgaagaccccttttttgtagtccgaggcgaggtgcagaaggcggtgaacacggcccgcgggctgtaccagcgctggtgcgagctcctgcaggaaagcgcggcggtcggacgcgaggagctggactggacgaccaatgagctgcggaatggcctgcgcagcatcgagtgggacctcgaggacctggaagagaccatcgatatctggaagccaacccaggcaagttcaagctcccagccggggacctgcaggagagaaaggtgttcgtggagcggatgcgagaggcagtccaggaaatgaaggaccatatggtcagcccaacagccgtagcatttttggagaggaataacagagagatactcgcaggcaagccagctgcccagaagtcacccagcgacctgctggatgccagcgcagtctcggccacatctcgctacatcgaggagcagcaggccacacagcagctgatcatggatgaacaggatcaacagctggagatggtgtctgggagcatccaggttctgaagcacatgtccggccgcgttggagaagagctggacgagcagggcatcatgctggatgccttcgcccaagagatggaccacacccagtcccgcatggacggggtcctcaggaagttggccaaagtatcccacatgacgagtggtgagtcccctcaggggaggggtcagtcctggtgggggcaggttgtaggtggtaccctctccccgtgacccctgaccttctcgttcccagaccgccgacagtggtgtgccatcgccgtgctagtgggggtgcttctcctcgttctcatcttactattctctctctgaccccagccctccctggcaggctggtcccttaagcctggggagccaccaagcactttggagctggcctcgccccctaggaggagagggtccctcctgggtagctggagagtagagggtcccgcctggggagctgtccccatggctctcccctagagccagtgggacccttcaggaccctgggctggaaccaccaccactggtcctgtctcaagtgcacttagggggtggtggaggcagggacacctgagacacacctgtctccatttccagttccaggaccccaaagccatttgcccctgtgccttatacacgtgccaacctggaaataaaatgtcagccttttttatacgta

SEQ ID NO: 10094 - protein, 152 aa, Homo sapiens; identical to SEQ ID NO: 10086

SEQ ID NO: 10095 - DNA, 1711 bp, Homo sapiens
ggcagaactccccggaggagcaggcccgctcctcaccgcgcccccgcagggagaagggaggaccacctctcccccagaccctagccaaacctgacactcgggaccctgggatgggacgatctcccaggtgccagctcagggagtccatgaaaagcttcaacgaatcgaatgagccccttccccagccataatacccagccgccagagatgagggaggctatcattatttacattgcccgtgcctggaagggaaactgaagttgcgcaggaacaatccgaggaactgggccttgaaccgaaattccgaactcggacccgaataggcccagacagaactccgacaccgccccctacggtgcggcacgagagggctaaggggcgggggcatgtgcaccggaagctgcctctgcccacaaccaagatggctgaggagagggcggaagtgtccgcacgtcgggcctccgaggcttctctttctcccctggcggtccggctctcgatggtggcgtgacgggggcgggggtggcggcgcgttctcctcggttgggagggaaccagcccgcgaacccaggccgggaggggggttcggcctgggggggaagggactgacatgtctctcgaagaccccttttttgtagtccgaggcgaggtgcagaaggcggtgaacacggcccgcgggctgtaccagcgctggtgcgagctcctgcaggaaagcgcggcggtcggacgcgaggagctggactggacgaccaatgagctgcggaatggcctgcgcagcatcgagtgggacctcgaggacctggaagagaccatcgatatctggaagccaacccaggcaagttcaagctcccagccggggacctgcaggagagaaaggtgttcgtggagcggatgcgagaggcagtccaggaaatgaaggaccatatggtcagcccaacagccgtagcatttttggagaggaataacagagagatactcgcaggcaagccagctgcccagaagtcacccagcgacctgctggatgccagcgcagtctcggccacatctcgctacatcgaggagcagcaggccacacagcagctgatcatggatgaacaggatcaacagctggagatggtgtctgggagcatccaggttctgaagcacatgtccggccgcgttggagaagagctggacgagcagggcatcatgctggatgccttcgcccaagagatggaccacacccagtcccgcatggacggggtcctcaggaagttggccaaagtatcccacatgacgagtgaccgccgacagtggtgtgccatcgccgtgctagtgggggtgcttctcctcgttctcatcttactattctctctctgaccccagccctccctggcaggctggtcccttaagcctggggagccaccaagcactttggagctggcctcgccccctaggaggagagggtccctcctgggtagctggagagtagagggtcccgcctggggagctgtccccatggctctcccctagagccagtgggacccttcaggaccctgggctggaaccaccaccactggtcctgtctcaagtgcacttagggggtggtggaggcagggacacctgagacacacctgtctccatttccagttccaggaccccaaagccatttgcccctgtgccttatacacgtgccaacctggaaataaaatgtcagccttttttatacgta

SEQ ID NO: 10096 - protein, 155 aa, Homo sapiens; identical to SEQ ID NO: 10092

SEQ ID NO: 10097 - DNA, 369 bp, Homo sapiens
acacacacacggcaggcacattacagaggaaactagcagatattaggatatgaggggggaaaatgcagatacactcagaggccaagtgcacgcacccaaataggttaggtgcatgcacagatgaaaaggcgggggcggatcacctgaggtagggagtttgagaccagcctggccaacatggggaaaccctgtctctactaaaaacacaaaaattagctgggcatggtggcacactcctgttgtcccagctacccaggaggctgaggcaggagaattgcttgaacccggaaggtggaggtttcagtgagtcaagattgcaccactgcaccccagcctgggcgacagagcaacactccgtctcaaaaaaaa

SEQ ID NO: 10098 - protein, 68 aa, Homo sapiens
DQPGQHGETLSLLKTQKLAGHGGTLLLSQLPRRLRQENCLNPEGGGFSESRLHHCTPAWATEQHSVSK

SEQ ID NO: 10099 - DNA, 1953 bp, Homo sapiens
ctctcgtgccgcaccgtagggggcggtgtcggagttctgtctgggcctattcgggtccgagttcggaatttcggttcaaggcccagttcctcggattgttcctgcgcaacttcagtttcccttccaggcacgggcaatagaggcgtgagcgagcccgttgtccggagtgcacctgctgcctgttctgtccctcccgggagcccccgccgctgtcgccgtcgagtcgccatggaagtgcagaaagaggcacagcgcatcatgaccctgtcggtgtggaagatgtatcactcccgcatgcagcgcggtggcctgcggctgcaccggagtctgcagctgtcgctggtcatgcgcagcgcccgggagctctacctctcggccaaggtggaggccctcgagcccgaggtgtcgttgccggccgccctcccctctgaccctcgcctgcacccgccccgagaagccgagtccacggccgagacagcgacccccgacggtgagcacccgtttccggagccaatggacacgcaggaggcgccgacagccgaggagacctccgcctgctgtgccccgcgccccgccaaagtcagccgcaaacgacgcagcagcagcctgagcgacggcggggacgctggactggtcccgagcaagaaagcccgtctggaagaaaaggaagaagaggagggagcgtcatccgaagtcgccgatcgcctgcagccccctccggcgcaagcggagggcgcctttcccaacctggcccgcgtcctgcagaggcgcttctccggcctcctgaactgcagccccgcggcccctccgacggcgccgcccgcgtgcgaggcaaagcccgcttgccgcccggcggacagcatgctcaacgtgctcgtgcgggccgtggtggccttctgaggaccccgagcggcgctgccggagcccagagcgcgcgtcgaaccgtcggcccgagggcgcagacctgaggcgaggccacccccctccatcctgggggaagcgcccgcgaaaaccgtggagagaagccgccgcccgggctgctgagaggcccggagagggactctgtccccggggagccatcgccttcagtgtgcagggacggcaccgaggagtctgagccgggggcgcgggcgccttccgcagagacctgcgcccacaggtgctgtcttagtggactgggacgtgaacctttcgctctccttctggactgggagaagggaggcttgggtgttgtgttttttgttttgtttgtttgtttgtttttaaagatctcctcagggtcggacttcattttgtactgtgggctgtgctggccctttcaaggtttttcaagagttggttttgcgtttccaacctcggagaattccaggcactccccttccccctccgctgacatacttgtataagcggtcatcgttgcgtcatggggcaggcgtggggagcttcctgtcgccttgcgtgggtgtggggcctgggaggaggtcctggggcgtgcacccgccctgggcagtggggaggagagtggcctgagttacttcacccccgcgtgctgctggttaatgtcccgcgtctctgcaccttcgggtgggagcggggactgatctactttcacattctcaagtttttctcatctgcattagaggtgcccagtaggttcccaggttccagcgtgcccctccctcagacacacggacacaatcagccgagaagttcctggtctgaatcacgagaatgtggaggggtggggggtgtcagtggaaaggcataaggctgagctgagaccagttgctggtgaaactgggccaatctggggaggggaacatccttgccagggagtttctgagggtctgctttgtttacctttcgtgcggtggattctttttaactccgtctacctggcgttttgttagaaatgtcagataggaaaataaaaaccatttgagtaaaaaagcc

SEQ ID NO: 10100 - protein, 223 aa, Homo sapiens; identical to SEQ ID NO: 1561

SEQ ID NO: 10101 - DNA, 2093 bp, Homo sapiens
ccgtagggggcggtgtcggagttctgtctgggcctattcgggtccgagttcggaatttcggttcaaggcccagttcctcggattgttcctgcgcaacttcagtttcccttccaggcacgggcaatgagtgtttggccgcgacgagttggaaagcccggatgcgtccttcggttgggcggggtgtctcagtgacgtcactgggggtataaaagggcctgggtggcgggcgcctgggcagagcgtcctagcagtgtcactgcgtgggttggtttgtgtagagaggcgtgagcgagcccgttgtccggagtgcacctgctgcctgttctgtccctcccgggagcccccgccgctgtcgccgtcgagtcgccatggaagtgcagaaagaggcacagcgcatcatgaccctgtcggtgtggaagatgtatcactcccgcatgcagcgcggtggcctgcggctgcaccggagtctgcagctgtcgctggtcatgcgcagcgcccgggagctctacctctcggccaaggtggaggccctcgagcccgaggtgtcgttgccggccgccctcccctctgaccctcgcctgcacccgccccgagaagccgagtccacggccgagacagcgacccccgacggtgagcacccgtttccggagccaatggacacgcaggaggcgccgacagccgaggagacctccgcctgctgtgccccgcgccccgccaaagtcagccgcaaacgacgcagcagcagcctgagcgacggcggggacgctggactggtcccgagcaagaaagcccgtctggaagaaaaggaagaagaggagggagcgtcatccgaagtcgccgatcgcctgcagccccctccggcgcaagcggagggcgcctttcccaacctggcccgcgtcctgcagaggcgcttctccggcctcctgaactgcagccccgcggcccctccgacggcgccgcccgcgtgcgaggcaaagcccgcttgccgcccggcggacagcatgctcaacgtgctcgtgcgggccgtggtggccttctgaggaccccgagcggcgctgccggagcccagagcgcgcgtcgaaccgtcggcccgagggcgcagacctgaggcgaggccacccccctccatcctgggggaagcgcccgcgaaaaccgtggagagaagccgccgcccgggctgctgagaggcccggagagggactctgtccccggggagccatcgccttcagtgtgcagggacggcaccgaggagtctgagccgggggcgcgggcgccttccgcagagacctgcgcccacaggtgctgtcttagtggactgggacgtgaacctttcgctctccttctggactgggagaagggaggcttgggtgttgtgttttttgttttgtttgtttgtttgtttttaaagatctcctcagggtcggacttcattttgtactgtgggctgtgctggccctttcaaggtttttcaagagttggttttgcgtttccaacctcggagaattccaggcactccccttccccctccgctgacatacttgtataagcggtcatcgttgcgtcatggggcaggcgtggggagcttcctgtcgccttgcgtgggtgtggggcctgggaggaggtcctggggcgtgcacccgccctgggcagtggggaggagagtggcctgagttacttcacccccgcgtgctgctggttaatgtcccgcgtctctgcaccttcgggtgggagcggggactgatctactttcacattctcaagtttttctcatctgcattagaggtgcccagtaggttcccaggttccagcgtgcccctccctcagacacacggacacaatcagccgagaagttcctggtctgaatcacgagaatgtggaggggtggggggtgtcagtggaaaggcataaggctgagctgagaccagttgctggtgaaactgggccaatctggggaggggaacatccttgccagggagtttctgagggtctgctttgtttacctttcgtgcggtggattctttttaactccgtctacctggcgttttgttagaaatgtcagataggaaaataaaaaccatttgagtaaaaaagcc

SEQ ID NO: 10102 - protein, 223 aa, Homo sapiens; identical to SEQ ID NO: 1561

SEQ ID NO: 10103 - DNA, 2790 bp, Homo sapiens
cgtagggggcggtgtcggagttctgtctgggcctattcgggtccgagttcggaatttcggttcaaggcccagttctcggcccccttgtttggggggcggcagccacgtgttcacggggactgtcgtgcgcgccgggttcgcagccgtgcgagctctgaacccacccgtggagctcctgtcgcgggaaactgcgggggaatggcttggtacgaatcacgggaacccgtagcccggggcgggtcaccgcctacaagcaagggctggcgtacgctagagaccgaagagctggaggccccagtggccccctttcacagcagtagcaaatattgtttgtttagtaaatattggcctagtgactctgccttggtttccccacttgaaggaagcagatagaacagtatcctccgaggagtggaggctggggatcggtgaattattgataaaaggagagctcttaacctagcctggcacgttgtaagcgctgttagcatgattattggtgcagaaaacactcattagacacacctggtaaatgctaagaacagtggccacaggggatgttcaggctggaaccagggtcttcccctgtgtgaagggaaacttgctgcccacgacccactggggcctccagacgggagcatgtgggtaggccgtgagctccacccccggcccccctcccttgggccaaggcgctgatgcatcggcggggctcagagaaaggagcccacccagaaagctcagcgtggagtcgggggacgctcctcctcgccagggttcccgtcccctttccctgctgggtaaatcgcattctgtctctttaaggagtgtttggccgcgacgagttggaaagcccggatgcgtccttcggttgggcggggtgtctcagtgacgtcactgggggtataaaagggcctgggtggcgggcgcctgggcagagcgtcctagcagtgtcactgcgtgggttggtttgtgtagagaggcgtgagcgagcccgttgtccggagtgcacctgctgcctgttctgtccctcccgggagcccccgccgctgtcgccgtcgagtcgccatggaagtgcagaaagaggcacagcgcatcatgaccctgtcggtgtggaagatgtatcactcccgcatgcagcgcggtggcctgcggctgcaccggagtctgcagctgtcgctggtcatgcgcagcgcccgggagctctacctctcggccaaggtggaggccctcgagcccgaggtgtcgttgccggccgccctcccctctgaccctcgcctgcacccgccccgagaagccgagtccacggccgagacagcgacccccgacggtgagcacccgtttccggagccaatggacacgcaggaggcgccgacagccgaggagacctccgcctgctgtgccccgcgccccgccaaagtcagccgcaaacgacgcagcagcagcctgagcgacggcggggacgctggactggtcccgagcaagaaagcccgtctggaagaaaaggaagaagaggagggagcgtcatccgaagtcgccgatcgcctgcagccccctccggcgcaagcggagggcgcctttcccaacctggcccgcgtcctgcagaggcgcttctccggcctcctgaactgcagccccgcggcccctccgacggcgccgcccgcgtgcgaggcaaagcccgcttgccgcccggcggacagcatgctcaacgtgctcgtgcgggccgtggtggccttctgaggaccccgagcggcgctgccggagcccagagcgcgcgtcgaaccgtcggcccgagggcgcagacctgaggcgaggccacccccctccatcctgggggaagcgcccgcgaaaaccgtggagagaagccgccgcccgggctgctgagaggcccggagagggactctgtccccggggagccatcgccttcagtgtgcagggacggcaccgaggagtctgagccgggggcgcgggcgccttccgcagagacctgcgcccacaggtgctgtcttagtggactgggacgtgaacctttcgctctccttctggactgggagaagggaggcttgggtgttgtgttttttgttttgtttgtttgtttgtttttaaagatctcctcagggtcggacttcattttgtactgtgggctgtgctggccctttcaaggtttttcaagagttggttttgcgtttccaacctcggagaattccaggcactccccttccccctccgctgacatacttgtataagcggtcatcgttgcgtcatggggcaggcgtggggagcttcctgtcgccttgcgtgggtgtggggcctgggaggaggtcctggggcgtgcacccgccctgggcagtggggaggagagtggcctgagttacttcacccccgcgtgctgctggttaatgtcccgcgtctctgcaccttcgggtgggagcggggactgatctactttcacattctcaagtttttctcatctgcattagaggtgcccagtaggttcccaggttccagcgtgcccctccctcagacacacggacacaatcagccgagaagttcctggtctgaatcacgagaatgtggaggggtggggggtgtcagtggaaaggcataaggctgagctgagaccagttgctggtgaaactgggccaatctggggaggggaacatccttgccagggagtttctgagggtctgctttgtttacctttcgtgcggtggattctttttaactccgtctacctggcgttttgttagaaatgtcagataggaaaataaaaaccatttgagtaaaaaagcc

SEQ ID NO: 10104 - protein, 223 aa, Homo sapiens; identical to SEQ ID NO: 1561

SEQ ID NO: 10105 - DNA, 1999 bp, Homo sapiens
gctcttaacctagcctggcacgttgtaagcgctgttagcatgattattggtgcagaaaacactcattagacacacctggtaaatgctaagaacagtggccacaggggatgttcaggctggaaccagggtcttcccctgtgtgaagggaaacttgctgcccacgacccactggggcctccagacgggagcatgtgggtaggccgtgagctccacccccggcccccctcccttgggccaaggcgctgatgcatcggcggggctcagagaaaggagcccacccagaaagctcagcgtggagtcgggggacgctcctcctcgccagggttcccgtcccctttccctgctgggtaaatcgcattctgtctctttaaggagtgtttggccgcgacgagttggaaagcccggatgcgtccttcggttgggcggggtgtctcagtgacgtcactgggggtataaaagggcctgggtggcgggcgcctgggcagagcgtcctagcagtgtcactgcgtgggttggtttgtgtagagaggcgtgagcgagcccgttgtccggagtgcacctgctgcctgttctgtccctcccgggagcccccgccgctgtcgccgtcgagtcgccatggaagtgcagaaagaggcacagcgcatcatgaccctgtcgcgacggcggggacgctggactggtcccgagcaagaaagcccgtctggaagaaaaggaagaagaggagggagcgtcatccgaagtcgccgatcgcctgcagccccctccggcgcaagcggagggcgcctttcccaacctggcccgcgtcctgcagaggcgcttctccggcctcctgaactgcagccccgcggcccctccgacggcgccgcccgcgtgcgaggcaaagcccgcttgccgcccggcggacagcatgctcaacgtgctcgtgcgggccgtggtggccttctgaggaccccgagcggcgctgccggagcccagagcgcgcgtcgaaccgtcggcccgagggcgcagacctgaggcgaggccacccccctccatcctgggggaagcgcccgcgaaaaccgtggagagaagccgccgcccgggctgctgagaggcccggagagggactctgtccccggggagccatcgccttcagtgtgcagggacggcaccgaggagtctgagccgggggcgcgggcgccttccgcagagacctgcgcccacaggtgctgtcttagtggactgggacgtgaacctttcgctctccttctggactgggagaagggaggcttgggtgttgtgttttttgttttgtttgtttgtttgtttttaaagatctcctcagggtcggacttcattttgtactgtgggctgtgctggccctttcaaggtttttcaagagttggttttgcgtttccaacctcggagaattccaggcactccccttccccctccgctgacatacttgtataagcggtcatcgttgcgtcatggggcaggcgtggggagcttcctgtcgccttgcgtgggtgtggggcctgggaggaggtcctggggcgtgcacccgccctgggcagtggggaggagagtggcctgagttacttcacccccgcgtgctgctggttaatgtcccgcgtctctgcaccttcgggtgggagcggggactgatctactttcacattctcaagtttttctcatctgcattagaggtgcccagtaggttcccaggttccagcgtgcccctccctcagacacacggacacaatcagccgagaagttcctggtctgaatcacgagaatgtggaggggtggggggtgtcagtggaaaggcataaggctgagctgagaccagttgctggtgaaactgggccaatctggggaggggaacatccttgccagggagtttctgagggtctgctttgtttacctttcgtgcggtggattctttttaactccgtctacctggcgttttgttagaaatgtcagataggaaaataaaaaccatttgagtaaaaaagcc

SEQ ID NO: 10106 - protein, 132 aa, Homo sapiens
MEVQKEAQRIMTLSRRRGRWTGPEQESPSGRKGRRGGSVIRSRRSPAAPSGASGGRLSQPGPRPAEALLRPPELQPRGPSDGAARVRGKARLPPGGQHAQRARAGRGGLLRTPSGAAGAQSARRTVGPRAQT

SEQ ID NO: 10107 - DNA, 1943 bp, Homo sapiens
gctcttaacctagcctggcacgttgtaagcgctgttagcatgattattggtgcagaaaacactcattagacacacctggtaaatgctaagaacagtggccacaggggatgttcaggctggaaccagggtcttcccctgtgtgaagggaaacttgctgcccacgacccactggggcctccagacgggagcatgtgggtaggccgtgagctccacccccggcccccctcccttgggccaaggcgctgatgcatcggcggggctcagagaaaggagcccacccagaaagctcagcgtggagtcgggggacgctcctcctcgccagggttcccgtcccctttccctgctgggtaaatcgcattctgtctctttaaggagtgtttggccgcgacgagttggaaagcccggatgcgtccttcggttgggcggggtgtctcagtgacgtcactgggggtataaaagggcctgggtggcgggcgcctgggcagagcgtcctagcagtgtcactgcgtgggttggtttgtgtagagaggcgtgagcgagcccgttgtccggagtgcacctgctgcctgttctgtccctcccgggagcccccgccgctgtcgccgtcgagtcgccatggaagtgcagaaagaggcacagcgcatcatgaccctgtcggtgtggaagatgtatcactcccgcatgcagcgcggtggcctgcggctgcaccggagtctgcagctgtcgctggtcatgcgcagcgcccgggagctctacctctcggccaaggtggaggccctcgagcccgaggtgtcgttgccggccgccctcccctctgaccctcgcctgcacccgccccgagaagccgagtccacggccgagacagcgacccccgacggtgagcacccgtttccggagccaatggacacgcaggaggcgccgacagccgaggagacctccgcctgctgtgccccgcgccccgccaaagtcagccgcaaacgacgcagcagcagcctgagcgacggcggggacgctggactggtcccgagcaagaaagcccgtctggaagaaaaggaagaagaggagggagcgtcatccgaagtcgccgatcgcctgcagccccctccggcgcaagcggagggcgccttccgcagagacctgcgcccacaggtgctgtcttagtggactgggacgtgaacctttcgctctccttctggactgggagaagggaggcttgggtgttgtgttttttgttttgtttgtttgtttgtttttaaagatctcctcagggtcggacttcattttgtactgtgggctgtgctggccctttcaaggtttttcaagagttggttttgcgtttccaacctcggagaattccaggcactccccttccccctccgctgacatacttgtataagcggtcatcgttgcgtcatggggcaggcgtggggagcttcctgtcgccttgcgtgggtgtggggcctgggaggaggtcctggggcgtgcacccgccctgggcagtggggaggagagtggcctgagttacttcacccccgcgtgctgctggttaatgtcccgcgtctctgcaccttcgggtgggagcggggactgatctactttcacattctcaagtttttctcatctgcattagaggtgcccagtaggttcccaggttccagcgtgcccctccctcagacacacggacacaatcagccgagaagttcctggtctgaatcacgagaatgtggaggggtggggggtgtcagtggaaaggcataaggctgagctgagaccagttgctggtgaaactgggccaatctggggaggggaacatccttgccagggagtttctgagggtctgctttgtttacctttcgtgcggtggattctttttaactccgtctacctggcgttttgttagaaatgtcagataggaaaataaaaaccatttgagtaaaaaagcc

SEQ ID NO: 10108 - protein, 181 aa, Homo sapiens
MEVQKEAQRIMTLSVWKMYHSRMQRGGLRLHRSLQLSLVMRSARELYLSAKVEALEPEVSLPAALPSDPRLHPPREAESTAETATPDGEHPFPEPMDTQEAPTAEETSACCAPRPAKVSRKRRSSSLSDGGDAGLVPSKKARLEEKEEEEGASSEVADRLQPPPAQAEGAFRRDLRPQVLS

SEQ ID NO: 10109 - DNA, 2172 bp, Homo sapiens
gctcttaacctagcctggcacgttgtaagcgctgttagcatgattattggtgcagaaaacactcattagacacacctggtaaatgctaagaacagtggccacaggggatgttcaggctggaaccagggtcttcccctgtgtgaagggaaacttgctgcccacgacccactggggcctccagacgggagcatgtgggtaggccgtgagctccacccccggcccccctcccttgggccaaggcgctgatgcatcggcggggctcagagaaaggagcccacccagaaagctcagcgtggagtcgggggacgctcctcctcgccagggttcccgtcccctttccctgctgggtaaatcgcattctgtctctttaaggagtgtttggccgcgacgagttggaaagcccggatgcgtccttcggttgggcggggtgtctcagtgacgtcactgggggtataaaagggcctgggtggcgggcgcctgggcagagcgtcctagcagtgtcactgcgtgggttggtttgtgtagagaggcgtgagcgagcccgttgtccggagtgcacctgctgcctgttctgtccctcccgggagcccccgccgctgtcgccgtcgagtcgccatggaagtgcagaaagaggcacagcgcatcatgacccctcgcctgcacccgccccgagaagccgagtccacggccgagacagcgacccccgacggtgagcacccgtttccggagccaatggacacgcaggaggcgccgacagccgaggagacctccgcctgctgtgccccgcgccccgccaaagtcagccgcaaacgacgcagcagcagcctgagcgacggcggggacgctggactggtcccgagcaagaaagcccgtctggaagaaaaggaagaagaggagggagcgtcatccgaagtcgccgatcgcctgcagccccctccggcgcaagcggagggcgcctttcccaacctggcccgcgtcctgcagaggcgcttctccggcctcctgaactgcagccccgcggcccctccgacggcgccgcccgcgtgcgaggcaaagcccgcttgccgcccggcggacagcatgctcaacgtgctcgtgcgggccgtggtggccttctgaggaccccgagcggcgctgccggagcccagagcgcgcgtcgaaccgtcggcccgagggcgcagacctgaggcgaggccacccccctccatcctgggggaagcgcccgcgaaaaccgtggagagaagccgccgcccgggctgctgagaggcccggagagggactctgtccccggggagccatcgccttcagtgtgcagggacggcaccgaggagtctgagccgggggcgcgggcgccttccgcagagacctgcgcccacaggtgctgtcttagtggactgggacgtgaacctttcgctctccttctggactgggagaagggaggcttgggtgttgtgttttttgttttgtttgtttgtttgtttttaaagatctcctcagggtcggacttcattttgtactgtgggctgtgctggccctttcaaggtttttcaagagttggttttgcgtttccaacctcggagaattccaggcactccccttccccctccgctgacatacttgtataagcggtcatcgttgcgtcatggggcaggcgtggggagcttcctgtcgccttgcgtgggtgtggggcctgggaggaggtcctggggcgtgcacccgccctgggcagtggggaggagagtggcctgagttacttcacccccgcgtgctgctggttaatgtcccgcgtctctgcaccttcgggtgggagcggggactgatctactttcacattctcaagtttttctcatctgcattagaggtgcccagtaggttcccaggttccagcgtgcccctccctcagacacacggacacaatcagccgagaagttcctggtctgaatcacgagaatgtggaggggtggggggtgtcagtggaaaggcataaggctgagctgagaccagttgctggtgaaactgggccaatctggggaggggaacatccttgccagggagtttctgagggtctgctttgtttacctttcgtgcggtggattctttttaactccgtctacctggcgttttgttagaaatgtcagataggaaaataaaaaccatttgagtaaaaaagcc

SEQ ID NO: 10110 - protein, 167 aa, Homo sapiens
MEVQKEAQRIMTPRLHPPREAESTAETATPDGEHPFPEPMDTQEAPTAEETSACCAPRPAKVSRKRRSSSLSDGGDAGLVPSKKARLEEKEEEEGASSEVADRLQPPPAQAEGAFPNLARVLQRRFSGLLNCSPAAPPTAPPACEAKPACRPADSMLNVLVRAVVAF

SEQ ID NO: 10111 - DNA, 4308 bp, Homo sapiens
ctagaccctggaaggcaggggactgcgagctgggctggcggagcagaggtgcagaagcaactgagtccaagttgtctggcggcttcaggtggacccagaagacgtccccaactcagggagattcagcgatcactcactcgctgtacagaatgatattcctcacggcactgcctctgttctggattatgatttcagcctcccgagggggtcactggggtgcctggatgccctcgtccatctcggccttcgaaggcacgtgcgtctccatcccctgccgctttgacttcccggatgagctgcggcccgctgtggtgcatggtgtctggtacttcaatagcccctaccccaagaactaccccccggtggtcttcaagtcgcgcacccaagtagtccacgagagcttccagggccgcagccgcctcctgggggacctgggcctgcgaaactgcaccctcctgctcagcaacgtcagccccgagctgggcgggaagtactacttccgtggggacctgggcggctacaaccagtacaccttctcagagcacagcgtcctggatatcgtcaacacccccaacatcgtggtgcccccagaggtggtggcaggcacggaggtggaggtcagctgcatggtgccggacaactgcccagagctgcgccctgagctgagctggctgggccacgaggggctgggggagcccgctgtgctgggccggctgcgggaggacgagggcacctgggtgcaggtgtcactgctgcacttcgtgcccacgagggaggccaacggccacaggctgggctgccaggcctccttccccaacaccaccctgcagttcgagggctacgccagcatggacgtcaagtaccccccggtgattgtggagatgaactcctcggtggaggccatcgagggctcccacgtgagcctgctctgtggggctgacagcaaccccccgccgctgctgacctggatgcgggacgggacagtcctccgggaggcggtggccgagagcctgctcctggagctggaggaggtgacccccgccgaagacggcgtctatgcctgcctggccgagaatgcctatggccaggacaaccgcaccgtggggctcagtgtcatgtatgcaccctggaagccaacagtgaacgggacaatggtggccgtagagggggagacggtctctatcttgtgctccacacagagcaacccggaccctattctcaccatcttcaaggagaagcagatcctgtccacggtcatctacgagagcgagctgcagctggagctgccggccgtgtcacccgaggatgatggagagtactggtgtgtggctgagaaccagtatggccagagggccaccgccttcaacctgtctgtggagttcgcccctgtgctcctcctggagtcccactgcgcggcagcccgagacacggtgcagtgcctgtgcgtggtgaagtccaacccggagccgtccgtggcctttgagctgccatcgcgcaatgtgaccgtgaacgagagcgagcgggagttcgtgtactcggagcgcagcggcctcgtgctcaccagcatcctcacgctgcgggggcaggcccaggccccgccccgcgtcatctgcaccgcgaggaacctctatggcgccaagagcctggagctgcccttccagggagcccatcgactgatgtgggccaagatcgggcctgtgggcgccgtggtcgcctttgccatcctgattgccatcgtctgctacattacccagacacgcaggaaaaagaacgtgacagagagccccagcttctcggcaggggacaaccctcccgtcctgttcagcagcgacttccgcatctctggggcaccagagaagtacgagagcgagaggcgcctgggatctgagaggaggctgctgggccttcggggtgagcccccagagctggacctgagctattctcactcggacctggggaaacggcccaccaaggacagctacacgctgacggaggagctagctgaatgctgccagggtcggaagaagtgttcctgcaagtgcagtatgccccggaaccttccacggttcagatcctccactcaccggctgtggagggaagtcaagtcgagtttctttgcatgtcactggccaatcctcttccaacaaattacacgtggtaccacaatgggaaagaaatgcagggaaggacagaggagaaagtccacatcccaaagatcctcccctggcacgctgggacttattcctgtgtggcagaaaacattcttggtactggacagaggggcccgggagctgagctggatgtccagtatcctcccaagaaggtgaccacagtgattcaaaaccccatgccgattcgagaaggagacacagtgaccctttcctgtaactacaattccagtaaccccagtgttacccggtatgaatggaaaccccatggcgcctgggaggagccatcgcttggggtgctgaagatccaaaacgttggctgggacaacacaaccatcgcctgcgcagcttgtaatagttggtgctcgtgggcctcccctgtcgccctgaatgtccagtatgccccccgagacgtgagggtccggaaaatcaagcccctttccgagattcactctggaaactcggtcagcctccaatgtgacttctcaagcagccaccccaaagaagtccagttcttctgggagaaaaatggcaggcttctggggaaagaaagccagctgaattttgactccatctccccagaagatgctgggagttacagctgctgggtgaacaactccataggacagacagcgtccaaggcctggacacttgaagtgctgtatgcacccaggaggctgcgtgtgtccatgagcccgggggaccaagtgatggaggggaagagtgcaaccctgacctgtgagagcgacgccaaccctcccgtctcccactacacctggtttgactggaataaccaaagcctcccctaccacagccagaagctgagattggagccggtgaaggtccagcactcgggtgcctactggtgccaggggaccaacagtgtgggcaagggccgttcgcctctcagcaccctcaccgtctactattaataattggaaacatggccttaaattgagggaacctagatagcccggagaccatcggcaggcgagtggctgtgggactcgggtcctgcctcgccatcctcatcctggcaatctgtgggctcaagctccagcgacgttggaagaggacacagagccagcaggggcttcaggagaattccagcggccagagcttctttgtgaggaataaaaaggttagaagggcccccctctctgaaggcccccactccctgggatgctacaatccaatgatggaagatggcattagctacaccaccctgcgctttcccgagatgaacataccacgaactggagatgcagagtcctcagagatgcagagacctcccccggactgcgatgacacggtcacttattcagcattgcacaagcgccaagtgggcgactatgagaacgtcattccagattttccagaagatgaggggattcattactcagagctgatccagtttggggtcggggagcggcctcaggcacaagaaaatgtggactatgtgatcctcaaacattgacactggatgggctgcagcagaggcactgggggcagcgggggccagggaagtccccgagtttccccagacaccgccacatggcttcctcctgcgcgcatgtgcgcacacacacacacacacgcacacacacacacacacactcactgcggagaaccttgtgcctggctcagagccagtctttttggtgagggtaaccccaaacctccaaaactcctgcccctgttctcttccactctccttgctacccagaaatccatctaaatacctgccctgacatgcacacctccccctgcccccaccacggccactggccatctccacccccagctgcttgtgtccctcctgggatctgctcgtcatcatttttccttcccttctccatctctctggccctctacccctgatctgacatccccactcacgaatattatgcccagtttctgcctctgagggaaagcccagaaaaggacagaaacgaagtagaaaggggcccagtcctggcctggcttctcctttggaagtgaggcattgcacagggagacgtacgtatcagcggccccttgactctggggactccgggtttgagatggacacactggtgtggattaacctgccagggagacagagctcacaataaaaatggctcagatgccacttcaaaga

SEQ ID NO: 10112 - protein, 725 aa, Homo sapiens
MIFLTALPLFWIMISASRGGHWGAWMPSSISAFEGTCVSIPCRFDFPDELRPAVVHGVWYFNSPYPKNYPPVVFKSRTQVVHESFQGRSRLLGDLGLRNCTLLLSNVSPELGGKYYFRGDLGGYNQYTFSEHSVLDIVNTPNIVVPPEVVAGTEVEVSCMVPDNCPELRPELSWLGHEGLGEPAVLGRLREDEGTWVQVSLLHFVPTREANGHRLGCQASFPNTTLQFEGYASMDVKYPPVIVEMNSSVEAIEGSHVSLLCGADSNPPPLLTWMRDGTVLREAVAESLLLELEEVTPAEDGVYACLAENAYGQDNRTVGLSVMYAPWKPTVNGTMVAVEGETVSILCSTQSNPDPILTIFKEKQILSTVIYESELQLELPAVSPEDDGEYWCVAENQYGQRATAFNLSVEFAPVLLLESHCAAARDTVQCLCVVKSNPEPSVAFELPSRNVTVNESEREFVYSERSGLVLTSILTLRGQAQAPPRVICTARNLYGAKSLELPFQGAHRLMWAKIGPVGAVVAFAILIAIVCYITQTRRKKNVTESPSFSAGDNPPVLFSSDFRISGAPEKYESERRLGSERRLLGLRGEPPELDLSYSHSDLGKRPTKDSYTLTEELAECCQGRKKCSCKCSMPRNLPRFRSSTHRLWREVKSSFFACHWPILFQQITRGTTMGKKCREGQRRKSTSQRSSPGTLGLIPVWQKTFLVLDRGARELSWMSSILPRR

SEQ ID NO: 10113 - DNA, 3615 bp, Homo sapiens
accgcgaggaacctctatggcgccaagagcctggagctgcccttccagggagcccatcgactgatgtgggccaagatcgggcctgtgggcgccgtggtcgcctttgccatcctgattgccatcgtctgctacattacccagacacgcaggaaaaagaacgtgacagagagccccagcttctcggcaggggacaaccctcccgtcctgttcagcagcgacttccgcatctctggggcaccagagaagtacgagatgctgccagggtccctgaagagggaagacacgcggaaacaggggaagggtcggagctcagtgggtgagcaagaaaagccacgtggaagaagtaagcggccagatggctcaaagacaaactctcccctgctcaggcttgcacccagacacgacaccatgcatctcctcggcccctggctcctgctcctggttctagaatacttggctttctctgactcaagtaaatgggtttttgagcaccctgaaaccctctacgcctgggagggggcctgcgtctggatcccctgcacctacagagccctagatggtgacctggaaagcttcatcctgttccacaatcctgagtataacaagaacacctcgaagtttgatgggacaagactctatgaaagcacaaaggatgggaaggttccttctgagcagaaaagggtgcaattcctgggagacaagaataagaactgcacactgagtatccacccggtgcacctcaatgacagtggtcagctggggctgaggatggagtccaagactgagaaatggatggaacgaatacacctcaatgtctctgaaaggccttttccacctcatatccagctccctccagaaattcaagagtcccaggaagtcactctgacctgcttgctgaatttctcctgctatgggtatccgatccaattgcagtggctcctagagggggttccaatgaggcaggctgctgtcacctcgacctccttgaccatcaagtctgtcttcacccggagcgagctcaagttctccccacagtggagtcaccatgggaagattgtgacctgccagcttcaggatgcagatgggaagttcctctccaatgacacggtgcagctgaacgtgaagcacaccccgaagttggagatcaaggtcactcccagtgatgccatagtgagggagggggactctgtgaccatgacctgcgaggtcagcagcagcaacccggagtacacgacggtatcctggctcaaggatgggacctcgctgaagaagcagaatacattcacgctaaacctgcgcgaagtgaccaaggaccagagtgggaagtactgctgtcaggtctccaatgacgtgggcccgggaaggtcggaagaagtgttcctgcaagtgcagtatgccccggaaccttccacggttcagatcctccactcaccggctgtggagggaagtcaagtcgagtttctttgcatgtcactggccaatcctcttccaacaaattacacgtggtaccacaatgggaaagaaatgcagggaaggacagaggagaaagtccacatcccaaagatcctcccctggcacgctgggacttattcctgtgtggcagaaaacattcttggtactggacagaggggcccgggagctgagctggatgtccagtatcctcccaagaaggtgaccacagtgattcaaaaccccatgccgattcgagaaggagacacagtgaccctttcctgtaactacaattccagtaaccccagtgttacccggtatgaatggaaaccccatggcgcctgggaggagccatcgcttggggtgctgaagatccaaaacgttggctgggacaacacaaccatcgcctgcgcagcttgtaatagttggtgctcgtgggcctcccctgtcgccctgaatgtccagtatgccccccgagacgtgagggtccggaaaatcaagcccctttccgagattcactctggaaactcggtcagcctccaatgtgacttctcaagcagccaccccaaagaagtccagttcttctgggagaaaaatggcaggcttctggggaaagaaagccagctgaattttgactccatctccccagaagatgctgggagttacagctgctgggtgaacaactccataggacagacagcgtccaaggcctggacacttgaagtgctgtatgcacccaggaggctgcgtgtgtccatgagcccgggggaccaagtgatggaggggaagagtgcaaccctgacctgtgagagcgacgccaaccctcccgtctcccactacacctggtttgactggaataaccaaagcctcccctaccacagccagaagctgagattggagccggtgaaggtccagcactcgggtgcctactggtgccaggggaccaacagtgtgggcaagggccgttcgcctctcagcaccctcaccgtctactatagcccggagaccatcggcaggcgagtggctgtgggactcgggtcctgcctcgccatcctcatcctggcaatctgtgggctcaagctccagcgacgttggaagaggacacagagccagcaggggcttcaggagaattccagcggccagagcttctttgtgaggaataaaaaggttagaagggcccccctctctgaaggcccccactccctgggatgctacaatccaatgatggaagatggcattagctacaccaccctgcgctttcccgagatgaacataccacgaactggagatgcagagtcctcagagatgcagagacctcccccggactgcgatgacacggtcacttattcagcattgcacaagcgccaagtgggcgactatgagaacgtcattccagattttccagaagatgaggggattcattactcagagctgatccagtttggggtcggggagcggcctcaggcacaagaaaatgtggactatgtgatcctcaaacattgacactggatgggctgcagcagaggcactgggggcagcgggggccagggaagtccccgagtttccccagacaccgccacatggcttcctcctgcgcgcatgtgcgcacacacacacacacacgcacacacacacacacacactcactgcggagaaccttgtgcctggctcagagccagtctttttggtgagggtaaccccaaacctccaaaactcctgcccctgttctcttccactctccttgctacccagaaatccatctaaatacctgccctgacatgcacacctccccctgcccccaccacggccactggccatctccacccccagctgcttgtgtccctcctgggatctgctcgtcatcatttttccttcccttctccatctctctggccctctacccctgatctgacatccccactcacgaatattatgcccagtttctgcctctgagggaaagcccagaaaaggacagaaacgaagtagaaaggggcccagtcctggcctggcttctcctttggaagtgaggcattgcacagggagacgtacgtatcagcggccccttgactctggggactccgggtttgagatggacacactggtgtggattaacctgccagggagacagagctcacaataaaaatggctcagatgccacttcaaaga

SEQ ID NO: 10114 - protein, 962 aa, Homo sapiens
MWAKIGPVGAVVAFAILIAIVCYITQTRRKKNVTESPSFSAGDNPPVLFSSDFRISGAPEKYEMLPGSLKREDTRKQGKGRSSVGEQEKPRGRSKRPDGSKTNSPLLRLAPRHDTMHLLGPWLLLLVLEYLAFSDSSKWVFEHPETLYAWEGACVWIPCTYRALDGDLESFILFHNPEYNKNTSKFDGTRLYESTKDGKVPSEQKRVQFLGDKNKNCTLSIHPVHLNDSGQLGLRMESKTEKWMERIHLNVSERPFPPHIQLPPEIQESQEVTLTCLLNFSCYGYPIQLQWLLEGVPMRQAAVTSTSLTIKSVFTRSELKFSPQWSHHGKIVTCQLQDADGKFLSNDTVQLNVKHTPKLEIKVTPSDAIVREGDSVTMTCEVSSSNPEYTTVSWLKDGTSLKKQNTFTLNLREVTKDQSGKYCCQVSNDVGPGRSEEVFLQVQYAPEPSTVQILHSPAVEGSQVEFLCMSLANPLPTNYTWYHNGKEMQGRTEEKVHIPKILPWHAGTYSCVAENILGTGQRGPGAELDVQYPPKKVTTVIQNPMPIREGDTVTLSCNYNSSNPSVTRYEWKPHGAWEEPSLGVLKIQNVGWDNTTIACAACNSWCSWASPVALNVQYAPRDVRVRKIKPLSEIHSGNSVSLQCDFSSSHPKEVQFFWEKNGRLLGKESQLNFDSISPEDAGSYSCWVNNSIGQTASKAWTLEVLYAPRRLRVSMSPGDQVMEGKSATLTCESDANPPVSHYTWFDWNNQSLPYHSQKLRLEPVKVQHSGAYWCQGTNSVGKGRSPLSTLTVYYSPETIGRRVAVGLGSCLAILILAICGLKLQRRWKRTQSQQGLQENSSGQSFFVRNKKVRRAPLSEGPHSLGCYNPMMEDGISYTTLRFPEMNIPRTGDAESSEMQRPPPDCDDTVTYSALHKRQVGDYENVIPDFPEDEGIHYSELIQFGVGERPQAQENVDYVILKH

SEQ ID NO: 10115 - DNA, 552 bp, Homo sapiens
ctcccaagaaggtgaccacagtgattcaaaaccccatgccgattcgagaaggagacacagtgaccctttcctgtaactacaattccagtaaccccagtgttacccggtatgaatggaaaccccatggcgcctgggaggagccatcgcttggggtgctgaagatccaaaacgttggctgggacaacacaaccatcgcctgcgcagcttgtaatagttgctgcttgtgtccctcctgggatctgctcgtcatcatttttccttcccttctccatctctctggccctctacccctgatctgacatccccactcacgaatattatgcccagtttctgcctctgagggaaagcccagaaaaggacagaaacgaagtagaaaggggcccagtcctggcctggcttctcctttggaagtgaggcattgcacagggagacgtacgtatcagcggccccttgactctggggactccgggtttgagatggacacactggtgtggattaacctgccagggagacagagctcacaataaaaatggctcagatgccacttcaaag

SEQ ID NO: 10116 - protein, 87 aa, Homo sapiens
MPIREGDTVTLSCNYNSSNPSVTRYEWKPHGAWEEPSLGVLKIQNVGWDNTTIACAACNSCCLCPSWDLLVIIFPSLLHLSGPLPLI

SEQ ID NO: 10117 - DNA, 957 bp, Homo sapiens
agcctgagagcctcctctttttcctggggccatggagtcctcgcgtatgaaggttgcatacatcctcctcccagtgccctcttcagggcctaggtctgcagcctcttgttttgggcacgcctgcaaggacagttgcaagatgcattcccatgtggaattgctgggtggaagacaggtgcactttcagagctgatcacacagctatactgccgtgaagagctgcacccatttatgcgggtgcgggtcacaggctctgggcgtgccacgtctgtgggaaaagcagctcctcaggagaattagtgccttattcctaaagggaggcccagagcaagcaggggccgttgtcaccctcttcctctgcacccctgcacgcatgcaggggagaaggacgagtctggctgcagagagaagtccaggatgccttccaggcaaaggctgccagggagagctggcccctcagttgattaaggtctctcctttctccacccagatagcccggagaccatcggcaggcgagtggctgtgggactcgggtcctgcctcgccatcctcatcctggcaatctgtgggctcaagctccagcgacgttggaagaggacacagagccagcaggggcttcaggagaattccagcggccagagcttctttgtgaggaataaaaaggtaggatggggctgggcacgatggctcatgcctgtaatcccagcactttgggaggctgaggcaggtggatcacctgaggtcaggagttcgagaccagcgtagccaacatggtgaaaccctgtctctacaaaaaatattttaaaaattagccgggcgtgatggtccatgcctgtaattccagctactcgggaggctgaggcaggagaatcgcttgaacctgggaggcagaggttgcagtgagccaagattgcgccattgcactccagcctgggtgacatactgagactctgcctc

SEQ ID NO: 10118 - protein, 92 aa, Homo sapiens
MQGRRTSLAAERSPGCLPGKGCQGELAPQLIKVSPFSTQIARRPSAGEWLWDSGPASPSSSWQSVGSSSSDVGRGHRASRGFRRIPAARASL

SEQ ID NO: 10119 - DNA, 579 bp, Homo sapiens
atagcccggagaccatcggcaggcgagtggctgtgggactcgggtcctgcctcgccatcctcatcctggcaatctgtgggctcaagctccagcgacgttggaagaggacacagagccagcaggggcttcaggagaattccagcggccagagcttctttgtgaggaataaaaaggttagaagggcccccctctctgaaggcccccactccctgggatgctacaatccaatgatggaagatggcattagctacaccaccctgcgctttcccgagatgaacataccacgaactggagatgcagagtcctcagagatgcagagacctcccccggactgcgatgacacggtcacttattcagcattgcacaagcgccaagtgggcgactatgagaacgtcattccagattttccagaagatgaggggattcattactcagagctgatccagtttggggtcggggagcggcctcaggcacaagaaaatgtggactatgtgatcctcaaacattgacaactggtgtggattaacctgccagggagacagagctcacaataaaaatggctcagatgccacttcaaag

SEQ ID NO: 10120 - protein, 93 aa, Homo sapiens [sequence omitted]

SEQ ID NO: 10121 - DNA, 539 bp, Homo sapiens
ttccagaagatgaggggattcattactcagagctgatccagtttggggtcggggagcggcctcaggcacaagaaaatgtggactatgtgatcctcaaacattgacactggatgggctgcagcagaggcactgggggcagcgggggccagggaagtccccgagtttccccagacaccgccacatggtggccatctccacccccagctgcttgtgtccctcctgggatctgctcgtcatcatttttccttcccttctccatctctctggccctctacccctgatctgacatccccactcacgaatattatgcccagtttctgcctctgagggaaagcccagaaaaggacagaaacgaagtagaaaggggcccagtcctggcctggcttctcctttggaagtgaggcattgcacagggagacgtacgtatcagcggccccttgactctggggactccgggtttgagatggacacactggtgtggattaacctgccagggagacagagctcacaataaaaatggctcagatgccacttcaaag

SEQ ID NO: 10122 - protein, 56 aa, Homo sapiens
MGCSRGTGGSGGQGSPRVSPDTATWWPSPPPAACVPPGICSSSFFLPFSISLALYP

SEQ ID NO: 10123 - DNA, 2569 bp, Homo sapiens
aagaggtgacatggtggagagaaagcacaggactgggggccacaggtcctggcttctcatccaggctccgctgctccctgactgctgcctttctctgtgggcctcgtttcctccctgatcccaccaggtgaattgtaattctccacacagggctggaacccgcgagtgatcccaggagcccctcctctccggggccccaagatctgaggacagggagccaggttgcacacaggagccgtgcaggccaggacggcggccccatggacctgcccccgcagctctccttcggcctctatgtggccgcctttgcgctgggcttcccgctcaacgtcctggccatccgaggcgcgacggcccacgcccggctccgtctcacccctagcctggtctacgccctgaacctgggctgctccgacctgctgctgacagtctctctgcccctgaaggcggtggaggcgctagcctccggggcctggcctctgccggcctcgctgtgccccgtcttcgcggtggcccacttcttcccactctatgccggcgggggcttcctggccgccctgagtgcaggccgctacctgggagcagccttccccttgggctaccaagccttccggaggccgtgctattcctggggggtgtgcgcggccatctgggccctcgtcctgtgtcacctgggtctggtctttgggttggaggctccaggaggctggctggaccacagcaacacctccctgggcatcaacacaccggtcaacggctctccggtctgcctggaggcctgggacccggcctctgccggcccggcccgcttcagcctctctctcctgctcttttttctgcccttggccatcacagccttctgctacgtgggctgcctccgggcactggcccgctccggcctgacgcacaggcggaagctgcgggccgcctgggtggccggcggggccctcctcacgctgctgctctgcgtaggaccctacaacgcctccaacgtggccagcttcctgtaccccaatctaggaggctcctggcggaagctggggctcatcacgggtgcctggagtgtggtgcttaatccgctggtgaccggttacttgggaaggggtcctggcctgaagacagtgtgtgcggcaagaacgcaagggggcaagtcccagaagtaacgccactgctcgggggaaggagcatggggcaggagggcccggctgcttctccaggcccctgcggggggctgcttcggaggaactgcagggcagcctggcccggaggcctccctggagccactcaagcagagagcggcgcctgctgagggcagcaccccagtcaagagaggagcaccgagccagagcacggtggcagggggaggtaagtttgcccctgcacgtgtcgaggaagtttgtcccttcctcgcctatctttctctcccctctgcacgtcctcacctgcctgtcttccgtgggccgcgagcagaggccttgtacttacgggaaggaggaggcagtctgtttctgacccacaggaactgccactccggtgatgcacttgaggacagctactctgaaatcagttcccaggagagaacatttgatttccgagtaggagaggaggcaggaggcaggataatgacgctgttataccatgtgaaactcgcaagggggcagccttggagcttggaacggaggctggcaggaaaagatgcttcagccggggagggaaaatgcaaggtcccgcagtgatgggcaaaggctacggagttgactcttgaacaacgtggggatggggtgccgaaccccacgcagtggaaaatctgtgcatgactttgactcccccaaagttcaactactaatagcctactgttgaccaaaagctttacccagtatataaacaattgagtaagacatatttgaagccaggcacagtggcttatgcctgtaatcccagcactttaggaggccgaggcgggaagactgctcgaagccaggagttcaagagcagcctgggcaagatagtgagacccccacctctacaaataataaaaataaaaataattagctgggcgtggtggtgcgtgcctgtagtcccagctactcaggggtctgaggtgggaggatcccttgagcccaggattgaggctgcaatgccatgatcgcaccactgcactccagcctgggtgacagagcaagatcctgtctctggaaaaaaaagaaaaaagacatattttgtatgttatatatattatgtgctgtattcttacaataaagtaagctagagaaaagtacatgttactgaaaacattattagaaagagaaaataccttcacagcactgtgctgtatttatcaatactgtaagttttgttgtctgtttataagagaagttgtctgtctcaagcggcagtaaccgcggctgcagatctcaatctgtggtagatatcaagcagttcaacccttttttataatgtcatgacttttctttgcttcttggaacagctctggcatcactagtggccccgcatttggggccaagggggttattcaaagtttacggtattgcattaaacatggtgaaac

SEQ ID NO: 10124 - protein, 300 aa, Homo sapiens; identical to SEQ ID NO: 1565

SEQ ID NO: 10125 - DNA, 5231 bp, Homo sapiens
atgtgagccccggcgacagcgggggaggggaagccccgggcgaccgccccccgcctcacagctgggatcggactctcccgccccagatgtggcgccgccgccgtcacacgagccccgtgacacccagccgggagcccgaggggtccagaggctcggacccgggcgtccggaatttctgcaccgcatcctgagagaccccgaggtccagaccccggcgcccaggctggaggacttgagccatccaggtgcgcagcgccccctcctggagcagccgggagcccggacgtcaccccgcgagaccctggaggccgagcgccccgtatccccgtttcaagaactcaggatccaggaccgcagactccctccagggctccgatcccaagaccccgcgttggaggaacttgagatccggacttctaagcgccccaaccagtttcgggctgcagcggccatcgcttcaaggggacccaggactttgggacccccctgtgctcccacctggagggagtttcattcctgcccctagaattaggggaactcagaaatccatcccccaccccacggccctacctagaagacttaggaatgtgggtccccagcgccgccatctgagactccagagtcgaggctcctagcatcccctacgtagaacactgagaaattccgactgcgggaccccagtctccgagagaccccagattctattcctggagcctgagagcccgaagttcacgcccctgagtctgggctccgcacctccctggggaccgcgtcggggtcgcgcaggagccgggctgcctcgagccggggctggaggctccccgggaggactctgctgggccgctcagccatgcctgagggagcccaaggactgagcctctccaaacctagcccaagcctcgggtgtggccgaagaggtgaagtgtgtgactgtggcaccgtgtgtgagactcggacagctcctgcagcccccaccatggcctccccccgaggttctgggagctccacatccctgagcacagtgggctctgagggggatccagcccctgggcccactccagcctgctcagcctccaggccagagccccttccagggcctcccatccgcctacatctctctccggtggggatcccaggttcagccagaccctcaaggctggagcgtgtggcccgggagatcgtggagacagaacgggcctatgtcagggacctccgcagcatcgtggaggactacctgggccctctgctggacggcggggtcctggggctgagcgtggagcaggtgggcacgctgtttgccaacattgaggacatctacgagttcagcagcgagctcctggaggacttggagaacagcagcagcgccgggggtattgccgagtgcttcgtgcagaggagcgaggattttgacatctacacattgtactgcatgaactacccgagctccctggccctgctccgggagctgtcgttgtctccgccagcagccctgtggctgcaggagcgccaggcccagcttcgccactcgctgcccctgcagagcttcctgctgaaacctgtccagcgcattctcaagtaccatctgctgctgcaggaactagggaagcactgggcggagggcccaggcactgggggtcgcgagatggtggaggaagctattgtgtccatgacagcggttgcctggtacatcaacgacatgaagcgcaagcaggagcatgcagcgcgcctccaggaagtgcagcggcggctgggtggctggaccggaccagagctcagtgcttttggggaactggtgttggagggcgcgttccgaggaggcggagggggtggcccccggctacgagggggtgagcggctgctcttcctgttctctcggatgctgctggtggccaagcgcagggggctggagtacacctacaaaggccacatcttctgctgcaacctgagcgtgagcgagagtccccgagaccctctagggttcaaggtgtctgatctgaccattcccaagcacagacacctgctccaggccaagaaccaagaagagaagaggctgtggattcactgtctccagcgcctcttctttgagaaccaccctgcctccatccctgccaaggcaaagcaagttctccttgaaaacagcctgcattgtgcccccaaaagtaagcctgtcctagagcccctgacacccccacttgggtctcctcgacctcgagatgctagaagttttacccctgggcgaaggaacacagctccatctcctgggccctctgtgattcgccgaggccgcaggcagtctgagccggtgaaggacccttatgtcatgttcccacagaacgctaagcctggattcaagcacgctggcagcgaaggggaactctaccctccagaatctcagccaccagtttcaggctctgcaccccctgaggacctggaggatgctggacccccaacactggacccctctgggacctcaatcactgaagaaatcctggaactgctgaatcagcgaggccttcgagatccagggccgtccacccatgacattcccaagttccccggagactcccaggtgcctggcgacagcgaaaccctcacattccaagccctgcccagccgggactcttcagaagaggaggaggaggaagaggaagggctggagatggatgaacgggggccttccccactccacgtcctggaagggctcgaaagttccattgcagctgaaatgcccagcattccctgccttaccaaaattcctgacgtgcccaaccttcctgaaattcccagccgctgtgaaattcccgaaggttctcgccttcctagtctctctgacatttccgatgtttttgagatgccctgccttccagccatacctagtgtccccaacacccccagtctgtctagcactcccaccctctcctgtgactcctggctccaagggcctctgcaggaaccagctgaggctccagccaccaggagagaactgttttctgggagcaatcctgggaaactgggagagccgccttcaggaggcaaggcagggccagaggaggatgaagaaggggtatcattcacagacttccagccccaggatgtcacccaacatcagggattcccagatgagctggcattccgctcttgctcagaaatccggagcgcctggcaggcattggaacagggacagctggcccggccaggcttcccagagccactgctgatcctggaggattcggatctgggtggagacagcgggagcgggaaggcaggagccccgagttcagaaaggacggcgtcccgagtgcgagagctggcccggctttacagcgagcggatccagcagatgcagcgggcggagactcgggcatcagccaatgccccgcgccgccggcctcgggttctggcccaaccccagccatccccctgtctgccccaggagcaggcagagccagggctcctgcctgcctttggacacgtgctggtatgtgagctggccttcccactgacatgtgcccaggagtctgtccccctgggtcctgctgtctgggttcaagctgccatacctttgtcaaagcagggaggcagcccggatggccagggtctacatgtttccaatttgcctaagcaagaccttccgggcatccacgtttcagctgctacccttttgcctgagcaaggaggttcccggcatgtccaggctccagccgccacacctttgcccaagcaagaaggccccctgcacctccaggtgccggctcttacaactttctctgatcaaggccacccagaaatccaagttccagccaccactcctttgcctgagcatagaagtcacatggttataccagctccatccaccgccttttgtcctgagcagggacactgtgcggacatccacgttcccaccactccagctttgcccaaggagatttgttctgatttcacagtttcagtcaccacccctgtgcccaagcaagaaggtcacctagacagcgagagcccaaccaatatcccactgacaaagcaaggaggttccagggatgttcagggcccagaccctgtctgcagtcaacccatccagcctttgtcttggcatggaagcagcctggatccccagggcccaggcgacaccctaccacccttgccatgtcacctcccagaccttcagattccaggtacctcacctttgcctgcacatggaagccacctggaccatcggatcccagccaacgccccactgtctttgtcccaggagctcccagacactcaggttccagctaccacacctttgcccctgccacaagtcctcacagacatctgggtccaagccctcccaacttcacccaagcagggaagcctcccagacatccagggtccagcggctgcacctccacttccggagccaagccttacagatacacaggtccaaaaactcacaccttcgttggagcagaagagcctcatagatgcccatgttccagctgccacacctttacctgagagaggaggctctctagacattcagggcctctcacccaccccagttcagaccaccatggttttgtccaaaccaggaggctccttagcctctcacgttgccaggttggagtcttcagacttgacgccacctcatagtcccccaccttccagccgtcagctcctgggccccaatgcagctgccctctccagatacctggcagcctcatatatcagccagagcctggctcggcggcaggggcctgggggaggggcccccgcagcctcccggggctcctggtcctctgctcccacgtcacgggcatcttcgccgcccccccagccccagccaccacctcccccagccaggcggctcagctatgccacgacggttaacatccacgtgggcgggggtgggcggctgcggccagccaaggcccaggtccggttgaaccaccctgctctcttggcctccacacaggaatctatgggccttcacagggcccagggggctcctgatgcccccttccacatgtgagccaggacatgaggcttccctgaagcaaggatttcagccagatgccatagaccctcagaacttgacctggaagtccagacactgaacgcaggcctcaaaactgctgcggccttccaactcctggtatctgcatcggcgaatggcccttcttgccttgatccacagggatggggaagggaggaatgtcattaatgttttgttaatactgattctttcatgc

SEQ ID NO: 10126 - protein, 1386 aa, Homo sapiens; identical to SEQ ID NO: 1567

SEQ ID NO: 10127 - DNA, 5382 bp, Homo sapiens
atgtgagccccggcgacagcgggggaggggaagccccgggcgaccgccccccgcctcacagctgggatcggactctcccgccccagatgtggcgccgccgccgtcacacgagccccgtgacacccagccgggagcccgaggggtccagaggctcggacccgggcgtccggaatttctgcaccgcatcctgagagaccccgaggtccagaccccggcgcccaggctggaggacttgagccatccaggtgcgcagcgccccctcctggagcagccgggagcccggacgtcaccccgcgagaccctggaggccgagcgccccgtatccccgtttcaagaactcaggatccaggaccgcagactccctccagggctccgatcccaagaccccgcgttggaggaacttgagatccggacttctaagcgccccaaccagtttcgggctgcagcggccatcgcttcaaggggacccaggactttgggacccccctgtgctcccacctggagggagtttcattcctgcccctagaattaggggaactcagaaatccatcccccaccccacggccctacctagaagacttaggaatgtgggtccccagcgccgccatctgagactccagagtcgaggctcctagcatcccctacgtagaacactgagaaattccgactgcgggaccccagtctccgagagaccccagattctattcctggagcctgagagcccgaagttcacgcccctgagtctgggctccgcacctccctggggaccgcgtcggggtcgcgcaggagccgggctgcctcgagccggggctggaggctccccgggaggactctgctgggccgctcagccatgcctgagggagcccaaggactgagcctctccaaacctagcccaagcctcgggtgtggccgaagaggtgaagtgtgtgactgtggcaccgtgtgtgagactcggacagctcctgcagcccccaccatggcctccccccgaggttctgggagctccacatccctgagcacagtgggctctgagggggatccagcccctgggcccactccagcctgctcagcctccaggccagagccccttccagggcctcccatccgcctacatctctctccggtggggatcccaggttcagccagaccctcaaggctggagcgtgtggcccgggagatcgtggagacagaacgggcctatgtcagggacctccgcagcatcgtggaggactacctgggccctctgctggacggcggggtcctggggctgagcgtggagcaggtgggcacgctgtttgccaacattgaggacatctacgagttcagcagcgagctcctggaggacttggagaacagcagcagcgccgggggtattgccgagtgcttcgtgcagaggagcgaggattttgacatctacacattgtactgcatgaactacccgagctccctggccctgctccgggagctgtcgttgtctccgccagcagccctgtggctgcaggagcgccaggcccagcttcgccactcgctgcccctgcagagcttcctgctgaaacctgtccagcgcattctcaagtaccatctgctgctgcaggaactagggaagcactgggcggagggcccaggcactgggggtcgcgagatggtggaggaagctattgtgtccatgacagcggttgcctggtacatcaacgacatgaagcgcaagcaggagcatgcagcgcgcctccaggaagtgcagcggcggctgggtggctggaccggaccagagctcagtgcttttggggaactggtgttggagggcgcgttccgaggaggcggagggggtggcccccggctacgagggggtgagcggctgctcttcctgttctctcggatgctgctggtggccaagcgcagggggctggagtacacctacaaaggccacatcttctgctgcaacctgagcgtgagcgagagtccccgagaccctctagggttcaaggtgtctgatctgaccattcccaagcacagacacctgctccaggccaagaaccaagaagagaagaggctgtggattcactgtctccagcgcctcttctttgagaaccaccctgcctccatccctgccaaggcaaagcaagttctccttgaaaacagcctgcattgtgcccccaaaagtaagcctgtcctagagcccctgacacccccacttgggtctcctcgacctcgagatgctagaagttttacccctgggcgaaggaacacagctccatctcctgggccctctgtgattcgccgaggccgcaggcagtctgagccggtgaaggacccttatgtcatgttcccacagaacgctaagcctggattcaagcacgctggcagcgaaggggaactctaccctccagaatctcagccaccagtttcaggctctgcaccccctgaggacctggaggatgctggacccccaacactggacccctctgggacctcaatcactgaagaaatcctggaactgctgaatcagcgaggccttcgagatccagggccgtccacccatgacattcccaagttccccggagactcccaggtgcctggcgacagcgaaaccctcacattccaagccctgcccagccgggactcttcagaagaggaggaggaggaagaggaagggctggagatggatgaacgggggccttccccactccacgtcctggaagggctcgaaagttccattgcagctgaaatgcccagcattccctgccttaccaaaattcctgacgtgcccaaccttcctgaaattcccagccgctgtgaaattcccgaaggttctcgccttcctagtctctctgacatttccgatgtttttgagatgccctgccttccagccatacctagtgtccccaacacccccagtctgtctagcactcccaccctctcctgtgactcctggctccaagggcctctgcaggaaccagctgaggctccagccaccaggagagaactgttttctgggagcaatcctgggaaactgggagagccgccttcaggaggcaaggcagggccagaggaggatgaagaaggggtatcattcacagacttccagccccaggatgtcacccaacatcagggattcccagatgagctggcattccgctcttgctcagaaatccggagcgcctggcaggcattggaacagggacagctggcccggccaggcttcccagagccactgctgatcctggaggattcggatctgggtggagacagcgggagcgggaaggcaggagccccgagttcagaaaggacggcgtcccgagtgcgagagctggcccggctttacagcgagcggatccagcagatgcagcgggcggagactcgggcatcagccaatgccccgcgccgccggcctcgggttctggcccaaccccagccatccccctgtctgccccaggagcaggcagagccagggctcctgcctgcctttggacacgtgctggtatgtgagctggccttcccactgacatgtgcccaggagtctgtccccctgggtcctgctgtctgggttcaagctgccatacctttgtcaaagcagggaggcagcccggatggccagggtctacatgtttccaatttgcctaagcaagaccttccgggcatccacgtttcagctgctacccttttgcctgagcaaggaggttcccggcatgtccaggctccagccgccacacctttgcccaagcaagaaggccccctgcacctccaggtgccggctcttacaactttctctgatcaaggccacccagaaatccaagttccagccaccactcctttgcctgagcatagaagtcacatggttataccagctccatccaccgccttttgtcctgagcagggacactgtgcggacatccacgttcccaccactccagctttgcccaaggagatttgttctgatttcacagtttcagtcaccacccctgtgcccaagcaagaaggtcacctagacagcgagagcccaaccaatatcccactgacaaagcaaggaggttccagggatgttcagggcccagaccctgtctgcagtcaacccatccagcctttgtcttggcatggaagcagcctggatccccagggcccaggcgacaccctaccacccttgccatgtcacctcccagaccttcagattccaggtacctcacctttgcctgcacatggaagccacctggaccatcggatcccagccaacgccccactgtctttgtcccaggagctcccagacactcaggttccagctaccacacctttgcccctgccacaagtcctcacagacatctgggtccaagccctcccaacttcacccaagcagggaagcctcccagacatccagggtccagcggctgcacctccacttccggagccaagccttacagatacacaggtccaaaaactcacaccttcgttggagcagaagagcctcatagatgcccatgttccagctgccacacctttacctgagagaggaggctctctagacattcagggcctctcacccaccccagttcagaccaccatggttttgtccaaaccaggaggctccttagcctctcacgttgccaggttggagtcttcagacttgacgccacctcatagtcccccaccttccagccgtcagctcctgggccccaatgcagctgccctctccagatacctggcagcctcatatatcagccagagcctggctcggcggcaggggcctgggggaggggcccccgcagcctcccggggctcctggtcctctgctcccacgtcacgggcatcttcgccgcccccccagccccagccaccacctcccccagccaggcggctcagctatgccacgacggttaacatccacgtgggcgggggtgggcggctgcggccagccaaggcccaggtccggttgaaccaccctgctctcttggcctccacacaggaatctatgggccttcacagggcccagggggctcctgatgcccccttccacatgtgagccaggacatgaggcttccctgaagcaaggatttcagccagatgccatagaccctcagaacttgacctggaagtccagacactgaacgcaggcctcaaaactgctgcggccttccaactcctggtatctgcatcggcgaatggcccttcttgccttgatccacagggatggggaagggaggaatgtcattaatgttttgttaatactgattctttcatgcaatgatgtgtattttcccattctggaggctgtgggagatgacaagacaatgaatgggaaggtctgacacagaacaaatcagcggttctgaaagcttggggaatctcagactcctttgagaattattggaaaatggacccactataacttgg

SEQ ID NO: 10128 - protein, 1386 aa, Homo sapiens; identical to SEQ ID NO: 1567

SEQ ID NO: 10129 - DNA, 6651 bp, Homo sapiens
atgtgagccccggcgacagcgggggaggggaagccccgggcgaccgccccccgcctcacagctgggatcggactctcccgccccagatgtggcgccgccgccgtcacacgagccccgtgacacccagccgggagcccgaggggtccagaggctcggacccgggcgtccggaatttctgcaccgcatcctgagagaccccgaggtccagaccccggcgcccaggctggaggacttgagccatccaggtgcgcagcgccccctcctggagcagccgggagcccggacgtcaccccgcgagaccctggaggccgagcgccccgtatccccgtttcaagaactcaggatccaggaccgcagactccctccagggctccgatcccaagaccccgcgttggaggaacttgagatccggacttctaagcgccccaaccagtttcgggctgcagcggccatcgcttcaaggggacccaggactttgggacccccctgtgctcccacctggagggagtttcattcctgcccctagaattaggggaactcagaaatccatcccccaccccacggccctacctagaagacttaggaatgtgggtccccagcgccgccatctgagactccagagtcgaggctcctagcatcccctacgtagaacactgagaaattccgactgcgggaccccagtctccgagagaccccagattctattcctggagcctgagagcccgaagttcacgcccctgagtctgggctccgcacctccctggggaccgcgtcggggtcgcgcaggagccgggctgcctcgagccggggctggaggctccccgggaggactctgctgggccgctcagccatgcctgagggagcccaaggactgagcctctccaaacctagcccaagcctcgggtgtggccgaagaggtgaagtgtgtgactgtggcaccgtgtgtgagactcggacagctcctgcagcccccaccatggcctccccccgaggttctgggagctccacatccctgagcacagtgggctctgagggggatccagcccctgggcccactccagcctgctcagcctccaggccagagccccttccagggcctcccatccgcctacatctctctccggtggggatcccaggttcagccagaccctcaaggctggagcgtgtggcccgggagatcgtggagacagaacgggcctatgtcagggacctccgcagcatcgtggaggactacctgggccctctgctggacggcggggtcctggggctgagcgtggagcaggtgggcacgctgtttgccaacattgaggacatctacgagttcagcagcgagctcctggaggacttggagaacagcagcagcgccgggggtattgccgagtgcttcgtgcagaggagcgaggattttgacatctacacattgtactgcatgaactacccgagctccctggccctgctccgggagctgtcgttgtctccgccagcagccctgtggctgcaggagcgccaggcccagcttcgccactcgctgcccctgcagagcttcctgctgaaacctgtccagcgcattctcaagtaccatctgctgctgcaggaactagggaagcactgggcggagggcccaggcactgggggtcgcgagatggtggaggaagctattgtgtccatgacagcggttgcctggtacatcaacgacatgaagcgcaagcaggagcatgcagcgcgcctccaggaagtgcagcggcggctgggtggctggaccggaccagagctcagtgcttttggggaactggtgttggagggcgcgttccgaggaggcggagggggtggcccccggctacgagggggtgagcggctgctcttcctgttctctcggatgctgctggtggccaagcgcagggggctggagtacacctacaaaggccacatcttctgctgcaacctgagcgtgagcgagagtccccgagaccctctagggttcaaggtgtctgatctgaccattcccaagcacagacacctgctccaggccaagaaccaagaagagaagaggctgtggattcactgtctccagcgcctcttctttgagaaccaccctgcctccatccctgccaaggcaaagcaagttctccttgaaaacagcctgcattgtgcccccaaaagtaagcctgtcctagagcccctgacacccccacttgggtctcctcgacctcgagatgctagaagttttacccctgggcgaaggaacacagctccatctcctgggccctctgtgattcgccgaggccgcaggcagtctgagccggtgaaggacccttatgtcatgttcccacagaacgctaagcctggattcaagcacgctggcagcgaaggggaactctaccctccagaatctcagccaccagtttcaggctctgcaccccctgaggacctggaggatgctggacccccaacactggacccctctgggacctcaatcactgaagaaatcctggaactgctgaatcagcgaggccttcgagatccagggccgtccacccatgacattcccaagttccccggagactcccaggtgcctggcgacagcgaaaccctcacattccaagccctgcccagccgggactcttcagaagaggaggaggaggaagaggaagggctggagatggatgaacgggggccttccccactccacgtcctggaagggctcgaaagttccattgcagctgaaatgcccagcattccctgccttaccaaaattcctgacgtgcccaaccttcctgaaattcccagccgctgtgaaattcccgaaggttctcgccttcctagtctctctgacatttccgatgtttttgagatgccctgccttccagccatacctagtgtccccaacacccccagtctgtctagcactcccaccctctcctgtgactcctggctccaagggcctctgcaggaaccagctgaggctccagccaccaggagagaactgttttctgggagcaatcctgggaaactgggagagccgccttcaggaggcaaggcagggccagaggaggatgaagaaggggtatcattcacagacttccagccccaggatgtcacccaacatcagggattcccagatgagctggcattccgctcttgctcagaaatccggagcgcctggcaggcattggaacagggacagctggcccggccaggcttcccagagccactgctgatcctggaggattcggatctgggtggagacagcgggagcgggaaggcaggagccccgagttcagaaaggacggcgtcccgagtgcgagagctggcccggctttacagcgagcggatccagcagatgcagcgggcggagactcgggcatcagccaatgccccgcgccgccggcctcgggttctggcccaaccccagccatccccctgtctgccccaggagcaggcagagccagggctcctgcctgcctttggacacgtgctggtatgtgagctggccttcccactgacatgtgcccaggagtctgtccccctgggtcctgctgtctgggttcaagctgccatacctttgtcaaagcagggaggcagcccggatggccagggtctacatgtttccaatttgcctaagcaagaccttccgggcatccacgtttcagctgctacccttttgcctgagcaaggaggttcccggcatgtccaggctccagccgccacacctttgcccaagcaagaaggccccctgcacctccaggtgccggctcttacaactttctctgatcaaggccacccagaaatccaagttccagccaccactcctttgcctgagcatagaagtcacatggttataccagctccatccaccgccttttgtcctgagcagggacactgtgcggacatccacgttcccaccactccagctttgcccaaggagatttgttctgatttcacagtttcagtcaccacccctgtgcccaagcaagaaggtcacctagacagcgagagcccaaccaatatcccactgacaaagcaaggaggttccagggatgttcagggcccagaccctgtctgcagtcaacccatccagcctttgtcttggcatggaagcagcctggatccccagggcccaggcgacaccctaccacccttgccatgtcacctcccagaccttcagattccaggtacctcacctttgcctgcacatggaagccacctggaccatcggatcccagccaacgccccactgtctttgtcccaggagctcccagacactcaggttccagctaccacacctttgcccctgccacaagtcctcacagacatctgggtccaagccctcccaacttcacccaagcagggaagcctcccagacatccagggtccagcggctgcacctccacttccggagccaagccttacagatacacaggtccaaaaactcacaccttcgttggagcagaagagcctcatagatgcccatgttccagctgccacacctttacctgagagaggaggctctctagacattcagggcctctcacccaccccagttcagaccaccatggttttgtccaaaccaggaggctccttagcctctcacgttgccaggttggagtcttcagacttgacgccacctcatagtcccccaccttccagccgtcagctcctgggccccaatgcagctgccctctccagatacctggcagcctcatatatcagccagagcctggctcggcggcaggggcctgggggaggggcccccgcagcctcccggggctcctggtcctctgctcccacgtcacgggcatcttcgccgcccccccagccccagccaccacctcccccagccaggcggctcagctatgccacgacggttaacatccacgtgggcgggggtgggcggctgcggccagccaaggcccaggtccggttgaaccaccctgctctcttggcctccacacaggaatctatgggccttcacagggcccagggggctcctgatgcccccttccacatgtgagccaggacatgaggcttccctgaagcaaggatttcagccagatgccatagaccctcagaacttgacctggaagtccagacactgaacgcaggcctcaaaactgctgcggccttccaactcctggtatctgcatcggcgaatggcccttcttgccttgatccacagggatggggaagggaggaatgtcattaatgttttgttaatactgattctttcatgcaatgatgtgtattttcccattctggaggctgtgggagatgacaagacaatgaatgggaaggtctgacacagaacaaatcagcggttctgaaagcttggggaatctcagactcctttgagaattattggaaaatggacccactataacttggcgtgtgtgtgaactgcttgatgcccatccaggaaagccaagttaagaagctttgcttcaagtagacactagaaatccattcccttggcaatttatacagttcacgtctcccaccatccgttcatctcacccaccctgccatctctccacctatccatctggctattgctccatctagctttcccgctccatctacccatcttccaatccatcatctcacgtatctgccttgcttatccaactgtctgccttattcacccacccatccctttatcattctaaccccatctggcattccatccctccatttatccatcttcccacttacccatcttctccatccagcactccgttcatcagtccgtctctccctccatatttccatctgtccattcatccactcattttgccatccatacatattcacccagccatctcccaatccatcgacataccccatccctccctcactggactctccggggtcttagtactatgatacttcagagacaattccatgctgatacgggggagatcaattttggggctctgggataagtctgtcccacatctgtctgatttcccttggcatccttcccgtcagttcctcttgaatatcccagttcttgtacccactcacatacctcagatcccttcactcctccccgcagtttgcagcctctacaattcatccacatgctccctcccccagcaaaataattcaggtcgtggagacaaaaggcttttatgttaggttctgtctgcccccttgttccagcagtggtatgcccagtgagaggcacaatttaaacggtttctttggtgatgatattagctactttcatcaaatacttagcctcttgtgctttagcacattatttatgtaagctcccctaggattctctgaagcaccctggtgtcctggctgtgaattcaagtcccatctttacttatttggtgtgggtcctccctctgagccggttttctcatctacaaaatgaagacaacagtacttccctcctgggatcattgaaagatttagggagcatatccttccacttcccaaacatatttgaacctctgacttgcttaggagcatcattcaaatcacagatcccccagtatctagtcccaacctattgaatcaggatccccagggaaggaggagcttgggaatctgatttttttttttttttttagataaagtctcactctgtcacccaggcttgagtgcagtggcaaaatcttggctcattgcaacctccacctc

SEQ ID NO: 10130 - protein, 1386 aa, Homo sapiens; identical to SEQ ID NO: 1567

SEQ ID NO: 10131 - DNA, 966 bp, Homo sapiens
aagccccgggcgaccgccccccgcctcacagctgggatcggactctcccgccccagatgtggcgccgccgccgtcacacgagccccgtgacacccagccgggagcccgaggggtccagaggctcggacccgggcgtccggaatttctgcaccgcatcctgagagaccccgaggtccagaccccggcgcccaggctggaggacttgagccatccaggtgcgcagcgccccctcctggagcagccgggagcccggacgtcaccccgcgagaccctggaggccgagcgccccgtatccccgtttcaagaactcaggatccaggaccgcagactccctccagggctccgatcccaagaccccgcgttggaggaacttgagatccggacttctaagcgccccaaccagtttcgggctgcagcggccatcgcttcaaggggacccaggactttgggacccccctgtgctcccacctggagggagtttcattcctgcccctagaattaggggaactcagaaatccatcccccaccccacggccctacctagaagacttaggaatgtgggtccccagcgccgccatctgagactccagagtcgaggctcctagcatcccctacgtagaacactgagaaattccgactgcgggaccccagtctccgagagaccccagattctattcctggagcctgagagcccgaagttcacgcccctgagtctgggctccgcacctccctggggaccgcgtcggggtcgcgcaggagccgggctgcctcgagccggggctggaggctccccgggaggactctgctgggccgctcagccatgcctgagggagcccaaggactgagcctctccaaacctagcccaagcctcgggtgtggccgaagaggtgaagtgtgtgactgtggcaccgtgtgtgagactcggacaggtgagcctagaggcaggggcggcggagcctgtggggc

SEQ ID NO: 10132 - protein, 47 aa, Homo sapiens
MPEGAQGLSLSKPSPSLGCGRRGEVCDCGTVCETRTGEPRGRGGGAC

SEQ ID NO: 10133 - DNA, 2203 bp, Homo sapiens
ctgcaggaccctggcatccggtcccccagcctccgccctcccctgggaccccgcggcctcccgcccacggcttttcccagccctgcccctcgccctccgctccagctggagcccaaacgttcccaggatccctaagcctccggccccagacaaacgggactcgcagcttctgcgcctcctgctccgctcactcttctttgtctcagcctttccatctttttcgccaggactctgctgggccgctcagccatgcctgagggagcccaaggactgagcctctccaaacctagcccaagcctcgggtgtggccgaagaggtgaagtgtgtgactgtggcaccgtgtgtgagactcggacagctcctgcagcccccaccatggcctccccccgaggttctgggagctccacatccctgagcacagtgggctctgagggggatccagcccctgggcccactccagcctgctcagcctccaggccagagccccttccagggcctcccatccgcctacatctctctccggtggggatcccaggttcagccagaccctcaaggctggagcgtgtggcccgggagatcgtggagacagaacgggcctatgtcagggacctccgcagcatcgtggaggactacctgggccctctgctggacggcggggtcctggggctgagcgtggagcaggtgggcacgctgtttgccaacattgaggacatctacgagttcagcagcgagctcctggaggacttggagaacagcagcagcgccgggggtattgccgagtgcttcgtgcagaggagcgaggattttgacatctacacattgtactgcatgaactacccgagctccctggccctgctccgggagctgtcgttgtctccgccagcagccctgtggctgcaggagcgccaggcccagcttcgccactcgctgcccctgcagagcttcctgctgaaacctgtccagcgcattctcaagtaccatctgctgctgcaggaactagggaagcactgggcggagggcccaggcactgggggtcgcgagatggtggaggaagctattgtgtccatgacagcggttgcctggtacatcaacgacatgaagcgcaagcaggagcatgcagcgcgcctccaggaagtgcagcggcggctgggtggctggaccggaccagagctcagtgcttttggggaactggtgttggagggcgcgttccgaggaggcggagggggtggcccccggctacgagggggtgagcggctgctcttcctgttctctcggatgctgctggtggccaagcgcagggggctggagtacacctacaaaggccacatcttctgctgcaacctgagcgtgagcgagagtccccgagaccctctagggttcaaggtgtctgatctgaccattcccaagcacagacacctgctccaggccaagaaccaagaagagaagaggctgtggattcactgtctccagcgcctcttctttgagaaccaccctgcctccatccctgccaaggcaaagcaagttctccttgaaaacagcctgcattgtgcccccaaaagtaagcctgtcctagagcccctgacacccccacttgggtctcctcgacctcgagatgctagaagttttacccctgggcgaaggaacacagctccatctcctgggccctctgtgattcgccgaggccgcaggcagtctgagccggtgaaggacccttatgtcatgttcccacagaacgctaagcctggattcaagcacgctggcagcgaaggggaactctaccctccagaatctcagccaccagtttcaggctctgcaccccctgaggacctggaggatgctggacccccaacactggacccctctgggacctcaatcactgaagaaatcctggaactgctgaatcagcgaggccttcgagatccaggggaatctatgggccttcacagggcccagggggctcctgatgcccccttccacatgtgagccaggacatgaggcttccctgaagcaaggatttcagccagatgccatagaccctcagaacttgacctggaagtccagacactgaacgcaggcctcaaaactgctgcggccttccaactcctggtatctgcatcggcgaatggcccttcttgccttgatccacagggatggggaagggaggaatgtcattaatgttttgttaatactgattctttcatgc

SEQ ID NO: 10134 - protein, 577 aa, Homo sapiens
MPEGAQGLSLSKPSPSLGCGRRGEVCDCGTVCETRTAPAAPTMASPRGSGSSTSLSTVGSEGDPAPGPTPACSASRPEPLPGPPIRLHLSPVGIPGSARPSRLERVAREIVETERAYVRDLRSIVEDYLGPLLDGGVLGLSVEQVGTLFANIEDIYEFSSELLEDLENSSSAGGIAECFVQRSEDFDIYTLYCMNYPSSLALLRELSLSPPAALWLQERQAQLRHSLPLQSFLLKPVQRILKYHLLLQELGKHWAEGPGTGGREMVEEAIVSMTAVAWYINDMKRKQEHAARLQEVQRRLGGWTGPELSAFGELVLEGAFRGGGGGGPRLRGGERLLFLFSRMLLVAKRRGLEYTYKGHIFCCNLSVSESPRDPLGFKVSDLTIPKHRHLLQAKNQEEKRLWIHCLQRLFFENHPASIPAKAKQVLLENSLHCAPKSKPVLEPLTPPLGSPRPRDARSFTPGRRNTAPSPGPSVIRRGRRQSEPVKDPYVMFPQNAKPGFKHAGSEGELYPPESQPPVSGSAPPEDLEDAGPPTLDPSGTSITEEILELLNQRGLRDPGESMGLHRAQGAPDAPFHM

SEQ ID NO: 10135 - DNA, 3400 bp, Homo sapiens
gtgagaccctgtctcaaataaataaataaaaattttaagagaaaaataaaaaaatttaaaaattgagccaggtacggtggctcacctgtaatcccagcactttgggaggccgaggtaggtggatcatctgagatcaggaatttgagaccaggctggccaacaaggagaaaccccgactctactaaaaatacaaaaattagctggacattgtggcaggcgcctgtaatcccagctactcaggaggctgaggcagcagaatcgcttgaacccgggaggcggagattgcagtgagcagagatggcgccattgcactgcaggctgggcgacagagcgagactccatctcaaaacaaacaaacgcaaaagaaggggattgggacttggggtcctctatgtgagggaggagtcttggctcttgccttccattgctttccctcctcacagcacgctggcagcgaaggggaactctaccctccagaatctcagccaccagtttcaggctctgcaccccctgaggacctggaggatgctggacccccaacactggacccctctgggacctcaatcactgaagaaatcctggaactgctgaatcagcgaggccttcgagatccagggccgtccacccatgacattcccaagttccccggagactcccaggtgcctggcgacagcgaaaccctcacattccaagccctgcccagccgggactcttcagaagaggaggaggaggaagaggaagggctggagatggatgaacgggggccttccccactccacgtcctggaagggctcgaaagttccattgcagctgaaatgcccagcattccctgccttaccaaaattcctgacgtgcccaaccttcctgaaattcccagccgctgtgaaattcccgaaggttctcgccttcctagtctctctgacatttccgatgtttttgagatgccctgccttccagccatacctagtgtccccaacacccccagtctgtctagcactcccaccctctcctgtgactcctggctccaagggcctctgcaggaaccagctgaggctccagccaccaggagagaactgttttctgggagcaatcctgggaaactgggagagccgccttcaggaggcaaggcagggccagaggaggatgaagaaggggtatcattcacagacttccagccccaggatgtcacccaacatcagggattcccagatgagctggcattccgctcttgctcagaaatccggagcgcctggcaggcattggaacagggacagctggcccggccaggcttcccagagccactgctgatcctggaggattcggatctgggtggagacagcgggagcgggaaggcaggagccccgagttcagaaaggacggcgtcccgagtgcgagagctggcccggctttacagcgagcggatccagcagatgcagcgggcggagactcgggcatcagccaatgccccgcgccgccggcctcgggttctggcccaaccccagccatccccctgtctgccccaggagcaggcagagccaggtgaggtccgggtacgtggttggcagaggtggtccccgctggagtagtggtcctgactcgatcctcttttcgcattcagggctcctgcctgcctttggacacgtgctggtatgtgagctggccttcccactgacatgtgcccaggagtctgtccccctgggtcctgctgtctgggttcaagctgccatacctttgtcaaagcagggaggcagcccggatggccagggtctacatgtttccaatttgcctaagcaagaccttccgggcatccacgtttcagctgctacccttttgcctgagcaaggaggttcccggcatgtccaggctccagccgccacacctttgcccaagcaagaaggccccctgcacctccaggtgccggctcttacaactttctctgatcaaggccacccagaaatccaagttccagccaccactcctttgcctgagcatagaagtcacatggttataccagctccatccaccgccttttgtcctgagcagggacactgtgcggacatccacgttcccaccactccagctttgcccaaggagatttgttctgatttcacagtttcagtcaccacccctgtgcccaagcaagaaggtcacctagacagcgagagcccaaccaatatcccactgacaaagcaaggaggttccagggatgttcagggcccagaccctgtctgcagtcaacccatccagcctttgtcttggcatggaagcagcctggatccccagggcccaggcgacaccctaccacccttgccatgtcacctcccagaccttcagattccaggtacctcacctttgcctgcacatggaagccacctggaccatcggatcccagccaacgccccactgtctttgtcccaggagctcccagacactcaggttccagctaccacacctttgcccctgccacaagtcctcacagacatctgggtccaagccctcccaacttcacccaagcagggaagcctcccagacatccagggtccagcggctgcacctccacttccggagccaagccttacagatacacaggtccaaaaactcacaccttcgttggagcagaagagcctcatagatgcccatgttccagctgccacacctttacctgagagaggaggctctctagacattcagggcctctcacccaccccagttcagaccaccatggttttgtccaaaccaggaggctccttagcctctcacgttgccaggttggagtcttcagacttgacgccacctcatagtcccccaccttccagccgtcagctcctgggccccaatgcagctgccctctccagatacctggcagcctcatatatcagccagagcctggctcggcggcaggggcctgggggaggggcccccgcagcctcccggggctcctggtcctctgctcccacgtcacgggcatcttcgccgcccccccagccccagccaccacctcccccagccaggcggctcagctatgccacgacggttaacatccacgtgggcgggggtgggcggctgcggccagccaaggcccaggtccggttgaaccaccctgctctcttggcctccacacaggaatctatgggccttcacagggcccagggggctcctgatgcccccttccacatgtgagccaggacatgaggcttccctgaagcaaggatttcagccagatgccatagaccctcagaacttgacctggaagtccagacactgaacgcaggcctcaaaactgctgcggccttccaactcctggtatctgcatcggcgaatggcccttcttgccttgatccacagggatggggaagggaggaatgtcattaatgttttgttaatactgattctttcatgc

SEQ ID NO: 10136 - protein, 572 aa, Homo sapiens
MPRAAGLGFWPNPSHPPVCPRSRQSQVRSGYVVGRGGPRWSSGPDSILFSHSGLLPAFGHVLVCELAFPLTCAQESVPLGPAVWVQAAIPLSKQGGSPDGQGLHVSNLPKQDLPGIHVSAATLLPEQGGSRHVQAPAATPLPKQEGPLHLQVPALTTFSDQGHPEIQVPATTPLPEHRSHMVIPAPSTAFCPEQGHCADIHVPTTPALPKEICSDFTVSVTTPVPKQEGHLDSESPTNIPLTKQGGSRDVQGPDPVCSQPIQPLSWHGSSLDPQGPGDTLPPLPCHLPDLQIPGTSPLPAHGSHLDHRIPANAPLSLSQELPDTQVPATTPLPLPQVLTDIWVQALPTSPKQGSLPDIQGPAAAPPLPEPSLTDTQVQKLTPSLEQKSLIDAHVPAATPLPERGGSLDIQGLSPTPVQTTMVLSKPGGSLASHVARLESSDLTPPHSPPPSSRQLLGPNAAALSRYLAASYISQSLARRQGPGGGAPAASRGSWSSAPTSRASSPPPQPQPPPPPARRLSYATTVNIHVGGGGRLRPAKAQVRLNHPALLASTQESMGLHRAQGAPDAPFHM

SEQ ID NO: 10137 - DNA, 3551 bp, Homo sapiens
gtgagaccctgtctcaaataaataaataaaaattttaagagaaaaataaaaaaatttaaaaattgagccaggtacggtggctcacctgtaatcccagcactttgggaggccgaggtaggtggatcatctgagatcaggaatttgagaccaggctggccaacaaggagaaaccccgactctactaaaaatacaaaaattagctggacattgtggcaggcgcctgtaatcccagctactcaggaggctgaggcagcagaatcgcttgaacccgggaggcggagattgcagtgagcagagatggcgccattgcactgcaggctgggcgacagagcgagactccatctcaaaacaaacaaacgcaaaagaaggggattgggacttggggtcctctatgtgagggaggagtcttggctcttgccttccattgctttccctcctcacagcacgctggcagcgaaggggaactctaccctccagaatctcagccaccagtttcaggctctgcaccccctgaggacctggaggatgctggacccccaacactggacccctctgggacctcaatcactgaagaaatcctggaactgctgaatcagcgaggccttcgagatccagggccgtccacccatgacattcccaagttccccggagactcccaggtgcctggcgacagcgaaaccctcacattccaagccctgcccagccgggactcttcagaagaggaggaggaggaagaggaagggctggagatggatgaacgggggccttccccactccacgtcctggaagggctcgaaagttccattgcagctgaaatgcccagcattccctgccttaccaaaattcctgacgtgcccaaccttcctgaaattcccagccgctgtgaaattcccgaaggttctcgccttcctagtctctctgacatttccgatgtttttgagatgccctgccttccagccatacctagtgtccccaacacccccagtctgtctagcactcccaccctctcctgtgactcctggctccaagggcctctgcaggaaccagctgaggctccagccaccaggagagaactgttttctgggagcaatcctgggaaactgggagagccgccttcaggaggcaaggcagggccagaggaggatgaagaaggggtatcattcacagacttccagccccaggatgtcacccaacatcagggattcccagatgagctggcattccgctcttgctcagaaatccggagcgcctggcaggcattggaacagggacagctggcccggccaggcttcccagagccactgctgatcctggaggattcggatctgggtggagacagcgggagcgggaaggcaggagccccgagttcagaaaggacggcgtcccgagtgcgagagctggcccggctttacagcgagcggatccagcagatgcagcgggcggagactcgggcatcagccaatgccccgcgccgccggcctcgggttctggcccaaccccagccatccccctgtctgccccaggagcaggcagagccaggtgaggtccgggtacgtggttggcagaggtggtccccgctggagtagtggtcctgactcgatcctcttttcgcattcagggctcctgcctgcctttggacacgtgctggtatgtgagctggccttcccactgacatgtgcccaggagtctgtccccctgggtcctgctgtctgggttcaagctgccatacctttgtcaaagcagggaggcagcccggatggccagggtctacatgtttccaatttgcctaagcaagaccttccgggcatccacgtttcagctgctacccttttgcctgagcaaggaggttcccggcatgtccaggctccagccgccacacctttgcccaagcaagaaggccccctgcacctccaggtgccggctcttacaactttctctgatcaaggccacccagaaatccaagttccagccaccactcctttgcctgagcatagaagtcacatggttataccagctccatccaccgccttttgtcctgagcagggacactgtgcggacatccacgttcccaccactccagctttgcccaaggagatttgttctgatttcacagtttcagtcaccacccctgtgcccaagcaagaaggtcacctagacagcgagagcccaaccaatatcccactgacaaagcaaggaggttccagggatgttcagggcccagaccctgtctgcagtcaacccatccagcctttgtcttggcatggaagcagcctggatccccagggcccaggcgacaccctaccacccttgccatgtcacctcccagaccttcagattccaggtacctcacctttgcctgcacatggaagccacctggaccatcggatcccagccaacgccccactgtctttgtcccaggagctcccagacactcaggttccagctaccacacctttgcccctgccacaagtcctcacagacatctgggtccaagccctcccaacttcacccaagcagggaagcctcccagacatccagggtccagcggctgcacctccacttccggagccaagccttacagatacacaggtccaaaaactcacaccttcgttggagcagaagagcctcatagatgcccatgttccagctgccacacctttacctgagagaggaggctctctagacattcagggcctctcacccaccccagttcagaccaccatggttttgtccaaaccaggaggctccttagcctctcacgttgccaggttggagtcttcagacttgacgccacctcatagtcccccaccttccagccgtcagctcctgggccccaatgcagctgccctctccagatacctggcagcctcatatatcagccagagcctggctcggcggcaggggcctgggggaggggcccccgcagcctcccggggctcctggtcctctgctcccacgtcacgggcatcttcgccgcccccccagccccagccaccacctcccccagccaggcggctcagctatgccacgacggttaacatccacgtgggcgggggtgggcggctgcggccagccaaggcccaggtccggttgaaccaccctgctctcttggcctccacacaggaatctatgggccttcacagggcccagggggctcctgatgcccccttccacatgtgagccaggacatgaggcttccctgaagcaaggatttcagccagatgccatagaccctcagaacttgacctggaagtccagacactgaacgcaggcctcaaaactgctgcggccttccaactcctggtatctgcatcggcgaatggcccttcttgccttgatccacagggatggggaagggaggaatgtcattaatgttttgttaatactgattctttcatgcaatgatgtgtattttcccattctggaggctgtgggagatgacaagacaatgaatgggaaggtctgacacagaacaaatcagcggttctgaaagcttggggaatctcagactcctttgagaattattggaaaatggacccactataacttgg

SEQ ID NO: 10138 - protein, 572 aa, Homo sapiens; identical to SEQ ID NO: 10136

SEQ ID NO: 10139 - DNA, 4820 bp, Homo sapiens
gtgagaccctgtctcaaataaataaataaaaattttaagagaaaaataaaaaaatttaaaaattgagccaggtacggtggctcacctgtaatcccagcactttgggaggccgaggtaggtggatcatctgagatcaggaatttgagaccaggctggccaacaaggagaaaccccgactctactaaaaatacaaaaattagctggacattgtggcaggcgcctgtaatcccagctactcaggaggctgaggcagcagaatcgcttgaacccgggaggcggagattgcagtgagcagagatggcgccattgcactgcaggctgggcgacagagcgagactccatctcaaaacaaacaaacgcaaaagaaggggattgggacttggggtcctctatgtgagggaggagtcttggctcttgccttccattgctttccctcctcacagcacgctggcagcgaaggggaactctaccctccagaatctcagccaccagtttcaggctctgcaccccctgaggacctggaggatgctggacccccaacactggacccctctgggacctcaatcactgaagaaatcctggaactgctgaatcagcgaggccttcgagatccagggccgtccacccatgacattcccaagttccccggagactcccaggtgcctggcgacagcgaaaccctcacattccaagccctgcccagccgggactcttcagaagaggaggaggaggaagaggaagggctggagatggatgaacgggggccttccccactccacgtcctggaagggctcgaaagttccattgcagctgaaatgcccagcattccctgccttaccaaaattcctgacgtgcccaaccttcctgaaattcccagccgctgtgaaattcccgaaggttctcgccttcctagtctctctgacatttccgatgtttttgagatgccctgccttccagccatacctagtgtccccaacacccccagtctgtctagcactcccaccctctcctgtgactcctggctccaagggcctctgcaggaaccagctgaggctccagccaccaggagagaactgttttctgggagcaatcctgggaaactgggagagccgccttcaggaggcaaggcagggccagaggaggatgaagaaggggtatcattcacagacttccagccccaggatgtcacccaacatcagggattcccagatgagctggcattccgctcttgctcagaaatccggagcgcctggcaggcattggaacagggacagctggcccggccaggcttcccagagccactgctgatcctggaggattcggatctgggtggagacagcgggagcgggaaggcaggagccccgagttcagaaaggacggcgtcccgagtgcgagagctggcccggctttacagcgagcggatccagcagatgcagcgggcggagactcgggcatcagccaatgccccgcgccgccggcctcgggttctggcccaaccccagccatccccctgtctgccccaggagcaggcagagccaggtgaggtccgggtacgtggttggcagaggtggtccccgctggagtagtggtcctgactcgatcctcttttcgcattcagggctcctgcctgcctttggacacgtgctggtatgtgagctggccttcccactgacatgtgcccaggagtctgtccccctgggtcctgctgtctgggttcaagctgccatacctttgtcaaagcagggaggcagcccggatggccagggtctacatgtttccaatttgcctaagcaagaccttccgggcatccacgtttcagctgctacccttttgcctgagcaaggaggttcccggcatgtccaggctccagccgccacacctttgcccaagcaagaaggccccctgcacctccaggtgccggctcttacaactttctctgatcaaggccacccagaaatccaagttccagccaccactcctttgcctgagcatagaagtcacatggttataccagctccatccaccgccttttgtcctgagcagggacactgtgcggacatccacgttcccaccactccagctttgcccaaggagatttgttctgatttcacagtttcagtcaccacccctgtgcccaagcaagaaggtcacctagacagcgagagcccaaccaatatcccactgacaaagcaaggaggttccagggatgttcagggcccagaccctgtctgcagtcaacccatccagcctttgtcttggcatggaagcagcctggatccccagggcccaggcgacaccctaccacccttgccatgtcacctcccagaccttcagattccaggtacctcacctttgcctgcacatggaagccacctggaccatcggatcccagccaacgccccactgtctttgtcccaggagctcccagacactcaggttccagctaccacacctttgcccctgccacaagtcctcacagacatctgggtccaagccctcccaacttcacccaagcagggaagcctcccagacatccagggtccagcggctgcacctccacttccggagccaagccttacagatacacaggtccaaaaactcacaccttcgttggagcagaagagcctcatagatgcccatgttccagctgccacacctttacctgagagaggaggctctctagacattcagggcctctcacccaccccagttcagaccaccatggttttgtccaaaccaggaggctccttagcctctcacgttgccaggttggagtcttcagacttgacgccacctcatagtcccccaccttccagccgtcagctcctgggccccaatgcagctgccctctccagatacctggcagcctcatatatcagccagagcctggctcggcggcaggggcctgggggaggggcccccgcagcctcccggggctcctggtcctctgctcccacgtcacgggcatcttcgccgcccccccagccccagccaccacctcccccagccaggcggctcagctatgccacgacggttaacatccacgtgggcgggggtgggcggctgcggccagccaaggcccaggtccggttgaaccaccctgctctcttggcctccacacaggaatctatgggccttcacagggcccagggggctcctgatgcccccttccacatgtgagccaggacatgaggcttccctgaagcaaggatttcagccagatgccatagaccctcagaacttgacctggaagtccagacactgaacgcaggcctcaaaactgctgcggccttccaactcctggtatctgcatcggcgaatggcccttcttgccttgatccacagggatggggaagggaggaatgtcattaatgttttgttaatactgattctttcatgcaatgatgtgtattttcccattctggaggctgtgggagatgacaagacaatgaatgggaaggtctgacacagaacaaatcagcggttctgaaagcttggggaatctcagactcctttgagaattattggaaaatggacccactataacttggcgtgtgtgtgaactgcttgatgcccatccaggaaagccaagttaagaagctttgcttcaagtagacactagaaatccattcccttggcaatttatacagttcacgtctcccaccatccgttcatctcacccaccctgccatctctccacctatccatctggctattgctccatctagctttcccgctccatctacccatcttccaatccatcatctcacgtatctgccttgcttatccaactgtctgccttattcacccacccatccctttatcattctaaccccatctggcattccatccctccatttatccatcttcccacttacccatcttctccatccagcactccgttcatcagtccgtctctccctccatatttccatctgtccattcatccactcattttgccatccatacatattcacccagccatctcccaatccatcgacataccccatccctccctcactggactctccggggtcttagtactatgatacttcagagacaattccatgctgatacgggggagatcaattttggggctctgggataagtctgtcccacatctgtctgatttcccttggcatccttcccgtcagttcctcttgaatatcccagttcttgtacccactcacatacctcagatcccttcactcctccccgcagtttgcagcctctacaattcatccacatgctccctcccccagcaaaataattcaggtcgtggagacaaaaggcttttatgttaggttctgtctgcccccttgttccagcagtggtatgcccagtgagaggcacaatttaaacggtttctttggtgatgatattagctactttcatcaaatacttagcctcttgtgctttagcacattatttatgtaagctcccctaggattctctgaagcaccctggtgtcctggctgtgaattcaagtcccatctttacttatttggtgtgggtcctccctctgagccggttttctcatctacaaaatgaagacaacagtacttccctcctgggatcattgaaagatttagggagcatatccttccacttcccaaacatatttgaacctctgacttgcttaggagcatcattcaaatcacagatcccccagtatctagtcccaacctattgaatcaggatccccagggaaggaggagcttgggaatctgatttttttttttttttttagataaagtctcactctgtcacccaggcttgagtgcagtggcaaaatcttggctcattgcaacctccacctc

SEQ ID NO: 10140 - protein, 572 aa, Homo sapiens; identical to SEQ ID NO: 10136

SEQ ID NO: 10141 - DNA, 564 bp, Homo sapiens
ccaggagccccgggaggctgcgggggcccctcccccaggcccctgccgccgagccaggctctggctgatatatgaggctgccaggtatctggagagggcagctgcattggggcccaggagctgacggctggaaggtgggggactatgaggtggcgtcaagtctgaagactccaacctggcaacgtgagaggctaaggagcctcctggtttggacaaaaccatggtggtctgaactggggtgggtgagaggccctgaatgtctagagagcctcctctctcaggtaaaggtgtggcagctggaacatgggcatctatgaggctcttctgctccaacgaaggtgtgagtttttggacctgtgtatctgtaaggcttggctccggaagtggaggtgcagccgctggaccctggatgtctgggagctgtccctgttccaatgcctgccaggcgctccggatttctgagcaagagcggaatgccagctcatctgggaatccctgatgttgggtgacatcctggggctggaagtctgtgaatgataccccttcttcatcctcctctggccc

SEQ ID NO: 10142 - protein, 80 aa, Homo sapiens
MSREPPLSGKGVAAGTWASMRLFCSNEGVSFWTCVSVRLGSGSGGAAAGPWMSGSCPCSNACQALRISEQERNASSSGNP

SEQ ID NO: 10143 - DNA, 1295 bp, Homo sapiens
ccaacatcagggattcccagatgagctggcattccgctcttgctcagaaatccggagcgcctggcaggcattggaacagggacagctggcccggccaggcttcccagagccactgctgatcctggaggattcggatctgggtggagacagcgggagcgggaaggcaggagccccgagttcagaaaggacggcgtcccgagtgcgagagctggcccggctttacagcgagcggatccagcagatgcagcgggcggagactcgggcatcagccaatgccccgcgccgccggcctcgggttctggcccaaccccagccatccccctgtctgccccaggagcaggcagagccaggtgaggtccgggtacgtggttggcagaggtggtccccgctggagtagtggtcctgactcgatcctcttttcgcattcagggctcctgcctgcctttggacacgtgctggtatgtgagctggccttcccactgacatgtgcccaggagtctgtccccctgggtcctgctgtctgggttcaagctgccatacctttgtcaaagcagggaggcagcccggatggccagggtctacatgtttccaatttgcctaagcaagaccttccgggcatccacgtttcagctgctacccttttgcctgagcaaggaggttcccggcatgtccaggctccagccgccacacctttgcccaagcaagaaggccccctgcacctccaggtgccggctcttacaactttctctgatcaaggccacccagaaatccaagttccagccaccactcctttgcctgagcatagaagtcacatggttataccagctccatccaccgccttttgtcctgagcagggacactgtgcggacatccacgttcccaccactccagctttgcccaaggagatttgttctgatttcacagtttcagtcaccacccctgtgcccaagcaagatttcagccagatgccatagaccctcagaacttgacctggaagtccagacactgaacgcaggcctcaaaactgctgcggccttccaactcctggtatctgcatcggcgaatggcccttcttgccttgatccacagggatggggaagggaggaatgtcattaatgttttgttaatactgattctttcatgcaatgatgtgtattttcccattctggaggctgtgggagatgacaagacaatgaatgggaaggtctgacacagaacaaatcagcggttctgaaagcttggggaatctcagactcctttgagaattattggaaaatggacccactataacttgg

SEQ ID NO: 10144 - protein, 233 aa, Homo sapiens
MPRAAGLGFWPNPSHPPVCPRSRQSQVRSGYVVGRGGPRWSSGPDSILFSHSGLLPAFGHVLVCELAFPLTCAQESVPLGPAVWVQAAIPLSKQGGSPDGQGLHVSNLPKQDLPGIHVSAATLLPEQGGSRHVQAPAATPLPKQEGPLHLQVPALTTFSDQGHPEIQVPATTPLPEHRSHMVIPAPSTAFCPEQGHCADIHVPTTPALPKEICSDFTVSVTTPVPKQDFSQMP

SEQ ID NO: 10145 - DNA, 1469 bp, Homo sapiens
acctttgtcaaagcagggaggcagcccggatggccagggtctacatgtttccaatttgcctaagcaagaccttccgggcatccacgtttcagctgctacccttttgcctgagcaaggaggttcccggcatgtccaggctccagccgccacacctttgcccaagcaagaaggccccctgcacctccaggtgccggctcttacaactttctctgatcaaggccacccagaaatccaagttccagccaccactcctttgcctgagcatagaagtcacatggttataccagctccatccaccgccttttgtcctgagcagggacactgtgcggacatccacgttcccaccactccagctttgcccaaggagatttgttctgatttcacagtttcagtcaccacccctgtgcccaagcaagaaggtcacctagacagcgagagcccaaccaatatcccactgacaaagcaaggaggttccagggatgttcagggcccagaccctgtctgcagtcaacccatccagcctttgtcttggcatggaagcagcctggatccccagggcccaggcgacaccctaccacccttgccatgtcacctcccagaccttcagattccaggtacctcacctttgcctgcacatggaagccacctggaccatcggatcccagccaacgccccactgtctttgtcccaggagctcccagacactcaggttccagctaccacacctttgcccctgccacaagtcctcacagacatctgggtccaagccctcccaacttcacccaagcagggaagcctcccagacatccagggtccagcggctgcacctccacttccggagccaagccttacagatacacaggtccaaaaactcacaccttcgttggagcagaagagcctcatagatgcccatgttccagctgccacacctttacctgagagaggaggctctctagacattcagggcctctcacccaccccagttcagaccaccatggttttgtccaaaccaggaggctccttagcctctcacgttgccaggaatctatgggccttcacagggcccagggggctcctgatgcccccttccacatgtgagccaggacatgaggcttccctgaagcaaggatttcagccagatgccatagaccctcagaacttgacctggaagtccagacactgaacgcaggcctcaaaactgctgcggccttccaactcctggtatctgcatcggcgaatggcccttcttgccttgatccacagggatggggaagggaggaatgtcattaatgttttgttaatactgattctttcatgcaatgatgtgtattttcccattctggaggctgtgggagatgacaagacaatgaatgggaaggtctgacacagaacaaatcagcggttctgaaagcttggggaatctcagactcctttgagaattattggaaaatggacccactataacttgg

SEQ ID NO: 10146 - protein, 302 aa, Homo sapiens
MVIPAPSTAFCPEQGHCADIHVPTTPALPKEICSDFTVSVTTPVPKQEGHLDSESPTNIPLTKQGGSRDVQGPDPVCSQPIQPLSWHGSSLDPQGPGDTLPPLPCHLPDLQIPGTSPLPAHGSHLDHRIPANAPLSLSQELPDTQVPATTPLPLPQVLTDIWVQALPTSPKQGSLPDIQGPAAAPPLPEPSLTDTQVQKLTPSLEQKSLIDAHVPAATPLPERGGSLDIQGLSPTPVQTTMVLSKPGGSLASHVARNLWAFTGPRGLLMPPSTCEPGHEASLKQGFQPDAIDPQNLTWKSRH

SEQ ID NO: 10147 - DNA, 2738 bp, Homo sapiens
acctttgtcaaagcagggaggcagcccggatggccagggtctacatgtttccaatttgcctaagcaagaccttccgggcatccacgtttcagctgctacccttttgcctgagcaaggaggttcccggcatgtccaggctccagccgccacacctttgcccaagcaagaaggccccctgcacctccaggtgccggctcttacaactttctctgatcaaggccacccagaaatccaagttccagccaccactcctttgcctgagcatagaagtcacatggttataccagctccatccaccgccttttgtcctgagcagggacactgtgcggacatccacgttcccaccactccagctttgcccaaggagatttgttctgatttcacagtttcagtcaccacccctgtgcccaagcaagaaggtcacctagacagcgagagcccaaccaatatcccactgacaaagcaaggaggttccagggatgttcagggcccagaccctgtctgcagtcaacccatccagcctttgtcttggcatggaagcagcctggatccccagggcccaggcgacaccctaccacccttgccatgtcacctcccagaccttcagattccaggtacctcacctttgcctgcacatggaagccacctggaccatcggatcccagccaacgccccactgtctttgtcccaggagctcccagacactcaggttccagctaccacacctttgcccctgccacaagtcctcacagacatctgggtccaagccctcccaacttcacccaagcagggaagcctcccagacatccagggtccagcggctgcacctccacttccggagccaagccttacagatacacaggtccaaaaactcacaccttcgttggagcagaagagcctcatagatgcccatgttccagctgccacacctttacctgagagaggaggctctctagacattcagggcctctcacccaccccagttcagaccaccatggttttgtccaaaccaggaggctccttagcctctcacgttgccaggaatctatgggccttcacagggcccagggggctcctgatgcccccttccacatgtgagccaggacatgaggcttccctgaagcaaggatttcagccagatgccatagaccctcagaacttgacctggaagtccagacactgaacgcaggcctcaaaactgctgcggccttccaactcctggtatctgcatcggcgaatggcccttcttgccttgatccacagggatggggaagggaggaatgtcattaatgttttgttaatactgattctttcatgcaatgatgtgtattttcccattctggaggctgtgggagatgacaagacaatgaatgggaaggtctgacacagaacaaatcagcggttctgaaagcttggggaatctcagactcctttgagaattattggaaaatggacccactataacttggcgtgtgtgtgaactgcttgatgcccatccaggaaagccaagttaagaagctttgcttcaagtagacactagaaatccattcccttggcaatttatacagttcacgtctcccaccatccgttcatctcacccaccctgccatctctccacctatccatctggctattgctccatctagctttcccgctccatctacccatcttccaatccatcatctcacgtatctgccttgcttatccaactgtctgccttattcacccacccatccctttatcattctaaccccatctggcattccatccctccatttatccatcttcccacttacccatcttctccatccagcactccgttcatcagtccgtctctccctccatatttccatctgtccattcatccactcattttgccatccatacatattcacccagccatctcccaatccatcgacataccccatccctccctcactggactctccggggtcttagtactatgatacttcagagacaattccatgctgatacgggggagatcaattttggggctctgggataagtctgtcccacatctgtctgatttcccttggcatccttcccgtcagttcctcttgaatatcccagttcttgtacccactcacatacctcagatcccttcactcctccccgcagtttgcagcctctacaattcatccacatgctccctcccccagcaaaataattcaggtcgtggagacaaaaggcttttatgttaggttctgtctgcccccttgttccagcagtggtatgcccagtgagaggcacaatttaaacggtttctttggtgatgatattagctactttcatcaaatacttagcctcttgtgctttagcacattatttatgtaagctcccctaggattctctgaagcaccctggtgtcctggctgtgaattcaagtcccatctttacttatttggtgtgggtcctccctctgagccggttttctcatctacaaaatgaagacaacagtacttccctcctgggatcattgaaagatttagggagcatatccttccacttcccaaacatatttgaacctctgacttgcttaggagcatcattcaaatcacagatcccccagtatctagtcccaacctattgaatcaggatccccagggaaggaggagcttgggaatctgatttttttttttttttttagataaagtctcactctgtcacccaggcttgagtgcagtggcaaaatcttggctcattgcaacctccacctc

SEQ ID NO: 10148 - protein, 302 aa, Homo sapiens; identical to SEQ ID NO: 10146

SEQ ID NO: 10149 - DNA, 747 bp, Homo sapiens
accgccttttgtcctgagcagggacactgtgcggacatccacgttcccaccactccagctttgcccaaggagatttgttctgatttcacagtttcagtcaccacccctgtgcccaagcaagaaggtcacctagacagcgagagcccaaccaatatcccactgacaaagcaaggaggttccagggatgttcagggcccagaccctgtctgcagtcaacccatccagcctttgtcttggcatggaagcagcctggatccccagggcccaggcgacaccctaccacccttgccatgtcacctcccagaccttcagattccaggaatctatgggccttcacagggcccagggggctcctgatgcccccttccacatgtgagccaggacatgaggcttccctgaagcaaggatttcagccagatgccatagaccctcagaacttgacctggaagtccagacactgaacgcaggcctcaaaactgctgcggccttccaactcctggtatctgcatcggcgaatggcccttcttgccttgatccacagggatggggaagggaggaatgtcattaatgttttgttaatactgattctttcatgcaatgatgtgtattttcccattctggaggctgtgggagatgacaagacaatgaatgggaaggtctgacacagaacaaatcagcggttctgaaagcttggggaatctcagactcctttgagaattattggaaaatggacccactataacttgg

SEQ ID NO: 10150 - protein, 63 aa, Homo sapiens
MFRAQTLSAVNPSSLCLGMEAAWIPRAQATPYHPCHVTSQTFRFQESMGLHRAQGAPDAPFHM

SEQ ID NO: 10151 - DNA, 2016 bp, Homo sapiens
accgccttttgtcctgagcagggacactgtgcggacatccacgttcccaccactccagctttgcccaaggagatttgttctgatttcacagtttcagtcaccacccctgtgcccaagcaagaaggtcacctagacagcgagagcccaaccaatatcccactgacaaagcaaggaggttccagggatgttcagggcccagaccctgtctgcagtcaacccatccagcctttgtcttggcatggaagcagcctggatccccagggcccaggcgacaccctaccacccttgccatgtcacctcccagaccttcagattccaggaatctatgggccttcacagggcccagggggctcctgatgcccccttccacatgtgagccaggacatgaggcttccctgaagcaaggatttcagccagatgccatagaccctcagaacttgacctggaagtccagacactgaacgcaggcctcaaaactgctgcggccttccaactcctggtatctgcatcggcgaatggcccttcttgccttgatccacagggatggggaagggaggaatgtcattaatgttttgttaatactgattctttcatgcaatgatgtgtattttcccattctggaggctgtgggagatgacaagacaatgaatgggaaggtctgacacagaacaaatcagcggttctgaaagcttggggaatctcagactcctttgagaattattggaaaatggacccactataacttggcgtgtgtgtgaactgcttgatgcccatccaggaaagccaagttaagaagctttgcttcaagtagacactagaaatccattcccttggcaatttatacagttcacgtctcccaccatccgttcatctcacccaccctgccatctctccacctatccatctggctattgctccatctagctttcccgctccatctacccatcttccaatccatcatctcacgtatctgccttgcttatccaactgtctgccttattcacccacccatccctttatcattctaaccccatctggcattccatccctccatttatccatcttcccacttacccatcttctccatccagcactccgttcatcagtccgtctctccctccatatttccatctgtccattcatccactcattttgccatccatacatattcacccagccatctcccaatccatcgacataccccatccctccctcactggactctccggggtcttagtactatgatacttcagagacaattccatgctgatacgggggagatcaattttggggctctgggataagtctgtcccacatctgtctgatttcccttggcatccttcccgtcagttcctcttgaatatcccagttcttgtacccactcacatacctcagatcccttcactcctccccgcagtttgcagcctctacaattcatccacatgctccctcccccagcaaaataattcaggtcgtggagacaaaaggcttttatgttaggttctgtctgcccccttgttccagcagtggtatgcccagtgagaggcacaatttaaacggtttctttggtgatgatattagctactttcatcaaatacttagcctcttgtgctttagcacattatttatgtaagctcccctaggattctctgaagcaccctggtgtcctggctgtgaattcaagtcccatctttacttatttggtgtgggtcctccctctgagccggttttctcatctacaaaatgaagacaacagtacttccctcctgggatcattgaaagatttagggagcatatccttccacttcccaaacatatttgaacctctgacttgcttaggagcatcattcaaatcacagatcccccagtatctagtcccaacctattgaatcaggatccccagggaaggaggagcttgggaatctgatttttttttttttttttagataaagtctcactctgtcacccaggcttgagtgcagtggcaaaatcttggctcattgcaacctccacctc

SEQ ID NO: 10152 - protein, 63 aa, Homo sapiens; identical to SEQ ID NO: 10150

SEQ ID NO: 10153 - DNA, 1084 bp, Homo sapiens
tgtgagctgaaagcaggtaaaggaagtatccagacagaggcactggtaaaagacctggagctgggaagggtctagggaccagggacaggttgtactgtaattctggaaacctgtgaggctcaaagaaagggcagagagctcaggtgggaaatagaaaaggcacctgaacagtccagggatggctttcgactacttgaaacagccttgggagtttcagaagctattggaatgctccttactgttcagccttctaagaaccagtcttagaggtagggtgtctgaggtccagtgagggacacaagtaggagggagcccagatcttgttccctttaccttgcctatatttcttaacaccacttcagcagtctcatatctggcttttttgactttcctcttctctgggtctgtagagggccttggagtgacaccctgacccccatccactagtacttgaaggccagtggtggcagaagccacagaaacaagaagcccagtgagatggctaagctgcccagcatgtaacttaaatccctgttcattccccattcctttagctgctggagccagttctgcttctcggcaaggagcgatttgctggtgtagacatccgtgtccgtgtaaagggtggtggtcacgtggcccagatttatgctatccgtcagtccatctccaaagccctggtggcctattaccagaaatgtgagtgagcatgggtccttcccatgaggtagatgggtgtgtggggatcaagtcaaggactctgtgtgattatctaaatcctcgtccctgctcttcttgccagatgtggatgaggcttccaagaaggagatcaaagacatcctcatccagtatgaccggaccctgctggtagctgaccctcgtcgctgcgagtccaaaaagtttggaggccctggtgcccgcgctcgctaccagaaatcctaccgataagcccatcgtgactcaaaactcacttgtataataaacagtttttgagggattttaaagtttcaagaactgtgtgtggccttatgtgttggtattggatgtttaaccagacagaaatcagtaaacatcctggacctat

SEQ ID NO: 10154 - protein, 53 aa, Homo sapiens
MGPSHEVDGCVGIKSRTLCDYLNPRPCSSCQMWMRLPRRRSKTSSSSMTGPCW

SEQ ID NO: 10155 - DNA, 1629 bp, Homo sapiens
ctacattgcagggtcagttaaaaaaattttttttgagttataaggttcttttttaaaaacagtatcttgctgtcacctaccctggagtgcaatagcacaatcctaatgaactgcagccttaaactcctgagttggagatcctcccacctcagcctttcggttgccaagactacaggcacatcaccacgcctggctcatttgagaaatatttttctgtagacgtggggtctcactttattgcccaggctggtccttggtctcatgtgatccttctgcctggactgggattacaggtgtgatcaccatgcctggcctagaatttaataaaaattctgagatttcctttgtgtagcagatgttgaatgttactgttattggctgtcactgtatttgaaggatttgtatgtgtaccctctgttgagttttggggacatagcagtgatccagatgacttaaggtcttgccttcatggacctgccagcctagttggggagaaggactgggcccaataccagaagctgatccaaagtggtcagaactggggaaggagacctgtgagctgaaagcaggtaaaggaagtatccagacagaggcactggtaaaagacctggagctgggaagggtctagggaccagggacaggttgtactgtaattctggaaacctgtgaggctcaaagaaagggcagagagctcaggtgggaaatagaaaaggcacctgaacagtccagggatggctttcgactacttgaaacagccttgggagtttcagaagctattggaatgctccttactgttcagccttctaagaaccagtcttagaggtagggtgtctgaggtccagtgagggacacaagtaggagggagcccagatcttgttccctttaccttgcctatatttcttaacaccacttcagcagtctcatatctggcttttttgactttcctcttctctgggtctgtagagggccttggagtgacaccctgacccccatccactagtacttgaaggccagtggtggcagaagccacagaaacaagaagcccagtgagatggctaagctgcccagcatgtaacttaaatccctgttcattccccattcctttagctgctggagccagttctgcttctcggcaaggagcgatttgctggtgtagacatccgtgtccgtgtaaagggtggtggtcacgtggcccagatttatggtgagtcccaggaactgggcgcatggaggaggtggctctgggagggaggccttcacagcgctcctgtaccctttaattgtgtgtctttctcacagctatccgtcagtccatctccaaagccctggtggcctattaccagaaatatgtggatgaggcttccaagaaggagatcaaagacatcctcatccagtatgaccggaccctgctggtagctgaccctcgtcgctgcgagtccaaaaagtttggaggccctggtgcccgcgctcgctaccagaaatcctaccgataagcccatcgtgactcaaaactcacttgtataataaacagtttttgagggattttaaagtttcaagaactgtgtgtggccttatgtgttggtattggatgtttaaccagacagaaatcagtaaacatcctggacctat

SEQ ID NO: 10156 - protein, 51 aa, Homo sapiens
MVSPRNWAHGGGGSGREAFTALLYPLIVCLSHSYPSVHLQSPGGLLPEICG

SEQ ID NO: 10157 - DNA, 1581 bp, Homo sapiens
ccttttccggttgcggcgccgcgcggtgaggttgtctagtccacgctcggagccatgccgtccaagggcccgctgcagtctgtgcaggtcttcggacgcaagaagacagcgacagctgtggcgcactgcaaacgcggcaatggtctcatcaaggtgaacgggcggcccctggagatgattgagccgcgcacgctacagtacaaggtgctgggatccggcaccggcgttgagtggatggaggactcttggagacagagatgttgtagctcttgaaagctgggggggctggcatcagcaacgggatgtttagaagttgtgttgggtgtagaacagtggggtatttggcaatagagctgggcttggggttcagaagatgtaaaagctgagatggggttgttgaagattaagggtttgctttgagaactgggatgttaggaagctcacctcactggggcggggggacccaaaggggtctagggaccagggacaggttgtactgtaattctggaaacctgtgaggctcaaagaaagggcagagagctcaggtgggaaatagaaaaggcacctgaacagtccagggatggctttcgactacttgaaacagccttgggagtttcagaagctattggaatgctccttactgttcagccttctaagaaccagtcttagaggtagggtgtctgaggtccagtgagggacacaagtaggagggagcccagatcttgttccctttaccttgcctatatttcttaacaccacttcagcagtctcatatctggcttttttgactttcctcttctctgggtctgtagagggccttggagtgacaccctgacccccatccactagtacttgaaggccagtggtggcagaagccacagaaacaagaagcccagtgagatggctaagctgcccagcatgtaacttaaatccctgttcattccccattcctttagctgctggagccagttctgcttctcggcaaggagcgatttgctggtgtagacatccgtgtccgtgtaaagggtggtggtcacgtggcccagatttatggtgagtcccaggaactgggcgcatggaggaggtggctctgggagggaggccttcacagcgctcctgtaccctttaattgtgtgtctttctcacagctatccgtcagtccatctccaaagccctggtggcctattaccagaaatgtgagtgagcatgggtccttcccatgaggtagatgggtgtgtggggatcaagtcaaggactctgtgtgattatctaaatcctcgtccctgctcttcttgccagatgtggatgaggcttccaagaaggagatcaaagacatcctcatccagtatgaccggaccctgctggtagctgaccctcgtcgctgcgagtccaaaaagtttggaggccctggtgcccgcgctcgctaccagaaatcctaccgataagcccatcgtgactcaaaactcacttgtataataaacagtttttgagggattttaaagtttcaagaactgtgtgtggccttatgtgttggtattggatgtttaaccagacagaaatcagtaaacatcctggacctat

SEQ ID NO: 10158 - protein, 72 aa, Homo sapiens [sequence omitted]

SEQ ID NO: 10159 - DNA, 726 bp, Homo sapiens
ccttttccggttgcggcgccgcgcggtgaggttgtctagtccacgctcggagccatgccgtccaagggcccgctgcagtctgtgcaggtcttcggacgcaagaagacagcgacagctgtggcgcactgcaaacgcggcaatggtctcatcaaggtgaacgggcggcccctggagatgattgagccgcgcacgctacagtacaagctgctggagccagttctgcttctcggcaaggagcgatttgctggtgtagacatccgtgtccgtgtaaagggtggtggtcacgtggcccagatttatggtgagtcccaggaactgggcgcatggaggaggtggctctgggagggaggccttcacagcgctcctgtaccctttaattgtgtgtctttctcacagctatccgtcagtccatctccaaagccctggtggcctattaccagaaatatgtggatgaggcttccaagaaggagatcaaagacatcctcatccagtatgaccggaccctgctggtagctgaccctcgtcgctgcgagtccaaaaagtttggaggccctggtgcccgcgctcgctaccagaaatcctaccgataagcccatcgtgactcaaaactcacttgtataataaacagtttttgagggattttaaagtttcaagaactgtgtgtggccttatgtgttggtattggatgtttaaccagacagaaatcagtaaacatcctggacctat

SEQ ID NO: 10160 - protein, 152 aa, Homo sapiens
MPSKGPLQSVQVFGRKKTATAVAHCKRGNGLIKVNGRPLEMIEPRTLQYKLLEPVLLLGKERFAGVDIRVRVKGGGHVAQIYGESQELGAWRRWLWEGGLHSAPVPFNCVSFSQLSVSPSPKPWWPITRNMWMRLPRRRSKTSSSSMTGPCW

SEQ ID NO: 10161 - DNA, 2604 bp, Homo sapiens
ccttttccggttgcggcgccgcgcggtgaggttgtctagtccacgctcggagccatgccgtccaagggcccgctgcagtctgtgcaggtcttcggacgcaagaagacagcgacagctgtggcgcactgcaaacgcggcaatggtctcatcaaggtgaacgggcggcccctggagatgattgagccgcgcacgctacagtacaaggtgctgggatccggcaccggcgttgagtggatggaggactcttggagacagagatgttgtagctcttgaaagctgggggggctggcatcagcaacgggatgtttagaagttgtgttgggttgttgaagattaagggtttgctttgagaactgggatgttaggaagctcacctcactggggcggggggacccaaagggtgaagggacaccgactattttttattttatttatttgttttgagagggagtctcgctgtgtcgcccaggctggagtgtagtggcgcgatctcggatcactgcaaccttcgcctcccgggttaaagcgattctcctgcctcagcctcttgagtagctgagattacaggcatgcaccaccacgcccggctaatttttgtatttttagtagagacggggtttcgccatattggccagagtggtctcgaactcattacctcaggtgatccaccagcctcggcctcccgaagtgctgggattgcaggcgtcagccaccgtgtgcggccgaatttgggtctgtttaaatgcttgcttgtaaaaggggttcctctgttccctttttgggactctcaatttctttggctcagaatggaaagaaaccagagtctgatttctgccccttctgaactctactacttttaaaagaaagaatatctacattgcagggtcagttaaaaaaattttttttgagttataaggttcttttttaaaaacagtatcttgctgtcacctaccctggagtgcaatagcacaatcctaatgaactgcagccttaaactcctgagttggagatcctcccacctcagcctttcggttgccaagactacaggcacatcaccacgcctggctcatttgagaaatatttttctgtagacgtggggtctcactttattgcccaggctggtccttggtctcatgtgatccttctgcctggactgggattacaggtgtgatcaccatgcctggcctagaatttaataaaaattctgagatttcctttgtgtagcagatgttgaatgttactgttattggctgtcactgtatttgaaggatttgtatgtgtaccctctgttgagttttggggacatagcagtgatccagatgacttaaggtcttgccttcatggacctgccagcctagttggggagaaggactgggcccaataccagaagctgatccaaagtggtcagaactggggaaggagacctgtgagctgaaagcaggtaaaggaagtatccagacagaggcactggtaaaagacctggagctgggaagggtctagggaccagggacaggttgtactgtaattctggaaacctgtgaggctcaaagaaagggcagagagctcaggtgggaaatagaaaaggcacctgaacagtccagggatggctttcgactacttgaaacagccttgggagtttcagaagctattggaatgctccttactgttcagccttctaagaaccagtcttagaggtagggtgtctgaggtccagtgagggacacaagtaggagggagcccagatcttgttccctttaccttgcctatatttcttaacaccacttcagcagtctcatatctggcttttttgactttcctcttctctgggtctgtagagggccttggagtgacaccctgacccccatccactagtacttgaaggccagtggtggcagaagccacagaaacaagaagcccagtgagatggctaagctgcccagcatgtaacttaaatccctgttcattccccattcctttagctgctggagccagttctgcttctcggcaaggagcgatttgctggtgtagacatccgtgtccgtgtaaagggtggtggtcacgtggcccagatttatggtgagtcccaggaactgggcgcatggaggaggtggctctgggagggaggccttcacagcgctcctgtaccctttaattgtgtgtctttctcacagctatccgtcagtccatctccaaagccctggtggcctattaccagaaatgtgagtgagcatgggtccttcccatgaggtagatgggtgtgtggggatcaagtcaaggactctgtgtgattatctaaatcctcgtccctgctcttcttgccagatgtggatgaggcttccaagaaggagatcaaagacatcctcatccagtatgaccggaccctgctggtagctgaccctcgtcgctgcgagtccaaaaagtttggaggccctggtgcccgcgctcgctaccagaaatcctaccgataagcccatcgtgactcaaaactcacttgtataataaacagtttttgagggattttaaagtttcaagaactgtgtgtggccttatgtgttggtattggatgtttaaccagacagaaatcagtaaacatcctggacctat

SEQ ID NO: 10162 - protein, 72 aa, Homo sapiens [sequence omitted]

SEQ ID NO: 10163 - DNA, 2192 bp, Homo sapiens
ccttttccggttgcggcgccgcgcggtgaggttgtctagtccacgctcggagccatgccgtccaagggcccgctgcagtctgtgcaggtcttcggacgcaagaagacagcgacagctgtggcgcactgcaaacgcggcaatggtctcatcaaggtgaacgggcggcccctggagatgattgagccgcgcacgctacagtacaaggtgctgggatccggcaccggcgttgagtggatggaggactcttggagacagagatgttgtagctcttgaaagctgggggggctggcatcagcaacgggatgtttagaagttgtgttgggtgtagaacagtggggtatttggcaatagagctgggcttggggttcagaagatgtaaaagctgagatggggttgttgaagaaaccagagtctgatttctgccccttctgaactctactacttttaaaagaaagaatatctacattgcagggtcagttaaaaaaattttttttgagttataaggttcttttttaaaaacagtatcttgctgtcacctaccctggagtgcaatagcacaatcctaatgaactgcagccttaaactcctgagttggagatcctcccacctcagcctttcggttgccaagactacaggcacatcaccacgcctggctcatttgagaaatatttttctgtagacgtggggtctcactttattgcccaggctggtccttggtctcatgtgatccttctgcctggactgggattacaggtgtgatcaccatgcctggcctagaatttaataaaaattctgagatttcctttgtgtagcagatgttgaatgttactgttattggctgtcactgtatttgaaggatttgtatgtgtaccctctgttgagttttggggacatagcagtgatccagatgacttaaggtcttgccttcatggacctgccagcctagttggggagaaggactgggcccaataccagaagctgatccaaagtggtcagaactggggaaggagacctgtgagctgaaagcaggtaaaggaagtatccagacagaggcactggtaaaagacctggagctgggaagggtctagggaccagggacaggttgtactgtaattctggaaacctgtgaggctcaaagaaagggcagagagctcaggtgggaaatagaaaaggcacctgaacagtccagggatggctttcgactacttgaaacagccttgggagtttcagaagctattggaatgctccttactgttcagccttctaagaaccagtcttagaggtagggtgtctgaggtccagtgagggacacaagtaggagggagcccagatcttgttccctttaccttgcctatatttcttaacaccacttcagcagtctcatatctggcttttttgactttcctcttctctgggtctgtagagggccttggagtgacaccctgacccccatccactagtacttgaaggccagtggtggcagaagccacagaaacaagaagcccagtgagatggctaagctgcccagcatgtaacttaaatccctgttcattccccattcctttagctgctggagccagttctgcttctcggcaaggagcgatttgctggtgtagacatccgtgtccgtgtaaagggtggtggtcacgtggcccagatttatggtgagtcccaggaactgggcgcatggaggaggtggctctgggagggaggccttcacagcgctcctgtaccctttaattgtgtgtctttctcacagctatccgtcagtccatctccaaagccctggtggcctattaccagaaatgtgagtgagcatgggtccttcccatgaggtagatgggtgtgtggggatcaagtcaaggactctgtgtgattatctaaatcctcgtccctgctcttcttgccagatgtggatgaggcttccaagaaggagatcaaagacatcctcatccagtatgaccggaccctgctggtagctgaccctcgtcgctgcgagtccaaaaagtttggaggccctggtgcccgcgctcgctaccagaaatcctaccgataagcccatcgtgactcaaaactcacttgtataataaacagtttttgagggattttaaagtttcaagaactgtgtgtggccttatgtgttggtattggatgtttaaccagacagaaatcagtaaacatcctggacctat

SEQ ID NO: 10164 - protein, 72 aa, Homo sapiens [sequence omitted]

SEQ ID NO: 10165 - DNA, 597 bp, Homo sapiens
gggtggcccctagctttccttttccggttgcggcgccgcgcggtgaggttgtctagtccacgctcggagccatgccgtccaagggcccgctgcagtctgtgcaggtcttcggacgcaagaagacagcgacagctgtggcgcactgcaaacgcggcaatggtctcatcaagctgctggagccagttctgcttctcggcaaggagcgatttgctggtgtagacatccgtgtccgtgtaaagggtggtggtcacgtggcccagatttatgctatccgtcagtccatctccaaagccctggtggcctattaccagaaatatgtggatgaggcttccaagaaggagatcaaagacatcctcatccagtatgaccggaccctgctggtagctgaccctcgtcgctgcgagtccaaaaagtttggaggccctggtgcccgcgctcgctaccagaaatcctaccgataagcccatcgtgactcaaaactcacttgtataataaacagtttttgagggattttaaagtttcaagaactgtgtgtggccttatgtgttggtattggatgtttaaccagacagaaatcagtaaacatcctggacctat

SEQ ID NO: 10166 - protein, 129 aa, Homo sapiens
MPSKGPLQSVQVFGRKKTATAVAHCKRGNGLIKLLEPVLLLGKERFAGVDIRVRVKGGGHVAQIYAIRQSISKALVAYYQKYVDEASKKEIKDILIQYDRTLLVADPRRCESKKFGGPGARARYQKSYR

SEQ ID NO: 10167 - DNA, 2547 bp, Homo sapiens
ctcccgtcgcgacgcagtgctcaaggcgcctgcgcagaccctgaaaagcggccagggtggcccctagctttccttttccggttgcggcgccgcgcggtgaggttgtctagtccacgctcggagccatgccgtccaagggcccgctgcagtctgtgcaggtcttcggacgcaagaagacagcgacagctgtggcgcactgcaaacgcggcaatggtctcatcaaggtgaacgggcggcccctggagatgattgagccgcgcacgctacagtacaaggtgctgggatccggcaccggcgttgagtggatggaggactcttggagacagagatgttgtagctcttgaaagctgggggggctggcatcagcaacgggatgtttagaagttgtgttgggtgtagaacagtggggtatttggcaatagagctgggcttggggttcagaagatgtaaaagctgagatggggttgttgaagattaagggtttgctttgagaactgggatgttaggaagctcacctcactggggcggggggacccaaagggtgaagggacaccgactattttttattttatttatttgttttgagagggagtctcgctgtgtcgcccaggctggagtgtagtggcgcgatctcggatcactgcaaccttcgcctcccgggttaaagcgattctcctgcctcagcctcttgagtagctgagattacaggcatgcaccaccacgcccggctaatttttgtatttttagtagagacggggtttcgccatattggccagagtggtctcgaactcattacctcaggtgatccaccagcctcggcctcccgaagtgctgggattgcaggcgtcagccaccgtgtgcggccgaatttgggtctgtttaaatgcttgcttgtaaaaggggttcctctgttccctttttgggactctcaatttctttggctcagaatggaaagaaaccagagtctgatttctgccccttctgaactctactacttttaaaagaaagaatatctacattgcagggtcagttaaaaaaattttttttgagttataaggttcttttttaaaaacagtatcttgctgtcacctaccctggagtgcaatagcacaatcctaatgaactgcagccttaaactcctgagttggagatcctcccacctcagcctttcggttgccaagactacaggcacatcaccacgcctggctcatttgagaaatatttttctgtagacgtggggtctcactttattgcccaggctggtccttggtctcatgtgatccttctgcctggactgggattacaggtgtgatcaccatgcctggcctagaatttaataaaaattctgagatttcctttgtgtagcagatgttgaatgttactgttattggctgtcactgtatttgaaggatttgtatgtgtaccctctgttgagttttggggacatagcagtgatccagatgacttaaggtcttgccttcatggacctgccagcctagttggggagaaggactgggcccaataccagaagctgatccaaagtggtcagaactggggaaggagacctgtgagctgaaagcaggtaaaggaagtatccagacagaggcactggtaaaagacctggagctgggaagggtctagggaccagggacaggttgtactgtaattctggaaacctgtgaggctcaaagaaagggcagagagctcaggtgggaaatagaaaaggcacctgaacagtccagggatggctttcgactacttgaaacagccttgggagtttcagaagctattggaatgctccttactgttcagccttctaagaaccagtcttagaggtagggtgtctgaggtccagtgagggacacaagtaggagggagcccagatcttgttccctttaccttgcctatatttcttaacaccacttcagcagtctcatatctggcttttttgactttcctcttctctgggtctgtagagggccttggagtgacaccctgacccccatccactagtacttgaaggccagtggtggcagaagccacagaaacaagaagcccagtgagatggctaagctgcccagcatgtaacttaaatccctgttcattccccattcctttagctgctggagccagttctgcttctcggcaaggagcgatttgctggtgtagacatccgtgtccgtgtaaagggtggtggtcacgtggcccagatttatgctatccgtcagtccatctccaaagccctggtggcctattaccagaaatatgtggatgaggcttccaagaaggagatcaaagacatcctcatccagtatgaccggaccctgctggtagctgaccctcgtcgctgcgagtccaaaaagtttggaggccctggtgcccgcgctcgctaccagaaatcctaccgataagcccatcgtgactcaaaactcacttgtataataaacagtttttgagggattttaaagtttcaagaactgtgtgtggccttatgtgttggtattggatgtttaaccagacagaaatcagtaaacatcctggacctat

SEQ ID NO: 10168 - protein, 72 aa, Homo sapiens [sequence omitted]

SEQ ID NO: 10169 - DNA, 791 bp, Homo sapiens
agttgctgggaagaggagtctcggaagggaaataaactcaggagaaagagcccgccacttccgcctcacagggcccgcccgctctgagcgcctaagggccttcccgccgctgaccagacgccccgcccgttagccgcaacagaagccgtaaagctctctcccgtcgcgacgcagtgctcaaggcgcctgcgcagaccctgaaaagcggccagggtggcccctagctttccttttccggttgcggcgccgcgcggtgaggttgtctagtccacgctcggagccatgccgtccaagggcccgctgcagtctgtgcaggtcttcggacgcaagaagacagcgacagctgtggcgcactgcaaacgcggcaatggtctcatcaaggtgaacgggcggcccctggagatgattgagccgcgcacgctacagtacaagctgctggagccagttctgcttctcggcaaggagcgatttgctggtgtagacatccgtgtccgtgtaaagggtggtggtcacgtggcccagatttatgctatccgtcagtccatctccaaagccctggtggcctattaccagaaatatgtggatgaggcttccaagaaggagatcaaagacatcctcatccagtatgaccggaccctgctggtagctgaccctcgtcgctgcgagtccaaaaagtttggaggccctggtgcccgcgctcgctaccagaaatcctaccgataagcccatcgtgactcaaaactcacttgtataataaacagtttttgagggattttaaagtttcaagaact

SEQ ID NO: 10170 - protein, 146 aa, Homo sapiens [sequence omitted]

SEQ ID NO: 10171 - DNA, 528 bp, Homo sapiens
gggtggcccctagctttccttttccggttgcggcgccgcgcggtgaggttgtctagtccacgctcggagccatgccgtccaagggcccgctgcagtctgtgcaggtcttcggacgcaagaagacagcgacagctgtggcgcactgcaaacgcggcaatggtctcatcaagctgctggagccagttctgcttctcggcaaggagcgatttgctggtgtagacatccgtgtccgtgtaaagggtggtggtcacgtggcccagatttatgctatccgtcagtccatctccaaagccctggtggcctattaccagaaatatgtggatgaggcttccaagaaggagatcaaagacatcctcatccagtatgaccggaccctgctggtagctgaccctcgtcgctgcgagtccaaaaagtttggaggccctggtgcccgcgctcgctaccagaaatcctaccgataagcccatcgtgactcaaaactcacttgtataataaacagtttttgagggattttaaagtttcaagaac

SEQ ID NO: 10172 - protein, 129 aa, Homo sapiens; identical to SEQ ID NO: 10166

SEQ ID NO: 10173 - DNA, 2478 bp, Homo sapiens
ctcccgtcgcgacgcagtgctcaaggcgcctgcgcagaccctgaaaagcggccagggtggcccctagctttccttttccggttgcggcgccgcgcggtgaggttgtctagtccacgctcggagccatgccgtccaagggcccgctgcagtctgtgcaggtcttcggacgcaagaagacagcgacagctgtggcgcactgcaaacgcggcaatggtctcatcaaggtgaacgggcggcccctggagatgattgagccgcgcacgctacagtacaaggtgctgggatccggcaccggcgttgagtggatggaggactcttggagacagagatgttgtagctcttgaaagctgggggggctggcatcagcaacgggatgtttagaagttgtgttgggtgtagaacagtggggtatttggcaatagagctgggcttggggttcagaagatgtaaaagctgagatggggttgttgaagattaagggtttgctttgagaactgggatgttaggaagctcacctcactggggcggggggacccaaagggtgaagggacaccgactattttttattttatttatttgttttgagagggagtctcgctgtgtcgcccaggctggagtgtagtggcgcgatctcggatcactgcaaccttcgcctcccgggttaaagcgattctcctgcctcagcctcttgagtagctgagattacaggcatgcaccaccacgcccggctaatttttgtatttttagtagagacggggtttcgccatattggccagagtggtctcgaactcattacctcaggtgatccaccagcctcggcctcccgaagtgctgggattgcaggcgtcagccaccgtgtgcggccgaatttgggtctgtttaaatgcttgcttgtaaaaggggttcctctgttccctttttgggactctcaatttctttggctcagaatggaaagaaaccagagtctgatttctgccccttctgaactctactacttttaaaagaaagaatatctacattgcagggtcagttaaaaaaattttttttgagttataaggttcttttttaaaaacagtatcttgctgtcacctaccctggagtgcaatagcacaatcctaatgaactgcagccttaaactcctgagttggagatcctcccacctcagcctttcggttgccaagactacaggcacatcaccacgcctggctcatttgagaaatatttttctgtagacgtggggtctcactttattgcccaggctggtccttggtctcatgtgatccttctgcctggactgggattacaggtgtgatcaccatgcctggcctagaatttaataaaaattctgagatttcctttgtgtagcagatgttgaatgttactgttattggctgtcactgtatttgaaggatttgtatgtgtaccctctgttgagttttggggacatagcagtgatccagatgacttaaggtcttgccttcatggacctgccagcctagttggggagaaggactgggcccaataccagaagctgatccaaagtggtcagaactggggaaggagacctgtgagctgaaagcaggtaaaggaagtatccagacagaggcactggtaaaagacctggagctgggaagggtctagggaccagggacaggttgtactgtaattctggaaacctgtgaggctcaaagaaagggcagagagctcaggtgggaaatagaaaaggcacctgaacagtccagggatggctttcgactacttgaaacagccttgggagtttcagaagctattggaatgctccttactgttcagccttctaagaaccagtcttagaggtagggtgtctgaggtccagtgagggacacaagtaggagggagcccagatcttgttccctttaccttgcctatatttcttaacaccacttcagcagtctcatatctggcttttttgactttcctcttctctgggtctgtagagggccttggagtgacaccctgacccccatccactagtacttgaaggccagtggtggcagaagccacagaaacaagaagcccagtgagatggctaagctgcccagcatgtaacttaaatccctgttcattccccattcctttagctgctggagccagttctgcttctcggcaaggagcgatttgctggtgtagacatccgtgtccgtgtaaagggtggtggtcacgtggcccagatttatgctatccgtcagtccatctccaaagccctggtggcctattaccagaaatatgtggatgaggcttccaagaaggagatcaaagacatcctcatccagtatgaccggaccctgctggtagctgaccctcgtcgctgcgagtccaaaaagtttggaggccctggtgcccgcgctcgctaccagaaatcctaccgataagcccatcgtgactcaaaactcacttgtataataaacagtttttgagggattttaaagtttcaagaac

SEQ ID NO: 10174 - protein, 72 aa, Homo sapiens [sequence omitted]

SEQ ID NO: 10175 - DNA, 656 bp, Homo sapiens
ccttttccggttgcggcgccgcgcggtgaggttgtctagtccacgctcggagccatgccgtccaagggcccgctgcagtctgtgcaggtcttcggacgcaagaagacagcgacagctgtggcgcactgcaaacgcggcaatggtctcatcaaggtgaacgggcggcccctggagatgattgagccgcgcacgctacagtacaagctgctggagccagttctgcttctcggcaaggagcgatttgctggtgtagacatccgtgtccgtgtaaagggtggtggtcacgtggcccagatttatggtgagtcccaggaactgggcgcatggaggaggtggctctgggagggaggccttcacagcgctcctgtaccctttaattgtgtgtctttctcacagctatccgtcagtccatctccaaagccctggtggcctattaccagaaatatgtggatgaggcttccaagaaggagatcaaagacatcctcatccagtatgaccggaccctgctggtagctgaccctcgtcgctgcgagtccaaaaagtttggaggccctggtgcccgcgctcgctaccagaaatcctaccgataagcccatcgtgactcaaaactcacttgtataataaacagtttttgagggattttaaagtttcaagaa

SEQ ID NO: 10176 - protein, 152 aa, Homo sapiens; identical to SEQ ID NO: 10160

SEQ ID NO: 10177 - DNA, 2532 bp, Homo sapiens
ccttttccggttgcggcgccgcgcggtgaggttgtctagtccacgctcggagccatgccgtccaagggcccgctgcagtctgtgcaggtcttcggacgcaagaagacagcgacagctgtggcgcactgcaaacgcggcaatggtctcatcaaggtgaacgggcggcccctggagatgattgagccgcgcacgctacagtacaaggtgctgggatccggcaccggcgttgagtggatggaggactcttggagacagagatgttgtagctcttgaaagctgggggggctggcatcagcaacgggatgtttagaagttgtgttgggttgttgaagattaagggtttgctttgagaactgggatgttaggaagctcacctcactggggcggggggacccaaagggtgaagggacaccgactattttttattttatttatttgttttgagagggagtctcgctgtgtcgcccaggctggagtgtagtggcgcgatctcggatcactgcaaccttcgcctcccgggttaaagcgattctcctgcctcagcctcttgagtagctgagattacaggcatgcaccaccacgcccggctaatttttgtatttttagtagagacggggtttcgccatattggccagagtggtctcgaactcattacctcaggtgatccaccagcctcggcctcccgaagtgctgggattgcaggcgtcagccaccgtgtgcggccgaatttgggtctgtttaaatgcttgcttgtaaaaggggttcctctgttccctttttgggactctcaatttctttggctcagaatggaaagaaaccagagtctgatttctgccccttctgaactctactacttttaaaagaaagaatatctacattgcagggtcagttaaaaaaattttttttgagttataaggttcttttttaaaaacagtatcttgctgtcacctaccctggagtgcaatagcacaatcctaatgaactgcagccttaaactcctgagttggagatcctcccacctcagcctttcggttgccaagactacaggcacatcaccacgcctggctcatttgagaaatatttttctgtagacgtggggtctcactttattgcccaggctggtccttggtctcatgtgatccttctgcctggactgggattacaggtgtgatcaccatgcctggcctagaatttaataaaaattctgagatttcctttgtgtagcagatgttgaatgttactgttattggctgtcactgtatttgaaggatttgtatgtgtaccctctgttgagttttggggacatagcagtgatccagatgacttaaggtcttgccttcatggacctgccagcctagttggggagaaggactgggcccaataccagaagctgatccaaagtggtcagaactggggaaggagacctgtgagctgaaagcaggtaaaggaagtatccagacagaggcactggtaaaagacctggagctgggaagggtctagggaccagggacaggttgtactgtaattctggaaacctgtgaggctcaaagaaagggcagagagctcaggtgggaaatagaaaaggcacctgaacagtccagggatggctttcgactacttgaaacagccttgggagtttcagaagctattggaatgctccttactgttcagccttctaagaaccagtcttagaggtagggtgtctgaggtccagtgagggacacaagtaggagggagcccagatcttgttccctttaccttgcctatatttcttaacaccacttcagcagtctcatatctggcttttttgactttcctcttctctgggtctgtagagggccttggagtgacaccctgacccccatccactagtacttgaaggccagtggtggcagaagccacagaaacaagaagcccagtgagatggctaagctgcccagcatgtaacttaaatccctgttcattccccattcctttagctgctggagccagttctgcttctcggcaaggagcgatttgctggtgtagacatccgtgtccgtgtaaagggtggtggtcacgtggcccagatttatggtgagtcccaggaactgggcgcatggaggaggtggctctgggagggaggccttcacagcgctcctgtaccctttaattgtgtgtctttctcacagctatccgtcagtccatctccaaagccctggtggcctattaccagaaatgtgagtgagcatgggtccttcccatgaggtagatgggtgtgtggggatcaagtcaaggactctgtgtgattatctaaatcctcgtccctgctcttcttgccagatgtggatgaggcttccaagaaggagatcaaagacatcctcatccagtatgaccggaccctgctggtagctgaccctcgtcgctgcgagtccaaaaagtttggaggccctggtgcccgcgctcgctaccagaaatcctaccgataagcccatcgtgactcaaaactcacttgtataataaacagtttttgagggattttaaagtttcaag

SEQ ID NO: 10178 - protein, 72 aa, Homo sapiens [sequence omitted]

SEQ ID NO: 10179 - DNA, 2120 bp, Homo sapiens
ccttttccggttgcggcgccgcgcggtgaggttgtctagtccacgctcggagccatgccgtccaagggcccgctgcagtctgtgcaggtcttcggacgcaagaagacagcgacagctgtggcgcactgcaaacgcggcaatggtctcatcaaggtgaacgggcggcccctggagatgattgagccgcgcacgctacagtacaaggtgctgggatccggcaccggcgttgagtggatggaggactcttggagacagagatgttgtagctcttgaaagctgggggggctggcatcagcaacgggatgtttagaagttgtgttgggtgtagaacagtggggtatttggcaatagagctgggcttggggttcagaagatgtaaaagctgagatggggttgttgaagaaaccagagtctgatttctgccccttctgaactctactacttttaaaagaaagaatatctacattgcagggtcagttaaaaaaattttttttgagttataaggttcttttttaaaaacagtatcttgctgtcacctaccctggagtgcaatagcacaatcctaatgaactgcagccttaaactcctgagttggagatcctcccacctcagcctttcggttgccaagactacaggcacatcaccacgcctggctcatttgagaaatatttttctgtagacgtggggtctcactttattgcccaggctggtccttggtctcatgtgatccttctgcctggactgggattacaggtgtgatcaccatgcctggcctagaatttaataaaaattctgagatttcctttgtgtagcagatgttgaatgttactgttattggctgtcactgtatttgaaggatttgtatgtgtaccctctgttgagttttggggacatagcagtgatccagatgacttaaggtcttgccttcatggacctgccagcctagttggggagaaggactgggcccaataccagaagctgatccaaagtggtcagaactggggaaggagacctgtgagctgaaagcaggtaaaggaagtatccagacagaggcactggtaaaagacctggagctgggaagggtctagggaccagggacaggttgtactgtaattctggaaacctgtgaggctcaaagaaagggcagagagctcaggtgggaaatagaaaaggcacctgaacagtccagggatggctttcgactacttgaaacagccttgggagtttcagaagctattggaatgctccttactgttcagccttctaagaaccagtcttagaggtagggtgtctgaggtccagtgagggacacaagtaggagggagcccagatcttgttccctttaccttgcctatatttcttaacaccacttcagcagtctcatatctggcttttttgactttcctcttctctgggtctgtagagggccttggagtgacaccctgacccccatccactagtacttgaaggccagtggtggcagaagccacagaaacaagaagcccagtgagatggctaagctgcccagcatgtaacttaaatccctgttcattccccattcctttagctgctggagccagttctgcttctcggcaaggagcgatttgctggtgtagacatccgtgtccgtgtaaagggtggtggtcacgtggcccagatttatggtgagtcccaggaactgggcgcatggaggaggtggctctgggagggaggccttcacagcgctcctgtaccctttaattgtgtgtctttctcacagctatccgtcagtccatctccaaagccctggtggcctattaccagaaatgtgagtgagcatgggtccttcccatgaggtagatgggtgtgtggggatcaagtcaaggactctgtgtgattatctaaatcctcgtccctgctcttcttgccagatgtggatgaggcttccaagaaggagatcaaagacatcctcatccagtatgaccggaccctgctggtagctgaccctcgtcgctgcgagtccaaaaagtttggaggccctggtgcccgcgctcgctaccagaaatcctaccgataagcccatcgtgactcaaaactcacttgtataataaacagtttttgagggattttaaagtttcaag

SEQ ID NO: 10180 - protein, 72 aa, Homo sapiens [sequence omitted]

SEQ ID NO: 10181 - DNA, 1509 bp, Homo sapiens
ccttttccggttgcggcgccgcgcggtgaggttgtctagtccacgctcggagccatgccgtccaagggcccgctgcagtctgtgcaggtcttcggacgcaagaagacagcgacagctgtggcgcactgcaaacgcggcaatggtctcatcaaggtgaacgggcggcccctggagatgattgagccgcgcacgctacagtacaaggtgctgggatccggcaccggcgttgagtggatggaggactcttggagacagagatgttgtagctcttgaaagctgggggggctggcatcagcaacgggatgtttagaagttgtgttgggtgtagaacagtggggtatttggcaatagagctgggcttggggttcagaagatgtaaaagctgagatggggttgttgaagattaagggtttgctttgagaactgggatgttaggaagctcacctcactggggcggggggacccaaaggggtctagggaccagggacaggttgtactgtaattctggaaacctgtgaggctcaaagaaagggcagagagctcaggtgggaaatagaaaaggcacctgaacagtccagggatggctttcgactacttgaaacagccttgggagtttcagaagctattggaatgctccttactgttcagccttctaagaaccagtcttagaggtagggtgtctgaggtccagtgagggacacaagtaggagggagcccagatcttgttccctttaccttgcctatatttcttaacaccacttcagcagtctcatatctggcttttttgactttcctcttctctgggtctgtagagggccttggagtgacaccctgacccccatccactagtacttgaaggccagtggtggcagaagccacagaaacaagaagcccagtgagatggctaagctgcccagcatgtaacttaaatccctgttcattccccattcctttagctgctggagccagttctgcttctcggcaaggagcgatttgctggtgtagacatccgtgtccgtgtaaagggtggtggtcacgtggcccagatttatggtgagtcccaggaactgggcgcatggaggaggtggctctgggagggaggccttcacagcgctcctgtaccctttaattgtgtgtctttctcacagctatccgtcagtccatctccaaagccctggtggcctattaccagaaatgtgagtgagcatgggtccttcccatgaggtagatgggtgtgtggggatcaagtcaaggactctgtgtgattatctaaatcctcgtccctgctcttcttgccagatgtggatgaggcttccaagaaggagatcaaagacatcctcatccagtatgaccggaccctgctggtagctgaccctcgtcgctgcgagtccaaaaagtttggaggccctggtgcccgcgctcgctaccagaaatcctaccgataagcccatcgtgactcaaaactcacttgtataataaacagtttttgagggattttaaagtttcaag

SEQ ID NO: 10182 - protein, 72 aa, Homo sapiens [sequence omitted]

SEQ ID NO: 10183 - DNA, 1011 bp, Homo sapiens
tgtgagctgaaagcaggtaaaggaagtatccagacagaggcactggtaaaagacctggagctgggaagggtctagggaccagggacaggttgtactgtaattctggaaacctgtgaggctcaaagaaagggcagagagctcaggtgggaaatagaaaaggcacctgaacagtccagggatggctttcgactacttgaaacagccttgggagtttcagaagctattggaatgctccttactgttcagccttctaagaaccagtcttagaggtagggtgtctgaggtccagtgagggacacaagtaggagggagcccagatcttgttccctttaccttgcctatatttcttaacaccacttcagcagtctcatatctggcttttttgactttcctcttctctgggtctgtagagggccttggagtgacaccctgacccccatccactagtacttgaaggccagtggtggcagaagccacagaaacaagaagcccagtgagatggctaagctgcccagcatgtaacttaaatccctgttcattccccattcctttagctgctggagccagttctgcttctcggcaaggagcgatttgctggtgtagacatccgtgtccgtgtaaagggtggtggtcacgtggcccagatttatgctatccgtcagtccatctccaaagccctggtggcctattaccagaaatgtgagtgagcatgggtccttcccatgaggtagatgggtgtgtggggatcaagtcaaggactctgtgtgattatctaaatcctcgtccctgctcttcttgccagatgtggatgaggcttccaagaaggagatcaaagacatcctcatccagtatgaccggaccctgctggtagctgaccctcgtcgctgcgagtccaaaaagtttggaggccctggtgcccgcgctcgctaccagaaatcctaccgataagcccatcgtgactcaaaactcacttgtataataaacagtttttgagggattttaaagtttcaa

SEQ ID NO: 10184 - protein, 53 aa, Homo sapiens; identical to SEQ ID NO: 10154

SEQ ID NO: 10185 - DNA, 1556 bp, Homo sapiens
ctacattgcagggtcagttaaaaaaattttttttgagttataaggttcttttttaaaaacagtatcttgctgtcacctaccctggagtgcaatagcacaatcctaatgaactgcagccttaaactcctgagttggagatcctcccacctcagcctttcggttgccaagactacaggcacatcaccacgcctggctcatttgagaaatatttttctgtagacgtggggtctcactttattgcccaggctggtccttggtctcatgtgatccttctgcctggactgggattacaggtgtgatcaccatgcctggcctagaatttaataaaaattctgagatttcctttgtgtagcagatgttgaatgttactgttattggctgtcactgtatttgaaggatttgtatgtgtaccctctgttgagttttggggacatagcagtgatccagatgacttaaggtcttgccttcatggacctgccagcctagttggggagaaggactgggcccaataccagaagctgatccaaagtggtcagaactggggaaggagacctgtgagctgaaagcaggtaaaggaagtatccagacagaggcactggtaaaagacctggagctgggaagggtctagggaccagggacaggttgtactgtaattctggaaacctgtgaggctcaaagaaagggcagagagctcaggtgggaaatagaaaaggcacctgaacagtccagggatggctttcgactacttgaaacagccttgggagtttcagaagctattggaatgctccttactgttcagccttctaagaaccagtcttagaggtagggtgtctgaggtccagtgagggacacaagtaggagggagcccagatcttgttccctttaccttgcctatatttcttaacaccacttcagcagtctcatatctggcttttttgactttcctcttctctgggtctgtagagggccttggagtgacaccctgacccccatccactagtacttgaaggccagtggtggcagaagccacagaaacaagaagcccagtgagatggctaagctgcccagcatgtaacttaaatccctgttcattccccattcctttagctgctggagccagttctgcttctcggcaaggagcgatttgctggtgtagacatccgtgtccgtgtaaagggtggtggtcacgtggcccagatttatggtgagtcccaggaactgggcgcatggaggaggtggctctgggagggaggccttcacagcgctcctgtaccctttaattgtgtgtctttctcacagctatccgtcagtccatctccaaagccctggtggcctattaccagaaatatgtggatgaggcttccaagaaggagatcaaagacatcctcatccagtatgaccggaccctgctggtagctgaccctcgtcgctgcgagtccaaaaagtttggaggccctggtgcccgcgctcgctaccagaaatcctaccgataagcccatcgtgactcaaaactcacttgtataataaacagtttttgagggattttaaagtttcaa

SEQ ID NO: 10186 - protein, 51 aa, Homo sapiens; identical to SEQ ID NO: 10156

SEQ ID NO: 10187 - DNA, 1214 bp, Homo sapiens
ccttttccggttgcggcgccgcgcggtgaggttgtctagtccacgctcggagccatgccgtccaagggcccgctgcagtctgtgcaggtcttcggacgcaagaagacagcgacagctgtggcgcactgcaaacgcggcaatggtctcatcaaggtgaacgggcggcccctggagatgattgagccgcgcacgctacagtacaaggtgctgggatccggcaccggcgttgagtggatggaggactcttggagacagagatgttgtagctcttgaaagctgggggggctggcatcagcaacgggatgtttagaagttgtgttgggttgttgaagattaagggtttgctttgagaactgggatgttaggaagctcacctcactggggcggggggacccaaagggtgaagggacaccgactattttttattttatttatttgttttgagagggagtctcgctgtgtcgcccaggctggagtgtagtggcgcgatctcggatcactgcaaccttcgcctcccgggttaaagcgattctcctgcctcagcctcttgagtagctgagattacaggcatgcaccaccacgcccggctaatttttgtatttttagtagagacggggtttcgccatattggccagagtggtctcgaactcattacctcaggtgatccaccagcctcggcctcccgaagtgctgggattgcaggcgtcagccaccgtgtgcggccgaatttgggtctgtttaaatgcttgcttgtaaaaggggttcctctgttccctttttgggactctcaatttctttggctcagaatggaaagaaaccagagtctgatttctgccccttctgaactctactacttttaaaagaaagaatatctacattgcagggtcagttaaaaaaattttttttgagttataaggttcttttttaaaaacagtatcttgctgtcacctaccctggagtgcaatagcacaatcctaatgaactgcagccttaaactcctgagttggagatcctcccacctcagcctttcggttgccaagactacaggcacatcaccacgcctggctcatttgagaaatatttttctgtagacgtggggtctcactttattgcccaggctggtccttggtctcatgtgatccttctgcctggactgggattacaggtgtgatcaccatgcctggcctagaatttaataaaaattctgagatttc

SEQ ID NO: 10188 - protein, 72 aa, Homo sapiens [sequence omitted]

SEQ ID NO: 10189 - DNA, 1355 bp, Homo sapiens
ctcccgtcgcgacgcagtgctcaaggcgcctgcgcagaccctgaaaagcggccagggtggcccctagctttccttttccggttgcggcgccgcgcggtgaggttgtctagtccacgctcggagccatgccgtccaagggcccgctgcagtctgtgcaggtcttcggacgcaagaagacagcgacagctgtggcgcactgcaaacgcggcaatggtctcatcaaggtgaacgggcggcccctggagatgattgagccgcgcacgctacagtacaaggtgctgggatccggcaccggcgttgagtggatggaggactcttggagacagagatgttgtagctcttgaaagctgggggggctggcatcagcaacgggatgtttagaagttgtgttgggtgtagaacagtggggtatttggcaatagagctgggcttggggttcagaagatgtaaaagctgagatggggttgttgaagattaagggtttgctttgagaactgggatgttaggaagctcacctcactggggcggggggacccaaagggtgaagggacaccgactattttttattttatttatttgttttgagagggagtctcgctgtgtcgcccaggctggagtgtagtggcgcgatctcggatcactgcaaccttcgcctcccgggttaaagcgattctcctgcctcagcctcttgagtagctgagattacaggcatgcaccaccacgcccggctaatttttgtatttttagtagagacggggtttcgccatattggccagagtggtctcgaactcattacctcaggtgatccaccagcctcggcctcccgaagtgctgggattgcaggcgtcagccaccgtgtgcggccgaatttgggtctgtttaaatgcttgcttgtaaaaggggttcctctgttccctttttgggactctcaatttctttggctcagaatggaaagaaaccagagtctgatttctgccccttctgaactctactacttttaaaagaaagaatatctacattgcagggtcagttaaaaaaattttttttgagttataaggttcttttttaaaaacagtatcttgctgtcacctaccctggagtgcaatagcacaatcctaatgaactgcagccttaaactcctgagttggagatcctcccacctcagcctttcggttgccaagactacaggcacatcaccacgcctggctcatttgagaaatatttttctgtagacgtggggtctcactttattgcccaggctggtccttggtctcatgtgatccttctgcctggactgggattacaggtgtgatcaccatgcctggcctagaatttaataaaaattctgagatttc

SEQ ID NO: 10190 - protein, 72 aa, Homo sapiens [sequence omitted]

SEQ ID NO: 10191 - DNA, 1036 bp, Homo sapiens
agggcttcacggtcactcagacttggcgaggaggcttgggtctgccgctttccactgagtttttctgagcttcagcgttctctccaaaacggggatacggatctcctggggatgctttagagggcctaggagataaagccttgtttcttttataatttgctattcgctgatttcgccgcctcctcgcagcttggcctaccgcgctagtgttccggactaacgaacaaacggctcactaaattcaaacatgagtttcagcctggtcgccgagccggcgggtagaaaaaacctttcccctcctaaccctccgcagatgtcggccccgcactccgcccaggccagccctgcctctctcaagatggcgacctggaagtgcgtcgcccgtgccagccccggaaatctcgtgttaggcgaggtcaacgggtaggttctcgcgagaggacccgtcagccccagtcaggcgtcgtgcgaacagcagctggtaccgaaggcggaggtggagcccgagagggaaccagcggggaaactgaggctcggggtggagcgcaggattgtgggacgcgccaaggctgctgtctttcccagcagcagcggaagatgtcggacagcgaggacagcaacttttccgaggaggaggacagcgagcgcagcagtgacggcgaggaggccgaggtagacgaagagcggcggagtgcagcgggcagtgagaaagaagaagagcctgaggacgaagaggaggaggaagaggaggaggaatacgatgaggaagaggaggaagaagatgatgaccgaccccccaagaaaccccgccatggaggcttcattctggacgaggctgatgttgacgatgagtatgaggacgaggaccagtgggaggatggagcagaggacattctagagaaagaagagattgaagcctccaatatcgataatgttgtcctggatgaagatcgttctggggctcgccgcctgcaaaacctctggagggaccagcgagaagaagaactgggcgagtattacatgaagaaatacgcca

SEQ ID NO: 10192 - protein, 145 aa, Homo sapiens
MSDSEDSNFSEEEDSERSSDGEEAEVDEERRSAAGSEKEEEPEDEEEEEEEEEYDEEEEEEDDDRPPKKPRHGGFILDEADVDDEYEDEDQWEDGAEDILEKEEIEASNIDNVVLDEDRSGARRLQNLWRDQREEELGEYYMKKY

SEQ ID NO: 10193 - DNA, 4120 bp, Homo sapiens
agggcttcacggtcactcagacttggcgaggaggcttgggtctgccgctttccactgagtttttctgagcttcagcgttctctccaaaacggggatacggatctcctggggatgctttagagggcctaggagataaagccttgtttcttttataatttgctattcgctgatttcgccgcctcctcgcagcttggcctaccgcgctagtgttccggactaacgaacaaacggctcactaaattcaaacatgagtttcagcctggtcgccgagccggcgggtagaaaaaacctttcccctcctaaccctccgcagatgtcggccccgcactccgcccaggccagccctgcctctctcaagatggcgacctggaagtgcgtcgcccgtgccagccccggaaatctcgtgttaggcgaggtcaacgggtaggttctcgcgagaggacccgtcagccccagtcaggcgtcgtgcgaacagcagctggtaccgaaggcggaggtggagcccgagagggaaccagcggggaaactgaggctcggggtggagcgcaggattgtgggacgcgccaaggctgctgtctttcccagcagcagcggaagatgtcggacagcgaggacagcaacttttccgaggaggaggacagcgagcgcagcagtgacggcgaggaggccgaggtagacgaagagcggcggagtgcagcgggcagtgagaaagaagaagagcctgaggacgaagaggaggaggaagaggaggaggaatacgatgaggaagaggaggaagaagatgatgaccgaccccccaagaaaccccgccatggaggcttcattctggacgaggctgatgttgacgatgagtatgaggacgaggaccagtgggaggatggagcagaggacattctagagaaagcctccaatatcgataatgttgtcctggatgaagatcgttctggggctcgccgcctgcaaaacctctggagggaccagcgagaagaagaactgggcgagtattacatgaagaaatacgccaagtcatctgtgggagagacggtgtatggaggatctgatgagctctcagacgacatcacccagcagcagctgctcccaggagtcaaggatcccaatctgtggactgtcaaatgtaagattggggaggaacgggccacggccatttccttgatgcgcaagttcattgcctaccagttcacagacacgcccctgcagatcaagtcagtagtggcaccagagcatgtgaagggctacatctacgtggaggcctacaagcagacccacgtgaagcaggccattgagggggtgggcaacctgcggcttggctactggaaccagcagatggtgcccatcaaggagatgacagacgtgctcaaagtggtgaaggaggtggccaacctgaaaccaaagtcctgggtccgcctcaagcggggcatctacaaggatgacattgctcaggtggactacgtggagcccagccagaacaccatctccctgaagatgatcccacgcatcgactacgatcgcatcaaggcccgcatgagcttgaaagactggtttgccaaaaggaagaagtttaagcggcctccacagaggctgtttgatgctgagaagatcaggtccctggggggtgatgttgcctctgatggtgacttcctcatctttgaggggaaccgttacagccggaagggctttctgttcaagagcttcgccatgtctgctgtgatcacggagggtgtgaagccaacactctctgagctggaaaagtttgaggaccagccagagggcattgacctggaggtggtgactgagagcacagggaaggagcgggagcacaacttccaacctggggacaacgtggaggtctgtgagggtgagctcatcaacctgcagggcaagatcctcagcgtggatggcaacaagatcaccatcatgcccaagcatgaggacctcaaggacatgttggagttcccagcccaggaacttagaaaatacttcaagatgggggaccacgtgaaggtgattgctggccgattcgagggcgacacaggcctcattgtgcgggtggaggagaatttcgttatcctgttctctgacctcaccatgcatgagctgaaggtgctcccccgggacctgcagctctgctcagagacagcatcaggtgtggatgttgggggccagcatgaatggggcgagctggtgcagctggatccccagactgtgggtgtcatcgtgcgactagaacgggagaccttccaggtgctgaacatgtacgggaaggtggtgactgtcagacatcaggctgtgacccggaagaaggacaaccgctttgctgtggccttggactcagagcagaacaacatccatgtgaaagacatcgttaaggtcattgatggcccccactcaggccgagaaggggagattcgccatctcttccgaagcttcgccttcctacattgcaagaaactggtggagaacgggggcatgtttgtctgcaagacccgccacctggtgctggctgggggctcaaagccccgtgatgtgaccaacttcaccgtgggtggctttgcgcctatgagtccccggatcagcagccccatgcaccccagtgctggaggtcagcgtggcggctttggtagcccaggtggcggcagtggtggcatgagcaggggccggggccggagggacaacgaactcatcggccagaccgtgcgcatctcccaggggccctacaaaggctacatcggtgtggtgaaagatgccacagagtccacggcccgtgtggagctgcactccacctgccagaccatctctgtggaccgtcagcggctcaccacggtgggctcacggcgcccgggcggcatgacctcgacctatgggaggacgcccatgtatggctcccagacgcccatgtatggctctggctcccgaacacccatgtacggctcacagacacccctccaggatggtagccgcaccccacactacggctcacagacgcccctgcatgatggcagccgcactcctgcccagagtggggcctgggaccccaacaaccccaacacgccgtcacgggctgaggaagaatatgagtatgctttcgatgatgagcccaccccgtccccgcaggcctatgggggaacccccaatccccaaacacctggctacccagacccctcgtccccacaggtcaacccacaatacaacccgcagacgccagggacgccggccatgtacaacacagaccagttctctccctatgctgccccctccccacaaggttcctaccagcccagccccagcccccagagctaccaccaggtggcgccaagcccagcaggctaccagaatacccactccccagccagctaccaccctacaccgtcgcccatggcctatcaggctagccccagcccgagccccgttggctacagtcctatgacacctggagctccctcccctggtggctacaacccacacacgccaggctcaggcatcgagcagaactccagcgactgggtaaccactgacattcaggtgaaggtgcgggacacctacctggatacacaggtggtgggacagacaggtgtcatccgcagtgtcacggggggcatgtgctctgtgtacctgaaggacagtgagaaggttgtcagcatttccagtgagcacctggagcctatcacccccaccaagaacaacaaggtgaaagtgatcctgggcgaggatcgggaagccacgggcgtcctactgagcattgatggtgaggatggcattgtccgtatggaccttgatgagcagctcaagatcctcaacctccgcttcctggggaagctcctggaagcctgaagcaggcagggccggtggacttcgtcggatgaagagtgatcctccttccttccctggcccttggctgtgacacaagatcctcctgcagggctaggcggattgttctggatttccttttgtttttccttttagttttccatcttttccctccctggtgctcattggaatctgagtagagtctgggggagggtccccaccttcctgtacctcctccccacagcttgcttttgttgtaccgtctttcaataaaaagaagctgtttggtctaaaa

SEQ ID NO: 10194 - protein, 1083 aa, Homo sapiens
MSDSEDSNFSEEEDSERSSDGEEAEVDEERRSAAGSEKEEEPEDEEEEEEEEEYDEEEEEEDDDRPPKKPRHGGFILDEADVDDEYEDEDQWEDGAEDILEKASNIDNVVLDEDRSGARRLQNLWRDQREEELGEYYMKKYAKSSVGETVYGGSDELSDDITQQQLLPGVKDPNLWTVKCKIGEERATAISLMRKFIAYQFTDTPLQIKSVVAPEHVKGYIYVEAYKQTHVKQAIEGVGNLRLGYWNQQMVPIKEMTDVLKVVKEVANLKPKSWVRLKRGIYKDDIAQVDYVEPSQNTISLKMIPRIDYDRIKARMSLKDWFAKRKKFKRPPQRLFDAEKIRSLGGDVASDGDFLIFEGNRYSRKGFLFKSFAMSAVITEGVKPTLSELEKFEDQPEGIDLEVVTESTGKEREHNFQPGDNVEVCEGELINLQGKILSVDGNKITIMPKHEDLKDMLEFPAQELRKYFKMGDHVKVIAGRFEGDTGLIVRVEENFVILFSDLTMHELKVLPRDLQLCSETASGVDVGGQHEWGELVQLDPQTVGVIVRLERETFQVLNMYGKVVTVRHQAVTRKKDNRFAVALDSEQNNIHVKDIVKVIDGPHSGREGEIRHLFRSFAFLHCKKLVENGGMFVCKTRHLVLAGGSKPRDVTNFTVGGFAPMSPRISSPMHPSAGGQRGGFGSPGGGSGGMSRGRGRRDNELIGQTVRISQGPYKGYIGVVKDATESTARVELHSTCQTISVDRQRLTTVGSRRPGGMTSTYGRTPMYGSQTPMYGSGSRTPMYGSQTPLQDGSRTPHYGSQTPLHDGSRTPAQSGAWDPNNPNTPSRAEEEYEYAFDDEPTPSPQAYGGTPNPQTPGYPDPSSPQVNPQYNPQTPGTPAMYNTDQFSPYAAPSPQGSYQPSPSPQSYHQVAPSPAGYQNTHSPASYHPTPSPMAYQASPSPSPVGYSPMTPGAPSPGGYNPHTPGSGIEQNSSDWVTTDIQVKVRDTYLDTQVVGQTGVIRSVTGGMCSVYLKDSEKVVSISSEHLEPITPTKNNKVKVILGEDREATGVLLSIDGEDGIVRMDLDEQLKILNLRFLGKLLEA

SEQ ID NO: 10195 - DNA, 4054 bp, Homo sapiens
agggcttcacggtcactcagacttggcgaggaggcttgggtctgccgctttccactgagtttttctgagcttcagcgttctctccaaaacggggatacggatctcctggggatgctttagagggcctaggagataaagccttgtttcttttataatttgctattcgctgatttcgccgcctcctcgcagcttggcctaccgcgctagtgttccggactaacgaacaaacggctcactaaattcaaacatgagtttcagcctggtcgccgagccggcgggtagaaaaaacctttcccctcctaaccctccgcagatgtcggccccgcactccgcccaggccagccctgcctctctcaagatggcgacctggaagtgcgtcgcccgtgccagccccggaaatctcgtgttaggcgaggtcaacgggtaggttctcgcgagaggacccgtcagccccagtcaggcgtcgtgcgaacagcagctggtaccgaaggcggaggtggagcccgagagcagcggaagatgtcggacagcgaggacagcaacttttccgaggaggaggacagcgagcgcagcagtgacggcgaggaggccgaggtagacgaagagcggcggagtgcagcgggcagtgagaaagaagaagagcctgaggacgaagaggaggaggaagaggaggaggaatacgatgaggaagaggaggaagaagatgatgaccgaccccccaagaaaccccgccatggaggcttcattctggacgaggctgatgttgacgatgagtatgaggacgaggaccagtgggaggatggagcagaggacattctagagaaagaagagattgaagcctccaatatcgataatgttgtcctggatgaagatcgttctggggctcgccgcctgcaaaacctctggagggaccagcgagaagaagaactgggcgagtattacatgaagaaatacgccaagtcatctgtgggagagacggtgtatggaggatctgatgagctctcagacgacatcacccagcagcagctgctcccaggagtcaaggatcccaatctgtggactgtcaaatgtaagattggggaggaacgggccacggccatttccttgatgcgcaagttcattgcctaccagttcacagacacgcccctgcagatcaagtcagtagtggcaccagagcatgtgaagggctacatctacgtggaggcctacaagcagacccacgtgaagcaggccattgagggggtgggcaacctgcggcttggctactggaaccagcagatggtgcccatcaaggagatgacagacgtgctcaaagtggtgaaggaggtggccaacctgaaaccaaagtcctgggtccgcctcaagcggggcatctacaaggatgacattgctcaggtggactacgtggagcccagccagaacaccatctccctgaagatgatcccacgcatcgactacgatcgcatcaaggcccgcatgagcttgaaagactggtttgccaaaaggaagaagtttaagcggcctccacagaggctgtttgatgctgagaagatcaggtccctggggggtgatgttgcctctgatggtgacttcctcatctttgaggggaaccgttacagccggaagggctttctgttcaagagcttcgccatgtctgctgtgatcacggagggtgtgaagccaacactctctgagctggaaaagtttgaggaccagccagagggcattgacctggaggtggtgactgagagcacagggaaggagcgggagcacaacttccaacctggggacaacgtggaggtctgtgagggtgagctcatcaacctgcagggcaagatcctcagcgtggatggcaacaagatcaccatcatgcccaagcatgaggacctcaaggacatgttggagttcccagcccaggaacttagaaaatacttcaagatgggggaccacgtgaaggtgattgctggccgattcgagggcgacacaggcctcattgtgcgggtggaggagaatttcgttatcctgttctctgacctcaccatgcatgagctgaaggtgctcccccgggacctgcagctctgctcagagacagcatcaggtgtggatgttgggggccagcatgaatggggcgagctggtgcagctggatccccagactgtgggtgtcatcgtgcgactagaacgggagaccttccaggtgctgaacatgtacgggaaggtggtgactgtcagacatcaggctgtgacccggaagaaggacaaccgctttgctgtggccttggactcagagcagaacaacatccatgtgaaagacatcgttaaggtcattgatggcccccactcaggccgagaaggggagattcgccatctcttccgaagcttcgccttcctacattgcaagaaactggtggagaacgggggcatgtttgtctgcaagacccgccacctggtgctggctgggggctcaaagccccgtgatgtgaccaacttcaccgtgggtggctttgcgcctatgagtccccggatcagcagccccatgcaccccagtgctggaggtcagcgtggcggctttggtagcccaggtggcggcagtggtggcatgagcaggggccggggccggagggacaacgaactcatcggccagaccgtgcgcatctcccaggggccctacaaaggctacatcggtgtggtgaaagatgccacagagtccacggcccgtgtggagctgcactccacctgccagaccatctctgtggaccgtcagcggctcaccacggtgggctcacggcgcccgggcggcatgacctcgacctatgggaggacgcccatgtatggctcccagacgcccatgtatggctctggctcccgaacacccatgtacggctcacagacacccctccaggatggtagccgcaccccacactacggctcacagacgcccctgcatgatggcagccgcactcctgcccagagtggggcctgggaccccaacaaccccaacacgccgtcacgggctgaggaagaatatgagtatgctttcgatgatgagcccaccccgtccccgcaggcctatgggggaacccccaatccccaaacacctggctacccagacccctcgtccccacaggtcaacccacaatacaacccgcagacgccagggacgccggccatgtacaacacagaccagttctctccctatgctgccccctccccacaaggttcctaccagcccagccccagcccccagagctaccaccaggtggcgccaagcccagcaggctaccagaatacccactccccagccagctaccaccctacaccgtcgcccatggcctatcaggctagccccagcccgagccccgttggctacagtcctatgacacctggagctccctcccctggtggctacaacccacacacgccaggctcaggcatcgagcagaactccagcgactgggtaaccactgacattcaggtgaaggtgcgggacacctacctggatacacaggtggtgggacagacaggtgtcatccgcagtgtcacggggggcatgtgctctgtgtacctgaaggacagtgagaaggttgtcagcatttccagtgagcacctggagcctatcacccccaccaagaacaacaaggtgaaagtgatcctgggcgaggatcgggaagccacgggcgtcctactgagcattgatggtgaggatggcattgtccgtatggaccttgatgagcagctcaagatcctcaacctccgcttcctggggaagctcctggaagcctgaagcaggcagggccggtggacttcgtcggatgaagagtgatcctccttccttccctggcccttggctgtgacacaagatcctcctgcagggctaggcggattgttctggatttccttttgtttttccttttagttttccatcttttccctccctggtgctcattggaatctgagtagagtctgggggagggtccccaccttcctgtacctcctccccacagcttgcttttgttgtaccgtctttcaataaaaagaagctgtttggtctaaaa

SEQ ID NO: 10196 - protein, 1087 aa, Homo sapiens; identical to SEQ ID NO: 1571

SEQ ID NO: 10197 - DNA, 4132 bp, Homo sapiens
agggcttcacggtcactcagacttggcgaggaggcttgggtctgccgctttccactgagtttttctgagcttcagcgttctctccaaaacggggatacggatctcctggggatgctttagagggcctaggagataaagccttgtttcttttataatttgctattcgctgatttcgccgcctcctcgcagcttggcctaccgcgctagtgttccggactaacgaacaaacggctcactaaattcaaacatgagtttcagcctggtcgccgagccggcgggtagaaaaaacctttcccctcctaaccctccgcagatgtcggccccgcactccgcccaggccagccctgcctctctcaagatggcgacctggaagtgcgtcgcccgtgccagccccggaaatctcgtgttaggcgaggtcaacgggtaggttctcgcgagaggacccgtcagccccagtcaggcgtcgtgcgaacagcagctggtaccgaaggcggaggtggagcccgagagggaaccagcggggaaactgaggctcggggtggagcgcaggattgtgggacgcgccaaggctgctgtctttcccagcagcagcggaagatgtcggacagcgaggacagcaacttttccgaggaggaggacagcgagcgcagcagtgacggcgaggaggccgaggtagacgaagagcggcggagtgcagcgggcagtgagaaagaagaagagcctgaggacgaagaggaggaggaagaggaggaggaatacgatgaggaagaggaggaagaagatgatgaccgaccccccaagaaaccccgccatggaggcttcattctggacgaggctgatgttgacgatgagtatgaggacgaggaccagtgggaggatggagcagaggacattctagagaaagaagagattgaagcctccaatatcgataatgttgtcctggatgaagatcgttctggggctcgccgcctgcaaaacctctggagggaccagcgagaagaagaactgggcgagtattacatgaagaaatacgccaagtcatctgtgggagagacggtgtatggaggatctgatgagctctcagacgacatcacccagcagcagctgctcccaggagtcaaggatcccaatctgtggactgtcaaatgtaagattggggaggaacgggccacggccatttccttgatgcgcaagttcattgcctaccagttcacagacacgcccctgcagatcaagtcagtagtggcaccagagcatgtgaagggctacatctacgtggaggcctacaagcagacccacgtgaagcaggccattgagggggtgggcaacctgcggcttggctactggaaccagcagatggtgcccatcaaggagatgacagacgtgctcaaagtggtgaaggaggtggccaacctgaaaccaaagtcctgggtccgcctcaagcggggcatctacaaggatgacattgctcaggtggactacgtggagcccagccagaacaccatctccctgaagatgatcccacgcatcgactacgatcgcatcaaggcccgcatgagcttgaaagactggtttgccaaaaggaagaagtttaagcggcctccacagaggctgtttgatgctgagaagatcaggtccctggggggtgatgttgcctctgatggtgacttcctcatctttgaggggaaccgttacagccggaagggctttctgttcaagagcttcgccatgtctgctgtgatcacggagggtgtgaagccaacactctctgagctggaaaagtttgaggaccagccagagggcattgacctggaggtggtgactgagagcacagggaaggagcgggagcacaacttccaacctggggacaacgtggaggtctgtgagggtgagctcatcaacctgcagggcaagatcctcagcgtggatggcaacaagatcaccatcatgcccaagcatgaggacctcaaggacatgttggagttcccagcccaggaacttagaaaatacttcaagatgggggaccacgtgaaggtgattgctggccgattcgagggcgacacaggcctcattgtgcgggtggaggagaatttcgttatcctgttctctgacctcaccatgcatgagctgaaggtgctcccccgggacctgcagctctgctcagagacagcatcaggtgtggatgttgggggccagcatgaatggggcgagctggtgcagctggatccccagactgtgggtgtcatcgtgcgactagaacgggagaccttccaggtgctgaacatgtacgggaaggtggtgactgtcagacatcaggctgtgacccggaagaaggacaaccgctttgctgtggccttggactcagagcagaacaacatccatgtgaaagacatcgttaaggtcattgatggcccccactcaggccgagaaggggagattcgccatctcttccgaagcttcgccttcctacattgcaagaaactggtggagaacgggggcatgtttgtctgcaagacccgccacctggtgctggctgggggctcaaagccccgtgatgtgaccaacttcaccgtgggtggctttgcgcctatgagtccccggatcagcagccccatgcaccccagtgctggaggtcagcgtggcggctttggtagcccaggtggcggcagtggtggcatgagcaggggccggggccggagggacaacgaactcatcggccagaccgtgcgcatctcccaggggccctacaaaggctacatcggtgtggtgaaagatgccacagagtccacggcccgtgtggagctgcactccacctgccagaccatctctgtggaccgtcagcggctcaccacggtgggctcacggcgcccgggcggcatgacctcgacctatgggaggacgcccatgtatggctcccagacgcccatgtatggctctggctcccgaacacccatgtacggctcacagacacccctccaggatggtagccgcaccccacactacggctcacagacgcccctgcatgatggcagccgcactcctgcccagagtggggcctgggaccccaacaaccccaacacgccgtcacgggctgaggaagaatatgagtatgctttcgatgatgagcccaccccgtccccgcaggcctatgggggaacccccaatccccaaacacctggctacccagacccctcgtccccacaggtcaacccacaatacaacccgcagacgccagggacgccggccatgtacaacacagaccagttctctccctatgctgccccctccccacaaggttcctaccagcccagccccagcccccagagctaccaccaggtggcgccaagcccagcaggctaccagaatacccactccccagccagctaccaccctacaccgtcgcccatggcctatcaggctagccccagcccgagccccgttggctacagtcctatgacacctggagctccctcccctggtggctacaacccacacacgccaggctcaggcatcgagcagaactccagcgactgggtaaccactgacattcaggtgaaggtgcgggacacctacctggatacacaggtggtgggacagacaggtgtcatccgcagtgtcacggggggcatgtgctctgtgtacctgaaggacagtgagaaggttgtcagcatttccagtgagcacctggagcctatcacccccaccaagaacaacaaggtgaaagtgatcctgggcgaggatcgggaagccacgggcgtcctactgagcattgatggtgaggatggcattgtccgtatggaccttgatgagcagctcaagatcctcaacctccgcttcctggggaagctcctggaagcctgaagcaggcagggccggtggacttcgtcggatgaagagtgatcctccttccttccctggcccttggctgtgacacaagatcctcctgcagggctaggcggattgttctggatttccttttgtttttccttttagttttccatcttttccctccctggtgctcattggaatctgagtagagtctgggggagggtccccaccttcctgtacctcctccccacagcttgcttttgttgtaccgtctttcaataaaaagaagctgtttggtctaaaa

SEQ ID NO: 10198 - protein, 1087 aa, Homo sapiens; identical to SEQ ID NO: 1571

SEQ ID NO: 10199 - DNA, 592 bp, Homo sapiens
agtcaggcgtcgtgcgaacagcagctggtaccgaaggcggaggtggagcccgagagggaaccagcggggaaactgaggctcggggtggagcgcaggattgtgggacgcgccaaggctgctgtctttcccagcagcagcggaagatgtcggacagcgaggacagcaacttttccgaggaggaggacagcgagcgcagcagtgacggcgaggaggccgaggtagacgaagagcggcggagtgcagcgggcagtgagaaagaagaagaatgaccgaccccccaagaaaccccgccatggaggcttcattctggacgaggctgatgttgacgatgagtatgaggacgaggaccagtgggaggatggagcagaggacattctagagaaaggtgtgtgtgagccctgcctccacaagactactgggaagagggtggctgagagggtcttcagagcccattcccccgacccccgcatcccctgtacaccccaactcccaccgtcctcaccttgcttctttctgtccttcccagagagaccagctccctgctttttccttttaggcccatgagtggggggtggggccctggggtggggat

SEQ ID NO: 10200 - protein, 41 aa, Homo sapiens
MSDSEDSNFSEEEDSERSSDGEEAEVDEERRSAAGSEKEEE

SEQ ID NO: 10201 - DNA, 482 bp, Homo sapiens
agtcaggcgtcgtgcgaacagcagctggtaccgaaggcggaggtggagcccgagagcagcggaagatgtcggacagcgaggacagcaacttttccgaggaggaggacagcgagcgcagcagtgacggcgaggaggccgaggtagacgaagagcggcggagtgcagcgggcagtgagaaagaagaagagcctgaggacgaagaggaggaggaagaggaggaggaatacgatgaggaagaggaggaagaagatgatgaccgaccccccaagaaaccccgccatggaggcttcattctggacgaggctgatgttgacgatgagtatgaggacgaggaccagtgggaggatggagcagaggacattctagagaaagaagagattgaagcctccaatatcgataatgttgtcctggatgaagatcgttctggggctcgccgcctgcaaaacctctggagggaccagcgagaagaagaactgggcgag

SEQ ID NO: 10202 - protein, 138 aa, Homo sapiens
MSDSEDSNFSEEEDSERSSDGEEAEVDEERRSAAGSEKEEEPEDEEEEEEEEEYDEEEEEEDDDRPPKKPRHGGFILDEADVDDEYEDEDQWEDGAEDILEKEEIEASNIDNVVLDEDRSGARRLQNLWRDQREEELG

SEQ ID NO: 10203 - DNA, 567 bp, Homo sapiens
gcgaacagcagctggtaccgaaggcggaggtggagcccgagagggaaccagcggggaaactgaggctcggggtggagcgcaggattgtgggacgcgccaaggctgctgtctttcccagcagcagcggaagatgtcggacagcgaggacagcaacttttccgaggaggaggacagcgagcgcagcagtgacggcgaggaggccgaggtagacgaagagcggcggagtgcagcgggcagtgagaaagaagaagagcctgaggacgaagaggaggaggaagaggaggaggaatacgatgaggaagaggaggaagaagatgatgaccgaccccccaagaaaccccgccatggaggcttcattctggacgaggctgatgttgacgatgagtatgaggacgaggaccagtgggaggatggagcagaggacattctagagaaaggtgtgtgtgagccctgcctccacaagactactgggaagagggtggctgagagggtcttcagagcccattcccccgacccccgcatcccctgtacaccccaactcccaccgtcctcaccttgcttctttct

SEQ ID NO: 10204 - protein, 144 aa, Homo sapiens
MSDSEDSNFSEEEDSERSSDGEEAEVDEERRSAAGSEKEEEPEDEEEEEEEEEYDEEEEEEDDDRPPKKPRHGGFILDEADVDDEYEDEDQWEDGAEDILEKGVCEPCLHKTTGKRVAERVFRAHSPDPRIPCTPQLPPSSPCF

SEQ ID NO: 10205 - DNA, 551 bp, Homo sapiens
ggtaccgaaggcggaggtggagcccgagagcagcggaagatgtcggacagcgaggacagcaacttttccgaggaggaggacagcgagcgcagcagtgacggcgaggaggccgaggtagacgaagagcggcggagtgcagcgggcagtgagaaagaagaagagcctgaggacgaagaggaggaggaagaggaggaggaatacgatgaggaagaggaggaagaagatgatgaccgaccccccaagaaaccccgccatggaggcttcattctggacgaggctgatgttgacgatgagtatgaggacgaggaccagtgggaggatggagcagaggacattctagagaaaggtgtgtgtgagccctgcctccacaagactactgggaagagggtggctgagagggtcttcagagcccattcccccgacccccgcatcccctgtacaccccaactcccaccgtcctcaccttgcttctttctgtccttcccagagagaccagctccctgctttttccttttaggcccatgagtggggggtggggccctggggtgggg

SEQ ID NO: 10206 - protein, 161 aa, Homo sapiens [sequence omitted]

SEQ ID NO: 10207 - DNA, 693 bp, Homo sapiens
aggtaagtgcgtgtgcagaggtggcagttccgggcgccggggaggtgtagagaacagattcggaaactggggaggtctagcatgtggcgtaggagggggtcctcactccgcttcgcgattgccaaaacgagcctgccggaagcgccctaaggggttttcttctcccagggaaccagcggggaaactgaggctcggggtggagcgcaggattgtgggacgcgccaaggctgctgtctttcccagcagcagcggaagatgtcggacagcgaggacagcaacttttccgaggaggaggacagcgagcgcagcagtgacggcgaggaggccgaggtagacgaagagcggcggagtgcagcgggcagtgagaaagaagaagagcctgaggacgaagaggaggaggaagaggaggaggaatacgatgaggaagaggaggaagaagatgatgaccgaccccccaagaaaccccgccatggaggcttcattctggacgaggctgatgttgacgatgagtatgaggacgaggaccagtgggaggatggagcagaggacattctagagaaagaagagattgaagcctccaatatcgataatgttgtcctggatgaagatcgttctggggctcgccgcctgcaaaacctctggagggaccagcgagaagaagaactgggcgagtattacatgaagaaatacgcc

SEQ ID NO: 10208 - protein, 145 aa, Homo sapiens; identical to SEQ ID NO: 10192

SEQ ID NO: 10209 - DNA, 3790 bp, Homo sapiens
aggtaagtgcgtgtgcagaggtggcagttccgggcgccggggaggtgtagagaacagattcggaaactggggaggtctagcatgtggcgtaggagggggtcctcactccgcttcgcgattgccaaaacgagcctgccggaagcgccctaaggggttttcttctcccagggaaccagcggggaaactgaggctcggggtggagcgcaggattgtgggacgcgccaaggctgctgtctttcccagcagcagcggaagatgtcggacagcgaggacagcaacttttccgaggaggaggacagcgagcgcagcagtgacggcgaggaggccgaggtagacgaagagcggcggagtgcagcgggcagtgagaaagaagaagagcctgaggacgaagaggaggaggaagaggaggaggaatacgatgaggaagaggaggaagaagatgatgaccgaccccccaagaaaccccgccatggaggcttcattctggacgaggctgatgttgacgatgagtatgaggacgaggaccagtgggaggatggagcagaggacattctagagaaagaagagattgaagcctccaatatcgataatgttgtcctggatgaagatcgttctggggctcgccgcctgcaaaacctctggagggaccagcgagaagaagaactgggcgagtattacatgaagaaatacgccaagtcatctgtgggagagacggtgtatggaggatctgatgagctctcagacgacatcacccagcagcagctgctcccaggagtcaaggatcccaatctgtggactgtcaaatgtaagattggggaggaacgggccacggccatttccttgatgcgcaagttcattgcctaccagttcacagacacgcccctgcagatcaagtcagtagtggcaccagagcatgtgaagggctacatctacgtggaggcctacaagcagacccacgtgaagcaggccattgagggggtgggcaacctgcggcttggctactggaaccagcagatggtgcccatcaaggagatgacagacgtgctcaaagtggtgaaggaggtggccaacctgaaaccaaagtcctgggtccgcctcaagcggggcatctacaaggatgacattgctcaggtggactacgtggagcccagccagaacaccatctccctgaagatgatcccacgcatcgactacgatcgcatcaaggcccgcatgagcttgaaagactggtttgccaaaaggaagaagtttaagcggcctccacagaggctgtttgatgctgagaagatcaggtccctggggggtgatgttgcctctgatggtgacttcctcatctttgaggggaaccgttacagccggaagggctttctgttcaagagcttcgccatgtctgctgtgatcacggagggtgtgaagccaacactctctgagctggaaaagtttgaggaccagccagagggcattgacctggaggtggtgactgagagcacagggaaggagcgggagcacaacttccaacctggggacaacgtggaggtctgtgagggtgagctcatcaacctgcagggcaagatcctcagcgtggatggcaacaagatcaccatcatgcccaagcatgaggacctcaaggacatgttggagttcccagcccaggaacttagaaaatacttcaagatgggggaccacgtgaaggtgattgctggccgattcgagggcgacacaggcctcattgtgcgggtggaggagaatttcgttatcctgttctctgacctcaccatgcatgagctgaaggtgctcccccgggacctgcagctctgctcagagacagcatcaggtgtggatgttgggggccagcatgaatggggcgagctggtgcagctggatccccagactgtgggtgtcatcgtgcgactagaacgggagaccttccaggtgctgaacatgtacgggaaggtggtgactgtcagacatcaggctgtgacccggaagaaggacaaccgctttgctgtggccttggactcagagcagaacaacatccatgtgaaagacatcgttaaggtcattgatggcccccactcaggccgagaaggggagattcgccatctcttccgaagcttcgccttcctacattgcaagaaactggtggagaacgggggcatgtttgtctgcaagacccgccacctggtgctggctgggggctcaaagccccgtgatgtgaccaacttcaccgtgggtggctttgcgcctatgagtccccggatcagcagccccatgcaccccagtgctggaggtcagcgtggcggctttggtagcccaggtggcggcagtggtggcatgagcaggggccggggccggagggacaacgaactcatcggccagaccgtgcgcatctcccaggggccctacaaaggctacatcggtgtggtgaaagatgccacagagtccacggcccgtgtggagctgcactccacctgccagaccatctctgtggaccgtcagcggctcaccacggtgggctcacggcgcccgggcggcatgacctcgacctatgggaggacgcccatgtatggctcccagacgcccatgtatggctctggctcccgaacacccatgtacggctcacagacacccctccaggatggtagccgcaccccacactacggctcacagacgcccctgcatgatggcagccgcactcctgcccagagtggggcctgggaccccaacaaccccaacacgccgtcacgggctgaggaagaatatgagtatgctttcgatgatgagcccaccccgtccccgcaggcctatgggggaacccccaatccccaaacacctggctacccagacccctcgtccccacaggtcaacccacaatacaacccgcagacgccagggacgccggccatgtacaacacagaccagttctctccctatgctgccccctccccacaaggttcctaccagcccagccccagcccccagagctaccaccaggtggcgccaagcccagcaggctaccagaatacccactccccagccagctaccaccctacaccgtcgcccatggcctatcaggctagccccagcccgagccccgttggctacagtcctatgacacctggagctccctcccctggtggctacaacccacacacgccaggctcaggcatcgagcagaactccagcgactgggtaaccactgacattcaggtgaaggtgcgggacacctacctggatacacaggtggtgggacagacaggtgtcatccgcagtgtcacggggggcatgtgctctgtgtacctgaaggacagtgagaaggttgtcagcatttccagtgagcacctggagcctatcacccccaccaagaacaacaaggtgaaagtgatcctgggcgaggatcgggaagccacgggcgtcctactgagcattgatggtgaggatggcattgtccgtatggaccttgatgagcagctcaagatcctcaacctccgcttcctggggaagctcctggaagcctgaagcaggcagggccggtggacttcgtcggatgaagagtgatcctccttccttccctggcccttggctgtgacacaagatcctcctgcagggctaggcggattgttctggatttccttttgtttttccttttagttttccatcttttccctccctggtgctcattggaatctgagtagagtctgggggagggtccccaccttcctgtacctcctccccacagcttgcttttgttgtaccgtctttcaataaaaagaagctgtttggtctaaaa

SEQ ID NO: 10210 - protein, 1087 aa, Homo sapiens; identical to SEQ ID NO: 1571

SEQ ID NO: 10211 - DNA, 367 bp, Homo sapiens
attcggaaactggggaggtctagcatgtggcgtaggagggggtcctcactccgcttcgcgattgccaaaacgagcctgccggaagcgccctaaggggttttcttctcccagggaaccagcggggaaactgaggctcggggtggagcgcaggattgtgggacgcgccaaggctgctgtctttcccagcagcagcggaagatgtcggacagcgaggacagcaacttttccgagttttccatcttttccctccctggtgctcattggaatctgagtagagtctgggggagggtccccaccttcctgtacctcctccccacagcttgcttttgttgtaccgtctttcaataaaaagaagctgtttggtcta

SEQ ID NO: 10212 - protein, 49 aa, Homo sapiens
MSDSEDSNFSEFSIFSLPGAHWNLSRVWGRVPTFLYLLPTACFCCTVFQ

SEQ ID NO: 10213 - DNA, 791 bp, Homo sapiens
ttcaacctttctgtgtccctcccttcccctcccccaacccattggttgattttgctgctataatttggctcatactttgtctgccctcgcccaccaccaccaccaccaccaccaccaccaccaccaccaccacctcctcttcctccaagtagaagagattgaaggtaagaatatgaaaagtgtgattccctgaccttcctcccatatcctgacatttcctccttcctgaggcacctgccctcaccggtagcctccccaccagccccggtctggccctgagggctctgacccatgtaggatccagagtcagggagttctggggccaggtataccccagttgttgacctgggaaagcacggatgtgtctgtctgggactgagcatttgtgggtggtagcgatgtgtggggtggggtgcagtccagggtgtgcctggactttgagatgggaacagctggaagccccccaacttgctgggccccatccccagtctttttgacaagaagcaggatgctgagtaggacagagtaggggatgaggggttgggatttcctctgtgagatgtcatcttcctgccccagggccaaaccctggccctcttagctgcacgctcctattttctccaggcccctgccctccacctgcccttgctcacgccctctgcccattatttttcagcctccaatatcgataatgttgtcctggatgaagatcgttctggggctcgccgcctgcaaaacctctggagggaccagcgagaagaagaactgggcgagtattacatgaagaaata

SEQ ID NO: 10214 - protein, 30 aa, Homo sapiens
MLSWMKIVLGLAACKTSGGTSEKKNWASIT

SEQ ID NO: 10215 - DNA, 380 bp, Homo sapiens
cgcatgagcttgaaagactggtttgccaaaaggaagaagtttaagcggcctccacagaggctgtttgatgctgagaagatcaggtgcgtgtccttggggactggctgggctgggtccccagggccggtgtgtagaatgtgccttttgcaggttcctccccaggggtggccccgccacaggtttagcctgtgaattggttagcttggcagtatagcctcaggcaagtcacttcacatccctgtgcctcagtttcttctgctataaagattgatgaggctgggcgcagcgggagggagcactttggaaggctaaggcaggaggcttgcttgaggcaaggagttcgagaccagcctgggcaacataatgagatcccatctttt

SEQ ID NO: 10216 - protein, 62 aa, Homo sapiens
MSLKDWFAKRKKFKRPPQRLFDAEKIRCVSLGTGWAGSPGPVCRMCLLQVPPQGWPRHRFSL

SEQ ID NO: 10217 - DNA, 4204 bp, Homo sapiens
aaaaagaaaaaagttaaaaaaatatttaaaaagattgatgaggctgggcgtgatggctcacacctataatcccagcgctttgggaggccgaggcgggcggatcacttgaggtcaggagttcaagaccagcctggccaacatggtgaaaccttgtctctactaaaaatacaaaaattagccaagggttgtggtcagctcctgtaatccaagctacttgggaggctgaggcaggagaatcgcttaaacccacgaggcagaaattgcagtgagccgagatcgtgccactgcactccagcctgggtgacagagcgagactccgtctcaaaaaaaaagaaaacaacctctgcttcctcagattatagattatagtgagaattaaataaattagtatgcatatgtactcagaatgcccttggcacgtagtaagtgtgatccatggtgtgatatattgaaatgggattcatggactatgtcaggctttagaaagtctcctttcctgatctgcttatgcccacttgagatgggggggtatggagtgcctttccctcaggatgccccccagactccctagctgggtagagaattggagcagcccaggaatttcaacatcccagggccaactgggggctccggcagggagggcaggagaggaggacatggagaaacgagaggtgccagtgacactcttccctctggtcctgttctagaactaattgtgtgtgattcagccagtcaggttttccttcagataaaggaagagctgtggaatgcacctttgagtctgcacccaagggccttgctaatacttcacctgcctgagttcggacccatttataccactggtttcgactcacctgaacctctctttgcaaagaacaaaccctagtgctcccttaccccccagcaagccagctgaccaagtaccccagcatgcccagcagagcatgctggcccctctcccagattcaccatgggagaaggcgattgcatgagcgcaggaggaacttgacctgctcctccatgaaggaggctccttccccaccccggagactcggaacaggcactaagcggccgccactccacatttggggccgggagctgcaggcttgggagtcccacctgcctgcttttgaatcctgtcaagactgtggcttggcacccttgggcatgtgatgtgaccttcctgagcctgcattccctcacctggaaatgatgagcagttactgatgccacagatttggggaagagcctgtgaggtcatgagtgtgcaggccaggctgagcgctctgcgaatattcactggtatcattgtctgaaactgttattttgttcagctaatgtttactgcatactttctgtgtactgggcactattcttggtgaaatttagtgaatgttacatccctgaccttctggagctgacatgctagttagggggacaggtcaaacactagattgtcagatggtgatcggtgctcaaagataaatcagggaatgggtggaggagtgcagggaggtgggaggcgggcctttggggtttgtgagaagtcactgctgccaagagggtgtgtgctgggatgggatgggtcagtctgcctgtggtcctctccttctgttgccagctgagaagactgaggtacagcaagattttcttcttgactctcccttctaatcttctctcccccatcaaattccaggtccctggggggtgatgttgcctctgatggtgacttcctcatctttgaggggaaccgttacagccggaagggctttctgttcaagagcttcgccatgtctgctgtgatcacggagggtgtgaagccaacactctctgagctggaaaagtttgaggaccagccagagggcattgacctggaggtggtgactgagagcacagggaaggagcgggagcacaacttccaacctggggacaacgtggaggtctgtgagggtgagctcatcaacctgcagggcaagatcctcagcgtggatggcaacaagatcaccatcatgcccaagcatgaggacctcaaggacatgttggagttcccagcccaggaacttagaaaatacttcaagatgggggaccacgtgaaggtgattgctggccgattcgagggcgacacaggcctcattgtgcgggtggaggagaatttcgttatcctgttctctgacctcaccatgcatgagctgaaggtgctcccccgggacctgcagctctgctcagagacagcatcaggtgtggatgttgggggccagcatgaatggggcgagctggtgcagctggatccccagactgtgggtgtcatcgtgcgactagaacgggagaccttccaggtgctgaacatgtacgggaaggtggtgactgtcagacatcaggctgtgacccggaagaaggacaaccgctttgctgtggccttggactcagagcagaacaacatccatgtgaaagacatcgttaaggtcattgatggcccccactcaggccgagaaggggagattcgccatctcttccgaagcttcgccttcctacattgcaagaaactggtggagaacgggggcatgtttgtctgcaagacccgccacctggtgctggctgggggctcaaagccccgtgatgtgaccaacttcaccgtgggtggctttgcgcctatgagtccccggatcagcagccccatgcaccccagtgctggaggtcagcgtggcggctttggtagcccaggtggcggcagtggtggcatgagcaggggccggggccggagggacaacgaactcatcggccagaccgtgcgcatctcccaggggccctacaaaggctacatcggtgtggtgaaagatgccacagagtccacggcccgtgtggagctgcactccacctgccagaccatctctgtggaccgtcagcggctcaccacggtgggctcacggcgcccgggcggcatgacctcgacctatgggaggacgcccatgtatggctcccagacgcccatgtatggctctggctcccgaacacccatgtacggctcacagacacccctccaggatggtagccgcaccccacactacggctcacagacgcccctgcatgatggcagccgcactcctgcccagagtggggcctgggaccccaacaaccccaacacgccgtcacgggctgaggaagaatatgagtatgctttcgatgatgagcccaccccgtccccgcaggcctatgggggaacccccaatccccaaacacctggctacccagacccctcgtccccacaggtcaacccacaatacaacccgcagacgccagggacgccggccatgtacaacacagaccagttctctccctatgctgccccctccccacaaggttcctaccagcccagccccagcccccagagctaccaccaggtggcgccaagcccagcaggctaccagaatacccactccccagccagctaccaccctacaccgtcgcccatggcctatcaggctagccccagcccgagccccgttggctacagtcctatgacacctggagctccctcccctggtggctacaacccacacacgccaggctcaggcatcgagcagaactccagcgactgggtaaccactgacattcaggtgaaggtgcgggacacctacctggatacacaggtggtgggacagacaggtgtcatccgcagtgtcacggtacgtggggcccagggtggtgggtgagcaggcatcctctccttggtaccccctaaactggagacagacctgtccccagatggtgacagcccagagtgggcagagctgggattgaggaagcctagagggcaaggggagctatgtgaacccaaaggaggcatcttacctgatttagcggggaatcagggagggctgcctggggaaggagaaatctgagccaagacctgacaaatgaataggagtaagctaaggaaagtgactggggtgagtgagttccaaatggagggaactgcatgtgcagaggcctggaggtgaggggaacctgggcacattccaggagctgaagggtttgttgtggctggaacataaagagccaaagggggccaagcagtgcttcacacctgtaatcccagcactctgggaggccgaggtgggcagatcacctgaggtcaggagttcaagaccagcctggtcaacgtggtgaaaccctgtctctactaaaaatacaaaaaaaaaaaaaa

SEQ ID NO: 10218 - protein, 639 aa, Homo sapiens
MSAVITEGVKPTLSELEKFEDQPEGIDLEVVTESTGKEREHNFQPGDNVEVCEGELINLQGKILSVDGNKITIMPKHEDLKDMLEFPAQELRKYFKMGDHVKVIAGRFEGDTGLIVRVEENFVILFSDLTMHELKVLPRDLQLCSETASGVDVGGQHEWGELVQLDPQTVGVIVRLERETFQVLNMYGKVVTVRHQAVTRKKDNRFAVALDSEQNNIHVKDIVKVIDGPHSGREGEIRHLFRSFAFLHCKKLVENGGMFVCKTRHLVLAGGSKPRDVTNFTVGGFAPMSPRISSPMHPSAGGQRGGFGSPGGGSGGMSRGRGRRDNELIGQTVRISQGPYKGYIGVVKDATESTARVELHSTCQTISVDRQRLTTVGSRRPGGMTSTYGRTPMYGSQTPMYGSGSRTPMYGSQTPLQDGSRTPHYGSQTPLHDGSRTPAQSGAWDPNNPNTPSRAEEEYEYAFDDEPTPSPQAYGGTPNPQTPGYPDPSSPQVNPQYNPQTPGTPAMYNTDQFSPYAAPSPQGSYQPSPSPQSYHQVAPSPAGYQNTHSPASYHPTPSPMAYQASPSPSPVGYSPMTPGAPSPGGYNPHTPGSGIEQNSSDWVTTDIQVKVRDTYLDTQVVGQTGVIRSVTVRGAQGGG

SEQ ID NO: 10219 - DNA, 947 bp, Homo sapiens
aggtgggagagaccctcacgggctgaatggccaggcctcagagctaggggcttgttggtgagggaggtgaccaagatgaggtccagagctctggtggggcctgcagaccatggggcggtccctgagaccaggtccaggaagaggagcaggtgtggggaagacgctgaggccagtttgggacatgaagagtcaagaagcagtctcctttttgcctgttagcttcattctgatgcttcccttgctgattgggtcaccctgtccaccctgacatgcaccacaggccccaggccttggaaccaggcccagccttggcctttcctgcccccatttcaccttgagttctcagaatgagccctgagcctgtgtcccctggagtatgggcctcagtcccatgttgggagcaggacaggctgaccaggctgtccccatcctccaggggggcatgtgctctgtgtacctgaaggacagtgagaaggttgtcagcatttccagtgagcacctggagcctatcacccccaccaagaacaacaaggtgaaagtgatcctgggcgaggatcgggaagccacgggcgtcctactgagcattgatggtgaggatggcattgtccgtatggaccttgatgagcagctcaagatcctcaacctccgcttcctggggaagctcctggaagcctgaagcaggcagggccggtggacttcgtcggatgaagagtgatcctccttccttccctggcccttggctgtgacacaagatcctcctgcagggctaggcggattgttctggatttccttttgtttttccttttagttttccatcttttccctccctggtgctcattggaatctgagtagagtctgggggagggtccccaccttcctgtacctcctccccacagcttgcttttgttgtaccgtctttcaataaaaagaagctgtttggtctaaaa

SEQ ID NO: 10220 - protein, 99 aa, Homo sapiens [sequence omitted]

SEQ ID NO: 10221 - DNA, 1147 bp, Homo sapiens
ctcagaggctggagggatcctccgtatgctgaacgctggtcccctgggccccctttatttctttctctatactttgtttctgtgtctttttctcttccaaagtctctcgttccacctaacgagaaacacccacaggtgtggaggggcaacccatcccttcagacaattgggaggtgagggccgattgccttacacggtgagacaagcggcctgactcgtgactatttttttggacaaatcaggcagccactgactcccttcattatggcctcagctttatctctgggcaataagtgtgatcccttccttcgctgcgtcctttgcaggggcggtggcgctctgcaaggcccaagggggcgtggtccagatgactttgaatcccagttgtcgcccccagggtcagccaggagactagtcagaagcaaacgcgcctgcggcaatccgcccgatgcctttggtctctctcgggcttccgtccacccgcccctcccccgcgtttccattggctgtagctccggcccggggcgggcgaagagggagcgagtgggcggggccgcgtggcgtcagcgcaagatggcggcctcggcagcggtgttctcgcgcttgcgaagcgggctccggctcggctcgcggggactgtgcacgaggttggcgacgccgccccgccgggccccagatcaggccgcagagatcgggagccgcgggagcactaaggcgcaagggccacagcagcagccgggctcagagggtcccagctatgccaaaaaagttgcgctctggcttgctgggctgcttggagctggtgggactgtgagcgtcgtctatatctttggaaacaacccggtggacgaaaatggtgccaaggtgagggggaaagagaccgaggccttgccaggagtcctagtctgtgggtgagaggggtcccctttggtctgttcaggcacattgctggtctggagtgagcctttctttcccagtgacctttgcctgttcctcttggggtcctggagattccttttctgtatgtgatggggttctgcctctgacatcctaaaccttccatttttctctctacctcccagattcctgatgagttcgacaatggtgagtaaacaagcacagattctggagtccctgaccctctcaa

SEQ ID NO: 10222 - protein, 216 aa, Homo sapiens
MASALSLGNKCDPFLRCVLCRGGGALQGPRGRGPDDFESQLSPPGSARRLVRSKRACGNPPDAFGLSRASVHPPLPRVSIGCSSGPGRAKRERVGGAAWRQRKMAASAAVFSRLRSGLRLGSRGLCTRLATPPRRAPDQAAEIGSRGSTKAQGPQQQPGSEGPSYAKKVALWLAGLLGAGGTVSVVYIFGNNPVDENGAKVRGKETEALPGVLVCG

SEQ ID NO: 10223 - DNA, 1275 bp, Homo sapiens
ctcagaggctggagggatcctccgtatgctgaacgctggtcccctgggccccctttatttctttctctatactttgtttctgtgtctttttctcttccaaagtctctcgttccacctaacgagaaacacccacaggtgtggaggggcaacccatcccttcagacaattgggaggtgagggccgattgccttacacggtgagacaagcggcctgactcgtgactatttttttggacaaatcaggcagccactgactcccttcattatggcctcagctttatctctgggcaataagtgtgatcccttccttcgctgcgtcctttgcaggggcggtggcgctctgcaaggcccaagggggcgtggtccagatgactttgaatcccagttgtcgcccccagggtcagccaggagactagtcagaagcaaacgcgcctgcggcaatccgcccgatgcctttggtctctctcgggcttccgtccacccgcccctcccccgcgtttccattggctgtagctccggcccggggcgggcgaagagggagcgagtgggcggggccgcgtggcgtcagcgcaagatggcggcctcggcagcggtgttctcgcgcttgcgaagcgggctccggctcggctcgcggggactgtgcacgaggttggcgacgccgccccgccgggccccagatcaggccgcagagatcgggagccgcgggagcactaaggcgcaagggccacagcagcagccgggctcagagggtcccagctatgccaaaaaagttgcgctctggcttgctgggctgcttggagctggtgggactgtgagcgtcgtctatatctttggaaacaacccggtggacgaaaatggtgccaagattcctgatgagttcgacaatggtgagtaaacaagcacagattctggagtccctgaccctctcaactctgtcatttgtaaggatgtctctctccccatctggtgtctccggcccctcctccttccactggggaggtgggggagccagcagctggatggctttgtggggagggacattacaaagcccaagcccacttccctggcccctcagccccgagcagatggtcagagacagatgggggattggagccttgggtgggagggcttggggacacagggtggcctatctccagacacatgggttcctgtgccttagaccaagcatctgcggttcccaactccttccccatccccctcgagcccctaccccattaggctcattttcaaaactatgccgccttcctctctcccc

SEQ ID NO: 10224 - protein, 209 aa, Homo sapiens
MASALSLGNKCDPFLRCVLCRGGGALQGPRGRGPDDFESQLSPPGSARRLVRSKRACGNPPDAFGLSRASVHPPLPRVSIGCSSGPGRAKRERVGGAAWRQRKMAASAAVFSRLRSGLRLGSRGLCTRLATPPRRAPDQAAEIGSRGSTKAQGPQQQPGSEGPSYAKKVALWLAGLLGAGGTVSVVYIFGNNPVDENGAKIPDEFDNGE

SEQ ID NO: 10225 - DNA, 1738 bp, Homo sapiens
ctcagaggctggagggatcctccgtatgctgaacgctggtcccctgggccccctttatttctttctctatactttgtttctgtgtctttttctcttccaaagtctctcgttccacctaacgagaaacacccacaggtgtggaggggcaacccatcccttcagacaattgggaggtgagggccgattgccttacacggtgagacaagcggcctgactcgtgactatttttttggacaaatcaggcagccactgactcccttcattatggcctcagctttatctctgggcaataagtgtgatcccttccttcgctgcgtcctttgcaggggcggtggcgctctgcaaggcccaagggggcgtggtccagatgactttgaatcccagttgtcgcccccagggtcagccaggagactagtcagaagcaaacgcgcctgcggcaatccgcccgatgcctttggtctctctcgggcttccgtccacccgcccctcccccgcgtttccattggctgtagctccggcccggggcgggcgaagagggagcgagtgggcggggccgcgtggcgtcagcgcaagatggcggcctcggcagcggtgttctcgcgcttgcgaagcgggctccggctcggctcgcggggactgtgcacgaggttggcgacgccgccccgccgggccccagatcaggccgcagagatcgggagccgcgggagcactaaggcgcaagggccacagcagcagccgggctcagagggtcccagctatgccaaaaaagttgcgctctggcttgctgggctgcttggagctggtgggactgtgagcgtcgtctatatctttggaaacaacccggtggacgaaaatggtgccaagattcctgatgagttcgacaatgatccaattctggtacagcagttgcgccggacatacaaatatttcaaagattatagacagatgatcatcgagcccaccagcccttgccttctcccagaccctctgcaggaaccgtactaccagccaccctacacgctcgttttggagctcaccggcgtcctcttgcatcctgagtggtcgctggccactggctggaggtttaagaagcgcccaggcatcgagaccttgttccagcagcttgcccctttatatgaaattgtcatctttacgtcagagactggcatgactgcgtttccactcattgatagtgtggacccccatggcttcatctcctaccgcctattccgggacgccacaagatacatggatggacaccatgtaaaggatatttcatgtctgaatcgggacccagctcgagtagtagttgtggactgcaagaaggaagccttccgcctgcagccctataacggcgttgccctgcggccctgggacggcaactctgatgaccgggtcttgttggatctgtctgccttcctcaagaccattgcactgaatggtgtggaggacgtgcgaaccgtgctggagcactatgccctggaggatgacccgctggcggctttcaaacagcggcaaagccggctagagcaggaggagcagcagcgcctggccgagctctccaagtccaacaagcagaacctcttccttggctccctcaccagccgcttgtggcctcgctccaaacagccctgaactctgggcctcctcaaactcagtgcctgggtccagggccccagtgcttccagaccaagacttgggccaccacttgtccaataaagtacatcccagacgccac

SEQ ID NO: 10226 - protein, 456 aa, Homo sapiens; identical to SEQ ID NO: 1573

SEQ ID NO: 10227 - DNA, 1679 bp, Homo sapiens
ctcagaggctggagggatcctccgtatgctgaacgctggtcccctgggccccctttatttctttctctatactttgtttctgtgtctttttctcttccaaagtctctcgttccacctaacgagaaacacccacaggtgtggaggggcaacccatcccttcagacaattgggaggtgagggccgattgccttacacggtgagacaagcggcctgactcgtgactatttttttggacaaatcaggcagccactgactcccttcattatggcctcagctttatctctgggcaataagtgtgatcccttccttcgctgcgtcctttgcaggggcggtggcgctctgcaaggcccaagggggcgtggtccagatgactttgaatcccagttgtcgcccccagggtcagccaggagactagtcagaagcaaacgcgcctgcggcaatccgcccgatgcctttggtctctctcgggcttccgtccacccgcccctcccccgcgtttccattggctgtagctccggcccggggcgggcgaagagggagcgagtgggcggggccgcgtggcgtcagcgcaagatggcggcctcggcagcggtgttctcgcgcttgcgaagcgggctccggctcggctcgcggggactgtgcacgaggttggcgacgccgccccgccgggccccagatcaggccgcagagatcgggagccgcgggagcactaaggcgcaagggccacagcagcagccgggctcagagggtcccagctatgccaaaaaagttgcgctctggcttgctgggctgcttggagctggtgggactgtgagcgtcgtctatatctttggaaacaacccggtggacgaaaatggtgccaagattcctgatgagttcgacaatgatgatcatcgagcccaccagcccttgccttctcccagaccctctgcaggaaccgtactaccagccaccctacacgctcgttttggagctcaccggcgtcctcttgcatcctgagtggtcgctggccactggctggaggtttaagaagcgcccaggcatcgagaccttgttccagcagcttgcccctttatatgaaattgtcatctttacgtcagagactggcatgactgcgtttccactcattgatagtgtggacccccatggcttcatctcctaccgcctattccgggacgccacaagatacatggatggacaccatgtaaaggatatttcatgtctgaatcgggacccagctcgagtagtagttgtggactgcaagaaggaagccttccgcctgcagccctataacggcgttgccctgcggccctgggacggcaactctgatgaccgggtcttgttggatctgtctgccttcctcaagaccattgcactgaatggtgtggaggacgtgcgaaccgtgctggagcactatgccctggaggatgacccgctggcggctttcaaacagcggcaaagccggctagagcaggaggagcagcagcgcctggccgagctctccaagtccaacaagcagaacctcttccttggctccctcaccagccgcttgtggcctcgctccaaacagccctgaactctgggcctcctcaaactcagtgcctgggtccagggccccagtgcttccagaccaagacttgggccaccacttgtccaataaagtacatcccagacgccac

SEQ ID NO: 10228 - protein, 244 aa, Homo sapiens
MASALSLGNKCDPFLRCVLCRGGGALQGPRGRGPDDFESQLSPPGSARRLVRSKRACGNPPDAFGLSRASVHPPLPRVSIGCSSGPGRAKRERVGGAAWRQRKMAASAAVFSRLRSGLRLGSRGLCTRLATPPRRAPDQAAEIGSRGSTKAQGPQQQPGSEGPSYAKKVALWLAGLLGAGGTVSVVYIFGNNPVDENGAKIPDEFDNDDHRAHQPLPSPRPSAGTVLPATLHARFGAHRRPLAS

SEQ ID NO: 10229 - DNA, 1657 bp, Homo sapiens
ctcagaggctggagggatcctccgtatgctgaacgctggtcccctgggccccctttatttctttctctatactttgtttctgtgtctttttctcttccaaagtctctcgttccacctaacgagaaacacccacaggtgtggaggggcaacccatcccttcagacaattgggaggtgagggccgattgccttacacggtgagacaagcggcctgactcgtgactatttttttggacaaatcaggcagccactgactcccttcattatggcctcagctttatctctgggcaataagtgtgatcccttccttcgctgcgtcctttgcaggggcggtggcgctctgcaaggcccaagggggcgtggtccagatgactttgaatcccagttgtcgcccccagggtcagccaggagactagtcagaagcaaacgcgcctgcggcaatccgcccgatgcctttggtctctctcgggcttccgtccacccgcccctcccccgcgtttccattggctgtagctccggcccggggcgggcgaagagggagcgagtgggcggggccgcgtggcgtcagcgcaagatggcggcctcggcagcggtgttctcgcgcttgcgaagcgggctccggctcggctcgcggggactgtgcacgaggttggcgacgccgccccgccgggccccagatcaggccgcagagatcgggagccgcgggagcactaaggcgcaagggccacagcagcagccgggctcagagggtcccagctatgccaaaaaagttgcgctctggcttgctgggctgcttggagctggtgggactgtgagcgtcgtctatatctttggaaacaacccggtggacgaaaatggtgccaagatgatcatcgagcccaccagcccttgccttctcccagaccctctgcaggaaccgtactaccagccaccctacacgctcgttttggagctcaccggcgtcctcttgcatcctgagtggtcgctggccactggctggaggtttaagaagcgcccaggcatcgagaccttgttccagcagcttgcccctttatatgaaattgtcatctttacgtcagagactggcatgactgcgtttccactcattgatagtgtggacccccatggcttcatctcctaccgcctattccgggacgccacaagatacatggatggacaccatgtaaaggatatttcatgtctgaatcgggacccagctcgagtagtagttgtggactgcaagaaggaagccttccgcctgcagccctataacggcgttgccctgcggccctgggacggcaactctgatgaccgggtcttgttggatctgtctgccttcctcaagaccattgcactgaatggtgtggaggacgtgcgaaccgtgctggagcactatgccctggaggatgacccgctggcggctttcaaacagcggcaaagccggctagagcaggaggagcagcagcgcctggccgagctctccaagtccaacaagcagaacctcttccttggctccctcaccagccgcttgtggcctcgctccaaacagccctgaactctgggcctcctcaaactcagtgcctgggtccagggccccagtgcttccagaccaagacttgggccaccacttgtccaataaagtacatcccagacgccac

SEQ ID NO: 10230 - protein, 429 aa, Homo sapiens
MASALSLGNKCDPFLRCVLCRGGGALQGPRGRGPDDFESQLSPPGSARRLVRSKRACGNPPDAFGLSRASVHPPLPRVSIGCSSGPGRAKRERVGGAAWRQRKMAASAAVFSRLRSGLRLGSRGLCTRLATPPRRAPDQAAEIGSRGSTKAQGPQQQPGSEGPSYAKKVALWLAGLLGAGGTVSVVYIFGNNPVDENGAKMIIEPTSPCLLPDPLQEPYYQPPYTLVLELTGVLLHPEWSLATGWRFKKRPGIETLFQQLAPLYEIVIFTSETGMTAFPLIDSVDPHGFISYRLFRDATRYMDGHHVKDISCLNRDPARVVVVDCKKEAFRLQPYNGVALRPWDGNSDDRVLLDLSAFLKTIALNGVEDVRTVLEHYALEDDPLAAFKQRQSRLEQEEQQRLAELSKSNKQNLFLGSLTSRLWPRSKQP

SEQ ID NO: 10231 - DNA, 1319 bp, Homo sapiens
ctcagaggctggagggatcctccgtatgctgaacgctggtcccctgggccccctttatttctttctctatactttgtttctgtgtctttttctcttccaaagtctctcgttccacctaacgagaaacacccacaggtgtggaggggcaacccatcccttcagacaattgggaggtgagggccgattgccttacacggtgagacaagcggcctgactcgtgactatttttttggacaaatcaggcagccactgactcccttcattatggcctcagctttatctctgggcaataagtgtgatcccttccttcgctgcgtcctttgcaggggcggtggcgctctgcaaggcccaagggggcgtggtccagatgactttgaatcccagttgtcgcccccagggtcagccaggagactagtcagaagcaaacgcgcctgcggcaatccgcccgatgcctttggtctctctcgggcttccgtccacccgcccctcccccgcgtttccattggctgtagctccggcccggggcgggcgaagagggagcgagtgggcggggccgcgtggcgtcagcgcaagatggcggcctcggcagcggtgttctcgcgcttgcgaagcgggctccggctcggctcgcggggactgtgcacgaggttggcgacgccgccccgccgggccccagatcaggatatttcatgtctgaatcgggacccagctcgagtagtagttgtggactgcaagaaggaagccttccgcctgcagccctataacggcgttgccctgcggccctgggacggcaactctgatgaccgggtcttgttggatctgtctgccttcctcaagaccattgcactgaatggtgtggaggacgtgcgaaccgtgctggagcactatgccctggaggatgacccgctggcggctttcaaacagcggcaaagccggctagagcaggaggagcagcagcgcctggccgagctctccaagtccaacaagcagaacctcttccttggctccctcaccagccgcttgtggcctcgctccaaacagccctgaactctgggcctcctcaaactcagtgcctgggtccagggccccagtgcttccagaccaagacttgggccaccacttgtccaataaagtacatcccagacgccacacctgctgtgtcccgagagtctccagatgggggcatcagggtgaggtccgggactcttgggtcatcgtcccacagtggctgatcggctgccaagcacagtgggggtgctttgttggatcagagcagatttttcaccctggtctcggaatctaaaaaccctcgctgtgtc

SEQ ID NO: 10232 - protein, 260 aa, Homo sapiens
MASALSLGNKCDPFLRCVLCRGGGALQGPRGRGPDDFESQLSPPGSARRLVRSKRACGNPPDAFGLSRASVHPPLPRVSIGCSSGPGRAKRERVGGAAWRQRKMAASAAVFSRLRSGLRLGSRGLCTRLATPPRRAPDQDISCLNRDPARVVVVDCKKEAFRLQPYNGVALRPWDGNSDDRVLLDLSAFLKTIALNGVEDVRTVLEHYALEDDPLAAFKQRQSRLEQEEQQRLAELSKSNKQNLFLGSLTSRLWPRSKQP

SEQ ID NO: 10233 - DNA, 1826 bp, Homo sapiens
ctcagaggctggagggatcctccgtatgctgaacgctggtcccctgggccccctttatttctttctctatactttgtttctgtgtctttttctcttccaaagtctctcgttccacctaacgagaaacacccacaggtgtggaggggcaacccatcccttcagacaattgggaggtgagggccgattgccttacacggtgagacaagcggcctgactcgtgactatttttttggacaaatcaggcagccactgactcccttcattatggcctcagctttatctctgggcaataagtgtgatcccttccttcgctgcgtcctttgcaggggcggtggcgctctgcaaggcccaagggggcgtggtccagatgactttgaatcccagttgtcgcccccagggtcagccaggagactagtcagaagcaaacgcgcctgcggcaatccgcccgatgcctttggtctctctcgggcttccgtccacccgcccctcccccgcgtttccattggctgtagctccggcccggggcgggcgaagagggagcgagtgggcggggccgcgtggcgtcagcgcaagatggcggcctcggcagcggtgttctcgcgcttgcgaagcgggctccggctcggctcgcggggactgtgcacgaggttggcgacgccgccccgccgggccccagatcaggccgcagagatcgggagccgcgggagcactaaggcgcaagggccacagcagcagccgggctcagagggtcccagctatgccaaaaaagttgcgctctggcttgctgggctgcttggagctggtgggactgtgagcgtcgtctatatctttggaaacaacccggtggacgaaaatggtgccaagatgatcatcgagcccaccagcccttgccttctcccagaccctctgcaggaaccgtactaccagccaccctacacgctcgttttggagctcaccggcgtcctcttgcatcctgagtggtcgctggccactggctggaggtttaagaagcgcccaggcatcgagaccttgttccagcagcttgcccctttatatgaaattgtcatctttacgtcagagactggcatgactgcgtttccactcattgatagtgtggacccccatggcttcatctcctaccgcctattccgggacgccacaagatacatggatggacaccatgtaaaggatatttcatgtctgaatcgggacccagctcgagtagtagttgtggactgcaagaaggaagccttccgcctgcagccctataacggcgttgccctgcggccctgggacggcaactctgatgaccgggtcttgttggatctgtctgccttcctcaagaccattgcactgaatggtgtggaggacgtgcgaaccgtgctggagcactatgccctggaggatgacccgctggcggctttcaaacagcggcaaagccggctagagcaggaggagcagcagcgcctggccgagctctccaagtccaacaagcagaacctcttccttggctccctcaccagccgcttgtggcctcgctccaaacagccctgaactctgggcctcctcaaactcagtgcctgggtccagggccccagtgcttccagaccaagacttgggccaccacttgtccaataaagtacatcccagacgccacacctgctgtgtcccgagagtctccagatgggggcatcagggtgaggtccgggactcttgggtcatcgtcccacagtggctgatcggctgccaagcacagtgggggtgctttgttggatcagagcagatttttcaccctggtctcggaatctaaaaaccctcgctgtgtc

SEQ ID NO: 10234 - protein, 429 aa, Homo sapiens; identical to SEQ ID NO: 10230

SEQ ID NO: 10235 - DNA, 1848 bp, Homo sapiens
ctcagaggctggagggatcctccgtatgctgaacgctggtcccctgggccccctttatttctttctctatactttgtttctgtgtctttttctcttccaaagtctctcgttccacctaacgagaaacacccacaggtgtggaggggcaacccatcccttcagacaattgggaggtgagggccgattgccttacacggtgagacaagcggcctgactcgtgactatttttttggacaaatcaggcagccactgactcccttcattatggcctcagctttatctctgggcaataagtgtgatcccttccttcgctgcgtcctttgcaggggcggtggcgctctgcaaggcccaagggggcgtggtccagatgactttgaatcccagttgtcgcccccagggtcagccaggagactagtcagaagcaaacgcgcctgcggcaatccgcccgatgcctttggtctctctcgggcttccgtccacccgcccctcccccgcgtttccattggctgtagctccggcccggggcgggcgaagagggagcgagtgggcggggccgcgtggcgtcagcgcaagatggcggcctcggcagcggtgttctcgcgcttgcgaagcgggctccggctcggctcgcggggactgtgcacgaggttggcgacgccgccccgccgggccccagatcaggccgcagagatcgggagccgcgggagcactaaggcgcaagggccacagcagcagccgggctcagagggtcccagctatgccaaaaaagttgcgctctggcttgctgggctgcttggagctggtgggactgtgagcgtcgtctatatctttggaaacaacccggtggacgaaaatggtgccaagattcctgatgagttcgacaatgatgatcatcgagcccaccagcccttgccttctcccagaccctctgcaggaaccgtactaccagccaccctacacgctcgttttggagctcaccggcgtcctcttgcatcctgagtggtcgctggccactggctggaggtttaagaagcgcccaggcatcgagaccttgttccagcagcttgcccctttatatgaaattgtcatctttacgtcagagactggcatgactgcgtttccactcattgatagtgtggacccccatggcttcatctcctaccgcctattccgggacgccacaagatacatggatggacaccatgtaaaggatatttcatgtctgaatcgggacccagctcgagtagtagttgtggactgcaagaaggaagccttccgcctgcagccctataacggcgttgccctgcggccctgggacggcaactctgatgaccgggtcttgttggatctgtctgccttcctcaagaccattgcactgaatggtgtggaggacgtgcgaaccgtgctggagcactatgccctggaggatgacccgctggcggctttcaaacagcggcaaagccggctagagcaggaggagcagcagcgcctggccgagctctccaagtccaacaagcagaacctcttccttggctccctcaccagccgcttgtggcctcgctccaaacagccctgaactctgggcctcctcaaactcagtgcctgggtccagggccccagtgcttccagaccaagacttgggccaccacttgtccaataaagtacatcccagacgccacacctgctgtgtcccgagagtctccagatgggggcatcagggtgaggtccgggactcttgggtcatcgtcccacagtggctgatcggctgccaagcacagtgggggtgctttgttggatcagagcagatttttcaccctggtctcggaatctaaaaaccctcgctgtgtc

SEQ ID NO: 10236 - protein, 244 aa, Homo sapiens; identical to SEQ ID NO: 10228

SEQ ID NO: 10237 - DNA, 1299 bp, Homo sapiens
ctcagaggctggagggatcctccgtatgctgaacgctggtcccctgggccccctttatttctttctctatactttgtttctgtgtctttttctcttccaaagtctctcgttccacctaacgagaaacacccacaggtgtggaggggcaacccatcccttcagacaattgggaggtgagggccgattgccttacacggtgagacaagcggcctgactcgtgactatttttttggacaaatcaggcagccactgactcccttcattatggcctcagctttatctctgggcaataagtgtgatcccttccttcgctgcgtcctttgcaggggcggtggcgctctgcaaggcccaagggggcgtggtccagatgactttgaatcccagttgtcgcccccagggtcagccaggagactagtcagaagcaaacgcgcctgcggcaatccgcccgatgcctttggtctctctcgggcttccgtccacccgcccctcccccgcgtttccattggctgtagctccggcccggggcgggcgaagagggagcgagtgggcggggccgcgtggcgtcagcgcaagatggcggcctcggcagcggtgttctcgcgcttgcgaagcgggctccggctcggctcgcggggactgtgcacgaggttggcgacgccgccccgccgggccccagatcaggccgcagagatcgggagccgcgggagcactaaggcgcaagggccacagcagcagccgggctcagagggtcccagctatgccaaaaaagttgcgctctgatgaccgggtcttgttggatctgtctgccttcctcaagaccattgcactgaatggtgtggaggacgtgcgaaccgtgctggagcactatgccctggaggatgacccgctggcggctttcaaacagcggcaaagccggctagagcaggaggagcagcagcgcctggccgagctctccaagtccaacaagcagaacctcttccttggctccctcaccagccgcttgtggcctcgctccaaacagccctgaactctgggcctcctcaaactcagtgcctgggtccagggccccagtgcttccagaccaagacttgggccaccacttgtccaataaagtacatcccagacgccacacctgctgtgtcccgagagtctccagatgggggcatcagggtgaggtccgggactcttgggtcatcgtcccacagtggctgatcggctgccaagcacagtgggggtgctttgttggatcagagcagatttttcaccctggtctcggaatctaaaaaccctcgctgtgtc

SEQ ID NO: 10238 - protein, 192 aa, Homo sapiens
MPLVSLGLPSTRPSPAFPLAVAPARGGRRGSEWAGPRGVSARWRPRQRCSRACEAGSGSARGDCARGWRRRPAGPQIRPQRSGAAGALRRKGHSSSRAQRVPAMPKKLRSDDRVLLDLSAFLKTIALNGVEDVRTVLEHYALEDDPLAAFKQRQSRLEQEEQQRLAELSKSNKQNLFLGSLTSRLWPRSKQP

SEQ ID NO: 10239 - DNA, 1907 bp, Homo sapiens
ctcagaggctggagggatcctccgtatgctgaacgctggtcccctgggccccctttatttctttctctatactttgtttctgtgtctttttctcttccaaagtctctcgttccacctaacgagaaacacccacaggtgtggaggggcaacccatcccttcagacaattgggaggtgagggccgattgccttacacggtgagacaagcggcctgactcgtgactatttttttggacaaatcaggcagccactgactcccttcattatggcctcagctttatctctgggcaataagtgtgatcccttccttcgctgcgtcctttgcaggggcggtggcgctctgcaaggcccaagggggcgtggtccagatgactttgaatcccagttgtcgcccccagggtcagccaggagactagtcagaagcaaacgcgcctgcggcaatccgcccgatgcctttggtctctctcgggcttccgtccacccgcccctcccccgcgtttccattggctgtagctccggcccggggcgggcgaagagggagcgagtgggcggggccgcgtggcgtcagcgcaagatggcggcctcggcagcggtgttctcgcgcttgcgaagcgggctccggctcggctcgcggggactgtgcacgaggttggcgacgccgccccgccgggccccagatcaggccgcagagatcgggagccgcgggagcactaaggcgcaagggccacagcagcagccgggctcagagggtcccagctatgccaaaaaagttgcgctctggcttgctgggctgcttggagctggtgggactgtgagcgtcgtctatatctttggaaacaacccggtggacgaaaatggtgccaagattcctgatgagttcgacaatgatccaattctggtacagcagttgcgccggacatacaaatatttcaaagattatagacagatgatcatcgagcccaccagcccttgccttctcccagaccctctgcaggaaccgtactaccagccaccctacacgctcgttttggagctcaccggcgtcctcttgcatcctgagtggtcgctggccactggctggaggtttaagaagcgcccaggcatcgagaccttgttccagcagcttgcccctttatatgaaattgtcatctttacgtcagagactggcatgactgcgtttccactcattgatagtgtggacccccatggcttcatctcctaccgcctattccgggacgccacaagatacatggatggacaccatgtaaaggatatttcatgtctgaatcgggacccagctcgagtagtagttgtggactgcaagaaggaagccttccgcctgcagccctataacggcgttgccctgcggccctgggacggcaactctgatgaccgggtcttgttggatctgtctgccttcctcaagaccattgcactgaatggtgtggaggacgtgcgaaccgtgctggagcactatgccctggaggatgacccgctggcggctttcaaacagcggcaaagccggctagagcaggaggagcagcagcgcctggccgagctctccaagtccaacaagcagaacctcttccttggctccctcaccagccgcttgtggcctcgctccaaacagccctgaactctgggcctcctcaaactcagtgcctgggtccagggccccagtgcttccagaccaagacttgggccaccacttgtccaataaagtacatcccagacgccacacctgctgtgtcccgagagtctccagatgggggcatcagggtgaggtccgggactcttgggtcatcgtcccacagtggctgatcggctgccaagcacagtgggggtgctttgttggatcagagcagatttttcaccctggtctcggaatctaaaaaccctcgctgtgtc

SEQ ID NO: 10240 - protein, 456 aa, Homo sapiens; identical to SEQ ID NO: 1573

SEQ ID NO: 10241 - DNA, 1898 bp, Homo sapiens
ctcagaggctggagggatcctccgtatgctgaacgctggtcccctgggccccctttatttctttctctatactttgtttctgtgtctttttctcttccaaagtctctcgttccacctaacgagaaacacccacaggtgtggaggggcaacccatcccttcagacaattgggaggtgagggccgattgccttacacggtgagacaagcggcctgactcgtgactatttttttggacaaatcaggcagccactgactcccttcattatggcctcagctttatctctgggcaataagtgtgatcccttccttcgctgcgtcctttgcaggggcggtggcgctctgcaaggcccaagggggcgtggtccagatgactttgaatcccagttgtcgcccccagggtcagccaggagactagtcagaagcaaacgcgcctgcggcaatccgcccgatgcctttggtctctctcgggcttccgtccacccgcccctcccccgcgtttccattggctgtagctccggcccggggcgggcgaagagggagcgagtgggcggggccgcgtggcgtcagcgcaagatggcggcctcggcagcggtgttctcgcgcttgcgaagcgggctccggctcggctcgcggggactgtgcacgaggttggcgacgccgccccgccgggccccagatcaggccgcagagatcgggagccgcgggagcactaaggcgcaagggccacagcagcagccgggctcagagggtcccagctatgccaaaaaagttgcgctctggcttgctgggctgcttggagctggtgggactgtgagcgtcgtctatatctttggaaacaacccggtggacgaaaatggtgccaagatgatcatcgagcccaccagcccttgccttctcccagaccctctgcaggaaccgtactaccagccaccctacacgctcgttttggagctcaccggcgtcctcttgcatcctgagtggtcgctggccactggctggaggtttaagaagcgcccaggcatcgagaccttgttccagcagcttgcccctttatatgaaattgtcatctttacgtcagagactggcatgactgcgtttccactcattgatagtgtggacccccatggcttcatctcctaccgcctattccgggacgccacaagatacatggatggacaccatgtaaaggatatttcatgtctgaatcgggacccagctcgagtagtagttgtggactgcaagaaggaagccttccgcctgcagccctataacggcgttgccctgcggccctgggacggcaactctgatgaccgggtcttgttggatctgtctgccttcctcaagaccattgcactgaatggtgtggaggacgtgcgaaccgtgctggagcactatgccctggaggatgacccgctggcggctttcaaacagcggcaaagccggctagagcaggaggagcagcagcgcctggccgagctctccaagtccaacaagcagaacctcttccttggctccctcaccagccgcttgtggcctcgctccaaacagccctgaactctgggcctcctcaaactcagtgcctgggtccagggccccagtgcttccagaccaagacttgggccaccacttgtccaataaagtacatcccagacgccacacctgctgtgtcccgagagtctccagatgggggcatcagggtgaggtccgggactcttgggtcatcgtcccacagtggctgatcggctgccaagcacagtgggggtgctttgttggatcagagcagatttttcaccctggtctcggaatctaaaaaccctcgctgtgtcttcctgtgtgttgcgtgatctgtgaaaaatacatctccctctgaccacagactcctcatctgtggagaaggg

SEQ ID NO: 10242 - protein, 429 aa, Homo sapiens; identical to SEQ ID NO: 10230

SEQ ID NO: 10243 - DNA, 1391 bp, Homo sapiens
ctcagaggctggagggatcctccgtatgctgaacgctggtcccctgggccccctttatttctttctctatactttgtttctgtgtctttttctcttccaaagtctctcgttccacctaacgagaaacacccacaggtgtggaggggcaacccatcccttcagacaattgggaggtgagggccgattgccttacacggtgagacaagcggcctgactcgtgactatttttttggacaaatcaggcagccactgactcccttcattatggcctcagctttatctctgggcaataagtgtgatcccttccttcgctgcgtcctttgcaggggcggtggcgctctgcaaggcccaagggggcgtggtccagatgactttgaatcccagttgtcgcccccagggtcagccaggagactagtcagaagcaaacgcgcctgcggcaatccgcccgatgcctttggtctctctcgggcttccgtccacccgcccctcccccgcgtttccattggctgtagctccggcccggggcgggcgaagagggagcgagtgggcggggccgcgtggcgtcagcgcaagatggcggcctcggcagcggtgttctcgcgcttgcgaagcgggctccggctcggctcgcggggactgtgcacgaggttggcgacgccgccccgccgggccccagatcaggatatttcatgtctgaatcgggacccagctcgagtagtagttgtggactgcaagaaggaagccttccgcctgcagccctataacggcgttgccctgcggccctgggacggcaactctgatgaccgggtcttgttggatctgtctgccttcctcaagaccattgcactgaatggtgtggaggacgtgcgaaccgtgctggagcactatgccctggaggatgacccgctggcggctttcaaacagcggcaaagccggctagagcaggaggagcagcagcgcctggccgagctctccaagtccaacaagcagaacctcttccttggctccctcaccagccgcttgtggcctcgctccaaacagccctgaactctgggcctcctcaaactcagtgcctgggtccagggccccagtgcttccagaccaagacttgggccaccacttgtccaataaagtacatcccagacgccacacctgctgtgtcccgagagtctccagatgggggcatcagggtgaggtccgggactcttgggtcatcgtcccacagtggctgatcggctgccaagcacagtgggggtgctttgttggatcagagcagatttttcaccctggtctcggaatctaaaaaccctcgctgtgtcttcctgtgtgttgcgtgatctgtgaaaaatacatctccctctgaccacagactcctcatctgtggagaaggg

SEQ ID NO: 10244 - protein, 260 aa, Homo sapiens; identical to SEQ ID NO: 10232

SEQ ID NO: 10245 - DNA, 1920 bp, Homo sapiens
ctcagaggctggagggatcctccgtatgctgaacgctggtcccctgggccccctttatttctttctctatactttgtttctgtgtctttttctcttccaaagtctctcgttccacctaacgagaaacacccacaggtgtggaggggcaacccatcccttcagacaattgggaggtgagggccgattgccttacacggtgagacaagcggcctgactcgtgactatttttttggacaaatcaggcagccactgactcccttcattatggcctcagctttatctctgggcaataagtgtgatcccttccttcgctgcgtcctttgcaggggcggtggcgctctgcaaggcccaagggggcgtggtccagatgactttgaatcccagttgtcgcccccagggtcagccaggagactagtcagaagcaaacgcgcctgcggcaatccgcccgatgcctttggtctctctcgggcttccgtccacccgcccctcccccgcgtttccattggctgtagctccggcccggggcgggcgaagagggagcgagtgggcggggccgcgtggcgtcagcgcaagatggcggcctcggcagcggtgttctcgcgcttgcgaagcgggctccggctcggctcgcggggactgtgcacgaggttggcgacgccgccccgccgggccccagatcaggccgcagagatcgggagccgcgggagcactaaggcgcaagggccacagcagcagccgggctcagagggtcccagctatgccaaaaaagttgcgctctggcttgctgggctgcttggagctggtgggactgtgagcgtcgtctatatctttggaaacaacccggtggacgaaaatggtgccaagattcctgatgagttcgacaatgatgatcatcgagcccaccagcccttgccttctcccagaccctctgcaggaaccgtactaccagccaccctacacgctcgttttggagctcaccggcgtcctcttgcatcctgagtggtcgctggccactggctggaggtttaagaagcgcccaggcatcgagaccttgttccagcagcttgcccctttatatgaaattgtcatctttacgtcagagactggcatgactgcgtttccactcattgatagtgtggacccccatggcttcatctcctaccgcctattccgggacgccacaagatacatggatggacaccatgtaaaggatatttcatgtctgaatcgggacccagctcgagtagtagttgtggactgcaagaaggaagccttccgcctgcagccctataacggcgttgccctgcggccctgggacggcaactctgatgaccgggtcttgttggatctgtctgccttcctcaagaccattgcactgaatggtgtggaggacgtgcgaaccgtgctggagcactatgccctggaggatgacccgctggcggctttcaaacagcggcaaagccggctagagcaggaggagcagcagcgcctggccgagctctccaagtccaacaagcagaacctcttccttggctccctcaccagccgcttgtggcctcgctccaaacagccctgaactctgggcctcctcaaactcagtgcctgggtccagggccccagtgcttccagaccaagacttgggccaccacttgtccaataaagtacatcccagacgccacacctgctgtgtcccgagagtctccagatgggggcatcagggtgaggtccgggactcttgggtcatcgtcccacagtggctgatcggctgccaagcacagtgggggtgctttgttggatcagagcagatttttcaccctggtctcggaatctaaaaaccctcgctgtgtcttcctgtgtgttgcgtgatctgtgaaaaatacatctccctctgaccacagactcctcatctgtggagaaggg

SEQ ID NO: 10246 - protein, 244 aa, Homo sapiens; identical to SEQ ID NO: 10228

SEQ ID NO: 10247 - DNA, 1979 bp, Homo sapiens
ctcagaggctggagggatcctccgtatgctgaacgctggtcccctgggccccctttatttctttctctatactttgtttctgtgtctttttctcttccaaagtctctcgttccacctaacgagaaacacccacaggtgtggaggggcaacccatcccttcagacaattgggaggtgagggccgattgccttacacggtgagacaagcggcctgactcgtgactatttttttggacaaatcaggcagccactgactcccttcattatggcctcagctttatctctgggcaataagtgtgatcccttccttcgctgcgtcctttgcaggggcggtggcgctctgcaaggcccaagggggcgtggtccagatgactttgaatcccagttgtcgcccccagggtcagccaggagactagtcagaagcaaacgcgcctgcggcaatccgcccgatgcctttggtctctctcgggcttccgtccacccgcccctcccccgcgtttccattggctgtagctccggcccggggcgggcgaagagggagcgagtgggcggggccgcgtggcgtcagcgcaagatggcggcctcggcagcggtgttctcgcgcttgcgaagcgggctccggctcggctcgcggggactgtgcacgaggttggcgacgccgccccgccgggccccagatcaggccgcagagatcgggagccgcgggagcactaaggcgcaagggccacagcagcagccgggctcagagggtcccagctatgccaaaaaagttgcgctctggcttgctgggctgcttggagctggtgggactgtgagcgtcgtctatatctttggaaacaacccggtggacgaaaatggtgccaagattcctgatgagttcgacaatgatccaattctggtacagcagttgcgccggacatacaaatatttcaaagattatagacagatgatcatcgagcccaccagcccttgccttctcccagaccctctgcaggaaccgtactaccagccaccctacacgctcgttttggagctcaccggcgtcctcttgcatcctgagtggtcgctggccactggctggaggtttaagaagcgcccaggcatcgagaccttgttccagcagcttgcccctttatatgaaattgtcatctttacgtcagagactggcatgactgcgtttccactcattgatagtgtggacccccatggcttcatctcctaccgcctattccgggacgccacaagatacatggatggacaccatgtaaaggatatttcatgtctgaatcgggacccagctcgagtagtagttgtggactgcaagaaggaagccttccgcctgcagccctataacggcgttgccctgcggccctgggacggcaactctgatgaccgggtcttgttggatctgtctgccttcctcaagaccattgcactgaatggtgtggaggacgtgcgaaccgtgctggagcactatgccctggaggatgacccgctggcggctttcaaacagcggcaaagccggctagagcaggaggagcagcagcgcctggccgagctctccaagtccaacaagcagaacctcttccttggctccctcaccagccgcttgtggcctcgctccaaacagccctgaactctgggcctcctcaaactcagtgcctgggtccagggccccagtgcttccagaccaagacttgggccaccacttgtccaataaagtacatcccagacgccacacctgctgtgtcccgagagtctccagatgggggcatcagggtgaggtccgggactcttgggtcatcgtcccacagtggctgatcggctgccaagcacagtgggggtgctttgttggatcagagcagatttttcaccctggtctcggaatctaaaaaccctcgctgtgtcttcctgtgtgttgcgtgatctgtgaaaaatacatctccctctgaccacagactcctcatctgtggagaaggg

SEQ ID NO: 10248 - protein, 456 aa, Homo sapiens; identical to SEQ ID NO: 1573

SEQ ID NO: 10249 - DNA, 1371 bp, Homo sapiens
ctcagaggctggagggatcctccgtatgctgaacgctggtcccctgggccccctttatttctttctctatactttgtttctgtgtctttttctcttccaaagtctctcgttccacctaacgagaaacacccacaggtgtggaggggcaacccatcccttcagacaattgggaggtgagggccgattgccttacacggtgagacaagcggcctgactcgtgactatttttttggacaaatcaggcagccactgactcccttcattatggcctcagctttatctctgggcaataagtgtgatcccttccttcgctgcgtcctttgcaggggcggtggcgctctgcaaggcccaagggggcgtggtccagatgactttgaatcccagttgtcgcccccagggtcagccaggagactagtcagaagcaaacgcgcctgcggcaatccgcccgatgcctttggtctctctcgggcttccgtccacccgcccctcccccgcgtttccattggctgtagctccggcccggggcgggcgaagagggagcgagtgggcggggccgcgtggcgtcagcgcaagatggcggcctcggcagcggtgttctcgcgcttgcgaagcgggctccggctcggctcgcggggactgtgcacgaggttggcgacgccgccccgccgggccccagatcaggccgcagagatcgggagccgcgggagcactaaggcgcaagggccacagcagcagccgggctcagagggtcccagctatgccaaaaaagttgcgctctgatgaccgggtcttgttggatctgtctgccttcctcaagaccattgcactgaatggtgtggaggacgtgcgaaccgtgctggagcactatgccctggaggatgacccgctggcggctttcaaacagcggcaaagccggctagagcaggaggagcagcagcgcctggccgagctctccaagtccaacaagcagaacctcttccttggctccctcaccagccgcttgtggcctcgctccaaacagccctgaactctgggcctcctcaaactcagtgcctgggtccagggccccagtgcttccagaccaagacttgggccaccacttgtccaataaagtacatcccagacgccacacctgctgtgtcccgagagtctccagatgggggcatcagggtgaggtccgggactcttgggtcatcgtcccacagtggctgatcggctgccaagcacagtgggggtgctttgttggatcagagcagatttttcaccctggtctcggaatctaaaaaccctcgctgtgtcttcctgtgtgttgcgtgatctgtgaaaaatacatctccctctgaccacagactcctcatctgtggagaaggg

SEQ ID NO: 10250 - protein, 192 aa, Homo sapiens; identical to SEQ ID NO: 10238

SEQ ID NO: 10251 - DNA, 1681 bp, Homo sapiens
ctcagaggctggagggatcctccgtatgctgaacgctggtcccctgggccccctttatttctttctctatactttgtttctgtgtctttttctcttccaaagtctctcgttccacctaacgagaaacacccacaggtgtggaggggcaacccatcccttcagacaattgggaggtgagggccgattgccttacacggtgagacaagcggcctgactcgtgactatttttttggacaaatcaggcagccactgactcccttcattatggcctcagctttatctctgggcaataagtgtgatcccttccttcgctgcgtcctttgcaggggcggtggcgctctgcaaggcccaagggggcgtggtccagatgactttgaatcccagttgtcgcccccagggtcagccaggagactagtcagaagcaaacgcgcctgcggcaatccgcccgatgcctttggtctctctcgggcttccgtccacccgcccctcccccgcgtttccattggctgtagctccggcccggggcgggcgaagagggagcgagtgggcggggccgcgtggcgtcagcgcaagatggcggcctcggcagcggtgttctcgcgcttgcgaagcgggctccggctcggctcgcggggactgtgcacgaggttggcgacgccgccccgccgggccccagatcaggccgcagagatcgggagccgcgggagcactaaggcgcaagggccacagcagcagccgggctcagagggtcccagctatgccaaaaaagttgcgctctgatgaccgggtcttgttggatctgtctgccttcctcaagaccattgcactgaatggtgtggaggacgtgcgaaccgtgctggagcactatgccctggaggatgacccgctggcggctttcaaacagcggcaaagccggctagagcaggaggagcagcagcgcctggccgagctctccaagtccaacaagcagaacctcttccttggctccctcaccagccgcttgtggcctcgctccaaacagccctgaactctgggcctcctcaaactcagtgcctgggtccagggccccagtgcttccagaccaagacttgggccaccacttgtccaataaagtacatcccagacgccacacctgctgtgtcccgagagtctccagatgggggcatcagggtgaggtccgggactcttgggtcatcgtcccacagtggctgatcggctgccaagcacagtgggggtgctttgttggatcagagcagatttttcaccctggtctcggaatctaaaaaccctcgctgtgtcttcctgtgtgttgcgtgatctgtgaaaaatacatctccctctgaccacagactcctcatctgtggagaagggaagagaggatggcacttggctttaaagacaggtagctgccaggctactgtggagagaatgtgttatgggcctagtgggcctctggtggaccagagattacccctctcaacaggccagctgctggttggctccagccagtgtggccctggggtaaagggggcctggagttgcttgacacgccagttgttcaaaagaagcaagaacttgggaatattttttttttttttttgagacagggtctcactgttgcccaggctggagtgcattgatgtgatcttagcttacaacagccttgacctcccggctcaag

SEQ ID NO: 10252 - protein, 192 aa, Homo sapiens; identical to SEQ ID NO: 10238

SEQ ID NO: 10253 - DNA, 2703 bp, Homo sapiens
ctcagaggctggagggatcctccgtatgctgaacgctggtcccctgggccccctttatttctttctctatactttgtttctgtgtctttttctcttccaaagtctctcgttccacctaacgagaaacacccacaggtgtggaggggcaacccatcccttcagacaattgggaggtgagggccgattgccttacacggtgagacaagcggcctgactcgtgactatttttttggacaaatcaggcagccactgactcccttcattatggcctcagctttatctctgggcaataagtgtgatcccttccttcgctgcgtcctttgcaggggcggtggcgctctgcaaggcccaagggggcgtggtccagatgactttgaatcccagttgtcgcccccagggtcagccaggagactagtcagaagcaaacgcgcctgcggcaatccgcccgatgcctttggtctctctcgggcttccgtccacccgcccctcccccgcgtttccattggctgtagctccggcccggggcgggcgaagagggagcgagtgggcggggccgcgtggcgtcagcgcaagatggcggcctcggcagcggtgttctcgcgcttgcgaagcgggctccggctcggctcgcggggactgtgcacgaggttggcgacgccgccccgccgggccccagatcaggccgcagagatcgggagccgcgggagcactaaggcgcaagggccacagcagcagccgggctcagagggtcccagctatgccaaaaaagttgcgctctggcttgctgggctgcttggagctggtgggactgtgagcgtcgtctatatctttggaaacaacccggtggacgaaaatggtgccaagattcctgatgagttcgacaatgatccaattctggtacagcagttgcgccggacatacaaatatttcaaagattatagacagatgatcatcgagcccaccagcccttgccttctcccagaccctctgcaggaaccgtactaccagccaccctacacgctcgttttggagctcaccggcgtcctcttgcatcctgagtggtcgctggccactggctggaggtttaagaagcgcccaggcatcgagaccttgttccagcagcttgcccctttatatgaaattgtcatctttacgtcagagactggcatgactgcgtttccactcattgatagtgtggacccccatggcttcatctcctaccgcctattccgggacgccacaagatacatggatggacaccatgtaaaggatatttcatgtctgaatcgggacccagctcgagtagtagttgtggactgcaagaaggaagccttccgcctgcagccctataacggcgttgccctgcggccctgggacggcaactctgatgaccgggtcttgttggatctgtctgccttcctcaagaccattgcactgaatggtgtggaggacgtgcgaaccgtgctggagcactatgccctggaggatgacccgctggcggctttcaaacagcggcaaagccggctagagcaggaggagcagcagcgcctggccgagctctccaagtccaacaagcagaacctcttccttggctccctcaccagccgcttgtggcctcgctccaaacagccctgaactctgggcctcctcaaactcagtgcctgggtccagggccccagtgcttccagaccaagacttgggccaccacttgtccaataaagtacatcccagacgccacacctgctgtgtcccgagagtctccagatgggggcatcagggtgaggtccgggactcttgggtcatcgtcccacagtggctgatcggctgccaagcacagtgggggtgctttgttggatcagagcagatttttcaccctggtctcggaatctaaaaaccctcgctgtgtcttcctgtgtgttgcgtgatctgtgaaaaatacatctccctctgaccacagactcctcatctgtggagaagggaagagaggatggcacttggctttaaagacaggtagctgccaggctactgtggagagaatgtgttatgggcctagtgggcctctggtggaccagagattacccctctcaacaggccagctgctggttggctccagccagtgtggccctggggtaaagggggcctggagttgcttgacacgccagttgttcaaaagaagcaagaacttgggaatattttttttttttttttgagacagggtctcactgttgcccaggctggagtgcattgatgtgatcttagcttacaacagccttgacctcccggctcaagtgatctccaagtgaccctcctgcctcagcctcctgagtaccctcctggggactacaggtgcgtgctaccatacccagctaatttaaacaaattttttttttgtagagatggggtcttggtgcccaagctggtctcaaactcctagtcttaagcaatcttcctgctttggcctcccaaagcgctaggattccaggtgtgagctactgtgcccagctaaaatagggatttttatattaaatctccctattttaaaatgttggctcctagcggggcgcagtggctcacgcctgtaatcccagcactttgggaggctgaggtgggtggatcacctgaggtcaggagttcaagaccagcctcaacatggagaaaccccatctctactaaaaatacaaaattagctgggcgtggtggagc

SEQ ID NO: 10254 - protein, 456 aa, Homo sapiens; identical to SEQ ID NO: 1573

SEQ ID NO: 10255 - DNA, 3172 bp, Homo sapiens
gattatagacaggtgagcagaagccctgggctcagtccccatgtctccagccctggcctccttgtctgagcgcccccatcctgtccctctcccacagatgatcatcgagcccaccagcccttgccttctcccagaccctctgcaggaaccgtactaccagccaccctacacgctcgttttggagctcaccggcgtcctcttgcatcctgagtggtcggtgtgtcccgggaaacccagtgggttggggatagacctgggcagtggggttgtgatgaggtggactttcagccctggctgtgctatgtgatcttggggaggagatgtcacctgtcattgcctcgctttcttcagctgggagaaggcagtcatgctaacacccactctgtagggtagtgtaggtgtgcccaggcacgctataagtgccacaaaggagccagacccgcagtcacagcctatgaacttcttgacctccaagagccacagagacagagggagagaactctgttctgggaatcccccaggctggatctttgtcctcttggggactctgaggacctctgggtcttggtgtttcactgtcctcactgtcttcccagctggccactggctggaggtttaagaagcgcccaggcatcgagaccttgttccagcagcttgcccctttatatgaaattgtcatctttacgtcagagactggcatgactgcgtttccactcattgatagtgtggacccccatggcttcatctcctaccgcctattccgggacgccacaagatacatggatggacaccatgtaaaggatatttcatgtctgaatcgggacccagctcgagtagtagttgtggactgcaagaaggaagccttccgcctgcagccctataacggcgttgccctgcggccctgggacggcaactctgatgaccgggtcttgttggatctgtctgccttcctcaagaccattgcactgaatggtgtggaggacgtgcgaaccgtgctggagcactatgccctggaggatgacccgctggcggctttcaaacagcggcaaagccggctagagcaggaggagcagcagcgcctggccgagctctccaagtccaacaagcagaacctcttccttggctccctcaccagccgcttgtggcctcgctccaaacagccctgaactctgggcctcctcaaactcagtgcctgggtccagggccccagtgcttccagaccaagacttgggccaccacttgtccaataaagtacatcccagacgccacacctgctgtgtcccgagagtctccagatgggggcatcagggtgaggtccgggactcttgggtcatcgtcccacagtggctgatcggctgccaagcacagtgggggtgctttgttggatcagagcagatttttcaccctggtctcggaatctaaaaaccctcgctgtgtcttcctgtgtgttgcgtgatctgtgaaaaatacatctccctctgaccacagactcctcatctgtggagaagggaagagaggatggcacttggctttaaagacaggtagctgccaggctactgtggagagaatgtgttatgggcctagtgggcctctggtggaccagagattacccctctcaacaggccagctgctggttggctccagccagtgtggccctggggtaaagggggcctggagttgcttgacacgccagttgttcaaaagaagcaagaacttgggaatattttttttttttttttgagacagggtctcactgttgcccaggctggagtgcattgatgtgatcttagcttacaacagccttgacctcccggctcaagtgatctccaagtgaccctcctgcctcagcctcctgagtaccctcctggggactacaggtgcgtgctaccatacccagctaatttaaacaaattttttttttgtagagatggggtcttggtgcccaagctggtctcaaactcctagtcttaagcaatcttcctgctttggcctcccaaagcgctaggattccaggtgtgagctactgtgcccagctaaaatagggatttttatattaaatctccctattttaaaatgttggctcctagcggggcgcagtggctcacgcctgtaatcccagcactttgggaggctgaggtgggtggatcacctgaggtcaggagttcaagaccagcctcaacatggagaaaccccatctctactaaaaatacaaaattagctgggcgtggtggagcatgcctgtgatcccagctactcaggaggctgaggcaggagaattgcttgaacctgggaggcggaggttgtggtgagccgagatcgcaccattgcactccagcctgggcaacagcagcgaaactccatctcaaaaaataaaataaaataaaaataaaatgttggcttctaactaaaacaggcagatatgtagcagtgttctccactggaactttctgtgatgtttggttcatgttctaggtctgtactgtccagtacagtagccagtggccacataaacctttgttttttttttttgagacggagtttcgctcttattgcccaggctggagtgcaatggcacgacgtcggctcaccacatcctccgcctcccgggttcaagcaatgctcccgcctcaacctcccaagtagctgagattacaggcgcacaccaccacgcccggctaatttttgtatttttttagtagagacagggtttcaccatgttggttaggctggtctcgaactcctgacctcgtgatccgcccgcctcggcctcccaaagtgctgggattgcaggcatgagccaccatgcctggccccacataaagtttctgagcacttgaaatgtggctagtgtgactgagaaactgaatttttaattttgtttgagactgggcacagtggctcacgcctgtaatcctgacactttgggaggccgaagcaggaggattgcttgaatccaggagtacgagaccaccctgggcaacatggtgaaatcctgcctctaaaaaaaaaacaaagtaacgagcccagcgaggttatgcatacctgtagtcccagctacgtgagaggctgaggtgggaggaatcccttgagccaaggaggtcgtgcgtggctgtgatgatctgtgatcgtgccgctaaattctagcctgggcaacagagcgagaccctgtctc

SEQ ID NO: 10256 - protein, 155 aa, Homo sapiens [sequence omitted]

SEQ ID NO: 10257 - DNA, 693 bp, Homo sapiens
ttgatggggggagagttgggcacagatgttgacctgatctgtcactcacttccaggatatttcatgtctgaatcgggacccagctcgagtagtagttgtggactgcaagaaggaagccttccgcctgcagccctataacggcgttgccctgcggccctgggacggcaactctgatgaccgggtcttgttggatctgtctgccttcctcaagaccattgcactgaatggtgtggaggacgtgcgaaccgtgctggagcactatgccctggaggatgacccgctggcggctttcaaacagcggcaaagccggctagagcaggaggagcagcagcgcctggccgagctctccaagtccaacaagcagaacctcttccttggctccctcaccagccgcttgtggcctcgctccaaacagccctgaactctgggcctcctcaaactcagtgcctgggtccagggccccagtgcttccagaccaagacttgggccaccacttgtccaataaagtacatcccagacgccacacctgctgtgtcccgagagtctccagatgggggcatcagggtgaggtccgggactcttgggtcatcgtcccacagtggctgatcggctgccaagcacagtgggggtgctttgttggatcagagcagatttttcaccctggtctcggaatctaaaaaccctcgctgtgtc

SEQ ID NO: 10258 - protein, 44 aa, Homo sapiens
MGGELGTDVDLICHSLPGYFMSESGPSSSSSCGLQEGSLPPAAL

SEQ ID NO: 10259 - DNA, 765 bp, Homo sapiens
ttgatggggggagagttgggcacagatgttgacctgatctgtcactcacttccaggatatttcatgtctgaatcgggacccagctcgagtagtagttgtggactgcaagaaggaagccttccgcctgcagccctataacggcgttgccctgcggccctgggacggcaactctgatgaccgggtcttgttggatctgtctgccttcctcaagaccattgcactgaatggtgtggaggacgtgcgaaccgtgctggagcactatgccctggaggatgacccgctggcggctttcaaacagcggcaaagccggctagagcaggaggagcagcagcgcctggccgagctctccaagtccaacaagcagaacctcttccttggctccctcaccagccgcttgtggcctcgctccaaacagccctgaactctgggcctcctcaaactcagtgcctgggtccagggccccagtgcttccagaccaagacttgggccaccacttgtccaataaagtacatcccagacgccacacctgctgtgtcccgagagtctccagatgggggcatcagggtgaggtccgggactcttgggtcatcgtcccacagtggctgatcggctgccaagcacagtgggggtgctttgttggatcagagcagatttttcaccctggtctcggaatctaaaaaccctcgctgtgtcttcctgtgtgttgcgtgatctgtgaaaaatacatctccctctgaccacagactcctcatctgtggagaaggg

SEQ ID NO: 10260 - protein, 44 aa, Homo sapiens; identical to SEQ ID NO: 10258

SEQ ID NO: 10261 - DNA, 1075 bp, Homo sapiens
ttgatggggggagagttgggcacagatgttgacctgatctgtcactcacttccaggatatttcatgtctgaatcgggacccagctcgagtagtagttgtggactgcaagaaggaagccttccgcctgcagccctataacggcgttgccctgcggccctgggacggcaactctgatgaccgggtcttgttggatctgtctgccttcctcaagaccattgcactgaatggtgtggaggacgtgcgaaccgtgctggagcactatgccctggaggatgacccgctggcggctttcaaacagcggcaaagccggctagagcaggaggagcagcagcgcctggccgagctctccaagtccaacaagcagaacctcttccttggctccctcaccagccgcttgtggcctcgctccaaacagccctgaactctgggcctcctcaaactcagtgcctgggtccagggccccagtgcttccagaccaagacttgggccaccacttgtccaataaagtacatcccagacgccacacctgctgtgtcccgagagtctccagatgggggcatcagggtgaggtccgggactcttgggtcatcgtcccacagtggctgatcggctgccaagcacagtgggggtgctttgttggatcagagcagatttttcaccctggtctcggaatctaaaaaccctcgctgtgtcttcctgtgtgttgcgtgatctgtgaaaaatacatctccctctgaccacagactcctcatctgtggagaagggaagagaggatggcacttggctttaaagacaggtagctgccaggctactgtggagagaatgtgttatgggcctagtgggcctctggtggaccagagattacccctctcaacaggccagctgctggttggctccagccagtgtggccctggggtaaagggggcctggagttgcttgacacgccagttgttcaaaagaagcaagaacttgggaatattttttttttttttttgagacagggtctcactgttgcccaggctggagtgcattgatgtgatcttagcttacaacagccttgacctcccggctcaag

SEQ ID NO: 10262 - protein, 57 aa, Homo sapiens
MCYGPSGPLVDQRLPLSTGQLLVGSSQCGPGVKGAWSCLTRQLFKRSKNLGIFFFFF

SEQ ID NO: 10263 - DNA, 2408 bp, Homo sapiens
gaaggggcggggccattctctcagatataaggcttggaagccagcagctgcgactcccgagacccccccaccagaaggccatggtctccccacggatgtccgggctcctctcccagactgtgatcctagcgctcattttcctcccccagacacggcccgctggcgtcttcgagctgcagatccactctttcgggccgggtccaggccctggggccccgcggtccccctgcagcgcccggctcccctgccgcctcttcttcagagtctgcctgaagcctgggctctcagaggaggccgccgagtccccgtgcgccctgggcgcggcgctgagtgcgcgcggaccggtctacaccgagcagcccggagcgcccgcgcctgatctcccactgcccgacggcctcttgcaggtgcccttccgggacgcctggcctggcaccttctctttcatcatcgaaacctggagagaggagttaggagaccagattggagggcccgcctggagcctgctggcgcgcgtggctggcaggcggcgcttggcagccggaggcccgtgggcccgggacattcagcgcgcaggcgcctgggagctgcgcttctcgtaccgcgcgcgctgcgagccgcctgccgtcgggaccgcgtgcacgcgcctctgccgtccgcgcagcgccccctcgcggtgcggtccgggactgcgcccctgcgcaccgctcgaggacgaatgtgaggcgccgctggtgtgccgagcaggctgcagccctgagcatggcttctgtgaacagcccggtgaatgccgatgcctagagggctggactggacccctctgcacggtccctgtctccaccagcagctgcctcagccccaggggcccgtcctctgctaccaccggatgccttgtccctgggcctgggccctgtgacgggaacccgtgtgccaatggaggcagctgtagtgagacacccaggtcctttgaatgcacctgcccgcgtgggttctacgggctgcggtgtgaggtgagcggggtgacatgtgcagatggaccctgcttcaacggcggcttgtgtgtcgggggtgcagaccctgactctgcctacatctgccactgcccacccggtttccaaggctccaactgtgagaagagggtggaccggtgcagcctgcagccatgccgcaatggcggactctgcctggacctgggccacgccctgcgctgccgctgccgcgccggcttcgcgggtcctcgctgcgagcacgacctggacgactgcgcgggccgcgcctgcgctaacggcggcacgtgtgtggagggcggcggcgcgcaccgctgctcctgcgcgctgggcttcggcggccgcgactgccgcgagcgcgcggacccgtgcgccgcgcgcccctgtgctcacggcggccgctgctacgcccacttctccggcctcgtctgcgcttgcgctcccggctacatgggagcgcggtgtgagttcccagtgcaccccgacggcgcaagcgccttgcccgcggccccgccgggcctcaggcccggggaccctcagcgctaccttttgcctccggctctgggactgctcgtggccgcgggcgtggccggcgctgcgctcttgctggtccacgtgcgccgccgtggccactcccaggatgctgggtctcgcttgctggctgggaccccggagccgtcagtccacgcactcccggatgcactcaacaacctaaggacgcaggagggttccggggatggtccgagctcgtccgtagattggaatcgccctgaagatgtagaccctcaagggatttatgtcatatctgctccttccatctacgctcgggaggtagcgacgccccttttccccccgctacacactgggcgcgctgggcagaggcagcacctgctttttccctacccttcctcgattctgtccgtgaaatgaattgggtagagtctctggaaggttttaagcccattttcagttctaacttactttcatcctattttgcatccctcttatcgttttgagctacctgccatcttctctttgaaaaacctatgggcttgaggaggtcacgatgccgactccgccagagcttttccactgattgtactcagcggggaggcaggggaggcagaggggcagcctctctaatgcttcctactcattttgtttctaggcctgacgcgtctcctccatccgcacctggagtcagagcgtggatttttgtatttgctcggtggtgcccagtctctgccccagaggctttggagttcaatcttgaaggggtgtctgggggaactttactgttgcaagttgtaaataatggttatttatatcctattttttctcaccccatctctctagaaacacctataaaggctattattgtgatcagttttgactaacgag

SEQ ID NO: 10264 - protein, 618 aa, Homo sapiens; identical to SEQ ID NO: 1575

SEQ ID NO: 10265 - DNA, 2071 bp, Homo sapiens
gaaggggcggggccattctctcagatataaggcttggaagccagcagctgcgactcccgagacccccccaccagaaggccatggtctccccacggatgtccgggctcctctcccagactgtgatcctagcgctcattttcctcccccagacacggcccgctggcgtcttcgagctgcagatccactctttcgggccgggtccaggccctggggccccgcggtccccctgcagcgcccggctcccctgccgcctcttcttcagagtctgcctgaagcctgggctctcagaggaggccgccgagtccccgtgcgccctgggcgcggcgctgagtgcgcgcggaccggtctacaccgagcagcccggagcgcccgcgcctgatctcccactgcccgacggcctcttgcaggtgcccttccgggacgcctggcctggcaccttctctttcatcatcgaaacctggagagaggagttaggagaccagattggagggcccgcctggagcctgctggcgcgcgtggctggcaggcggcgcttggcagccggaggcccgtgggcccgggacattcagcgcgcaggcgcctgggagctgcgcttctcgtaccgcgcgcgctgcgagccgcctgccgtcgggaccgcgtgcacgcgcctctgccgtccgcgcagcgccccctcgcggtgcggtccgggactgcgcccctgcgcaccgctcgaggacgaatgtgaggcgccgctggtgtgccgagcaggctgcagccctgagcatggcttctgtgaacagcccggtgaatgccgatgcctagagggctggactggacccctctgcacggtccctgtctccaccagcagctgcctcagccccaggggcccgtcctctgctaccaccggatgccttgtccctgggcctgggccctgtgacgggaacccgtgtgccaatggaggcagctgtagtgagacacccaggtcctttgaatgcacctgcccgcgtgggttctacgggctgcggtgtgaggtgagcggggtgacatgtgcagatggaccctgcttcaacggcggcttgtgtgtcgggggtgcagaccctgactctgcctacatctgccactgcccacccggtttccaaggctccaactgtgagaagagggtggaccggtgcagcctgcagccatgccgcaatggcggactctgcctggacctgggccacgccctgcgctgccgctgccgcgccggcttcgcgggtcctcgctgcgagcacgacctggacgactgcgcgggccgcgcctgcgctaacggcggcacgtgtgtggagggcggcggcgcgcaccgctgctcctgcgcgctgggcttcggcggccgcgactgccgcgagcgcgcggacccgtgcgccgcgcgcccctgtgctcacggcggccgctgctacgcccacttctccggcctcgtctgcgcttgcgctcccggctacatgggagcgcggtgtgagttcccagtgcaccccgacggcgcaagcgccttgcccgcggccccgccgggcctcaggcccggggaccctcagcgctaccttttgcctccggctctgggactgctcgtggccgcgggcgtggccggcgctgcgctcttgctggtccacgtgcgccgccgtggccactcccaggatgctgggtctcgcttgctggctgggaccccggagccgtcagtccacgcactcccggatgcactcaacaacctaaggacgcaggagggttccggggatggtccgagctcgtccgtagattggaatcgccctgaagatgtagaccctcaagggatttatgtcatatctgctccttccatctacgctcgggaggcctgacgcgtctcctccatccgcacctggagtcagagcgtggatttttgtatttgctcggtggtgcccagtctctgccccagaggctttggagttcaatcttgaaggggtgtctgggggaactttactgttgcaagttgtaaataatggttatttatatcctattttttctcaccccatctctctagaaacacctataaaggctattattgtgatcagttttgactaacgag

SEQ ID NO: 10266 - protein, 587 aa, Homo sapiens; identical to SEQ ID NO: 1577

SEQ ID NO: 10267 - DNA, 780 bp, Homo sapiens
ctcagccggggctgaactctcaggtgctccttgaagcccaggatgctgttaactgggagaaagaccctggcagtctatccctcttaccctccctgccccaactttccaggacctggttccagcccactcttctccctgctgcctgggtatcgtggccaccccagtttccagtccttggtgagcaagctccggagccaagtgatgtccatggcccggccacagctgtcacacacgatcctcaccgagaagaactggttccactacgctgcccggatctgggatggggtgagaaagtcctctgctctggcagagtacagccgcctgctggcctgaggccaaggagaggaatgtcatgcaggggacctcctgggtccgcagtgtactgcgagggagcacagatgtccatcccccgctggggtggagagcggcagcaggcctgatggatgagggatcgtggcttcccggcccagagacatgaggtgtccagggccaggccccccaccctcagttggggctgttccgggggtgactgtgagcgatcccaccccaaacctgagatggggtagcccgtcctgtgtcctccacagggacaagcagtgggaggagtctgaatggtcaccaggaagcccgggctccatcttgacctcctttttcagggacaggagcaacaggcccctcttccctgactctaagcccttccctgtaaggtgaggcagggtctggagagctctttattggaacagatctggtggttcaaataaacacagtcatgcaagcctg

SEQ ID NO: 10268 - protein, 96 aa, Homo sapiens
MLLTGRKTLAVYPSYPPCPNFPGPGSSPLFSLLPGYRGHPSFQSLVSKLRSQVMSMARPQLSHTILTEKNWFHYAARIWDGVRKSSALAEYSRLLA

SEQ ID NO: 10269 - DNA, 2034 bp, Homo sapiens
atggctgcaattgatgaggaaggagggagagagataggagatgaagtcaatatattggtgaaggaacagacacagttaggggtcaagactctcatgaggttactcaaggaaccagagaaagaacgggactcagactcagatttctcccctcttcagcagactgagggatgccagcgaagagacaagcacttccgtcatgcagaaaacccccatcatcctctcaaaacctccagcagagcggcccctctggagaagcccatcgttctcatgaagccacgggaggaggggaaggggcctgtggccgtgacaggtgcctctacccctgagggcaccgccccaccaccccctgcagcccctgcgccacccaagggggagaaggaggggcagagacccacacagcctgtgtaccagatccagaaccggggcatgggcactgccgcaccagcagccatggaccctgtcgtgggtcaggccaaactactgcccccagagcgcatgaagcacagcatcaagttggtggatgaccagatgaattggtgtgacagtgccatcgagtacctgttggatcagactgatgtgttggtggttggtgtcctgggcctccaggggacaggcaagtccatggtcatgtcattgttgtcagccaacactccagaggaggaccagaggacttatgttttccgggcccagagcgctgaaatgaaggaacgagggggcaaccagaccagtggcatcgacttctttattacccaagaacggattgttttcctggacacacagcccatcctgagcccttctatcctagaccatctcatcaataatgaccgcaaactgcctccagagtacaaccttccccacacttacgttgaaatgcagtcactccagattgctgccttccttttcacggtctgccatgtggtgattgttgtccaggactggttcacagacctcagtctctacaggctgtgggacctggggtgcaagtgcaagagcaacagccactcaccccaaaccccaaggttcctgcagacagcagagatggtgaagccctccaccccatcccccagccacgagtccagcagctcatcgggctccgatgaaggcaccgagtactacccccacctagtcttcttgcagaacaaagctcgccgagaggacttctgtcctcggaagctgcggcagatgcacctgatgattgaccagctcatggcccactcccacctgcgttacaagggaactctgtccatgttacaatgcaatgtcttcccggggcttccacctgacttcctggactctgaggtcaacttattcctggtacccttcatggacagtgaagcagagagtgaaaacccaccaagagcaggacctggttccagcccactcttctccctgctgcctgggtatcgtggccaccccagtttccagtccttggtgagcaagctccggagccaagtgatgtccatggcccggccacagctgtcacacacgatcctcaccgagaagaactggttccactacgctgcccggatctgggatggggtgagaaagtcctctgctctggcagagtacagccgcctgctggcctgaggccaaggagaggaatgtcatgcaggggacctcctgggtccgcagtgtactgcgagggagcacagatgtccatcccccgctggggtggagagcggcagcaggcctgatggatgagggatcgtggcttcccggcccagagacatgaggtgtccagggccaggccccccaccctcagttggggctgttccgggggtgactgtgagcgatcccaccccaaacctgagatggggtagcccgtcctgtgtcctccacagggacaagcagtgggaggagtctgaatggtcaccaggaagcccgggctccatcttgacctcctttttcagggacaggagcaacaggcccctcttccctgactctaagcccttccctgtaaggtgaggcagggtctggagagctctttattggaacagatctggtggttcaaataaacacagtcatgcaagcctg

SEQ ID NO: 10270 - protein, 528 aa, Homo sapiens
MAAIDEEGGREIGDEVNILVKEQTQLGVKTLMRLLKEPEKERDSDSDFSPLQQTEGCQRRDKHFRHAENPHHPLKTSSRAAPLEKPIVLMKPREEGKGPVAVTGASTPEGTAPPPPAAPAPPKGEKEGQRPTQPVYQIQNRGMGTAAPAAMDPVVGQAKLLPPERMKHSIKLVDDQMNWCDSAIEYLLDQTDVLVVGVLGLQGTGKSMVMSLLSANTPEEDQRTYVFRAQSAEMKERGGNQTSGIDFFITQERIVFLDTQPILSPSILDHLINNDRKLPPEYNLPHTYVEMQSLQIAAFLFTVCHVVIVVQDWFTDLSLYRLWDLGCKCKSNSHSPQTPRFLQTAEMVKPSTPSPSHESSSSSGSDEGTEYYPHLVFLQNKARREDFCPRKLRQMHLMIDQLMAHSHLRYKGTLSMLQCNVFPGLPPDFLDSEVNLFLVPFMDSEAESENPPRAGPGSSPLFSLLPGYRGHPSFQSLVSKLRSQVMSMARPQLSHTILTEKNWFHYAARIWDGVRKSSALAEYSRLLA

SEQ ID NO: 10271 - DNA, 2542 bp, Homo sapiens
cgaagaggcacaactcgaaccccagatccgggccgctctccctcctgccggctcctcggcgtatccatttccctactcatctccccaccctcaaccccccaaccgcgcgcacgcgcattgagtcagagccgcggcgtcctcccgcctcccgctccggaacccgcatgcgtgctgaagccgaccgcctccatccacgcacgctcagcccggcgagcgcattcagttctcgagctccagccctcagcgcatgcgcaggacgagtcgcctgagggaactgatctcagctcgggcccgcgttacatcctcctcctcttcttccttcggcccagctttccttaggggctgcaacccggacgccgaggccggtttcggagtggggagtgcccattttctctccttcccacgttcctggcccccagacgccatttgcaggcgggtggcttgggtcagcctccccgcccccacccgactcccgtcacgggagagcgcacaccgcgccccgagaaccaatcagcagccgcgttaggtaaccatgtctgagtctggacacagtcagcctggactctatgggatagagcggcggcgacggtggaaggagcctggctctggtggcccccagaatctctctgggcctggtggtcgggagagggactacattgcaccatgggaaagagagagaagggatgccagcgaagagacaagcacttccgtcatgcagaaaacccccatcatcctctcaaaacctccagcagagcggtcaaaacagccaccacctccaacagcccctgctgccccgcctgctccagcccctctggagaagcccatcgttctcatgaagccacgggaggaggggaaggggcctgtggccgtgacaggtgcctctacccctgagggcaccgccccaccaccccctgcagcccctgcgccacccaagggggagaaggaggggcagagacccacacagcctgtgtaccagatccagaaccggggcatgggcactgccgcaccagcagccatggaccctgtcgtgggtcaggccaaactactgcccccagagcgcatgaagcacagcatcaagttggtggatgaccagatgaattggtgtgacagtgccatcgagtacctgttggatcagactgatgtgttggtggttggtgtcctgggcctccaggggacaggcaagtccatggtcatgtcattgttgtcagccaacactccagaggaggaccagaggacttatgttttccgggcccagagcgctgaaatgaaggaacgagggggcaaccagaccagtggcatcgacttctttattacccaagaacggattgttttcctggacacacagcccatcctgagcccttctatcctagaccatctcatcaataatgaccgcaaactgcctccagagtacaaccttccccacacttacgttgaaatgcagtcactccagattgctgccttccttttcacggtctgccatgtggtgattgttgtccaggactggttcacagacctcagtctctacaggttcctgcagacagcagagatggtgaagccctccaccccatcccccagccacgagtccagcagctcatcgggctccgatgaaggcaccgagtactacccccacctagtcttcttgcagaacaaagctcgccgagaggacttctgtcctcggaagctgcggcagatgcacctgatgattgaccagctcatggcccactcccacctgcgttacaagggaactctgtccatgttacaatgcaatgtcttcccggggcttccacctgacttcctggactctgaggtcaacttattcctggtacccttcatggacagtgaagcagagagtgaaaacccaccaagagcaggacctggttccagcccactcttctccctgctgcctgggtatcgtggccaccccagtttccagtccttggtgagcaagctccggagccaagtgatgtccatggcccggccacagctgtcacacacgatcctcaccgagaagaactggttccactacgctgcccggatctgggatggggtgagaaagtcctctgctctggcagagtacagccgcctgctggcctgaggccaaggagaggaatgtcatgcaggggacctcctgggtccgcagtgtactgcgagggagcacagatgtccatcccccgctggggtggagagcggcagcaggcctgatggatgagggatcgtggcttcccggcccagagacatgaggtgtccagggccaggccccccaccctcagttggggctgttccgggggtgactgtgagcgatcccaccccaaacctgagatggggtagcccgtcctgtgtcctccacagggacaagcagtgggaggagtctgaatggtcaccaggaagcccgggctccatcttgacctcctttttcagggacaggagcaacaggcccctcttccctgactctaagcccttccctgtaaggtgaggcagggtctggagagctctttattggaacagatctggtggttcaaataaacacagtcatgcaagcctg

SEQ ID NO: 10272 - protein, 520 aa, Homo sapiens; identical to SEQ ID NO: 1579

SEQ ID NO: 10273 - DNA, 2731 bp, Homo sapiens
cgaagaggcacaactcgaaccccagatccgggccgctctccctcctgccggctcctcggcgtatccatttccctactcatctccccaccctcaaccccccaaccgcgcgcacgcgcattgagtcagagccgcggcgtcctcccgcctcccgctccggaacccgcatgcgtgctgaagccgaccgcctccatccacgcacgctcagcccggcgagcgcattcagttctcgagctccagccctcagcgcatgcgcaggacgagtcgcctgagggaactgatctcagctcgggcccgcgttacatcctcctcctcttcttccttcggcccagctttccttaggggctgcaacccggacgccgaggccggtttcggagtggggagtgcccattttctctccttcccacgttcctggcccccagacgccatttgcaggcgggtggcttgggtcagcctccccgcccccacccgactcccgtcacgggagagcgcacaccgcgccccgagaaccaatcagcagccgcgttaggtaaccatgtctgagtctggacacagtcagcctggactctatgggatagagcggcggcgacggtggaaggagcctggctctggtggcccccagaatctctctgggcctggtggtcgggagagggactacattgcaccatgggaaagagagagaagggatgccagcgaagagacaagcacttccgtcatgcagaaaacccccatcatcctctcaaaacctccagcagagcggtcaaaacagccaccacctccaacagcccctgctgccccgcctgctccagcccctctggagaagcccatcgttctcatgaagccacgggaggaggggaaggggcctgtggccgtgacaggtgcctctacccctgagggcaccgccccaccaccccctgcagcccctgcgccacccaagggggagaaggaggggcagagacccacacagcctgtgtaccagatccagaaccggggcatgggcactgccgcaccagcagccatggaccctgtcgtgggtcaggccaaactactgcccccagagcgcatgaagcacagcatcaagttggtggatgaccagatgaattggtgtgacagtgccatcgagtacctgttggatcagactgatgtgttggtggttggtgtcctgggcctccaggggacaggcaagtccatggtcatgtcattgttgtcagccaacactccagaggaggaccagaggacttatgttttccgggcccagagcgctgaaatgaaggaacgagggggcaaccagaccagtggcatcgacttctttattacccaagaacggattgttttcctggacacacagcccatcctgagcccttctatcctagaccatctcatcaataatgaccgcaaactgcctccagagtacaaccttccccacacttacgttgaaatgcagtcactccagattgctgccttccttttcacggtctgccatgtggtgattgttgtccaggactggttcacagacctcagtctctacaggttcctgcagacagcagagatggtgaagccctccaccccatcccccagccacgagtccagcagctcatcgggctccgatgaaggcaccgagtactacccccacctagtcttcttgcagaacaaagctcgccgagaggacttctgtcctcggaagctgcggcagatgcacctgatgattgaccagctcatggcccactcccacctgcgttacaagggaactctgtccatgttacaatgcaatgtcttcccggggcttccacctgacttcctggactctgaggtcaacttattcctggtacccttcatggacagtgaagcagagagtgaaaacccaccaagagcaggacctggttccagcccactcttctccctgctgcctgggtatcgtggccaccccagtttccagtccttggtgagcaagctccggagccaagtgatgtccatggcccggccacagctgtcacacacgatcctcaccgagaagaactggtaagagctctttgcagagggggtcaatttgaggcaccccaccctggtgtagagagaagggggcgtcccttagatcggcatgaccttgtgaagcccctcctctccagatcccaggttccttttctggaacagtgatgattgctactgtcttgtaagcatctcacccatgtggcaacatgctgtttcctgtgactttgaatcctcctaatcagccagcatcatgtaggtccttgtcaccagttttcctggtggggaaatttaggctcggggaaaagtgttacatagcaaggccacacatctgtggctaggagtcatttgattgctaggagtaggaccagtgaccagatttagcttaaggaagatttattccagggacctgatcacagaaagcagggccctgcagcagatgggaaccaggaagccatcagggtctcattcttcacacttctgcatttgtcttgtttcctgcctctggctttctctccctgctttcacttggcccggcactagctctgtggcccctactttacattacttctttgtccagagctctcagcatatgagtccaggtcttcctcatcttacttcaaagagaaaaattggaaagataaatagcttaactgggtgcagcctctctaacttggctccctacatctgtttgcagttggctgtgcctggaaggggtcaggagtgcagacaaagcagcaggaagccc

SEQ ID NO: 10274 - protein, 495 aa, Homo sapiens
MSESGHSQPGLYGIERRRRWKEPGSGGPQNLSGPGGRERDYIAPWERERRDASEETSTSVMQKTPIILSKPPAERSKQPPPPTAPAAPPAPAPLEKPIVLMKPREEGKGPVAVTGASTPEGTAPPPPAAPAPPKGEKEGQRPTQPVYQIQNRGMGTAAPAAMDPVVGQAKLLPPERMKHSIKLVDDQMNWCDSAIEYLLDQTDVLVVGVLGLQGTGKSMVMSLLSANTPEEDQRTYVFRAQSAEMKERGGNQTSGIDFFITQERIVFLDTQPILSPSILDHLINNDRKLPPEYNLPHTYVEMQSLQIAAFLFTVCHVVIVVQDWFTDLSLYRFLQTAEMVKPSTPSPSHESSSSSGSDEGTEYYPHLVFLQNKARREDFCPRKLRQMHLMIDQLMAHSHLRYKGTLSMLQCNVFPGLPPDFLDSEVNLFLVPFMDSEAESENPPRAGPGSSPLFSLLPGYRGHPSFQSLVSKLRSQVMSMARPQLSHTILTEKNW

SEQ ID NO: 10275 - DNA, 572 bp, Homo sapiens
ctgcgccacccaagggggagaaggaggggcagagacccacacagcctgtgtaccagatccagaaccggggcatgggcactgccgcaccagcagccatggaccctgtcgtgggtcaggccaaactactgcccccagagcgcatgaagcacagcatcaagttggtggatgaccagatgaattggtgtgacagtgccatcgagtacctgttggatcagactgatgtgttggtggttggtgtcctgggcctccaggggacaggcaagtccatggtcatgtcattgttgtcagccaacactccagaggaggaccagaggacttatgttttccgggcccagagcgctgaaatgaaggaacgagggggcaaccagaccagtggcatcgacttctttattacccaagaacggattgttttcctggacacacaggtgccagccccgcctgcctttgccccaccctgccacatcctgcattgagcctcttcctggaatgtgattaagccagaaccctgcgtggattccatgtgcttccagtcaagccatggacatactggctgccctggggcaaattgtgtc

SEQ ID NO: 10276 - protein, 133 aa, Homo sapiens
MGTAAPAAMDPVVGQAKLLPPERMKHSIKLVDDQMNWCDSAIEYLLDQTDVLVVGVLGLQGTGKSMVMSLLSANTPEEDQRTYVFRAQSAEMKERGGNQTSGIDFFITQERIVFLDTQVPAPPAFAPPCHILH

SEQ ID NO: 10277 - DNA, 938 bp, Homo sapiens
cgaagaggcacaactcgaaccccagatccgggccgctctccctcctgccggctcctcggcgtatccatttccctactcatctccccaccctcaaccccccaaccgcgcgcacgcgcattgagtcagagccgcggcgtcctcccgcctcccgctccggaacccgcatgcgtgctgaagccgaccgcctccatccacgcacgctcagcccggcgagcgcattcagttctcgagctccagccctcagcgcatgcgcaggacgagtcgcctgagggaactgatctcagctcgggcccgcgttacatcctcctcctcttcttccttcggcccagctttccttaggggctgcaacccggacgccgaggccggtttcggagtggggagtgcccattttctctccttcccacgttcctggcccccagacgccatttgcaggcgggtggcttgggtcagcctccccgcccccacccgactcccgtcacgggagagcgcacaccgcgccccgagaaccaatcagcagccgcgttaggtaaccatgtctgagtctggacacagtcagcctggactctatgggatagagcggcggcgacggtggaaggagcctggctctggtggcccccagaatctctctgggcctggtggtcgggagagggactacattgcaccatgggaaagagagagaagggatgccagcgaagagacaagcacttccgtcatgcagaaaacccccatcatcctctcaaaacctccagcagagcgggtgagcagagaaggagggaggagggggagccgttagggaagggattgcccccattgatgggattttttttacctccgtagtcaaaacagccaccacctccaacagcccctgctgccccgcctgctccagcccctctggagaagcccatcgttctcatgaagccacgggaggaggggaaggg

SEQ ID NO: 10278 - protein, 86 aa, Homo sapiens
MSESGHSQPGLYGIERRRRWKEPGSGGPQNLSGPGGRERDYIAPWERERRDASEETSTSVMQKTPIILSKPPAERVSREGGRRGSR

SEQ ID NO: 10279 - DNA, 954 bp, Homo sapiens
tcttcgacaactttgtttctttgttttgtttcttcatgtgcctctcctcccttcattcctcccctgagctacagctacattcagggaccaggcttgtaaaactgactccccacttcttcccacaggttccgccaggtgcggctgaaacaccggaagctccgggaacaagtgaactccatggtggacatctccaagatgcacatgatcctgtatgacctgcagcagaatctgagcagctcacaccgggccctggagaaacagattgacacgctggcggggaagctggatgccctgactgagctgcttagcactgccctggggccgaggcagcttccagaacccagccagcagtccaagtagctggacccacgaggaggaaccaggctactttccccagtactgaggtggtggacatcgtctctgccactcctgacccagccctgaacaaagcacctcaagtgcaaggaccaaagggggccctggcttggagtgggttggcttgctgatggctgctggaggggacgctggctaaagtgggtaggccttggcccacctgaggccccaggtgggaacatggtcacccccactctgcataccctcatcaaaaacactctcactatgctgctatggacgacctccagctctcagttacaagtgcaggcgactggaggcaggactcctgggtccctgggaaagagggtactaggggcccggatccaggattctgggaggcttcagttaccgctggccgagctgaagaactgggtatgaggctggggcggggctggaggtggcgccccctggtgggacaacaaagaggacaccatttttccagagctgcagagagcacctggtggggaggaagaagtgtaactcaccagcctctgctcttatctttgtaataaatgttaaagccagaagttgccatttctctctaaacatatctacactcct

SEQ ID NO: 10280 - protein, 60 aa, Homo sapiens [sequence omitted]

SEQ ID NO: 10281 - DNA, 1243 bp, Homo sapiens
gcttggcctctggctgaccaccgcctgggtgctgtccgtggccgagaggcaggctgttaatgccactgggcacctttcagacacactttggctgatccccatcacattcctgaccatcggctatggtgacgtggtgccgggcaccatgtggggcaagatcgtctgcctgtgcactggagtcatgggtgtctgctgcacagccctgctggtggccgtggtggcccggaagctggagtttaacaaggcagagaagcacgtgcacaacttcatgatggatatccagtataccaaagagatgaaggagtccgctgcccgagtgctacaagaagcctggatgttctacaaacatactcgcaggaaggagtctcatgctgcccgcaggcatcagcgcaagctgctggccgccatcaacgcgttccgccaggtgcggctgaaacaccggaagctccgggaacaagtgaactccatggtggacatctccaagatgcacatgatcctgtatgacctgcagcagaatctgagcagctcacaccgggccctggagaaacagattgacacgctggcggggaagctggatgccctgactgagctgcttagcactgccctggggccgaggcagcttccagaacccagccagcagtccaagtagctggacccacgaggaggaaccaggctactttccccagtactgaggtggtggacatcgtctctgccactcctgacccagccctgaacaaagcacctcaagtgcaaggaccaaagggggccctggcttggagtgggttggcttgctgatggctgctggaggggacgctggctaaagtgggtaggccttggcccacctgaggccccaggtgggaacatggtcacccccactctgcataccctcatcaaaaacactctcactatgctgctatggacgacctccagctctcagttacaagtgcaggcgactggaggcaggactcctgggtccctgggaaagagggtactaggggcccggatccaggattctgggaggcttcagttaccgctggccgagctgaagaactgggtatgaggctggggcggggctggaggtggcgccccctggtgggacaacaaagaggacaccatttttccagagctgcagagagcacctggtggggaggaagaagtgtaactcaccagcctctgctcttatctttgtaataaatgttaaagccagaagttgccatttctctctaaacatatctacactcct

SEQ ID NO: 10282 - protein, 167 aa, Homo sapiens
MWGKIVCLCTGVMGVCCTALLVAVVARKLEFNKAEKHVHNFMMDIQYTKEMKESAARVLQEAWMFYKHTRRKESHAARRHQRKLLAAINAFRQVRLKHRKLREQVNSMVDISKMHMILYDLQQNLSSSHRALEKQIDTLAGKLDALTELLSTALGPRQLPEPSQQSK

SEQ ID NO: 10283 - DNA, 2481 bp, Homo sapiens
gtttgggtgtggctctttgtgtcagagaaagttgtgacaactttgagtgtaatatttgtgcctgtgtgtggacggtgtttgggtggctgtgtgtgccacgggatactgcctgcttgctaagtgctggtgtgtgtcacaccatgtgtgtggtgtctgggtgtggctgtgggtttcagagcttgctgggagttgtgagtcactctgtgtaggttgtgttgtgtgccctggtgtgttagtctccgtcttgggctgtggagtgtccttcggtgtctgggtgtggtgagtagaggtgtgtgtcacaaagtacagaccattgtgtgtgacaaagcccatcgtgtgtctgtgtgtgtctttatccacgtggatggacgtctctttcttgctctgccccaagacacaccctagcccctccttattctcaaaagggggagctggggagcctccccctaccctggggcctcccctgcccctccccgccctgcctggccgtcaccactccccagagggcacagggctctgctgtgcctcagagcaaaagtcccagagccagcagagcaggctgacgacctgcaagccacagtggctgccctgtgcgtgctgcgaggtgggggaccctgggcaggaagctggctgagccccaagaccccgggggccatgggcggggatctggtgcttggcctgggggccttgagacgccgaaagcgcttgctggagcaggagaagtctctggccggctgggcactggtgctggcaggaactggcattggactcatggtgctgcatgcagagatgctgtggttcggggggtgctcgtgggcgctctacctgttcctggttaaatgcacgatcagcatttccaccttcttactcctctgcctcatcgtggcctttcatgccaaagaggtccaggtagggcaggccccgcccctaagccttgctccctccaaccccctcagcgccctctgttcatgaccgacaacgggctgcgggactggcgcgtggcgctgaccgggcggcaggcggcgcagatcgtgctggagctggtggtgtgtgggctgcacccggcgcccgtgcggggcccgccgtgcgtgcaggatttaggggcgccgctgacctccccgcagccctggccgggattcctgggccaaggggaagcgctgctgtccctggccatgctgctctcggcctcacgcttggcctctggctgaccaccgcctgggtgctgtccgtggccgagaggcaggctgttaatgccactgggcacctttcagacacactttggctgatccccatcacattcctgaccatcggctatggtgacgtggtgccgggcaccatgtggggcaagatcgtctgcctgtgcactggagtcatgggtgtctgctgcacagccctgctggtggccgtggtggcccggaagctggagtttaacaaggcagagaagcacgtgcacaacttcatgatggatatccagtataccaaagaggaaggagtctcatgctgcccgcaggcatcagcgcaagctgctggccgccatcaacgcgtgagggccgctttgtatgcacacgtgtccatgtgcacccatgtccaagtcacctctctgcacggctgtgtgtgtgcatgtccatgcctgtccaggtcaggacacccaggttccgccaggtgcggctgaaacaccggaagctccgggaacaagtgaactccatggtggacatctccaagatgcacatgatcctgtatgacctgcagcagaatctgagcagctcacaccgggccctggagaaacagattgacacgctggcggggaagctggatgccctgactgagctgcttagcactgccctggggccgaggcagcttccagaacccagccagcagtccaagtagctggacccacgaggaggaaccaggctactttccccagtactgaggtggtggacatcgtctctgccactcctgacccagccctgaacaaagcacctcaagtgcaaggaccaaagggggccctggcttggagtgggttggcttgctgatggctgctggaggggacgctggctaaagtgggtaggccttggcccacctgaggccccaggtgggaacatggtcacccccactctgcataccctcatcaaaaacactctcactatgctgctatggacgacctccagctctcagttacaagtgcaggcgactggaggcaggactcctgggtccctgggaaagagggtactaggggcccggatccaggattctgggaggcttcagttaccgctggccgagctgaagaactgggtatgaggctggggcggggctggaggtggcgccccctggtgggacaacaaagaggacaccatttttccagagctgcagagagcacctggtggggaggaagaagtgtaactcaccagcctctgctcttatctttgtaataaatgttaaagccagaagttgccatttctctctaaacatatctacactcct

SEQ ID NO: 10284 - protein, 129 aa, Homo sapiens
MLPAGISASCWPPSTREGRFVCTRVHVHPCPSHLSARLCVCMSMPVQVRTPRFRQVRLKHRKLREQVNSMVDISKMHMILYDLQQNLSSSHRALEKQIDTLAGKLDALTELLSTALGPRQLPEPSQQSK

SEQ ID NO: 10285 - DNA, 2206 bp, Homo sapiens
gtttgggtgtggctctttgtgtcagagaaagttgtgacaactttgagtgtaatatttgtgcctgtgtgtggacggtgtttgggtggctgtgtgtgccacgggatactgcctgcttgctaagtgctggtgtgtgtcacaccatgtgtgtggtgtctgggtgtggctgtgggtttcagagcttgctgggagttgtgagtcactctgtgtaggttgtgttgtgtgccctggtgtgttagtctccgtcttgggctgtggagtgtccttcggtgtctgggtgtggtgagtagaggtgtgtgtcacaaagtacagaccattgtgtgtgacaaagcccatcgtgtgtctgtgtgtgtctttatccacgtggatggacgtctctttcttgctctgccccaagacacaccctagcccctccttattctcaaaagggggagctggggagcctccccctaccctggggcctcccctgcccctccccgccctgcctggccgtcaccactccccagagggcacagggctctgctgtgcctcagagcaaaagtcccagagccagcagagcaggctgacgacctgcaagccacagtggctgccctgtgcgtgctgcgaggtgggggaccctgggcaggaagctggctgagccccaagaccccgggggccatgggcggggatctggtgcttggcctgggggccttgagacgccgaaagcgcttgctggagcaggagaagtctctggccggctgggcactggtgctggcaggaactggcattggactcatggtgctgcatgcagagatgctgtggttcggggggtgctcgtgggcgctctacctgttcctggttaaatgcacgatcagcatttccaccttcttactcctctgcctcatcgtggcctttcatgccaaagaggtccagctgttcatgaccgacaacgggctgcgggactggcgccctgctgctcggcctcacgcttggcctctggctgaccaccgcctgggtgctgtccgtggccgagaggcaggctgttaatgccactgggcacctttcagacacactttggctgatccccatcacattcctgaccatcggctatggtgacgtggtgccgggcaccatgtggggcaagatcgtctgcctgtgcactggagtcatgggtgtctgctgcacagccctgctggtggccgtggtggcccggaagctggagtttaacaaggcagagaagcacgtgcacaacttcatgatggatatccagtataccaaagagatgaaggagtccgctgcccgagtgctacaagaagcctggatgttctacaaacatactcgcaggaaggagtctcatgctgcccgcaggcatcagcgcaagctgctggccgccatcaacgcgttccgccaggtgcggctgaaacaccggaagctccgggaacaagtgaactccatggtggacatctccaagatgcacatgatcctgtatgacctgcagcagaatctgagcagctcacaccgggccctggagaaacagattgacacgctggcggggaagctggatgccctgactgagctgcttagcactgccctggggccgaggcagcttccagaacccagccagcagtccaagtagctggacccacgaggaggaaccaggctactttccccagtactgaggtggtggacatcgtctctgccactcctgacccagccctgaacaaagcacctcaagtgcaaggaccaaagggggccctggcttggagtgggttggcttgctgatggctgctggaggggacgctggctaaagtgggtaggccttggcccacctgaggccccaggtgggaacatggtcacccccactctgcataccctcatcaaaaacactctcactatgctgctatggacgacctccagctctcagttacaagtgcaggcgactggaggcaggactcctgggtccctgggaaagagggtactaggggcccggatccaggattctgggaggcttcagttaccgctggccgagctgaagaactgggtatgaggctggggcggggctggaggtggcgccccctggtgggacaacaaagaggacaccatttttccagagctgcagagagcacctggtggggaggaagaagtgtaactcaccagcctctgctcttatctttgtaataaatgttaaagccagaagttgccatttctctctaaacatatctacactcct

SEQ ID NO: 10286 - protein, 167 aa, Homo sapiens; identical to SEQ ID NO: 10282

SEQ ID NO: 10287 - DNA, 2532 bp, Homo sapiens
gtttgggtgtggctctttgtgtcagagaaagttgtgacaactttgagtgtaatatttgtgcctgtgtgtggacggtgtttgggtggctgtgtgtgccacgggatactgcctgcttgctaagtgctggtgtgtgtcacaccatgtgtgtggtgtctgggtgtggctgtgggtttcagagcttgctgggagttgtgagtcactctgtgtaggttgtgttgtgtgccctggtgtgttagtctccgtcttgggctgtggagtgtccttcggtgtctgggtgtggtgagtagaggtgtgtgtcacaaagtacagaccattgtgtgtgacaaagcccatcgtgtgtctgtgtgtgtctttatccacgtggatggacgtctctttcttgctctgccccaagacacaccctagcccctccttattctcaaaagggggagctggggagcctccccctaccctggggcctcccctgcccctccccgccctgcctggccgtcaccactccccagagggcacagggctctgctgtgcctcagagcaaaagtcccagagccagcagagcaggctgacgacctgcaagccacagtggctgccctgtgcgtgctgcgaggtgggggaccctgggcaggaagctggctgagccccaagaccccgggggccatgggcggggatctggtgcttggcctgggggccttgagacgccgaaagcgcttgctggagcaggagaagtctctggccggctgggcactggtgctggcaggaactggcattggactcatggtgctgcatgcagagatgctgtggttcggggggtgctcgtgggcgctctacctgttcctggttaaatgcacgatcagcatttccaccttcttactcctctgcctcatcgtggcctttcatgccaaagaggtccagctgttcatgaccgacaacgggctgcgggactggcgcgtggcgctgaccgggcggcaggcggcgcagatcgtgctggagctggtggtgtgtgggctgcacccggcgcccgtgcggggcccgccgtgcgtgcaggatttaggggcgccgctgacctccccgcagccctggccgggattcctgggccaaggggaagcgctgctgtccctggccatgctgctgcgtctctacctggtgccccgcgccgtgctcctgcgcagcggcgtcctgctcaacgcttcctaccgcagcatcggcgctctcaatcaagtccgcttccgccactggttcgtggccaagctttacatgaacacgcaccctggccgcctgctgctcggcctcacgcttggcctctggctgaccaccgcctgggtgctgtccgtggccgagaggcaggctgttaatgccactgggcacctttcagacacactttggctgatccccatcacattcctgaccatcggctatggtgacgtggtgccgggcaccatgtggggcaagatcgtctgcctgtgcactggagtcatgggtgtctgctgcacagccctgctggtggccgtggtggcccggaagctggagtttaacaaggcagagaagcacgtgcacaacttcatgatggatatccagtataccaaagagatgaaggagtccgctgcccgagtgctacaagaagcctggatgttctacaaacatactcgcaggaaggagtctcatgctgcccgcaggcatcagcgcaagctgctggccgccatcaacgcgttccgccaggtgcggctgaaacaccggaagctccgggaacaagtgaactccatggtggacatctccaagatgcacatgatcctgtatgacctgcagcagaatctgagcagctcacaccgggccctggagaaacagattgacacgctggcggggaagctggatgccctgactgagctgcttagcactgccctggggccgaggcagcttccagaacccagccagcagtccaagtagctggacccacgaggaggaaccaggctactttccccagtactgaggtggtggacatcgtctctgccactcctgacccagccctgaacaaagcacctcaagtgcaaggaccaaagggggccctggcttggagtgggttggcttgctgatggctgctggaggggacgctggctaaagtgggtaggccttggcccacctgaggccccaggtgggaacatggtcacccccactctgcataccctcatcaaaaacactctcactatgctgctatggacgacctccagctctcagttacaagtgcaggcgactggaggcaggactcctgggtccctgggaaagagggtactaggggcccggatccaggattctgggaggcttcagttaccgctggccgagctgaagaactgggtatgaggctggggcggggctggaggtggcgccccctggtgggacaacaaagaggacaccatttttccagagctgcagagagcacctggtggggaggaagaagtgtaactcaccagcctctgctcttatctttgtaataaatgttaaagccagaagttgccatttctctctaaacatatctacactcct

SEQ ID NO: 10288 - protein, 427 aa, Homo sapiens; identical to SEQ ID NO: 1581

SEQ ID NO: 10289 - DNA, 1478 bp, Homo sapiens
tctcggtgtgtctgcggacctgggtacctgggtttctactggggatgggggctcgtggggaggcagggtgcatcccctcccactctttcagctcttcgacaactttgtttctttgttttgtttcttcatgtgcctctcctcccttcattcctcccctgagctacagctacattcagggaccaggcttgtaaaactgactccccacttcttcccacaggttccgccaggtgcggctgaaacaccggaagctccgggaacaagtgaactccatggtggacatctccaagatgcacatgatcctgtatgacctgcagcagaatctgagcagctcacaccgggccctggagaaacagattgacacgctggcggggaagctggatgccctgactgagctgcttagcactgccctggggccgaggcagcttccagaacccagccagcagtccaagtagctggtgagggggctgggacttgggcaggaaggcatcctggaggaagggttcctgtggccagcaccctatgtggctaagggggcgggggatggctgggagacaaggccgccttttctcatcagctctggcactgtctggaggaaaggactcagttcggggctggactggcagtgaaggaagatggtgtaccctctccccttcactgacccttgatggccttctccctctttgcttggtctctctctctctctctgcctgtcctgggcacattgtctggctgtccatccaatgtctctgtctaaatgccctcctgccccctggcctcggggcccggaaacacctgccccctgtctcccacttctgcccaccggtttctgtctgcacctcggtgtgtcccactctcactctccctcttcctggcctgcctctccatcagtctctctgtctctccaggacccacgaggaggaaccaggctactttccccagtactgaggtggtggacatcgtctctgccactcctgacccagccctgaacaaagcacctcaagtgcaaggaccaaagggggccctggcttggagtgggttggcttgctgatggctgctggaggggacgctggctaaagtgggtaggccttggcccacctgaggccccaggtgggaacatggtcacccccactctgcataccctcatcaaaaacactctcactatgctgctatggacgacctccagctctcagttacaagtgcaggcgactggaggcaggactcctgggtccctgggaaagagggtactaggggcccggatccaggattctgggaggcttcagttaccgctggccgagctgaagaactgggtatgaggctggggcggggctggaggtggcgccccctggtgggacaacaaagaggacaccatttttccagagctgcagagagcacctggtggggaggaagaagtgtaactcaccagcctctgctcttatctttgtaataaatgttaaagccagaagttgccatttctctct

SEQ ID NO: 10290 - protein, 60 aa, Homo sapiens [sequence omitted]

SEQ ID NO: 10291 - DNA, 1115 bp, Homo sapiens
gtttgggtgtggctctttgtgtcagagaaagttgtgacaactttgagtgtaatatttgtgcctgtgtgtggacggtgtttgggtggctgtgtgtgccacgggatactgcctgcttgctaagtgctggtgtgtgtcacaccatgtgtgtggtgtctgggtgtggctgtgggtttcagagcttgctgggagttgtgagtcactctgtgtaggttgtgttgtgtgccctggtgtgttagtctccgtcttgggctgtggagtgtccttcggtgtctgggtgtggtgagtagaggtgtgtgtcacaaagtacagaccattgtgtgtgacaaagcccatcgtgtgtctgtgtgtgtctttatccacgtggatggacgtctctttcttgctctgccccaagacacaccctagcccctccttattctcaaaagggggagctggggagcctccccctaccctggggcctcccctgcccctccccgccctgcctggccgtcaccactccccagagggcacagggctctgctgtgcctcagagcaaaagtcccagagccagcagagcaggctgacgacctgcaagccacagtggctgccctgtgcgtgctgcgaggtgggggaccctgggcaggaagctggctgagccccaagaccccgggggccatgggcggggatctggtgcttggcctgggggccttgagacgccgaaagcgcttgctggagcaggagaagtctctggccggctgggcactggtgctggcaggaactggcattggactcatggtgctgcatgcagagatgctgtggttcggggggtgctcgtgggcgctctacctgttcctggttaaatgcacgatcagcatttccaccttcttactcctctgcctcatcgtggcctttcatgccaaagaggtccagctgttcatgaccgacaacgggctgcgggactggcgcgtggcgctgaccgggcggcaggcggcgcagatcgtgctggagctggtggtgtgtgggctgcacccggcgcccgtgcggggcccgccgtgcgtgcaggatttaggggcgccgctgacctccccgcagccctggccgggattcctgggccaaggggaagcgctgctgtccct

SEQ ID NO: 10292 - protein, 152 aa, Homo sapiens
MGGDLVLGLGALRRRKRLLEQEKSLAGWALVLAGTGIGLMVLHAEMLWFGGCSWALYLFLVKCTISISTFLLLCLIVAFHAKEVQLFMTDNGLRDWRVALTGRQAAQIVLELVVCGLHPAPVRGPPCVQDLGAPLTSPQPWPGFLGQGEALL

SEQ ID NO: 10293 - DNA, 1505 bp, Homo sapiens
aaatgatgttaaagtaagaattgcactcctgtccctctggccttccatctctcccgcccttgtgccccacaacctggccaacagtactggaagaaactggacacagtcaccagcatccccggggagggcaaaacagccatgtcgtgccccgatgaagagcaattctgatcacagctgttactcactgagcaccagccaggcaccaggcaccccataacacggcttcctgtgctctccctccagagcctgtcgcagctctaggagggagctatacaatgatgtctttattagtgtcatcatgagaagcccaataagcagtatgccctaacagttagtaggccaggctctggagctaagctgcatgggttcaaatcccagctccaccattcagcctgcagagaccatgagcgagttacttaagccaggctctggagctaagctgcatgggttcaaatcccagctccagcattcagcctacagagaccatgggtgagttacttaagccaggctctggagctaagctgcatgggttcaaatcccagctccaccattcagcctgcagagactgtgggtgagttacttgagctctctgtgccaatattttctcacctataaggtggaggtgaaaataaactctataacatgacaagaactacttcacagtagttgcagtgaggattcaacgagatgaacatttagtacttgggacacagcagtggcccagtgtaaatgggctacttgtcataagccctaagtcacaggtcaacaaactgagaggcaaaagcacttggttgagcttgtgtatctagtgagtatggattcagggaccagattcccagccccacgaactgctaagcaaccccacctcctaaacacatgagtgccgattaacttcacagaaaaacacacaaggcaaagttcagcgaggtgaaattctccaagctataaagatcagggaagacttcctggaggaattcacccttgagcaaaatcctaaaggatcaatagtagctggcaaaaagaagcaggaggaagcgcattctaggtagaggagacagcctggacaaaggtctgagggaggaaggagcacaaggagtgcaggacactttcatgagtgcaggacactttcataactgcatgaacttcatagagatgggatcctttagcatgttctctgtgcacatgcttgaccatgttctttcacatgctttttgccacttgatctttccagcaactcagtgagagaagcaaaaaaggaacacagagatacaaagaagaaaataaaagcagaaatgaagaaaaaaggagaaaggagaaaagcatgcacttggagactaagaccaggagatagaaacagagaagcaagacaaggcgcagtggctcacacttgtaattccagcaccttaggaggacgaggcaggaggatggcttgagaccaggagttcgcgaccagcctggcaacatagtgggaactgattttatgaccaaaaaaatgttttttaatt

SEQ ID NO: 10294 - protein, 46 aa, Homo sapiens
MKKKGERRKACTWRLRPGDRNREARQGAVAHTCNSSTLGGRGRRMA

SEQ ID NO: 10295 - DNA, 1027 bp, Homo sapiens
cgtgggctcaaggctggcggttgcctgggactgacgacggagcagagaaagccccctcatcttgctttcatcctcggacacagcacaaggaagatgaactcttccggatgcctgtctgaggaggtggggtccctccgcccactgactgtggttatcctgtctgcgtccattgtcgtcggagtgctgggcaatgggctggtgctgtggatgactgtcttccgtatggcacgcacggtctccaccgtctgcttcttccacctggcccttgccgatttcatgctctcactgtctctgcccattgccatgtactatattgtctccaggcagtggctcctcggagagtgggcctgcaaactctacatcacctttgtgttcctcagctactttgccagtaactgcctccttgtcttcatctctgtggaccgttgcatctctgtcctctaccccgtctgggccctgaaccaccgcactgtgcagcgggcgagctggctggcctttggggtgtggctcctggccgccgccttgtgctctgcgcacctgaaattccggacaaccagaaaatggaatggctgtacgcactgctacttggcgttcaactctgacaatgagactgcccagatttggattgaaggggtcgtggagggacacattatagggaccattggccacttcctgctgggcttcctggggcccttagcaatcataggcacctgcgcccacctcatccgggccaagctcttgcgggagggctgggtccatgccaaccggcccaagaggctgctgctggtgctggtgagcgctttctttatcttctggtccccgtttaacgtggtgctgttggtccatctgtggcgacgggtgatgctcaaggaaatctaccacccccggatgctgctcatcctccaggctagctttgccttgggctgtgtcaacagcagcctcaaccccttcctctacgtcttcgttggcagagatttccaagaaaagtttttccagtctttgacttctgccctggcgagggcgtttg

SEQ ID NO: 10296 - protein, 310 aa, Homo sapiens
MNSSGCLSEEVGSLRPLTVVILSASIVVGVLGNGLVLWMTVFRMARTVSTVCFFHLALADFMLSLSLPIAMYYIVSRQWLLGEWACKLYITFVFLSYFASNCLLVFISVDRCISVLYPVWALNHRTVQRASWLAFGVWLLAAALCSAHLKFRTTRKWNGCTHCYLAFNSDNETAQIWIEGVVEGHIIGTIGHFLLGFLGPLAIIGTCAHLIRAKLLREGWVHANRPKRLLLVLVSAFFIFWSPFNVVLLVHLWRRVMLKEIYHPRMLLILQASFALGCVNSSLNPFLYVFVGRDFQEKFFQSLTSALARA

SEQ ID NO: 10297 - DNA, 1269 bp, Homo sapiens
tcttgagcctaggaggtggaggctgcagtgatctgtgattgtacctttgcactccagcctgggtgacagagcatgacgctgtctctaaaagaataataataataagcattccataaaaattatggaatggagaaatcatgaatggggtctcggaggggaccagaggctgcagtgacaggcaacctggggtcctgacacgtgatcgctcttgttccaggaagatgaactcttccggatgcctgtctgaggaggtggggtccctccgcccactgactgtggttatcctgtctgcgtccattgtcgtcggagtgctgggcaatgggctggtgctgtggatgactgtcttccgtatggcacgcacggtctccaccgtctgcttcttccacctggcccttgccgatttcatgctctcactgtctctgcccattgccatgtactatattgtctccaggcagtggctcctcggagagtgggcctgcaaactctacatcacctttgtgttcctcagctactttgccagtaactgcctccttgtcttcatctctgtggaccgttgcatctctgtcctctaccccgtctgggccctgaaccaccgcactgtgcagcgggcgagctggctggcctttggggtgtggctcctggccgccgccttgtgctctgcgcacctgaaattccggacaaccagaaaatggaatggctgtacgcactgctacttggcgttcaactctgacaatgagactgcccagatttggattgaaggggtcgtggagggacacattatagggaccattggccacttcctgctgggcttcctggggcccttagcaatcataggcacctgcgcccacctcatccgggccaagctcttgcgggagggctgggtccatgccaaccggcccaagaggctgctgctggtgctggtgagcgctttctttatcttctggtccccgtttaacgtggtgctgttggtccatctgtggcgacgggtgatgctcaaggaaatctaccacccccggatgctgctcatcctccaggctagctttgccttgggctgtgtcaacagcagcctcaaccccttcctctacgtcttcgttggcagagatttccaagaaaagtttttccagtctttgacttctgccctggcgagggcgtttggagaggaggagtttctgtcatcctgtccccgtggcaacgccccccgggaatgatggaagacttcagctggaagctggaagccgtccttcttagtttgcttgtggcctcttacct

SEQ ID NO: 10298 - protein, 356 aa, Homo sapiens; identical to SEQ ID NO: 1583

SEQ ID NO: 10299 - DNA, 618 bp, Homo sapiens
atgccctttccccgttgccatggccaccattctggtctctccgacaaccccctctcggagttccagtggcttctcccccctctggctcagaggcccaggaaagagagagaagaccaaccaaggggtggctggagtcccaaggccatgaactttcaggaaaatgtgaccctggccatggccttgttcaccatcctgacctccatctatttcttcaacaaggctcagcagtgagaagacacaggacctccccgcacaagagccctgcctctccctctgccatcgctctgaggccagataaatgagaggcagagaatatcattgcaggatcctgctttttaaaaaatgctccatgccaagggcagcggctcacacatgtaatctcaacacttcgggaggctgaagcagaaagattgcttgaggccaggaattcaagaccagcctgggcaacatagcaagattctgtctctacaaaaaaaaatttaatgagggcatgatggcacatgcctgtcgtcccagctacttgggaggctgaggcaggaggattgctcgaggctgcagggagctatgaccatgccactctactcccgcctggtcaacaaagcaagaacctgactcaaa

SEQ ID NO: 10300 - protein, 76 aa, Homo sapiens
MPFPRCHGHHSGLSDNPLSEFQWLLPPLAQRPRKEREDQPRGGWSPKAMNFQENVTLAMALFTILTSIYFFNKAQQ

SEQ ID NO: 10301 - DNA, 1692 bp, Homo sapiens
gattaatgttggttaggcagctgtcagtcttggccagaattatgccttcaggtactcaagatccctttacactcttcttccaaatagaagaagtagagccatccttcccaaggatgagatccccaacgttttatgttgaagtttctttgtgataagtgtcccataacttaaaagaatacttagcttcaaagccccaatataccacgatgcaatgagaattgggaatccacaatggaaactcctaatgaggaaaagaaaaaagggagatgtagcggacactgttctactgcaattaaccaaggccagtgggaaggaaaggtctcgctgtgtcacccaggctggagtgcagtgccacaatcatagctcactgccgccttcgcctcccgggctcaagctatcctcccacctcagccccagtccttcagctggatctacaggcacgcaccaccaagcccaggagcagacaagatggagacaaattcctctctccccacgaacatctctggagggacacctgctgtatctgctggctatctcttcctggatatcatcacttatctggtatttgcagtcacctttgtcctcggggtcctgggcaacgggcttgtgatctgggtggctggattccggatgacacacacagtcaccaccatcagttacctgaacctggccgtggctgacttctgtttcacctccactttgccattcttcatggtcaggaaggccatgggaggacattggcctttcggctggttcctgtgcaaattcgtctttaccatagtggacatcaacttgttcggaagtgtcttcctgatcgccctcattgctctggaccgctgtgtttgcgtcctgcatccagtctggacccagaaccaccgcaccgtgagcctggccaagaaggtgatcattgggccctgggtgatggctctgctcctcacattgccagttatcattcgtgtgactacagtacctggtaaaacggggacagtagcctgcacttttaacttttcgccctggaccaacgaccctaaagagaggataaatgtggccgttgccatgttgacggtgagaggcatcatccggttcatcattggcttcagcgcacccatgtccatcgttgctgtcagttatgggcttattgccaccaagatccacaagcaaggcttgattaagtccagtcgtcccttacgggtcctctcctttgtcgcagcagccttttttctctgctggtccccatatcaggtggtggcccttatagccacagtcagaatccgtgagttattgcaaggcatgtacaaagaaattggtattgcagtggatgtgacaagtgccctggccttcttcaacagctgcctcaaccccatgctctatgtcttcatgggccaggacttccgggagaggctgatccacgcccttcccgccagtctggagagggccctgaccgaggactcaacccaaaccagtgacacagctaccaattctactttaccttctgcagaggtggagttacaggcaaagtgaggagggagctgggggacactttcgagctcccagctccagcttcgtctcaccttgagttaggctgagccacaggcatttcctgcttattttaggattacccactcatcagaaaaaaaaaaaaaagcctttgtgtcccctgatttggggagaataaacagatatgagtttatt

SEQ ID NO: 10302 - protein, 132 aa, Homo sapiens
MRIGNPQWKLLMRKRKKGDVADTVLLQLTKASGKERSRCVTQAGVQCHNHSSLPPSPPGLKLSSHLSPSPSAGSTGTHHQAQEQTRWRQIPLSPRTSLEGHLLYLLAISSWISSLIWYLQSPLSSGSWATGL

SEQ ID NO: 10303 - DNA, 2437 bp, Homo sapiens
gctctaactatcaaaacactcattttgttttatagcatgacaggctgtctgattccatctttataaccaaagccaattaagatcttaaaaccaaacatataacttcatctttttacaagtacttagagcctgagttgctccacaggaatccaggaactgggcacaggaaaaggatctaagctggtggtgtgggaagatggaaaccaacttctccattcctctgaatgaaactgaggaggtgctccctgagcctgctggccacaccgttctgtggatcttctcattgctagtccacggagtcacctttgtcttcggggtcctgggcaatgggcttgtgatctgggtggctggattccggatgacacgcacagtcaacaccatctgttacctgaacctggccctagctgacttctctttcagtgccatcctaccattccgaatggtctcatttcaccatagtccttaccttaccaaatttcatcttctggactacaataagtactacgaatggggacacatactgtattttcaactttgcattctggggtgacactgctgtagagaggttgaacgtgttcattaccatggccaaggtctttctgatcctccacttcattattggcttcagcgtgcctatgtccatcatcacagtctgctatgggatcatcgctgccaaaattcacagaaaccacatgattaaatccagccgtcccttacgtgtcttcgctgctgtggtggcttctttcttcatctgttggttcccttatgaactaattggcattctaatggcagtctggctcaaagagatgttgttaaatggcaaatacaaaatcattcttgtcctgattaacccaacaagctccttggccttttttaacagctgcctcaacccaattctctacgtctttatgggtcgtaacttccaagaaagactgattcgctctttgcccactagtttggagagggccctgactgaggtccctgactcagcccagaccagcaacacagacaccacttctgcttcacctcctgaggagacggagttacaagcaatgtgaggtcggggatatttttgggctctgtctctttctaccctgcgttaagcggaaaaaaaaaattctgacagtgtttttcttcctctttcataccaccaccaccacaatcatcaacataaaggaagtctgtaccaaatctgtagggggtttttcccacaaccaagcaatagacaccagctgggtgtcctacaattaaattccaacactatctacctggagctactgtcagatcccacaggtttaagggctcattccccaagtctgctcctccagttgagacacaagtcacaaatccaggcttctgaaacttcggaccaaccagcttcaatcagggttcccactaccccctctttgggggtagagtggctcatggaactcagagaaacatttatttcggcttgctggtttattataaaagcaaggtttattataaaagatactacaaaggatacagatgaagaggcacatagggcaaggtacggggttccacgccctccctgagtgcatcaccctctgggaacctccgtgtgttcacgtctcatgaagctctccaaatccagtcctcttgggtttttatggaagcttcatgatgtcagcattctttcctccagtgtataggatgggatcctctctggggagggtcttaagacccacaattagaaaggcaagggaagattagagtcctgctttggggtagatgaaaggaaaggagagagattctgtttcctgaggcttaatacacccaacattataacaaaggactgtagcaagggctatgggagttctgaagcagaaaccatgggctaaaaccaacatacatcttaataccagataccctaatcccagtcctaacttcatttaaccttggtcacattgagtcattccaggatgagtggctcaagtatttcctcagggaaaatacttctgtgccccctgatttgagggtaagaagtagataatgaggccactgtgggtgttattttttcatgtctggacctcagcctatatcctgagactaagtggaagtgggaaaagagtacaagagaagagacaaagtggggatatttgtaaggcttagatgagatagtgtttttttagaaaaaaactttatcttaccattaagtaaaatgtttgccataggctttctggggctttctctttttaaagtcagactgttgaaggtttcttctattcttatttgttaagagttttcttttattgtttaaatcatgaatgaatgttgaattttattaaatgcagtttctgtaaatattaacgtgatcatattatttttattctttcatttacataattataaattagattaagttttcaatgttaagctacccttgcatttatgaaataaaccacgcttgctcatg

SEQ ID NO: 10304 - protein, 117 aa, Homo sapiens
METNFSIPLNETEEVLPEPAGHTVLWIFSLLVHGVTFVFGVLGNGLVIWVAGFRMTRTVNTICYLNLALADFSFSAILPFRMVSFHHSPYLTKFHLLDYNKYYEWGHILYFQLCILG

SEQ ID NO: 10305 - DNA, 2628 bp, Homo sapiens
atcaaaacactcattttgttttatagcatgacaggctgtctgattccatctttataaccaaagccaattaagatcttaaaaccaaacatataacttcatctttttacaagtacttagagcctgagttgctccacaggaatccaggaactgggcacaggaaaaggatctaagctggtggtgtgggaagatggaaaccaacttctccattcctctgaatgaaactgaggaggtgctccctgagcctgctggccacaccgttctgtggatcttctcattgctagtccacggagtcacctttgtcttcggggtcctgggcaatgggcttgtgatctgggtggctggattccggatgacacgcacagtcaacaccatctgttacctgaacctggccctagctgacttctctttcagtgccatcctaccattccgaatggtctcagtcgccatgagagaaaaatggccttttggctcattcctatgtaagttagttcatgttatgatagacatcaacctgtttgtcagtgtctacctgatcaccatcattgctctggaccgctgtatttgtgtcctgcatccagcctgggcccagaaccatcgcaccatgagtctggccaagagggtgatgacgggactctggattttcaccatagtccttaccttaccaaatttcatcttctggactacaataagtactacgaatggggacacatactgtattttcaactttgcattctggggtgacactgctgtagagaggttgaacgtgttcattaccatggccaaggtctttctgatcctccacttcattattggcttcagcgtgcctatgtccatcatcacagtctgctatgggatcatcgctgccaaaattcacagaaaccacatgattaaatccagccgtcccttacgtgtcttcgctgctgtggtggcttctttcttcatctgttggttcccttatgaactaattggcattctaatggcagtctggctcaaagagatgttgttaaatggcaaatacaaaatcattcttgtcctgattaacccaacaagctccttggccttttttaacagctgcctcaacccaattctctacgtctttatgggtcgtaacttccaagaaagactgattcgctctttgcccactagtttggagagggccctgactgaggtccctgactcagcccagaccagcaacacagacaccacttctgcttcacctcctgaggagacggagttacaagcaatgtgaggtcggggatatttttgggctctgtctctttctaccctgcgttaagcggaaaaaaaaaattctgacagtgtttttcttcctctttcataccaccaccaccacaatcatcaacataaaggaagtctgtaccaaatctgtagggggtttttcccacaaccaagcaatagacaccagctgggtgtcctacaattaaattccaacactatctacctggagctactgtcagatcccacaggtttaagggctcattccccaagtctgctcctccagttgagacacaagtcacaaatccaggcttctgaaacttcggaccaaccagcttcaatcagggttcccactaccccctctttgggggtagagtggctcatggaactcagagaaacatttatttcggcttgctggtttattataaaagcaaggtttattataaaagatactacaaaggatacagatgaagaggcacatagggcaaggtacggggttccacgccctccctgagtgcatcaccctctgggaacctccgtgtgttcacgtctcatgaagctctccaaatccagtcctcttgggtttttatggaagcttcatgatgtcagcattctttcctccagtgtataggatgggatcctctctggggagggtcttaagacccacaattagaaaggcaagggaagattagagtcctgctttggggtagatgaaaggaaaggagagagattctgtttcctgaggcttaatacacccaacattataacaaaggactgtagcaagggctatgggagttctgaagcagaaaccatgggctaaaaccaacatacatcttaataccagataccctaatcccagtcctaacttcatttaaccttggtcacattgagtcattccaggatgagtggctcaagtatttcctcagggaaaatacttctgtgccccctgatttgagggtaagaagtagataatgaggccactgtgggtgttattttttcatgtctggacctcagcctatatcctgagactaagtggaagtgggaaaagagtacaagagaagagacaaagtggggatatttgtaaggcttagatgagatagtgtttttttagaaaaaaactttatcttaccattaagtaaaatgtttgccataggctttctggggctttctctttttaaagtcagactgttgaaggtttcttctattcttatttgttaagagttttcttttattgtttaaatcatgaatgaatgttgaattttattaaatgcagtttctgtaaatattaacgtgatcatattatttttattctttcatttacataattataaattagattaagttttcaatgttaagctacccttgcatttatgaaataaaccacgcttgctcatg

SEQ ID NO: 10306 - protein, 353 aa, Homo sapiens; identical to SEQ ID NO: 1585

SEQ ID NO: 10307 - DNA, 2603 bp, Homo sapiens
atgaggtgttgtctgattctagaattatgaataaagccaataaaaactttacactaaattagttgtaattttgtcttttgacaaatccttggagcttgtgttgctcgacaggaagccagggactggccacaagaaaaggaactcagctagtggtgtgggaagatggaaaccaacttctccattcctctgaatgaaactgaggaggtgctccctgagcctgctggccacaccgttctgtggatcttctcattgctagtccacggagtcacctttgtcttcggggtcctgggcaatgggcttgtgatctgggtggctggattccggatgacacgcacagtcaacaccatctgttacctgaacctggccctagctgacttctctttcagtgccatcctaccattccgaatggtctcagtcgccatgagagaaaaatggccttttggctcattcctatgtaagttagttcatgttatgatagacatcaacctgtttgtcagtgtctacctgatcaccatcattgctctggaccgctgtatttgtgtcctgcatccagcctgggcccagaaccatcgcaccatgagtctggccaagagggtgatgacgggactctggattttcaccatagtccttaccttaccaaatttcatcttctggactacaataagtactacgaatggggacacatactgtattttcaactttgcattctggggtgacactgctgtagagaggttgaacgtgttcattaccatggccaaggtctttctgatcctccacttcattattggcttcagcgtgcctatgtccatcatcacagtctgctatgggatcatcgctgccaaaattcacagaaaccacatgattaaatccagccgtcccttacgtgtcttcgctgctgtggtggcttctttcttcatctgttggttcccttatgaactaattggcattctaatggcagtctggctcaaagagatgttgttaaatggcaaatacaaaatcattcttgtcctgattaacccaacaagctccttggccttttttaacagctgcctcaacccaattctctacgtctttatgggtcgtaacttccaagaaagactgattcgctctttgcccactagtttggagagggccctgactgaggtccctgactcagcccagaccagcaacacagacaccacttctgcttcacctcctgaggagacggagttacaagcaatgtgaggtcggggatatttttgggctctgtctctttctaccctgcgttaagcggaaaaaaaaaattctgacagtgtttttcttcctctttcataccaccaccaccacaatcatcaacataaaggaagtctgtaccaaatctgtagggggtttttcccacaaccaagcaatagacaccagctgggtgtcctacaattaaattccaacactatctacctggagctactgtcagatcccacaggtttaagggctcattccccaagtctgctcctccagttgagacacaagtcacaaatccaggcttctgaaacttcggaccaaccagcttcaatcagggttcccactaccccctctttgggggtagagtggctcatggaactcagagaaacatttatttcggcttgctggtttattataaaagcaaggtttattataaaagatactacaaaggatacagatgaagaggcacatagggcaaggtacggggttccacgccctccctgagtgcatcaccctctgggaacctccgtgtgttcacgtctcatgaagctctccaaatccagtcctcttgggtttttatggaagcttcatgatgtcagcattctttcctccagtgtataggatgggatcctctctggggagggtcttaagacccacaattagaaaggcaagggaagattagagtcctgctttggggtagatgaaaggaaaggagagagattctgtttcctgaggcttaatacacccaacattataacaaaggactgtagcaagggctatgggagttctgaagcagaaaccatgggctaaaaccaacatacatcttaataccagataccctaatcccagtcctaacttcatttaaccttggtcacattgagtcattccaggatgagtggctcaagtatttcctcagggaaaatacttctgtgccccctgatttgagggtaagaagtagataatgaggccactgtgggtgttattttttcatgtctggacctcagcctatatcctgagactaagtggaagtgggaaaagagtacaagagaagagacaaagtggggatatttgtaaggcttagatgagatagtgtttttttagaaaaaaactttatcttaccattaagtaaaatgtttgccataggctttctggggctttctctttttaaagtcagactgttgaaggtttcttctattcttatttgttaagagttttcttttattgtttaaatcatgaatgaatgttgaattttattaaatgcagtttctgtaaatattaacgtgatcatattatttttattctttcatttacataattataaattagattaagttttcaatgttaagctacccttgcatttatgaaataaaccacgcttgctcatg

SEQ ID NO: 10308 - protein, 353 aa, Homo sapiens; identical to SEQ ID NO: 1585

SEQ ID NO: 10309 - DNA, 552 bp, Homo sapiens
gctaacccccagcttcagattccactgaccattccctgaagccttcttacaccgcaaacctccacaagtaccccatgctggtcgcatccggtcaaggaccccaacagcgctgggtacatttgggtgtgggattgtggagagagaccttgaggggtaagaactgggccaaactggttgtggagcagacactgacaaccacaacccattccaagagaatattagttgtacttcagaaagatcatgtgtattctgaacagtcatgtgaaatagatgtaaaagtcatgaagaaattattagcaatcaaatctagcattatatgaaaagaatgaacttcaagatcaggttcccaggaatacaaggatgttttatcccttaaaaataaatacatgtaatgtatggtgccagccatgattaagtaagccccctagtttatcactcccactggttagagttaaaacttttgaaaaaaaactaataaaaactacttgagaacttttaaaatgaataattgcaaagagattggagaataaagtatagagttgaaaaccaagc

SEQ ID NO: 10310 - protein, 81 aa, Homo sapiens
MLVASGQGPQQRWVHLGVGLWRETLRGKNWAKLVVEQTLTTTTHSKRILVVLQKDHVYSEQSCEIDVKVMKKLLAIKSSII

SEQ ID NO: 10311 - DNA, 642 bp, Homo sapiens
cagtatggccctcgccggccgccatccccgaaacttgcgagtgtcgcgtctgcagtgtgtggggttcgcggggcggcgggtagaggcgagtcatttttgtcatctgcaaataattttagccaggtggcaagtgtatggactgtggagtaagaagtacctgcctctgcctctgacttgggggtcattgtcattcgaagatgtggctgtgggcttcaccagggaggagtggcagtttttggaccagtctcagaaggtcttgtacaaggaagtaatgttggagaactacatcaacctagtatcaatagggtatcgaggcaccaagccagattcgctcttcaagttggagcaaggagaacccccagggatagcagaaggagcagcccacagtcaaatctgtccagggtattcattcaggagaaggaccctacagatggagggaatgcaggaaagctaagaagaatcacacctcattgcagatctgcattaccgttggaaaacagcagcctcagaaccacagtagccatgaagaccatcagccttcaaccaccacccttgtatcagaggagacaaataagcttggaaatcctcaaaaagcctcatcctcagagcaatgtcattatatatcttgtcttacagctccat

SEQ ID NO: 10312 - protein, 149 aa, Homo sapiens
MALAGRHPRNLRVSRLQCVGFAGRRVEASHFCHLQIILARWQVYGLWSKKYLPLPLTWGSLSFEDVAVGFTREEWQFLDQSQKVLYKEVMLENYINLVSIGYRGTKPDSLFKLEQGEPPGIAEGAAHSQICPGYSFRRRTLQMEGMQES

SEQ ID NO: 10313 - DNA, 807 bp, Homo sapiens
gggcccttttggaactcttgtgggagagaaaccttatagatgcaatgaatattttaagccttcttttttgaagatatccctcgtttaccgtagagatctcacaagaagaatcattggccaggcgcattggcccatgcctgttatctcagcactttgggaggctgaagcaggcagatcacttgaggttgggagttcgagaccagcctggccaacatgatgaaaccctgtctctactaaaaatacaaaaaaaaaaaaaaacaaatagccaggtgtggtgtgcacacctgtaatcctaactactcaggaggctgaggcaggagaatctcttgaacctaggaggtggaggttgcagtaagccgagattgcaccagtgtactccagcctgggtgacagagtgagactctgtctcaaaaaaaaaaaaaaaaaaaaaaagagagagtcaattatgagtgcagtgattgtcaaaaaagtttattagaaaactagaagctttccatttagtaggcagcaccagtggatgtaatgaaaatgataaatcattctcaaattatatttgttacacattagggtattcattcaggagaaggaccctacagatggagggaatgcaggaaagctaagaagaatcacacctcattgcagatctgcattaccgttggaaaacagcagcctcagaaccacagtagccatgaagaccatcagccttcaaccaccacccttgtatcagaggagacaaataagcttggaaatcctcaaaaagcctcatcctcagagcaatgtcattatatatcttgtcttacagctcca

SEQ ID NO: 10314 - protein, 38 aa, Homo sapiens
MKTISLQPPPLYQRRQISLEILKKPHPQSNVIIYLVLQ

SEQ ID NO: 10315 - DNA, 2037 bp, Homo sapiens
ttcactgtgttagccaggatagtcttaatctcccgactttgtgatctgcccacctcggcctcccaaagtactgagattacaggtgtgagccaccacgcccagccgtattattacatttttaaaatatgtcttagatcatatattatttgggagcttaattttttgcatttaagagactgccttggagatcattgataatcatgtgggtatgtatacatctacctcattgattttaacatttttgcagtatattatagcatggaggtgctgtaatttaaccctgtctgcttttgatagacatttagattattggtaagtttttcattatgagaaacaaaggaataatgaacagtcttattacatgttgtttcatatctatgctagtactgccttcgtgcttttagggtaggcagaattggtggaattccatggtcctttggtatgtgaaatagccatggtgtgcatacgttgtcatggagaaaaggatcaagacatgtccccgtccctcttctccgcatcatctattgttatccacctcagattgcattggaattgttattataggggtcattgtcattcgaagatgtggctgtgggcttcaccagggaggagtggcagtttttggaccagtctcagaaggtcttgtacaaggaagtaatgttggagaactacatcaacctagtatcaataggtaaggacagcattgccgtcacttaccttttctttcttatttggtgaccactgtacggtcccataaatatttaatggtttagactaaagtattatatgttatagattttttgttgtggtggtaaaatatataacataaaatttaccgtcttaaccataagcgtgcagttcagtgggttaaatgcattcgcgcacatagtgttatgcagccaccaacactaccttctgtcttctaaaactgaaactctgtacccacaaaacaacaactactcattcccccacttctccccagctcctggtgaccaccattcactttctgtctttaggattttgacttctctaagtacctcgtataagtggaattatatagtgtctgtctttttgtgtctggcttatttcacttattatgatgttctcaaggtttatccatgttgtagcatgtgccagagtttcctttttaaggctgaataatattcttttgtatatatatataccaccttttgcttatccacttatctgttaaggaacactgggttgcttccatgttttagcgcttgtgaatcatgttgctatgaatatgggtgtacaaataatctctttgagaccctgctttccattctttggggtatatacccagaagtggaattgctgggtgatatggtcattccattgttaattttttgaggaacagttttccacaatgtcagtaccattttacattcccaccaagagtacacagggtcccagtttctccacatctttgccaacaattgttattttctgtttttgtttgtctgtttgtttttttgatagtagccatcctaatgggtatgggtgtgtcacgcagactgttattttcctccctggcacgaagtggttgtgctcttttcctgagtgaaagagttttgctttatcaaagtgcaaatgctgtggttcctgagacataaccctctccatcttcatccattccccaagcacacgtgccaagtgttcagtgatctcccatttacagggtatcgaggcaccaagccagattcgctcttcaagttggagcaaggagaacccccagggatagcagaaggagcagcccacagtcaaatctgtccagggtattcattcaggagaaggaccctacagatggagggaatgcaggaaagctaagaagaatcacacctcattgcagatctgcattaccgttggaaaacagcagcctcagaaccacagtagccatgaagaccatcagccttcaaccaccacccttgtatcagaggagacaaataagcttggaaatcctcaaaaagcctcatcctcagagcaatgtcattatatatcttgtcttacagctcc

SEQ ID NO: 10316 - protein, 78 aa, Homo sapiens
MLWFLRHNPLHLHPFPKHTCQVFSDLPFTGYRGTKPDSLFKLEQGEPPGIAEGAAHSQICPGYSFRRRTLQMEGMQES

SEQ ID NO: 10317 - DNA, 1907 bp, Homo sapiens
aaagacgcagtatggccctcgccggccgccatccccgaaacttgcgagtgtcgcgtctgcagtgtgtggggttcgcggggcggcgggtagaggcgagtgtttagagacttcgggtccctgactcgcctccagcagtggagacaggtcatcggtctggtctgcgtgggcttctgggaatgtttcaggggcagggagagcgcgcttttttttttctgttgttcgctagcgcgtgaggtccgtgttgcggggagctctcggggagtcctcgctcggagttcgtttcgcagtcgtgttggagttcccagagtctgggagcccatggtctccgcattggaaccagtgcttgggaggtcttcgttgcacagtagcgctagggcgtcgtggtggggaagcgaatcgtgtcagtgttggagactgctctgggcagttcgtgttcattgcttatcacatgcgtacttaaaaaggggtctgctggtccccttgcttccctgctgctgtatattctgtagaaaatgggttttcaggttcattgcgacccaagtaataacatccccatcattttaaatactcctccagaaaataactctggtttagtgtatttcatgtttaatgttgggatcaggtgtctaggtattggtataattttattcgtctttaataacatcttgtcaacttcgtattcccatattacatgctctttgagagttttttaaattgctgcagtttcatcaagtggttgctttaatttgggtagaattgatgtagatctagatacaacactttcaggaacatgtgatggatttctattaacccaatatttttatttgtttgactatctgtagtgtttttccatacgtatcttggacatttctggttatgcttatttctacatagttaatactttttgttgtaaatcgtgactttttttttgcataagacccctccccctttccttttttgttcctaattttacttagttgacaagaacagaagttaaaaatatatatgtttattctgtcacttcattgtactcatgtcattacatataacttataaattgacgtcttttttctagttgagcatttttgtcatctgcaaataattttagccaggtggcaagtgtatggactgtggagtaagaagtacctgcctctgcctctgacttgggttctggcctataggaacaagacattttcagtaatggaagaaggagcttccaggctggggaagatcatcatttccagtggtagcttgacctgagatgatacctgaccaccacttctgggaaggcccagaatagacagaagagagagaacatactagagttgctagcccctaagagttgaacgaaatgggcaaggcccagctgaaataacaggaaacacatgaaaaatgccacgattgtaatgtctgtgaggagagagcaaggcagttcttcaggggaggggtcattgtcattcgaagatgtggctgtgggcttcaccagggaggagtggcagtttttggaccagtctcagaaggtcttgtacaaggaagtaatgttggagaactacatcaacctagtatcaatagggtatcgaggcaccaagccagattcgctcttcaagttggagcaaggagaacccccagggatagcagaaggagcagcccacagtcaaatctgtccagggtattcattcaggagaaggaccctacagatggagggaatgcaggaaagctaagaagaatcacacctcattgcagatctgcattaccgttggaaaacagcagcctcagaaccacagtagccatgaagaccatcagccttcaaccaccacccttgtatcagaggagacaaataagcttggaaatcctcaaaaagcctcatcctcagagcaatgtcattatatatcttgtcttacagctcc

SEQ ID NO: 10318 - protein, 111 aa, Homo sapiens
MKNATIVMSVRREQGSSSGEGSLSFEDVAVGFTREEWQFLDQSQKVLYKEVMLENYINLVSIGYRGTKPDSLFKLEQGEPPGIAEGAAHSQICPGYSFRRRTLQMEGMQES

SEQ ID NO: 10319 - DNA, 3261 bp, Homo sapiens
atggccctcgccggccgccatccccgaaacttgcgagtgtcgcgtctgcagtgtgtggggttcgcggggcggcgggtagaggcgagtcatttttgtcatctgcaaataattttagccaggtggcaagtgtatggactgtggagtaagaagtacctgcctctgcctctgacttgggttctggcctataggaacaagacattttcagtaatggaagaaggagcttccaggctggggaagatcatcatttccagtggtagcttgacctgagatgatacctgaccaccacttctgggaaggcccagaatagacagaagagagagaacatactagagttgctagcccctaagagttgaacgaaatgggcaaggcccagctgaaataacaggaaacacatgaaaaatgccacgattgtaatgtctgtgaggagagagcaaggcagttcttcaggggaggggtcattgtcattcgaagatgtggctgtgggcttcaccagggaggagtggcagtttttggaccagtctcagaaggtcttgtacaaggaagtaatgttggagaactacatcaacctagtatcaatagggtatcgaggcaccaagccagattcgctcttcaagttggagcaaggagaacccccagggatagcagaaggagcagcccacagtcaaatctgtccaggttttgtaatccagagtagaagatatgcaggaaaagattctgatgcatttggtggatatgggagatcatgcctccatatcaagcgtgacaaaactcttactggagttaaataccatagatgtgttaaacccagcagccctaaatcacagctcaatgacctacaaaaaatttgtgcaggagggaaaccacatgaatgcagtgtgtgcgggagagccttctccaggaaagcacagcttattcaacatcagagaactgaaagaggagagaaaccccatggatgtggtgaatgtgggaaaacattcatgaggaagattcagctcactgagcatcagagaactcacacaggagagaagccccatgaatgtagtgaatgtggaaaagccttctccagaaagtcacagctcatggtccatcagagaacccatacaggagagaaaccctacagatgcagcaaatgcggaaaagccttcagccggaagtgccggctcaatagacatcagcgatcacatactggagagaaactctatgggtgcagtgtgtgtgggaaagccttttctcagaaggcatacctcactgcacaccagagacttcacacaggagataagccttataaatgcagtgattgtggaagaaccttctattttaagtcagacctgaccagacatcagaggattcatacgggagagaaaccttatgaatgtagtgagtgtgaaaaagcctttagaagcaagtcgaagctcattcagcatcagcgtactcacactggagagagaccatattcatgcagagaatgtggcaaagcctttgcccacatgtcagtcctcattaaacatgagaaaactcacataagagagacagccataaattcactgacggtggagaaaccttcctcaaggagtcatacctccttatacatgagcgaactcatacaagagcaaaagactgtgaacacagtacctatagaaatgccttcctcaggaaccccgccattgttaaacaagagtgagcgcctagtgggcagaaatgtagtgattgtggaacaaccttttccaagaaatcaagcctttgtagttaatcaggaatttgaacagagaataagcctcacaaatgaagtgaatgtggccccatcagtaataaattatatcttgtatcttacagatattgtatcagaataaatcttctgataccagaaaggtgggaaaatctttagtaggaatcctccagccattatatcccagagagctcatttagggctgaaacactgtggaggcagtggttgtggaggacatttctgtgagaagtcaaacctgttaaacaccattgaaatcatgttgggtagaaatgcagctgttatgaggaagtctttacctggagatgatatctcaattggtatcaaaagaattcttacaggaatatttatgaaagattgtgatggtgcttttagcgctaaattgtgcctcgtgtgccaaagaaacatagacaactgtagaggcaatggatatggaaaacatttttcgtaaaatatgggagaatttgtagaaaagaaaaactcttgaaagtaagaaatgatggcaactcaccaaattaactcatgtatcatacttttatgtcttgagagtcttggagggacgtgtttaatgaaatcttgaaccccaggaatagtattatgtaatgaaaacctatgaatataacaaatatggaagtaaaattgtgttagttttttatgagtgttgcaccaaactaacacaaatttaatggcttaaaacaacacaaaatcattatcttacagttctggaggactgaagtccaaatgcatctcacggggctacatcaagctgttgacagggctgcttttctttttggaggctctaggggagcgtctttctttgcccttccagcttctagaagctgcccaaattctgtggtttggggcctcctttcaaaaccagcaatggccaatcagtcttacatcactcaaacacttgagtgttctgtctccctcttccatgtttgaggacccttgtgattacactgtgaaaacccagataagccaggataatctccctatcttattatgaggcaagtatgttaagattttattctataatcagagaatcttatgctatgattgttatatgtgagcattatagatgctcttgaaatgttaaaatcacatcagcactggaaaataactcctaaatgtccaaaaagaacatgagatttatggtgcttgaaatgttgctaaacgtaaatttgtatctattctgaaattatataaattaacctacctggccaggcacagtggctcacacctgtaatctcagcactttgggaggccaaggcaggaagatcacttgagcccgcaagtttgagaccaccctgggcaacatagcgagactacctctacaaaaaaaaaaaaaaataataatagctggacatggtggtgtgtgcctatagtcccagctacttgggaggctgaggcaagatgattgcttgagtccaggagttctaggctgcagtgactgcagtgagctatgatcatgccactgcactacagcgtgggtgacagaataagactctgactct

SEQ ID NO: 10320 - protein, 485 aa, Homo sapiens
MKNATIVMSVRREQGSSSGEGSLSFEDVAVGFTREEWQFLDQSQKVLYKEVMLENYINLVSIGYRGTKPDSLFKLEQGEPPGIAEGAAHSQICPGFVIQSRRYAGKDSDAFGGYGRSCLHIKRDKTLTGVKYHRCVKPSSPKSQLNDLQKICAGGKPHECSVCGRAFSRKAQLIQHQRTERGEKPHGCGECGKTFMRKIQLTEHQRTHTGEKPHECSECGKAFSRKSQLMVHQRTHTGEKPYRCSKCGKAFSRKCRLNRHQRSHTGEKLYGCSVCGKAFSQKAYLTAHQRLHTGDKPYKCSDCGRTFYFKSDLTRHQRIHTGEKPYECSECEKAFRSKSKLIQHQRTHTGERPYSCRECGKAFAHMSVLIKHEKTHIRETAINSLTVEKPSSRSHTSLYMSELIQEQKTVNTVPIEMPSSGTPPLLNKSERLVGRNVVIVEQPFPRNQAFVVNQEFEQRISLTNEVNVAPSVINYILYLTDIVSE

SEQ ID NO: 10321 - DNA, 3195 bp, Homo sapiens
aaagacgcagtatggccctcgccggccgccatccccgaaacttgcgagtgtcgcgtctgcagtgtgtggggttcgcggggcggcgggtagaggcgagtgtttagagacttcgggtccctgactcgcctccagcagtggagacaggtcatcggtctggtctgcgtgggcttctgggaatgtttcaggggcagggagagcgcgcttttttttttctgttgttcgctagcgcgtgaggtccgtgttgcggggagctctcggggagtcctcgctcggagttcgtttcgcagtcgtgttggagttcccagagtctgggagcccatggtctccgcattggaaccagtgcttgggaggtcttcgttgcacagtagcgctagggcgtcgtggtggggaagcgaatcgtgtcagtgttggagactgctctgggcagttcgtgttcattgcttatcacatgcgtacttaaaaaggggtctgctggtccccttgcttccctgctgctgtatattctgtagaaaatgggttttcaggttcattgcgacccaagtaataacatccccatcattttaaatactcctccagaaaataactctggtttagtgtatttcatgtttaatgttgggatcaggtgtctaggtattggtataattttattcgtctttaataacatcttgtcaacttcgtattcccatattacatgctctttgagagttttttaaattgctgcagtttcatcaagtggttgctttaatttgggtagaattgatgtagatctagatacaacactttcaggaacatgtgatggatttctattaacccaatatttttatttgtttgactatctgtagtgtttttccatacgtatcttggacatttctggttatgcttatttctacatagttaatactttttgttgtaaatcgtgactttttttttgcataagacccctccccctttccttttttgttcctaattttacttagttgacaagaacagaagttaaaaatatatatgtttattctgtcacttcattgtactcatgtcattacatataacttataaattgacgtcttttttctagttgagcatttttgtcatctgcaaataattttagccaggtggcaagtgtatggactgtggagtaagaagtacctgcctctgcctctgacttgggttctggcctataggaacaagacattttcagtaatggaagaaggagcttccaggctggggaagatcatcatttccagtggtagcttgacctgagatgatacctgaccaccacttctgggaaggcccagaatagacagaagagagagaacatactagagttgctagcccctaagagttgaacgaaatgggcaaggcccagctgaaataacaggaaacacatgaaaaatgccacgattgtaatgtctgtgaggagagagcaaggcagttcttcaggggaggggtcattgtcattcgaagatgtggctgtgggcttcaccagggaggagtggcagtttttggaccagtctcagaaggtcttgtacaaggaagtaatgttggagaactacatcaacctagtatcaatagggtatcgaggcaccaagccagattcgctcttcaagttggagcaaggagaacccccagggatagcagaaggagcagcccacagtcaaatctgtccaggagggaaaccacatgaatgcagtgtgtgcgggagagccttctccaggaaagcacagcttattcaacatcagagaactgaaagaggagagaaaccccatggatgtggtgaatgtgggaaaacattcatgaggaagattcagctcactgagcatcagagaactcacacaggagagaagccccatgaatgtagtgaatgtggaaaagccttctccagaaagtcacagctcatggtccatcagagaacccatacaggagagaaaccctacagatgcagcaaatgcggaaaagccttcagccggaagtgccggctcaatagacatcagcgatcacatactggagagaaactctatgggtgcagtgtgtgtgggaaagccttttctcagaaggcatacctcactgcacaccagagacttcacacaggagataagccttataaatgcagtgattgtggaagaaccttctattttaagtcagacctgaccagacatcagaggattcatacgggagagaaaccttatgaatgtagtgagtgtgaaaaagcctttagaagcaagtcgaagctcattcagcatcagcgtactcacactggagagagaccatattcatgcagagaatgtggcaaagcctttgcccacatgtcagtcctcattaaacatgagaaaactcacataagagagacagccataaattcactgacggtggagaaaccttcctcaaggagtcatacctccttatacatgagcgaactcatacaagagcaaaagactgtgaacacagtacctatagaaatgccttcctcaggaaccccgccattgttaaacaagagtgagcgcctagtgggcagaaatgtagtgattgtggaacaaccttttccaagaaatcaagcctttgtagttaatcaggaatttgaacagagaataagcctcacaaatgaagtgaatgtggccccatcagtaataaattatatcttgtatcttacagatattgtatcagaataaatcttctgataccagaaaggtgggaaaatctttagtaggaatcctccagccattatatcccagagagctcatttagggctgaaacactgtggaggcagtggttgtggaggacatttctgtgagaagtcaaacctgttaaacaccattgaaatcatgttgggtagaaatgcagctgttatgaggaagtctttacctggagatgatatctcaattggtatcaaaagaattcttacaggaatatttatgaaagattgtgatggtgcttttagcgctaaattgtgcctcgtgtgccaaagaaacatagacaactgtagaggcaatggatatggaaaacatttttcgtaaaatatgggagaatttgtagaaaagaaaaactcttgaaagtaagaaatgatggcaactcaccaaattaactcatgtatcatacttttatgtcttgagagtcttggagggacgtgtttaatgaaatcttgaaccccaggaatagtattatgtaatgaaaacctatgaatataacaaatatggaagt

SEQ ID NO: 10322 - protein, 426 aa, Homo sapiens
MKNATIVMSVRREQGSSSGEGSLSFEDVAVGFTREEWQFLDQSQKVLYKEVMLENYINLVSIGYRGTKPDSLFKLEQGEPPGIAEGAAHSQICPGGKPHECSVCGRAFSRKAQLIQHQRTERGEKPHGCGECGKTFMRKIQLTEHQRTHTGEKPHECSECGKAFSRKSQLMVHQRTHTGEKPYRCSKCGKAFSRKCRLNRHQRSHTGEKLYGCSVCGKAFSQKAYLTAHQRLHTGDKPYKCSDCGRTFYFKSDLTRHQRIHTGEKPYECSECEKAFRSKSKLIQHQRTHTGERPYSCRECGKAFAHMSVLIKHEKTHIRETAINSLTVEKPSSRSHTSLYMSELIQEQKTVNTVPIEMPSSGTPPLLNKSERLVGRNVVIVEQPFPRNQAFVVNQEFEQRISLTNEVNVAPSVINYILYLTDIVSE

SEQ ID NO: 10323 - DNA, 2824 bp, Homo sapiens
aaagacgcagtatggccctcgccggccgccatccccgaaacttgcgagtgtcgcgtctgcagtgtgtggggttcgcggggcggcgggtagaggcgagtgtttagagacttcgggtccctgactcgcctccagcagtggagacaggtcatcggtctggtctgcgtgggcttctgggaatgtttcaggggcagggagagcgcgcttttttttttctgttgttcgctagcgcgtgaggtccgtgttgcggggagctctcggggagtcctcgctcggagttcgtttcgcagtcgtgttggagttcccagagtctgggagcccatggtctccgcattggaaccagtgcttgggaggtcttcgttgcacagtagcgctagggcgtcgtggtggggaagcgaatcgtgtcagtgttggagactgctctgggcagttcgtgttcattgcttatcacatgcgtacttaaaaaggggtctgctggtccccttgcttccctgctgctgtatattctgtagaaaatgggttttcaggttcattgcgacccaagtaataacatccccatcattttaaatactcctccagaaaataactctggtttagtgtatttcatgtttaatgttgggatcaggtgtctaggtattggtataattttattcgtctttaataacatcttgtcaacttcgtattcccatattacatgctctttgagagttttttaaattgctgcagtttcatcaagtggttgctttaatttgggtagaattgatgtagatctagatacaacactttcaggaacatgtgatggatttctattaacccaatatttttatttgtttgactatctgtagtgtttttccatacgtatcttggacatttctggttatgcttatttctacatagttaatactttttgttgtaaatcgtgactttttttttgcataagacccctccccctttccttttttgttcctaattttacttagttgacaagaacagaagttaaaaatatatatgtttattctgtcacttcattgtactcatgtcattacatataacttataaattgacgtcttttttctagttgagcatttttgtcatctgcaaataattttagccaggtggcaagtgtatggactgtggagtaagaagtacctgcctctgcctctgacttgggttctggcctataggaacaagacattttcagtaatggaagaaggagcttccaggctggggaagatcatcatttccagtggtagcttgacctgagatgatacctgaccaccacttctgggaaggcccagaatagacagaagagagagaacatactagagttgctagcccctaagagttgaacgaaatgggcaaggcccagctgaaataacaggaaacacatgaaaaatgccacgattgtaatgtctgtgaggagagagcaaggcagttcttcaggggaggggtcattgtcattcgaagatgtggctgtgggcttcaccagggaggagtggcagtttttggaccagtctcagaaggtcttgtacaaggaagtaatgttggagaactacatcaacctagtatcaatagggtatcgaggcaccaagccagattcgctcttcaagttggagcaaggagaacccccagggatagcagaaggagcagcccacagtcaaatctgtccaggttttgtaatccagagtagaagatatgcaggaaaagattctgatgcatttggtggatatgggagatcatgcctccatatcaagcgtgacaaaactcttactggagttaaataccatagatgtgttaaacccagcagccctaaatcacagctcaatgacctacaaaaaatttgtgcaggagggaaaccacatgaatgcagtgtgtgcgggagagccttctccaggaaagcacagcttattcaacatcagagaactgaaagaggagagaaaccccatggatgtggtgaatgtgggaaaacattcatgaggaagattcagctcactgagcatcagagaactcacacaggagagaagccccatgaatgtagtgaatgtggaaaagccttctccagaaagtcacagctcatggtccatcagagaacccatacaggagagaaaccctacagatgcagcaaatgcggaaaagccttcagccggaagtgccggctcaatagacatcagcgatcacatactggagagaaactctatgggtgcagtgtgtgtgggaaagccttttctcagaaggcatacctcactgcacaccagagacttcacacaggagataagccttataaatgcagtgattgtggaagaaccttctattttaagtcagacctgaccagacatcagaggattcatacgggagagaaaccttatgaatgtagtgagtgtgaaaaagcctttagaagcaagtcgaagctcattcagcatcagcgtactcacactggagagagaccatattcatgcagagaatgtggcaaagcctttgcccacatgtcagtcctcattaaacatgagaaaactcacataagagagacagccataaattcactgacggtggagaaaccttcctcaaggagtcatacctccttatacatgagcgaactcatacaagagcaaaagactgtgaacacagtacctatagaaatgccttcctcaggaaccccgccattgttaaacaagagtgagcgcctagtgggcagaaatgtagtgattgtggaacaaccttttccaagaaatcaagcctttgtagttaatcaggaatttgaacagagaataagcctcacaaatgaagtgaatgtggccccatcagtaataaattatatcttgtatcttac

SEQ ID NO: 10324 - protein, 478 aa, Homo sapiens
MKNATIVMSVRREQGSSSGEGSLSFEDVAVGFTREEWQFLDQSQKVLYKEVMLENYINLVSIGYRGTKPDSLFKLEQGEPPGIAEGAAHSQICPGFVIQSRRYAGKDSDAFGGYGRSCLHIKRDKTLTGVKYHRCVKPSSPKSQLNDLQKICAGGKPHECSVCGRAFSRKAQLIQHQRTERGEKPHGCGECGKTFMRKIQLTEHQRTHTGEKPHECSECGKAFSRKSQLMVHQRTHTGEKPYRCSKCGKAFSRKCRLNRHQRSHTGEKLYGCSVCGKAFSQKAYLTAHQRLHTGDKPYKCSDCGRTFYFKSDLTRHQRIHTGEKPYECSECEKAFRSKSKLIQHQRTHTGERPYSCRECGKAFAHMSVLIKHEKTHIRETAINSLTVEKPSSRSHTSLYMSELIQEQKTVNTVPIEMPSSGTPPLLNKSERLVGRNVVIVEQPFPRNQAFVVNQEFEQRISLTNEVNVAPSVINYILY

SEQ ID NO: 10325 - DNA, 580 bp, Homo sapiens
gatgcaatatgtctgcgcccaggggacgcttgctgggagcagccattttcaaccctactgccgtagagcaggcggagtccctcttttcgcgccttaagacagaaacacaaaatgatcctctgacaagtgatgaagaagaatgggaagatgtgaaaatccaagcaagaagaacttaggggaagcaactcaacatctaagaagaaatgaatagggatcagttccaagaagagataaaggggaaatacccaagaactgggatgcttcgtctttggtttcttctggatcctccctaaattttggctaagaaatctgagtctccatttaagagtgttcccagaaatgatgacatccacatccaggaacctcctccttccttcatttgaactctcttgcttctggggagccaggacctatggagtaaaaatcaagttcatttggtgacacattccctccgggcccagatgctgtctctgctgctgtaaactctcctgcagtcaaggccaagcaatatatctaagcatccctttgtcaggtgtccccaagtctttacatcccagggcaataaaacaacactctgaat

SEQ ID NO: 10326 - protein, 55 aa, Homo sapiens
MSAPRGRLLGAAIFNPTAVEQAESLFSRLKTETQNDPLTSDEEEWEDVKIQARRT

SEQ ID NO: 10327 - DNA, 3226 bp, Homo sapiens
gaagagaagcccatgtcccatcgtcctagcgcggcagaattgactcgcgccctcgtccgccgccataggccagtgccggggtttaagggccaggaaaggaagcattcagggaatttaggtgtagccagaagaaaatcaggtcctggctccccagaagcaagagagttcaaatgaaggaaggaggaggttcctggatgtggatgtcatcatttctgggaacactcttaaatggagactcagatttcttagccaaaatttagggaggatccagaagaaaccaaagacgaagcatcccagttcttgggtatttcctgaaacagaagaaaatgacaaaggcccaggaatcactgaccctggaggatgtggctgtggacttcacctgggaggagtggcagttcctgagccctgctcagaaggacctgtaccgggatgtgatgttggagaactacagcaaccttgtgtcagtggggtatcaagccggcaaacctgatgccctcaccaagttggaacaaggagaaccactatggacactagaagatgaaatccacagtccagcccacccagaaattgagaaagctgatgatcatctgcagcagcccttgcaaaaccaaaaaatactgaagaggacgggacaacgctatgaacacggaagaactttgaaatcatatttaggtttaaccaaccagagcagaagatacaacagaaaggagcctgctgagtttaatggagatggagcttttctccatgataatcatgaacaaatgcctacggaaattgaattccctgaaagtagaaaacccatcagcaccaagtcacaattccttaaacatcagcaaacacacaacatagagaaagcccatgaatgcactgactgtgggaaagctttcctcaagaagtctcagctcactgagcataagagaattcatacaggaaagaaaccccacgtgtgtagcttgtgtgggaaagccttctacaagaagtacaggctcactgaacacgagagagctcacagaggagagaaaccccacgggtgtagcttgtgtgggaaagccttctacaagaggtacaggctcactgaacacgagagagctcacaaaggagagaaaccatacgggtgcagtgaatgtgggaaagccttccccaggaaatctgagcttactgaacatcaaaggattcacacgggaattaagccccatcaatgcagcgaatgtgggagagctttctccagaaaatcactactcgttgtacatcagcgaactcatacaggagagaagcctcatacatgcagtgaatgtggaaaaggcttcattcagaagggcaatctcaacatacatcaacgaactcacactggagagaaaccttatggatgcattgactgtggcaaggccttcagccagaagtcttgccttgtagcacatcagagatatcatacaggaaagactccctttgtatgtcctgaatgtgggcaaccctgttcacagaagtcaggactcattagacatcagaaaattcactcaggagagaaaccctataaatgcagtgactgtgggaaagccttccttacaaagacaatgctcattgtacatcacagaactcacacgggagagagaccctatggctgtgatgagtgtgagaaagcttacttctatatgtcttgccttgttaaacataagagaatacactcaagggagaaacggggggattcagtgaaggtggaaaatccttccacagcaagtcacagcttaagtcctagtgaacatgtgcaggggaaaagccctgttaatatggtaactgtggcaatggtggcagggcagtgtgagtttgcccacatcctgcattcatgataaacagtttgctgtttgatcatatagcctccagcggaatgctgagtttgtcatgtcccatgggcctttggctccctgcactaatatgtatagtagggtttacaagatatgaaatatattttacttttttatatcttataaacctcactacccctcccacaatattgtttttcatttactatcttgatcatagagtttggctggggaggggggcagttttagaggcttccacttggtgttcctcagaatgatatctcttactccgggggccaaggtaggggttagcttttgttctctttgtagtttagattgtatctcttgccttgttcaagttcacaaatctttttgtgtatacacatatgtacatgaaaatgatgttcatgctttttattattttacccttcattatttcattttttatagttctcatagctatgtctttcagttcactaatcttttttccacagtgtttaatctgtcattaatcccatccaaagtatgttttctctcagaaattgtaatttttaacctctaataatttgacatgggtttttccctgttatatctttcatatctttatttatcatggttttacttttaacctatttatgctttcatatttaaagtgggtgtttagtgggcaacatacagttgggccttccttttttatccagttaacaatctctgtctttttactggggtatttagatcatttacgttcaatgtattgatgtttttaggtttaaattactaacttactatttgttgtttattctatgtcttctttgttctccttttcttctttttctgctttcccttagagtagctgagtgtgtttatattacatattgtctcctttgttggcttattaactgtaaatccttgtcatttgattccttgagattttatagcatacatcattgtgagggattgcatatttatgtcctctccaaatttacatgttgaagtcctaatccctaagggatggcattaggaagtgtgacctttggaaggtaattacatcttgaaagtggaaccctcatgatgagattatgtgtcttatgagacaacacagaagagagtttgttttctctttctctgctctttgccatgtgaagacagaatgagatgaccatgcataaaccaggaaatggactctcactggacactagacctgccaacaccttgattgtgttttagagtccagttctagagactcctcagcctctggaacgtgagaaatgaatgtttgttaaggcagtcagtcagtctatggtgtattttttctagtagcctgaactgactgaaagaaaatcatgaacttatcattctaacttcaaggacattatatcacttactgtataataaaataatcttacagt

SEQ ID NO: 10328 - protein, 505 aa, Homo sapiens; identical to SEQ ID NO: 1589

SEQ ID NO: 10329 - DNA, 2665 bp, Homo sapiens
gaagagaagcccatgtcccatcgtcctagcgcggcagaattgactcgcgccctcgtccgccgccataggccagtgccggggtttaagggccaggaaaggaagcattcagggaatttaggtgtagccagaagaaaatcaggtcctggctccccagaagcaagagagttcaaatgaaggaaggaggaggttcctggatgtggatgtcatcatttctgggaacactcttaaatggagactcagatttcttagccaaaatttagggaggatccagaagaaaccaaagacgaagcatcccagttcttgggtatttcctgaaacagaagaaaatgacaaaggcccaggaatcactgaccctggaggatgtggctgtggacttcacctgggaggagtggcagttcctgagccctgctcagaaggacctgtaccgggatgtgatgttggagaactacagcaaccttgtgtcagtggggtatcaagccggcaaacctgatgccctcaccaagttggaacaaggagaaccactatgaacacggaagaactttgaaatcatatttaggtttaaccaaccagagcagaagatacaacagaaaggagcctgctgagtttaatggagatggagcttttctccatgataatcatgaacaaatgcctacggaaattgaattccctgaaagtagaaaacccatcagcaccaagtcacaattccttaaacatcagcaaacacacaacatagagaaagcccatgaatgcactgactgtgggaaagctttcctcaagaagtctcagctcactgagcataagagaattcatacaggaaagaaaccccacgtgtgtagcttgtgtgggaaagccttctacaagaagtacaggctcactgaacacgagagagctcacagaggagagaaaccccacgggtgtagcttgtgtgggaaagccttctacaagaggtacaggctcactgaacacgagagagctcacaaaggagagaaaccatacgggtgcagtgaatgtgggaaagccttccccaggaaatctgagcttactgaacatcaaaggattcacacgggaattaagccccatcaatgcagcgaatgtgggagagctttctccagaaaatcactactcgttgtacatcagcgaactcatacaggagagaagcctcatacatgcagtgaatgtggaaaaggcttcattcagaagggcaatctcaacatacatcaacgaactcacactggagagaaaccttatggatgcattgactgtggcaaggccttcagccagaagtcttgccttgtagcacatcagagatatcatacaggaaagactccctttgtatgtcctgaatgtgggcaaccctgttcacagaagtcaggactcattagacatcagaaaattcactcaggagagaaaccctataaatgcagtgactgtgggaaagccttccttacaaagacaatgctcattgtacatcacagaactcacacgggagagagaccctatggctgtgatgagtgtgagaaagcttacttctatatgtcttgccttgttaaacataagagaatacactcaagggagaaacggggggattcagtgaaggtggaaaatccttccacagcaagtcacagcttaagtcctagtgaacatgtgcaggggaaaagccctgttaatatggtaactgtggcaatggtggcagggcagtgtgagtttgcccacatcctgcattcatgataaacagtttgctgtttgatcatatagcctccagcggaatgctgagtttgtcatgtcccatgggcctttggctccctgcactaatatgtatagtagggtttacaagatatgaaatatattttacttttttatatcttataaacctcactacccctcccacaatattgtttttcatttactatcttgatcatagagtttggctggggaggggggcagttttagaggcttccacttggtgttcctcagaatgatatctcttactccgggggccaaggtaggggttagcttttgttctctttgtagtttagattgtatctcttgccttgttcaagttcacaaatctttttgtgtatacacatatgtacatgaaaatgatgttcatgctttttattattttacccttcattatttcattttttatagttctcatagctatgtctttcagttcactaatcttttttccacagtgtttaatctgtcattaatcccatccaaagtatgttttctctcagaaattgtaatttttaacctctaataatttgacatgggtttttccctgttatatctttcatatctttatttatcatggttttacttttaacctatttatgctttcatatttaaagtgggtgtttagtgggcaacatacagttgggccttccttttttatccagttaacaatctctgtctttttactggggtatttagatcatttacgttcaatgtattgatgtttttaggtttaaattactaacttactatttgttgtttattctatgtcttctttgttctccttttcttctttttctgctttcccttagagtagctgagtgtgtttatattacatattgtctcctttgttggcttattaactgtaaatccttgtcatttgattccttgagattttatagcatacatcattgtgagggattgcata

SEQ ID NO: 10330 - protein, 412 aa, Homo sapiens
MPSPSWNKENHYEHGRTLKSYLGLTNQSRRYNRKEPAEFNGDGAFLHDNHEQMPTEIEFPESRKPISTKSQFLKHQQTHNIEKAHECTDCGKAFLKKSQLTEHKRIHTGKKPHVCSLCGKAFYKKYRLTEHERAHRGEKPHGCSLCGKAFYKRYRLTEHERAHKGEKPYGCSECGKAFPRKSELTEHQRIHTGIKPHQCSECGRAFSRKSLLVVHQRTHTGEKPHTCSECGKGFIQKGNLNIHQRTHTGEKPYGCIDCGKAFSQKSCLVAHQRYHTGKTPFVCPECGQPCSQKSGLIRHQKIHSGEKPYKCSDCGKAFLTKTMLIVHHRTHTGERPYGCDECEKAYFYMSCLVKHKRIHSREKRGDSVKVENPSTASHSLSPSEHVQGKSPVNMVTVAMVAGQCEFAHILHS

SEQ ID NO: 10331 - DNA, 1865 bp, Homo sapiens
gaagagaagcccatgtcccatcgtcctagcgcggcagaattgactcgcgccctcgtccgccgccataggccagtgccggggtttaagggccaggaaaggaagcattcagggaatttaggtgtagccagaagaaaatcaggtcctggctccccagaagcaagagagttcaaatgaaggaaggaggaggttcctggatgtggatgtcatcatttctgggaacactcttaaatggagactcagatttcttagccaaaatttagggaggatccagaagaaaccaaagacgaagcatcccagttcttgggtatttcctgaaacagaagaaaatgacaaaggcccaggaatcactgaccctggaggatgtggctgtggacttcacctgggaggagtggcagttcctgagccctgctcagaaggacctgtaccgggatgtgatgttggagaactacagcaaccttgtgtcagtggggtatcaagccggcaaacctgatgccctcaccaagttggaacaaggagaaccactatggacactagaagatgaaatccacagtccagcccacccagaaattgagaaagctgatgatcatctgcagcagcccttgcaaaaccaaaaaatactgaagaggacgggacaacgctatgaacacggaagaactttgaaatcatatttaggtttaaccaaccagagcagaagatacaacagaaaggagcctgctgagtttaatggagatggagcttttctccatgataatcatgaacaaatgcctacggaaattgaattccctgaaagtagaaaacccatcagcaccaagtcacaattccttaaacatcagcaaacacacaacatagagaaagcccatgaatgcactgactgtgggaaagctttcctcaagaagtctcagctcactgagcataagagaattcatacaggaaagaaaccccacgtgtgtagcttgtgtgggaaagccttctacaagaagtacaggctcactgaacacgagagagctcacagaggagagaaaccccacgggtgtagcttgtgtgggaaagccttctacaagaggtacaggctcactgaacacgagagagctcacaaaggagagaaaccatacgggtgcagtgaatgtgggaaagccttccccaggaaatctgagcttactgaacatcaaaggattcacacgggaattaagccccatcaatgcagcgaatgtgggagagctttctccagaaaatcactactcgttgtacatcagcgaactcatacaggagagaagcctcatacatgcagtgaatgtggaaaaggcttcattcagaagggcaatctcaacatacatcaacgaactcacactggagagaaaccttatggatgcattgactgtggcaaggccttcagccagaagtcttgccttgtagcacatcagagatatcatacaggaaagactccctttgtatgtcctgaatgtgggcaaccctgttcacagaagtcaggactcattagacatcagaaaattcactcaggagagaaaccctataaatgcagtgactgtgggaaagccttccttacaaagacaatgctcattgtacatcacagaactcacacgggagagagaccctatggctgtgatgagtgtgagaaagcttacttctatatgtcttgccttgttaaacataagagaatacactcaagggagaaacggggggattcagtgaaggtggaaaatccttccacagcaagtcacagcttaagtcctagtgaacatgtgcaggggaaaagccctgttaatatggtaactgtggcaatggtggcagggcagtgtgagtttgcccacatcctgcattcatgataaacagtttgctgtttgatc

SEQ ID NO: 10332 - protein, 505 aa, Homo sapiens; identical to SEQ ID NO: 1589

SEQ ID NO: 10333 - DNA, 826 bp, Homo sapiens
gtattctcaggatgtgaaactcgcttatacagagtaacataagcagattccactaggccaactgtaggtcatgagtatgcacaatttcggtatatgtggggcatcctgaaaccattccattgagtataccaagggacaactgtgcaggtgcagcttatgtggtgaaaatgggccgaacaacttcatatttcttccatgtcaataaaagagaaacatattaagcaggactgtgttattacaggaatcactgaccctggaggatgtggctgtggacttcacctgggaggagtggcagttcctgagccctgctcagaaggacctgtaccgggatgtgatgttggagaactacagcaaccttgtgtcagtggggtatcaagccggcaaacctgatgccctcaccaagttggaacaaggagaaccactatggacactagaagatgaaatccacagtccagcccacccaggtaagtgagagagaaccagcaagaggggaaggcagcggaagtcacattctggtcatttagagaaggcatgacagttgtgaaagtgtctagggagacagaaacagctgccacatcttcttctcccctaggatacaagagctctttttcttataggaattcagagaagcatacatacccctttatctcttcttggaactgatccctattcatttcttcttagatgttgagttgcttcccctaagttcttcttgcttggattttcacatcttcccattcttcttcatcacttgtcagaggatcattttgtgtttctgaggcaaaaacgacaaactgtttttttctctgtcacatagtcactcaac

SEQ ID NO: 10334 - protein, 64 aa, Homo sapiens
MSIKEKHIKQDCVITGITDPGGCGCGLHLGGVAVPEPCSEGPVPGCDVGELQQPCVSGVSSRQT

SEQ ID NO: 10335 - DNA, 567 bp, Homo sapiens
agaattgactcgcgccctcgtccgccgccataggccagtgccggggtttaagggccaggaaaggaagcattcagggaatttaggtgtagccagaagaaaatcaggagtttccttgagcaatgaacgattcgcgaattgggcagcccccagaatcacagcagattaacagagactccaggggtgcctcgtggtcagaacaaatttatagacaaaaaaggtcctggctccccagaagcaagagagttcaaatgaaggaaggaggaggttcctggatgtggatgtcatcatttctgggaacactcttaaatggagactcagatttcttagccaaaatttagggaggatccagaagaaaccaaagacgaagcatcccagttcttgggtatttcctgaaacagaagaaaatgacaaaggcccaggaatcactgaccctggaggatgtggctgtggacttcacctgggaggagtggcagttcctgagccctgctcagaaggacctgtaccgggatgtgatgttggagaactacagcaaccttgtgtcagtggggtatcaagccggcaaacctg

SEQ ID NO: 10336 - protein, 72 aa, Homo sapiens
MNDSRIGQPPESQQINRDSRGASWSEQIYRQKRSWLPRSKRVQMKEGGGSWMWMSSFLGTLLNGDSDFLAKI

SEQ ID NO: 10337 - DNA, 561 bp, Homo sapiens
agaattgactcgcgccctcgtccgccgccataggccagtgccggggtttaagggccaggaaaggaagcattcagggaatttaggtgtagccagaagaaaatcaggtcctggctccccagaagcaagagagttcaaatgaaggaaggaggaggttcctggatgtggatgtcatcatttctgggaacactcttaaatggagactcagatttcttagccaaaatttagggaggatccagaagaaaccaaagacgaagcatcccagttcttgggtatttcctgaaacagaagaaaatgacaaaggcccaggaatcactgaccctggaggatgtggctgtggacttcacctgggaggagtggcagttcctgagccctgctcagaaggacctgtaccgggatgtgatgttggagaactacagcaaccttgtgtcagtgggtgaggacagctgccctgtgtcactcagagggtacccagtcagtggcctttgctttctcagcttctggaagctttggtatgtctgctgtgctcccaaatggcagatcctcaggcccgtctctggtccc

SEQ ID NO: 10338 - protein, 89 aa, Homo sapiens
MTKAQESLTLEDVAVDFTWEEWQFLSPAQKDLYRDVMLENYSNLVSVGEDSCPVSLRGYPVSGLCFLSFWKLWYVCCAPKWQILRPVSG

SEQ ID NO: 10339 - DNA, 931 bp, Homo sapiens
gcagaattgactcgcgccctcgtccgccgccataggccagtgccggggtttaagggccaggaaaggaagcattcagggaatttaggtgtagccagaagaaaatcaggtcctggctccccagaagcaagagagttcaaatgaaggaaggaggaggttcctggatgtggatgtcatcatttctgggaacactcttaaatggagactcagatttcttagccaaaatttagggaggatccagaagaaaccaaagacgaagcatcccagttcttgggtatttcctgaaacagaagaaaatgacaaaggcccaggtaacttttggtttgttttattcttaactcgattccctgatggatttgtggaagtctgaagaaatcagttcatttacattaaaagtataaattggaaaaaatgagctctggggagaaacagacttagactgtacctttaatccaggacaaagtgggatcacaaatactttgttcacatagttcacatgtgaccagtgttggaatataatgtgcgactctgccagaccctgttggctacattaagtgtcagcttgtgtccaaaatctttggccaccatcacacccagagaatcatggtaagttacatgatgtgcactgattctgaggagaaagcgggtccgttcctcaggggatgtcagtatttcatggcacttaaatcttgggaaattagtttgatgctttttgctagaggtgacaagatagactttttgtccttaacagcatttttccaaaagatacacaagcaagttttgtgtgactgtttctacatgattattctgagtcctctatgggactataccaagaagggtttaatgaacacagtttttccagagctcacagcactgcggcctatatacccaaccttgttgcagtctgtgtttatctgtgagtaaacctaattgc

SEQ ID NO: 10340 - protein, 106 aa, Homo sapiens [sequence omitted]

SEQ ID NO: 10341 - DNA, 1302 bp, Homo sapiens
gggtatcaagttaccaaagcagacacattattctggttggagcaaggaaaaccatggatactagaggaagaaatccagagtcaggtttgtccagaagatgcctggcaagtcaatgatcacacagaatggcaccgagaaaaccaaagcagccttgaaactatggacagacaccacaaatatcatatatttggcaacataacatctcatctgagctcaaaccttcataccccttttgtacttgggaaacacctgaatcctaatctagagtactttattcaaaacagaagctatgcaagaaatgaaggtgaatgtaatggatatgacaaagtttttctttatcctaagcatgagaaaattcatgctgaagagaaatacaatgaatataatgaacgtgtaaaggctttcagtcataagtcacagctcataaaacactggaaaactcaaaaacgagagaaacagtatgactgcagtgactgtgggaaagccttttcccagaagttggacctctttaagcatcaaagaacacaaagaggagagaagccctatggatgcagtagatgtcagacagccttcagatggaagtcctgtctcattttacacgagagaacccatacagaagagaaaccttatgagtgcaataaatgtgggaaagcttttactgataagtcatgccttaataaacatcaacgaactcacacaggagagaaatgctttgagtgtcatacatgtcaaaaaggttttagtgataagtcaaaactcactttccatcaaagaactcatactggagagaaaccctatggatgcagcaaatgtcagaaaagcttcagcaataagtcacagctcatgatccatcagagagctcacacagaagagaaaccctatggttgtgatgagtgtgggaaaacattcccccttaagtttaacctcattttacatcaaaaaatccataccggggaaaaatcgcatgggtgtaatgaatgtgggaaagccttcatccagagatctgagctcagtagacatcagagaactcacacaggagagaaaccgtatcactgcagtgaatgtggaaaaggctttagtgtaaagtcattcctcaatactcactggagaactcatatgggagagaaaccctatggatgcaacgaatgtgggaaaatgttctccatcaagtttagtctcatcctacaccaaagaactcatacaggggaaaaaccctatgaatgcagtcagtgtcagaagactttcagccaaaagtcacacctgaatattcatcagcggtctcacactggagagaaaccttag

SEQ ID NO: 10342 - protein, 380 aa, Homo sapiens [sequence omitted]

SEQ ID NO: 10343 - DNA, 919 bp, Homo sapiens
atgacttttctccccagcccgctaaggtgcacgtagccataccatgtttgtcttggctaagctcgaccctctgaaaataaatgaaacttgggcgcaggatttaggtgccaaaatatggagttcttcaccgtcccgcgctatccctgaatacttgggcagaaaaggtccactttaccttccgtacgtgcaggattcaaagatggctgcctccagtatccgtgacgagaggacgcgaacttactacctcccagtcgtccgtgctccgtacacctgcaacttcagaccttcctcggccgccgtaggccggcttggaggctgggggagggcccagaagtggaataattcaggaaagtgcaggttctgggaagtctcggtgggttccccgcaaaatcagagatggcatctcactatgttgcccaggctgatcttgaactcctgacctcaagtgatcctctctccttggcctcctaaagtgctgggattccagcccacaggtcctgacttcaggagcaagacacttcaagtgaggtgaggaggaggttccaggacctggataccatcctttgcagggatgtaattcaccagagaccaagatttctagccagaaattgagggcagctcaaggagagactacagacacagcatcctacttactggctatttcccagtaacaaaagaaaatgatcaagtcccaggaatcactgaccctggaggatgtggctgtggagttcacttgggaggagtggcagctcctcggccctgctcagaaggacctgtaccgagacgtgatgttggagaactatagcaacctcgtgtcagtggggtatcaagccagcaaaccagatgcactcttcaagttggaacaaggagagccatggacagtagaaaatgaaatccacagccaaatctgtccaggtga

SEQ ID NO: 10344 - protein, 131 aa, Homo sapiens
MFVLAKLDPLKINETWAQDLGAKIWSSSPSRAIPEYLGRKGPLYLPYVQDSKMAASSIRDERTRTYYLPVVRAPYTCNFRPSSAAVGRLGGWGRAQKWNNSGKCRFWEVSVGSPQNQRWHLTMLPRLILNS

SEQ ID NO: 10345 - DNA, 2332 bp, Homo sapiens
aaaataaatgaaacttgggcgcaggatttaggtgccaaaatatggagttcttcaccgtcccgcgctatccctgaatacttgggcagaaaaggtccactttaccttccgtacgtgcaggattcaaagatggctgcctccagtatccgtgacgagaggacgcgaacttactacctcccagtcgtccgtgctccgtacacctgcaacttcagaccttcctcggccgccgtaggccggcttggaggctgggggagggcccagaagtggaataattcaggaaagtgcaggttctgggaagtctcggtgggttccccgcaaaatcagagatggcatctcactatgttgcccaggctgatcttgaactcctgacctcaagtgatcctctctccttggcctcctaaagtgctgggattccaggtgtgagccacttcacccagccacatttatccatcttgtaaaatattgctttgttttttggtgcatttcaaacccacaggtcctgacttcaggagcaagacacttcaagtgaggtgaggaggaggttccaggacctggataccatcctttgcagggatgtaattcaccagagaccaagatttctagccagaaattgagggcagctcaaggagagactacagacacagcatcctacttactggctatttcccagtaacaaaagaaaatgatcaagtcccagaaatcaagaaagttgacaatcatctacagatgcactcacaaaagcaaagatgtctgaagagagtggaacaatgccataaacataatgcatttggaaacatcattcatcagaggaaaagtgattttcctttaaggcaaaatcatgatacatttgacttacatgggaaaatactgaaatcaaatttaagtttagtcaaccagaacaaaaggtatgaaatcaagaattctgtgggggttaatggagatgggaaatccttccttcatgccaagcatgaacaatttcataatgaaatgaacttccccgaaggtggaaattctgtgaatacaaattcacaattcattaagcatcagcgaactcaaaacatagataaaccccatgtatgcactgagtgtgggaaggctttcctcaagaagtctcgcctcatctatcatcagagagttcacactggggagaaacctcatggatgcagtatatgtgggaaagccttctccagaaagtccgggctcactgaacaccagagaaaccacacaggagagaaaccctatgaatgcactgaatgtgacaaagcattccgctggaaatcacagctcaatgcacaccagaaaattcatacaggagagaagtcatatatatgcagtgattgtggaaaaggcttcatcaagaagtctcggctcattaatcatcagagagttcatacaggagagaaaccacatggatgcagcctgtgtgggaaggccttctccaaaaggtccaggctcactgaacaccagagaactcatacaggagagaaaccctatgaatgcactgaatgtgacaaagcattccgctggaaatcacagctcaatgcacatcagaaagctcacacaggagagaagtcatatatatgccgtgattgtggaaaaggcttcattcagaagggaaatctcattgtacatcagcgaattcatactggagaaaaaccctatatatgcaatgaatgtggaaaaggcttcatccaaaagggcaacctccttattcatcgacgtactcacactggagagaaaccctatgtatgcaatgaatgtgggaaaggcttcagccagaagacatgtttaatatcccatcagagatttcacacaggaaagacaccctttgtatgtactgagtgtggaaaatcctgctcacacaagtcaggtctcattaaccaccagagaattcacacaggagagaaaccctatacatgcagtgactgtgggaaagctttcagagataaatcatgtctcaacagacatcggagaactcatacaggggagagaccgtatggatgctctgattgtgggaaagctttctcccacttgtcatgccttgtttatcataagggaatgctgcatgcaagagagaaatgtgtaggttcagtcaaattggaaaatccttgctcagagagtcatagcttatcacatacacgtgatctcatacaggataaagactctgttaacatggtgactctgcagatgccttctgtggcagctcagacctcattaactaacagtgcgttccaagcagagagcaaagtagccattgtgagccagcctgttgccagaagttcagtctcagcagatagtagaatttgcacagaataaaaaccatatgaatgcagtg

SEQ ID NO: 10346 - protein, 79 aa, Homo sapiens
MAASSIRDERTRTYYLPVVRAPYTCNFRPSSAAVGRLGGWGRAQKWNNSGKCRFWEVSVGSPQNQRWHLTMLPRLILNS

SEQ ID NO: 10347 - DNA, 2552 bp, Homo sapiens
aaaataaatgaaacttgggcgcaggatttaggtgccaaaatatggagttcttcaccgtcccgcgctatccctgaatacttgggcagaaaaggtccactttaccttccgtacgtgcaggattcaaagatggctgcctccagtatccgtgacgagaggacgcgaacttactacctcccagtcgtccgtgctccgtacacctgcaacttcagaccttcctcggccgccgtaggccggcttggaggctgggggagggcccagaagtggaataattcaggaaagtgcaggttctgggaagtctcggtgggttccccgcaaaatcagagatggcatctcactatgttgcccaggctgatcttgaactcctgacctcaagtgatcctctctccttggcctcctaaagtgctgggattccaggtgtgagccacttcacccagccacatttatccatcttgtaaaatattgctttgttttttggtgcatttcaaacccacaggtcctgacttcaggagcaagacacttcaagtgaggtgaggaggaggttccaggacctggataccatcctttgcagggatgtaattcaccagagaccaagatttctagccagaaattgagggcagctcaaggagagactacagacacagcatcctacttactggctatttcccagtaacaaaagaaaatgatcaagtcccaggaatcactgaccctggaggatgtggctgtggagttcacttgggaggagtggcagctcctcggccctgctcagaaggacctgtaccgagacgtgatgttggagaactatagcaacctcgtgtcagtggggtatcaagccagcaaaccagatgcactcttcaagttggaacaaggagagccatggacagtagaaaatgaaatccacagccaaatctgtccagaaatcaagaaagttgacaatcatctacagatgcactcacaaaagcaaagatgtctgaagagagtggaacaatgccataaacataatgcatttggaaacatcattcatcagaggaaaagtgattttcctttaaggcaaaatcatgatacatttgacttacatgggaaaatactgaaatcaaatttaagtttagtcaaccagaacaaaaggtatgaaatcaagaattctgtgggggttaatggagatgggaaatccttccttcatgccaagcatgaacaatttcataatgaaatgaacttccccgaaggtggaaattctgtgaatacaaattcacaattcattaagcatcagcgaactcaaaacatagataaaccccatgtatgcactgagtgtgggaaggctttcctcaagaagtctcgcctcatctatcatcagagagttcacactggggagaaacctcatggatgcagtatatgtgggaaagccttctccagaaagtccgggctcactgaacaccagagaaaccacacaggagagaaaccctatgaatgcactgaatgtgacaaagcattccgctggaaatcacagctcaatgcacaccagaaaattcatacaggagagaagtcatatatatgcagtgattgtggaaaaggcttcatcaagaagtctcggctcattaatcatcagagagttcatacaggagagaaaccacatggatgcagcctgtgtgggaaggccttctccaaaaggtccaggctcactgaacaccagagaactcatacaggagagaaaccctatgaatgcactgaatgtgacaaagcattccgctggaaatcacagctcaatgcacatcagaaagctcacacaggagagaagtcatatatatgccgtgattgtggaaaaggcttcattcagaagggaaatctcattgtacatcagcgaattcatactggagaaaaaccctatatatgcaatgaatgtggaaaaggcttcatccaaaagggcaacctccttattcatcgacgtactcacactggagagaaaccctatgtatgcaatgaatgtgggaaaggcttcagccagaagacatgtttaatatcccatcagagatttcacacaggaaagacaccctttgtatgtactgagtgtggaaaatcctgctcacacaagtcaggtctcattaaccaccagagaattcacacaggagagaaaccctatacatgcagtgactgtgggaaagctttcagagataaatcatgtctcaacagacatcggagaactcatacaggggagagaccgtatggatgctctgattgtgggaaagctttctcccacttgtcatgccttgtttatcataagggaatgctgcatgcaagagagaaatgtgtaggttcagtcaaattggaaaatccttgctcagagagtcatagcttatcacatacacgtgatctcatacaggataaagactctgttaacatggtgactctgcagatgccttctgtggcagctcagacctcattaactaacagtgcgttccaagcagagagcaaagtagccattgtgagccagcctgttgccagaagttcagtctcagcagatagtagaatttgcacagaataaaaaccatatgaatgcagtg

SEQ ID NO: 10348 - protein, 617 aa, Homo sapiens
MIKSQESLTLEDVAVEFTWEEWQLLGPAQKDLYRDVMLENYSNLVSVGYQASKPDALFKLEQGEPWTVENEIHSQICPEIKKVDNHLQMHSQKQRCLKRVEQCHKHNAFGNIIHQRKSDFPLRQNHDTFDLHGKILKSNLSLVNQNKRYEIKNSVGVNGDGKSFLHAKHEQFHNEMNFPEGGNSVNTNSQFIKHQRTQNIDKPHVCTECGKAFLKKSRLIYHQRVHTGEKPHGCSICGKAFSRKSGLTEHQRNHTGEKPYECTECDKAFRWKSQLNAHQKIHTGEKSYICSDCGKGFIKKSRLINHQRVHTGEKPHGCSLCGKAFSKRSRLTEHQRTHTGEKPYECTECDKAFRWKSQLNAHQKAHTGEKSYICRDCGKGFIQKGNLIVHQRIHTGEKPYICNECGKGFIQKGNLLIHRRTHTGEKPYVCNECGKGFSQKTCLISHQRFHTGKTPFVCTECGKSCSHKSGLINHQRIHTGEKPYTCSDCGKAFRDKSCLNRHRRTHTGERPYGCSDCGKAFSHLSCLVYHKGMLHAREKCVGSVKLENPCSESHSLSHTRDLIQDKDSVNMVTLQMPSVAAQTSLTNSAFQAESKVAIVSQPVARSSVSADSRICTE

SEQ ID NO: 10349 - DNA, 3199 bp, Homo sapiens
aaaataaatgaaacttgggcgcaggatttaggtgccaaaatatggagttcttcaccgtcccgcgctatccctgaatacttgggcagaaaaggtccactttaccttccgtacgtgcaggattcaaagatggctgcctccagtatccgtgacgagaggacgcgaacttactacctcccagtcgtccgtgctccgtacacctgcaacttcagaccttcctcggccgccgtaggccggcttggaggctgggggagggcccagaagtggaataattcaggaaagtgcaggttctgggaagtctcggtgggttccccgcaaaatcagagatggcatctcactatgttgcccaggctgatcttgaactcctgacctcaagtgatcctctctccttggcctcctaaagtgctgggattccaggtgtgagccacttcacccagccacatttatccatcttgtaaaatattgctttgttttttggtgcatttcaaacccacaggtcctgacttcaggagcaagacacttcaagtgaggtgaggaggaggttccaggacctggataccatcctttgcagggatgtaattcaccagagaccaagatttctagccagaaattgagggcagctcaaggagagactacagacacagcatcctacttactggctatttcccagtaacaaaagaaaatgatcaagtcccagaaatcaagaaagttgacaatcatctacagatgcactcacaaaagcaaagatgtctgaagagagtggaacaatgccataaacataatgcatttggaaacatcattcatcagaggaaaagtgattttcctttaaggcaaaatcatgatacatttgacttacatgggaaaatactgaaatcaaatttaagtttagtcaaccagaacaaaaggtatgaaatcaagaattctgtgggggttaatggagatgggaaatccttccttcatgccaagcatgaacaatttcataatgaaatgaacttccccgaaggtggaaattctgtgaatacaaattcacaattcattaagcatcagcgaactcaaaacatagataaaccccatgtatgcactgagtgtgggaaggctttcctcaagaagtctcgcctcatctatcatcagagagttcacactggggagaaacctcatggatgcagtatatgtgggaaagccttctccagaaagtccgggctcactgaacaccagagaaaccacacaggagagaaaccctatgaatgcactgaatgtgacaaagcattccgctggaaatcacagctcaatgcacaccagaaaattcatacaggagagaagtcatatatatgcagtgattgtggaaaaggcttcatcaagaagtctcggctcattaatcatcagagagttcatacaggagagaaaccacatggatgcagcctgtgtgggaaggccttctccaaaaggtccaggctcactgaacaccagagaactcatacaggagagaaaccctatgaatgcactgaatgtgacaaagcattccgctggaaatcacagctcaatgcacatcagaaagctcacacaggagagaagtcatatatatgccgtgattgtggaaaaggcttcattcagaagggaaatctcattgtacatcagcgaattcatactggagaaaaaccctatatatgcaatgaatgtggaaaaggcttcatccaaaagggcaacctccttattcatcgacgtactcacactggagagaaaccctatgtatgcaatgaatgtgggaaaggcttcagccagaagacatgtttaatatcccatcagagatttcacacaggaaagacaccctttgtatgtactgagtgtggaaaatcctgctcacacaagtcaggtctcattaaccaccagagaattcacacaggagagaaaccctatacatgcagtgactgtgggaaagctttcagagataaatcatgtctcaacagacatcggagaactcatacaggggagagaccgtatggatgctctgattgtgggaaagctttctcccacttgtcatgccttgtttatcataagggaatgctgcatgcaagagagaaatgtgtaggttcagtcaaattggaaaatccttgctcagagagtcatagcttatcacatacacgtgatctcatacaggataaagactctgttaacatggtgactctgcagatgccttctgtggcagctcagacctcattaactaacagtgcgttccaagcagagagcaaagtagccattgtgagccagcctgttgccagaagttcagtctcagcagatagtagaatttgcacagaataaaaaccatatgaatgcagtgaatgtggtagtgctttcagtgatcaattacatcatatgtcacaaaaaacacagaggaacaaactgatatattcaaggtggaaagcccttgaataaaaccttatggctaataagcatatactcagagaaaaatagtatgaagtggagactgggaaattcttttatgggaagatagatcttctcatcagtgaccatagatcacatcttcagtgagcttatagttggtagaaatataatgatcatggaaaagtccttgttcagaaacagtacgccagtaggtatcagggggtttacacaggagagaaacttttggaagacctttgaaggctatgaatgtggcagggttgctagtggtacattctgccttatcctcagagggaatcatatagaaataaaactatgaaaatgtaactagaacatcttcatcaaaatatgaaagaacacacgaagcaaataagccctgtgaaaaggagtattttagagatttcgatcagaaatctaacatcattatatggcagataatatacaggatgtgtattttaggacaatataccttgaatcactagttgatatgtcaatgactaattaaaaggggttgtcagtgttacacatcattggttaaatttatagcacaatgtacctcttcccccttttttgataagagtcttctattcccaaccaagatcattatatgattagctcttgtgtttctttgattccaaatttcttcacttgttatttcagactactgaagctcttcaaaaggaaaaatgtatttaatttaataatgtaacacaacaagtttggatgtgtttaactttataaataatcaccccagaggaatgaagttcaaaacttgtgaataacc

SEQ ID NO: 10350 - protein, 79 aa, Homo sapiens; identical to SEQ ID NO: 10346

SEQ ID NO: 10351 - DNA, 3419 bp, Homo sapiens
aaaataaatgaaacttgggcgcaggatttaggtgccaaaatatggagttcttcaccgtcccgcgctatccctgaatacttgggcagaaaaggtccactttaccttccgtacgtgcaggattcaaagatggctgcctccagtatccgtgacgagaggacgcgaacttactacctcccagtcgtccgtgctccgtacacctgcaacttcagaccttcctcggccgccgtaggccggcttggaggctgggggagggcccagaagtggaataattcaggaaagtgcaggttctgggaagtctcggtgggttccccgcaaaatcagagatggcatctcactatgttgcccaggctgatcttgaactcctgacctcaagtgatcctctctccttggcctcctaaagtgctgggattccaggtgtgagccacttcacccagccacatttatccatcttgtaaaatattgctttgttttttggtgcatttcaaacccacaggtcctgacttcaggagcaagacacttcaagtgaggtgaggaggaggttccaggacctggataccatcctttgcagggatgtaattcaccagagaccaagatttctagccagaaattgagggcagctcaaggagagactacagacacagcatcctacttactggctatttcccagtaacaaaagaaaatgatcaagtcccaggaatcactgaccctggaggatgtggctgtggagttcacttgggaggagtggcagctcctcggccctgctcagaaggacctgtaccgagacgtgatgttggagaactatagcaacctcgtgtcagtggggtatcaagccagcaaaccagatgcactcttcaagttggaacaaggagagccatggacagtagaaaatgaaatccacagccaaatctgtccagaaatcaagaaagttgacaatcatctacagatgcactcacaaaagcaaagatgtctgaagagagtggaacaatgccataaacataatgcatttggaaacatcattcatcagaggaaaagtgattttcctttaaggcaaaatcatgatacatttgacttacatgggaaaatactgaaatcaaatttaagtttagtcaaccagaacaaaaggtatgaaatcaagaattctgtgggggttaatggagatgggaaatccttccttcatgccaagcatgaacaatttcataatgaaatgaacttccccgaaggtggaaattctgtgaatacaaattcacaattcattaagcatcagcgaactcaaaacatagataaaccccatgtatgcactgagtgtgggaaggctttcctcaagaagtctcgcctcatctatcatcagagagttcacactggggagaaacctcatggatgcagtatatgtgggaaagccttctccagaaagtccgggctcactgaacaccagagaaaccacacaggagagaaaccctatgaatgcactgaatgtgacaaagcattccgctggaaatcacagctcaatgcacaccagaaaattcatacaggagagaagtcatatatatgcagtgattgtggaaaaggcttcatcaagaagtctcggctcattaatcatcagagagttcatacaggagagaaaccacatggatgcagcctgtgtgggaaggccttctccaaaaggtccaggctcactgaacaccagagaactcatacaggagagaaaccctatgaatgcactgaatgtgacaaagcattccgctggaaatcacagctcaatgcacatcagaaagctcacacaggagagaagtcatatatatgccgtgattgtggaaaaggcttcattcagaagggaaatctcattgtacatcagcgaattcatactggagaaaaaccctatatatgcaatgaatgtggaaaaggcttcatccaaaagggcaacctccttattcatcgacgtactcacactggagagaaaccctatgtatgcaatgaatgtgggaaaggcttcagccagaagacatgtttaatatcccatcagagatttcacacaggaaagacaccctttgtatgtactgagtgtggaaaatcctgctcacacaagtcaggtctcattaaccaccagagaattcacacaggagagaaaccctatacatgcagtgactgtgggaaagctttcagagataaatcatgtctcaacagacatcggagaactcatacaggggagagaccgtatggatgctctgattgtgggaaagctttctcccacttgtcatgccttgtttatcataagggaatgctgcatgcaagagagaaatgtgtaggttcagtcaaattggaaaatccttgctcagagagtcatagcttatcacatacacgtgatctcatacaggataaagactctgttaacatggtgactctgcagatgccttctgtggcagctcagacctcattaactaacagtgcgttccaagcagagagcaaagtagccattgtgagccagcctgttgccagaagttcagtctcagcagatagtagaatttgcacagaataaaaaccatatgaatgcagtgaatgtggtagtgctttcagtgatcaattacatcatatgtcacaaaaaacacagaggaacaaactgatatattcaaggtggaaagcccttgaataaaaccttatggctaataagcatatactcagagaaaaatagtatgaagtggagactgggaaattcttttatgggaagatagatcttctcatcagtgaccatagatcacatcttcagtgagcttatagttggtagaaatataatgatcatggaaaagtccttgttcagaaacagtacgccagtaggtatcagggggtttacacaggagagaaacttttggaagacctttgaaggctatgaatgtggcagggttgctagtggtacattctgccttatcctcagagggaatcatatagaaataaaactatgaaaatgtaactagaacatcttcatcaaaatatgaaagaacacacgaagcaaataagccctgtgaaaaggagtattttagagatttcgatcagaaatctaacatcattatatggcagataatatacaggatgtgtattttaggacaatataccttgaatcactagttgatatgtcaatgactaattaaaaggggttgtcagtgttacacatcattggttaaatttatagcacaatgtacctcttcccccttttttgataagagtcttctattcccaaccaagatcattatatgattagctcttgtgtttctttgattccaaatttcttcacttgttatttcagactactgaagctcttcaaaaggaaaaatgtatttaatttaataatgtaacacaacaagtttggatgtgtttaactttataaataatcaccccagaggaatgaagttcaaaacttgtgaataacc

SEQ ID NO: 10352 - protein, 617 aa, Homo sapiens; identical to SEQ ID NO: 10348

SEQ ID NO: 10353 - DNA, 2229 bp, Homo sapiens
ctcggccgccgtaggccggcttggaggctgggggagggcccagaagtggaataattcaggaaagtgcaggttctgggaagtctcggtgggttccccgcaaaatcaggcttgagtgcagtggcgcaatcgtggctcactgcagcctccatctcccggggctcaggtgattttcccacctcagctttcccgagtagctgggactacagagatggcatctcactatgttgcccaggctgatcttgaactcctgacctcaagtgatcctctctccttggcctcctaaagtgctgggattccaggtgtgagccacttcacccagccacatttatccatcttgtaaaatattgctttgttttttggtgcatttcaaagaatcactgaccctggaggatgtggctgtggagttcacttgggaggagtggcagctcctcggccctgctcagaaggacctgtaccgagacgtgatgttggagaactatagcaacctcgtgtcagtggggtatcaagccagcaaaccagatgcactcttcaagttggaacaaggagagccatggacagtagaaaatgaaatccacagccaaatctgtccagaaatcaagaaagttgacaatcatctacagatgcactcacaaaagcaaagatgtctgaagagagtggaacaatgccataaacataatgcatttggaaacatcattcatcagaggaaaagtgattttcctttaaggcaaaatcatgatacatttgacttacatgggaaaatactgaaatcaaatttaagtttagtcaaccagaacaaaaggtatgaaatcaagaattctgtgggggttaatggagatgggaaatccttccttcatgccaagcatgaacaatttcataatgaaatgaacttccccgaaggtggaaattctgtgaatacaaattcacaattcattaagcatcagcgaactcaaaacatagataaaccccatgtatgcactgagtgtgggaaggctttcctcaagaagtctcgcctcatctatcatcagagagttcacactggggagaaacctcatggatgcagtatatgtgggaaagccttctccagaaagtccgggctcactgaacaccagagaaaccacacaggagagaaaccctatgaatgcactgaatgtgacaaagcattccgctggaaatcacagctcaatgcacaccagaaaattcatacaggagagaagtcatatatatgcagtgattgtggaaaaggcttcatcaagaagtctcggctcattaatcatcagagagttcatacaggagagaaaccacatggatgcagcctgtgtgggaaggccttctccaaaaggtccaggctcactgaacaccagagaactcatacaggagagaaaccctatgaatgcactgaatgtgacaaagcattccgctggaaatcacagctcaatgcacatcagaaagctcacacaggagagaagtcatatatatgccgtgattgtggaaaaggcttcattcagaagggaaatctcattgtacatcagcgaattcatactggagaaaaaccctatatatgcaatgaatgtggaaaaggcttcatccaaaagggcaacctccttattcatcgacgtactcacactggagagaaaccctatgtatgcaatgaatgtgggaaaggcttcagccagaagacatgtttaatatcccatcagagatttcacacaggaaagacaccctttgtatgtactgagtgtggaaaatcctgctcacacaagtcaggtctcattaaccaccagagaattcacacaggagagaaaccctatacatgcagtgactgtgggaaagctttcagagataaatcatgtctcaacagacatcggagaactcatacaggggagagaccgtatggatgctctgattgtgggaaagctttctcccacttgtcatgccttgtttatcataagggaatgctgcatgcaagagagaaatgtgtaggttcagtcaaattggaaaatccttgctcagagagtcatagcttatcacatacacgtgatctcatacaggataaagactctgttaacatggtgactctgcagatgccttctgtggcagctcagacctcattaactaacagtgcgttccaagcagagagcaaagtagccattgtgagccagcctgttgccagaagttcagtctcagcagatagtagaatttgcacagaataaaaaccatatgaatgcagtg

SEQ ID NO: 10354 - protein, 581 aa, Homo sapiens; identical to SEQ ID NO: 1593

SEQ ID NO: 10355 - DNA, 3096 bp, Homo sapiens
ctcggccgccgtaggccggcttggaggctgggggagggcccagaagtggaataattcaggaaagtgcaggttctgggaagtctcggtgggttccccgcaaaatcaggcttgagtgcagtggcgcaatcgtggctcactgcagcctccatctcccggggctcaggtgattttcccacctcagctttcccgagtagctgggactacagagatggcatctcactatgttgcccaggctgatcttgaactcctgacctcaagtgatcctctctccttggcctcctaaagtgctgggattccaggtgtgagccacttcacccagccacatttatccatcttgtaaaatattgctttgttttttggtgcatttcaaagaatcactgaccctggaggatgtggctgtggagttcacttgggaggagtggcagctcctcggccctgctcagaaggacctgtaccgagacgtgatgttggagaactatagcaacctcgtgtcagtggggtatcaagccagcaaaccagatgcactcttcaagttggaacaaggagagccatggacagtagaaaatgaaatccacagccaaatctgtccagaaatcaagaaagttgacaatcatctacagatgcactcacaaaagcaaagatgtctgaagagagtggaacaatgccataaacataatgcatttggaaacatcattcatcagaggaaaagtgattttcctttaaggcaaaatcatgatacatttgacttacatgggaaaatactgaaatcaaatttaagtttagtcaaccagaacaaaaggtatgaaatcaagaattctgtgggggttaatggagatgggaaatccttccttcatgccaagcatgaacaatttcataatgaaatgaacttccccgaaggtggaaattctgtgaatacaaattcacaattcattaagcatcagcgaactcaaaacatagataaaccccatgtatgcactgagtgtgggaaggctttcctcaagaagtctcgcctcatctatcatcagagagttcacactggggagaaacctcatggatgcagtatatgtgggaaagccttctccagaaagtccgggctcactgaacaccagagaaaccacacaggagagaaaccctatgaatgcactgaatgtgacaaagcattccgctggaaatcacagctcaatgcacaccagaaaattcatacaggagagaagtcatatatatgcagtgattgtggaaaaggcttcatcaagaagtctcggctcattaatcatcagagagttcatacaggagagaaaccacatggatgcagcctgtgtgggaaggccttctccaaaaggtccaggctcactgaacaccagagaactcatacaggagagaaaccctatgaatgcactgaatgtgacaaagcattccgctggaaatcacagctcaatgcacatcagaaagctcacacaggagagaagtcatatatatgccgtgattgtggaaaaggcttcattcagaagggaaatctcattgtacatcagcgaattcatactggagaaaaaccctatatatgcaatgaatgtggaaaaggcttcatccaaaagggcaacctccttattcatcgacgtactcacactggagagaaaccctatgtatgcaatgaatgtgggaaaggcttcagccagaagacatgtttaatatcccatcagagatttcacacaggaaagacaccctttgtatgtactgagtgtggaaaatcctgctcacacaagtcaggtctcattaaccaccagagaattcacacaggagagaaaccctatacatgcagtgactgtgggaaagctttcagagataaatcatgtctcaacagacatcggagaactcatacaggggagagaccgtatggatgctctgattgtgggaaagctttctcccacttgtcatgccttgtttatcataagggaatgctgcatgcaagagagaaatgtgtaggttcagtcaaattggaaaatccttgctcagagagtcatagcttatcacatacacgtgatctcatacaggataaagactctgttaacatggtgactctgcagatgccttctgtggcagctcagacctcattaactaacagtgcgttccaagcagagagcaaagtagccattgtgagccagcctgttgccagaagttcagtctcagcagatagtagaatttgcacagaataaaaaccatatgaatgcagtgaatgtggtagtgctttcagtgatcaattacatcatatgtcacaaaaaacacagaggaacaaactgatatattcaaggtggaaagcccttgaataaaaccttatggctaataagcatatactcagagaaaaatagtatgaagtggagactgggaaattcttttatgggaagatagatcttctcatcagtgaccatagatcacatcttcagtgagcttatagttggtagaaatataatgatcatggaaaagtccttgttcagaaacagtacgccagtaggtatcagggggtttacacaggagagaaacttttggaagacctttgaaggctatgaatgtggcagggttgctagtggtacattctgccttatcctcagagggaatcatatagaaataaaactatgaaaatgtaactagaacatcttcatcaaaatatgaaagaacacacgaagcaaataagccctgtgaaaaggagtattttagagatttcgatcagaaatctaacatcattatatggcagataatatacaggatgtgtattttaggacaatataccttgaatcactagttgatatgtcaatgactaattaaaaggggttgtcagtgttacacatcattggttaaatttatagcacaatgtacctcttcccccttttttgataagagtcttctattcccaaccaagatcattatatgattagctcttgtgtttctttgattccaaatttcttcacttgttatttcagactactgaagctcttcaaaaggaaaaatgtatttaatttaataatgtaacacaacaagtttggatgtgtttaactttataaataatcaccccagaggaatgaagttcaaaacttgtgaataacc

SEQ ID NO: 10356 - protein, 581 aa, Homo sapiens; identical to SEQ ID NO: 1593

SEQ ID NO: 10357 - DNA, 2116 bp, Homo sapiens
ggccggcttggaggctgggggagggcccagaagtggaataattcaggaaagtgcaggttctgggaagtctcggtgggttccccgcaaaatcagagatggcatctcactatgttgcccaggctgatcttgaactcctgacctcaagtgatcctctctccttggcctcctaaagtgctgggattccaggtgtgagccacttcacccagccacatttatccatcttgtaaaatattgctttgttttttggtgcatttcaaagaatcactgaccctggaggatgtggctgtggagttcacttgggaggagtggcagctcctcggccctgctcagaaggacctgtaccgagacgtgatgttggagaactatagcaacctcgtgtcagtggggtatcaagccagcaaaccagatgcactcttcaagttggaacaaggagagccatggacagtagaaaatgaaatccacagccaaatctgtccagaaatcaagaaagttgacaatcatctacagatgcactcacaaaagcaaagatgtctgaagagagtggaacaatgccataaacataatgcatttggaaacatcattcatcagaggaaaagtgattttcctttaaggcaaaatcatgatacatttgacttacatgggaaaatactgaaatcaaatttaagtttagtcaaccagaacaaaaggtatgaaatcaagaattctgtgggggttaatggagatgggaaatccttccttcatgccaagcatgaacaatttcataatgaaatgaacttccccgaaggtggaaattctgtgaatacaaattcacaattcattaagcatcagcgaactcaaaacatagataaaccccatgtatgcactgagtgtgggaaggctttcctcaagaagtctcgcctcatctatcatcagagagttcacactggggagaaacctcatggatgcagtatatgtgggaaagccttctccagaaagtccgggctcactgaacaccagagaaaccacacaggagagaaaccctatgaatgcactgaatgtgacaaagcattccgctggaaatcacagctcaatgcacaccagaaaattcatacaggagagaagtcatatatatgcagtgattgtggaaaaggcttcatcaagaagtctcggctcattaatcatcagagagttcatacaggagagaaaccacatggatgcagcctgtgtgggaaggccttctccaaaaggtccaggctcactgaacaccagagaactcatacaggagagaaaccctatgaatgcactgaatgtgacaaagcattccgctggaaatcacagctcaatgcacatcagaaagctcacacaggagagaagtcatatatatgccgtgattgtggaaaaggcttcattcagaagggaaatctcattgtacatcagcgaattcatactggagaaaaaccctatatatgcaatgaatgtggaaaaggcttcatccaaaagggcaacctccttattcatcgacgtactcacactggagagaaaccctatgtatgcaatgaatgtgggaaaggcttcagccagaagacatgtttaatatcccatcagagatttcacacaggaaagacaccctttgtatgtactgagtgtggaaaatcctgctcacacaagtcaggtctcattaaccaccagagaattcacacaggagagaaaccctatacatgcagtgactgtgggaaagctttcagagataaatcatgtctcaacagacatcggagaactcatacaggggagagaccgtatggatgctctgattgtgggaaagctttctcccacttgtcatgccttgtttatcataagggaatgctgcatgcaagagagaaatgtgtaggttcagtcaaattggaaaatccttgctcagagagtcatagcttatcacatacacgtgatctcatacaggataaagactctgttaacatggtgactctgcagatgccttctgtggcagctcagacctcattaactaacagtgcgttccaagcagagagcaaagtagccattgtgagccagcctgttgccagaagttcagtctcagcagatagtagaatttgcacagaataaaaaccatatgaatgcagtg

SEQ ID NO: 10358 - protein, 581 aa, Homo sapiens; identical to SEQ ID NO: 1593

SEQ ID NO: 10359 - DNA, 2983 bp, Homo sapiens
ggccggcttggaggctgggggagggcccagaagtggaataattcaggaaagtgcaggttctgggaagtctcggtgggttccccgcaaaatcagagatggcatctcactatgttgcccaggctgatcttgaactcctgacctcaagtgatcctctctccttggcctcctaaagtgctgggattccaggtgtgagccacttcacccagccacatttatccatcttgtaaaatattgctttgttttttggtgcatttcaaagaatcactgaccctggaggatgtggctgtggagttcacttgggaggagtggcagctcctcggccctgctcagaaggacctgtaccgagacgtgatgttggagaactatagcaacctcgtgtcagtggggtatcaagccagcaaaccagatgcactcttcaagttggaacaaggagagccatggacagtagaaaatgaaatccacagccaaatctgtccagaaatcaagaaagttgacaatcatctacagatgcactcacaaaagcaaagatgtctgaagagagtggaacaatgccataaacataatgcatttggaaacatcattcatcagaggaaaagtgattttcctttaaggcaaaatcatgatacatttgacttacatgggaaaatactgaaatcaaatttaagtttagtcaaccagaacaaaaggtatgaaatcaagaattctgtgggggttaatggagatgggaaatccttccttcatgccaagcatgaacaatttcataatgaaatgaacttccccgaaggtggaaattctgtgaatacaaattcacaattcattaagcatcagcgaactcaaaacatagataaaccccatgtatgcactgagtgtgggaaggctttcctcaagaagtctcgcctcatctatcatcagagagttcacactggggagaaacctcatggatgcagtatatgtgggaaagccttctccagaaagtccgggctcactgaacaccagagaaaccacacaggagagaaaccctatgaatgcactgaatgtgacaaagcattccgctggaaatcacagctcaatgcacaccagaaaattcatacaggagagaagtcatatatatgcagtgattgtggaaaaggcttcatcaagaagtctcggctcattaatcatcagagagttcatacaggagagaaaccacatggatgcagcctgtgtgggaaggccttctccaaaaggtccaggctcactgaacaccagagaactcatacaggagagaaaccctatgaatgcactgaatgtgacaaagcattccgctggaaatcacagctcaatgcacatcagaaagctcacacaggagagaagtcatatatatgccgtgattgtggaaaaggcttcattcagaagggaaatctcattgtacatcagcgaattcatactggagaaaaaccctatatatgcaatgaatgtggaaaaggcttcatccaaaagggcaacctccttattcatcgacgtactcacactggagagaaaccctatgtatgcaatgaatgtgggaaaggcttcagccagaagacatgtttaatatcccatcagagatttcacacaggaaagacaccctttgtatgtactgagtgtggaaaatcctgctcacacaagtcaggtctcattaaccaccagagaattcacacaggagagaaaccctatacatgcagtgactgtgggaaagctttcagagataaatcatgtctcaacagacatcggagaactcatacaggggagagaccgtatggatgctctgattgtgggaaagctttctcccacttgtcatgccttgtttatcataagggaatgctgcatgcaagagagaaatgtgtaggttcagtcaaattggaaaatccttgctcagagagtcatagcttatcacatacacgtgatctcatacaggataaagactctgttaacatggtgactctgcagatgccttctgtggcagctcagacctcattaactaacagtgcgttccaagcagagagcaaagtagccattgtgagccagcctgttgccagaagttcagtctcagcagatagtagaatttgcacagaataaaaaccatatgaatgcagtgaatgtggtagtgctttcagtgatcaattacatcatatgtcacaaaaaacacagaggaacaaactgatatattcaaggtggaaagcccttgaataaaaccttatggctaataagcatatactcagagaaaaatagtatgaagtggagactgggaaattcttttatgggaagatagatcttctcatcagtgaccatagatcacatcttcagtgagcttatagttggtagaaatataatgatcatggaaaagtccttgttcagaaacagtacgccagtaggtatcagggggtttacacaggagagaaacttttggaagacctttgaaggctatgaatgtggcagggttgctagtggtacattctgccttatcctcagagggaatcatatagaaataaaactatgaaaatgtaactagaacatcttcatcaaaatatgaaagaacacacgaagcaaataagccctgtgaaaaggagtattttagagatttcgatcagaaatctaacatcattatatggcagataatatacaggatgtgtattttaggacaatataccttgaatcactagttgatatgtcaatgactaattaaaaggggttgtcagtgttacacatcattggttaaatttatagcacaatgtacctcttcccccttttttgataagagtcttctattcccaaccaagatcattatatgattagctcttgtgtttctttgattccaaatttcttcacttgttatttcagactactgaagctcttcaaaaggaaaaatgtatttaatttaataatgtaacacaacaagtttggatgtgtttaactttataaataatcaccccagaggaatgaagttcaaaacttgtgaataacc

SEQ ID NO: 10360 - protein, 581 aa, Homo sapiens; identical to SEQ ID NO: 1593

SEQ ID NO: 10361 - DNA, 2133 bp, Homo sapiens
ccagaagtggaataattcaggaaagtgcaggttctgggaagtctcggtgggttccccgcaaaatcagcccacaggtcctgacttcaggagcaagacacttcaagtgaggtgaggaggaggttccaggacctggataccatcctttgcagggatgtaattcaccagagaccaagatttctagccagaaattgagggcagctcaaggagagactacagacacagcatcctacttactggctatttcccagtaacaaaagaaaatgatcaagtcccaggaatcactgaccctggaggatgtggctgtggagttcacttgggaggagtggcagctcctcggccctgctcagaaggacctgtaccgagacgtgatgttggagaactatagcaacctcgtgtcagtggggtatcaagccagcaaaccagatgcactcttcaagttggaacaaggagagccatggacagtagaaaatgaaatccacagccaaatctgtccagaaatcaagaaagttgacaatcatctacagatgcactcacaaaagcaaagatgtctgaagagagtggaacaatgccataaacataatgcatttggaaacatcattcatcagaggaaaagtgattttcctttaaggcaaaatcatgatacatttgacttacatgggaaaatactgaaatcaaatttaagtttagtcaaccagaacaaaaggtatgaaatcaagaattctgtgggggttaatggagatgggaaatccttccttcatgccaagcatgaacaatttcataatgaaatgaacttccccgaaggtggaaattctgtgaatacaaattcacaattcattaagcatcagcgaactcaaaacatagataaaccccatgtatgcactgagtgtgggaaggctttcctcaagaagtctcgcctcatctatcatcagagagttcacactggggagaaacctcatggatgcagtatatgtgggaaagccttctccagaaagtccgggctcactgaacaccagagaaaccacacaggagagaaaccctatgaatgcactgaatgtgacaaagcattccgctggaaatcacagctcaatgcacaccagaaaattcatacaggagagaagtcatatatatgcagtgattgtggaaaaggcttcatcaagaagtctcggctcattaatcatcagagagttcatacaggagagaaaccacatggatgcagcctgtgtgggaaggccttctccaaaaggtccaggctcactgaacaccagagaactcatacaggagagaaaccctatgaatgcactgaatgtgacaaagcattccgctggaaatcacagctcaatgcacatcagaaagctcacacaggagagaagtcatatatatgccgtgattgtggaaaaggcttcattcagaagggaaatctcattgtacatcagcgaattcatactggagaaaaaccctatatatgcaatgaatgtggaaaaggcttcatccaaaagggcaacctccttattcatcgacgtactcacactggagagaaaccctatgtatgcaatgaatgtgggaaaggcttcagccagaagacatgtttaatatcccatcagagatttcacacaggaaagacaccctttgtatgtactgagtgtggaaaatcctgctcacacaagtcaggtctcattaaccaccagagaattcacacaggagagaaaccctatacatgcagtgactgtgggaaagctttcagagataaatcatgtctcaacagacatcggagaactcatacaggggagagaccgtatggatgctctgattgtgggaaagctttctcccacttgtcatgccttgtttatcataagggaatgctgcatgcaagagagaaatgtgtaggttcagtcaaattggaaaatccttgctcagagagtcatagcttatcacatacacgtgatctcatacaggataaagactctgttaacatggtgactctgcagatgccttctgtggcagctcagacctcattaactaacagtgcgttccaagcagagagcaaagtagccattgtgagccagcctgttgccagaagttcagtctcagcagatagtagaatttgcacagaataaaaaccatatgaatgcagtg

SEQ ID NO: 10362 - protein, 617 aa, Homo sapiens; identical to SEQ ID NO: 10348

SEQ ID NO: 10363 - DNA, 3000 bp, Homo sapiens
ccagaagtggaataattcaggaaagtgcaggttctgggaagtctcggtgggttccccgcaaaatcagcccacaggtcctgacttcaggagcaagacacttcaagtgaggtgaggaggaggttccaggacctggataccatcctttgcagggatgtaattcaccagagaccaagatttctagccagaaattgagggcagctcaaggagagactacagacacagcatcctacttactggctatttcccagtaacaaaagaaaatgatcaagtcccaggaatcactgaccctggaggatgtggctgtggagttcacttgggaggagtggcagctcctcggccctgctcagaaggacctgtaccgagacgtgatgttggagaactatagcaacctcgtgtcagtggggtatcaagccagcaaaccagatgcactcttcaagttggaacaaggagagccatggacagtagaaaatgaaatccacagccaaatctgtccagaaatcaagaaagttgacaatcatctacagatgcactcacaaaagcaaagatgtctgaagagagtggaacaatgccataaacataatgcatttggaaacatcattcatcagaggaaaagtgattttcctttaaggcaaaatcatgatacatttgacttacatgggaaaatactgaaatcaaatttaagtttagtcaaccagaacaaaaggtatgaaatcaagaattctgtgggggttaatggagatgggaaatccttccttcatgccaagcatgaacaatttcataatgaaatgaacttccccgaaggtggaaattctgtgaatacaaattcacaattcattaagcatcagcgaactcaaaacatagataaaccccatgtatgcactgagtgtgggaaggctttcctcaagaagtctcgcctcatctatcatcagagagttcacactggggagaaacctcatggatgcagtatatgtgggaaagccttctccagaaagtccgggctcactgaacaccagagaaaccacacaggagagaaaccctatgaatgcactgaatgtgacaaagcattccgctggaaatcacagctcaatgcacaccagaaaattcatacaggagagaagtcatatatatgcagtgattgtggaaaaggcttcatcaagaagtctcggctcattaatcatcagagagttcatacaggagagaaaccacatggatgcagcctgtgtgggaaggccttctccaaaaggtccaggctcactgaacaccagagaactcatacaggagagaaaccctatgaatgcactgaatgtgacaaagcattccgctggaaatcacagctcaatgcacatcagaaagctcacacaggagagaagtcatatatatgccgtgattgtggaaaaggcttcattcagaagggaaatctcattgtacatcagcgaattcatactggagaaaaaccctatatatgcaatgaatgtggaaaaggcttcatccaaaagggcaacctccttattcatcgacgtactcacactggagagaaaccctatgtatgcaatgaatgtgggaaaggcttcagccagaagacatgtttaatatcccatcagagatttcacacaggaaagacaccctttgtatgtactgagtgtggaaaatcctgctcacacaagtcaggtctcattaaccaccagagaattcacacaggagagaaaccctatacatgcagtgactgtgggaaagctttcagagataaatcatgtctcaacagacatcggagaactcatacaggggagagaccgtatggatgctctgattgtgggaaagctttctcccacttgtcatgccttgtttatcataagggaatgctgcatgcaagagagaaatgtgtaggttcagtcaaattggaaaatccttgctcagagagtcatagcttatcacatacacgtgatctcatacaggataaagactctgttaacatggtgactctgcagatgccttctgtggcagctcagacctcattaactaacagtgcgttccaagcagagagcaaagtagccattgtgagccagcctgttgccagaagttcagtctcagcagatagtagaatttgcacagaataaaaaccatatgaatgcagtgaatgtggtagtgctttcagtgatcaattacatcatatgtcacaaaaaacacagaggaacaaactgatatattcaaggtggaaagcccttgaataaaaccttatggctaataagcatatactcagagaaaaatagtatgaagtggagactgggaaattcttttatgggaagatagatcttctcatcagtgaccatagatcacatcttcagtgagcttatagttggtagaaatataatgatcatggaaaagtccttgttcagaaacagtacgccagtaggtatcagggggtttacacaggagagaaacttttggaagacctttgaaggctatgaatgtggcagggttgctagtggtacattctgccttatcctcagagggaatcatatagaaataaaactatgaaaatgtaactagaacatcttcatcaaaatatgaaagaacacacgaagcaaataagccctgtgaaaaggagtattttagagatttcgatcagaaatctaacatcattatatggcagataatatacaggatgtgtattttaggacaatataccttgaatcactagttgatatgtcaatgactaattaaaaggggttgtcagtgttacacatcattggttaaatttatagcacaatgtacctcttcccccttttttgataagagtcttctattcccaaccaagatcattatatgattagctcttgtgtttctttgattccaaatttcttcacttgttatttcagactactgaagctcttcaaaaggaaaaatgtatttaatttaataatgtaacacaacaagtttggatgtgtttaactttataaataatcaccccagaggaatgaagttcaaaacttgtgaataacc

SEQ ID NO: 10364 - protein, 617 aa, Homo sapiens; identical to SEQ ID NO: 10348

SEQ ID NO: 10365 - DNA, 1942 bp, Homo sapiens
tcaaatcaatttactcttcagcccacaggtcctgacttcaggagcaagacacttcaagtgaggtgaggaggaggttccaggacctggataccatcctttgcagggatgtaattcaccagagaccaagatttctagccagaaattgagggcagtcagaaggacctgtaccgagacgtgatgttggagaactatagcaacctcgtgtcagtggggtatcaagccagcaaaccagatgcactcttcaagttggaacaaggagagccatggacagtagaaaatgaaatccacagccaaatctgtccagaaatcaagaaagttgacaatcatctacagatgcactcacaaaagcaaagatgtctgaagagagtggaacaatgccataaacataatgcatttggaaacatcattcatcagaggaaaagtgattttcctttaaggcaaaatcatgatacatttgacttacatgggaaaatactgaaatcaaatttaagtttagtcaaccagaacaaaaggtatgaaatcaagaattctgtgggggttaatggagatgggaaatccttccttcatgccaagcatgaacaatttcataatgaaatgaacttccccgaaggtggaaattctgtgaatacaaattcacaattcattaagcatcagcgaactcaaaacatagataaaccccatgtatgcactgagtgtgggaaggctttcctcaagaagtctcgcctcatctatcatcagagagttcacactggggagaaacctcatggatgcagtatatgtgggaaagccttctccagaaagtccgggctcactgaacaccagagaaaccacacaggagagaaaccctatgaatgcactgaatgtgacaaagcattccgctggaaatcacagctcaatgcacaccagaaaattcatacaggagagaagtcatatatatgcagtgattgtggaaaaggcttcatcaagaagtctcggctcattaatcatcagagagttcatacaggagagaaaccacatggatgcagcctgtgtgggaaggccttctccaaaaggtccaggctcactgaacaccagagaactcatacaggagagaaaccctatgaatgcactgaatgtgacaaagcattccgctggaaatcacagctcaatgcacatcagaaagctcacacaggagagaagtcatatatatgccgtgattgtggaaaaggcttcattcagaagggaaatctcattgtacatcagcgaattcatactggagaaaaaccctatatatgcaatgaatgtggaaaaggcttcatccaaaagggcaacctccttattcatcgacgtactcacactggagagaaaccctatgtatgcaatgaatgtgggaaaggcttcagccagaagacatgtttaatatcccatcagagatttcacacaggaaagacaccctttgtatgtactgagtgtggaaaatcctgctcacacaagtcaggtctcattaaccaccagagaattcacacaggagagaaaccctatacatgcagtgactgtgggaaagctttcagagataaatcatgtctcaacagacatcggagaactcatacaggggagagaccgtatggatgctctgattgtgggaaagctttctcccacttgtcatgccttgtttatcataagggaatgctgcatgcaagagagaaatgtgtaggttcagtcaaattggaaaatccttgctcagagagtcatagcttatcacatacacgtgatctcatacaggataaagactctgttaacatggtgactctgcagatgccttctgtggcagctcagacctcattaactaacagtgcgttccaagcagagagcaaagtagccattgtgagccagcctgttgccagaagttcagtctcagcagatagtagaatttgcacagaataaaaaccatatgaatgcagtg

SEQ ID NO: 10366 - protein, 581 aa, Homo sapiens; identical to SEQ ID NO: 1593

SEQ ID NO: 10367 - DNA, 2809 bp, Homo sapiens
tcaaatcaatttactcttcagcccacaggtcctgacttcaggagcaagacacttcaagtgaggtgaggaggaggttccaggacctggataccatcctttgcagggatgtaattcaccagagaccaagatttctagccagaaattgagggcagtcagaaggacctgtaccgagacgtgatgttggagaactatagcaacctcgtgtcagtggggtatcaagccagcaaaccagatgcactcttcaagttggaacaaggagagccatggacagtagaaaatgaaatccacagccaaatctgtccagaaatcaagaaagttgacaatcatctacagatgcactcacaaaagcaaagatgtctgaagagagtggaacaatgccataaacataatgcatttggaaacatcattcatcagaggaaaagtgattttcctttaaggcaaaatcatgatacatttgacttacatgggaaaatactgaaatcaaatttaagtttagtcaaccagaacaaaaggtatgaaatcaagaattctgtgggggttaatggagatgggaaatccttccttcatgccaagcatgaacaatttcataatgaaatgaacttccccgaaggtggaaattctgtgaatacaaattcacaattcattaagcatcagcgaactcaaaacatagataaaccccatgtatgcactgagtgtgggaaggctttcctcaagaagtctcgcctcatctatcatcagagagttcacactggggagaaacctcatggatgcagtatatgtgggaaagccttctccagaaagtccgggctcactgaacaccagagaaaccacacaggagagaaaccctatgaatgcactgaatgtgacaaagcattccgctggaaatcacagctcaatgcacaccagaaaattcatacaggagagaagtcatatatatgcagtgattgtggaaaaggcttcatcaagaagtctcggctcattaatcatcagagagttcatacaggagagaaaccacatggatgcagcctgtgtgggaaggccttctccaaaaggtccaggctcactgaacaccagagaactcatacaggagagaaaccctatgaatgcactgaatgtgacaaagcattccgctggaaatcacagctcaatgcacatcagaaagctcacacaggagagaagtcatatatatgccgtgattgtggaaaaggcttcattcagaagggaaatctcattgtacatcagcgaattcatactggagaaaaaccctatatatgcaatgaatgtggaaaaggcttcatccaaaagggcaacctccttattcatcgacgtactcacactggagagaaaccctatgtatgcaatgaatgtgggaaaggcttcagccagaagacatgtttaatatcccatcagagatttcacacaggaaagacaccctttgtatgtactgagtgtggaaaatcctgctcacacaagtcaggtctcattaaccaccagagaattcacacaggagagaaaccctatacatgcagtgactgtgggaaagctttcagagataaatcatgtctcaacagacatcggagaactcatacaggggagagaccgtatggatgctctgattgtgggaaagctttctcccacttgtcatgccttgtttatcataagggaatgctgcatgcaagagagaaatgtgtaggttcagtcaaattggaaaatccttgctcagagagtcatagcttatcacatacacgtgatctcatacaggataaagactctgttaacatggtgactctgcagatgccttctgtggcagctcagacctcattaactaacagtgcgttccaagcagagagcaaagtagccattgtgagccagcctgttgccagaagttcagtctcagcagatagtagaatttgcacagaataaaaaccatatgaatgcagtgaatgtggtagtgctttcagtgatcaattacatcatatgtcacaaaaaacacagaggaacaaactgatatattcaaggtggaaagcccttgaataaaaccttatggctaataagcatatactcagagaaaaatagtatgaagtggagactgggaaattcttttatgggaagatagatcttctcatcagtgaccatagatcacatcttcagtgagcttatagttggtagaaatataatgatcatggaaaagtccttgttcagaaacagtacgccagtaggtatcagggggtttacacaggagagaaacttttggaagacctttgaaggctatgaatgtggcagggttgctagtggtacattctgccttatcctcagagggaatcatatagaaataaaactatgaaaatgtaactagaacatcttcatcaaaatatgaaagaacacacgaagcaaataagccctgtgaaaaggagtattttagagatttcgatcagaaatctaacatcattatatggcagataatatacaggatgtgtattttaggacaatataccttgaatcactagttgatatgtcaatgactaattaaaaggggttgtcagtgttacacatcattggttaaatttatagcacaatgtacctcttcccccttttttgataagagtcttctattcccaaccaagatcattatatgattagctcttgtgtttctttgattccaaatttcttcacttgttatttcagactactgaagctcttcaaaaggaaaaatgtatttaatttaataatgtaacacaacaagtttggatgtgtttaactttataaataatcaccccagaggaatgaagttcaaaacttgtgaataacc

SEQ ID NO: 10368 - protein, 581 aa, Homo sapiens; identical to SEQ ID NO: 1593

SEQ ID NO: 10369 - DNA, 577 bp, Homo sapiens
aatacgaggccgagggaggaattctgtcgtctgggaacggctggtttcgcggtcagacgccgagggccctcgaagtccctagcaacggctgcggagggagattccacctaggtccgtgcaggttacaaatggcaaccagaacagggactccaagcacgcccaactagcagcatccaaacatgggacttcaaggacgtgaatgaagaaggtctgctggagcagaggaactgaaattgacaaggcgaaaggggaccctgggaagagtctgccggcagcagatataaggtcagtgccctaaagaggtactgggagcagtgctttaaagaagtactgggaagttttctgactcagggtaacaagggaaagaatttgtctattgaagaaaaacattatgtgcagttgcttaaagttctgttgagacagtctgcagctcaggttaattcgcagacactaacctcctgcagaagccacaaaaggttattacacataacccatcgtttccacaggcaggcactcttgatgtggaaaattgggatacagcaggagaaggattaaaacaggctcatcaaaaaggtct

SEQ ID NO: 10370 - protein, 32 aa, Homo sapiens
MKKVCWSRGTEIDKAKGDPGKSLPAADIRSVP

SEQ ID NO: 10371 - DNA, 411 bp, Homo sapiens
gactacatataaaatttttcaatggcagtatcacatcagaaggttgtaccagtggcttagtaaatggagtcacattaaatgtttgccttaattaggatggaattgacatgtataaaatattcaattctatttctatattttctatctatatataacattctgatactccaattactcaagttcttctgttcccaccccaagatttgtgattcacttttttatgtcctagatcttatggttacatttattcttaagtggcttatactgttttttttgataattcctctagaagaggaagtcattttttaaaaattgagacagagtctcacaccgttgcccaggctagagttgcagtgagccaaaatcacaccactgcagtccagcctgggcaatagagccagaccctgtctc

SEQ ID NO: 10372 - protein, 76 aa, Homo sapiens [sequence omitted]

SEQ ID NO: 10373 - DNA, 1191 bp, Homo sapiens
ccacaggttctgactcctcaggagcaaaaaacataacctgaagagggaggaagtggatttggggttcaccatttcttggggcacacttgattgaaaactgagacttctgtggcccctcagacatcattaaacatcagcggcctcctcgcaaacaggaacgtagtccttgtgggacagccagtggtcagatgtgcagcctcaggagataacagaggatttgcacaggacagaaaccttgtgaatgcagtgaatgtggttgtgccttccgtgatcaattatgtcttattttatgttacagaaaacccataggaagaaaactcagatctatgtggaaaagggttgagcaaaaatttgtagttcattatgtggccgaaaagcatacactgagagaacatgtataaggctgagatagcctgataaactcatcctattaaaatgtatgctgtgatacacaggcaaatttgatgttaacctaagcacatacacagcaattgctcgactgtgtcaattaaatgagtaaaggaagcccaagtacttttaagtggaggaaatgaagtactgtgaatttttaaaacagatgagataattggtgtcgggagtgttgcagtgactgaaaagcttcataaggggcagttggtgggaaagggctaatactgtaatggtggaatgtgggacacatatgtgtcaattcagtttccttagaccagtgccagtgtggaggattaattgaaaaccaggaccataaactttcagaactttgtattatgcagagggatctgtgaaactagtcaatttgtttcattaaacaaatattttaaaattatttcctttgtaccttgtcctgttccaggagctgaggtcaaagaagaaaaagtttgtggtctcctggagagtttgtggggttaattttaagtggtatcattacactcaggcaatctagtcaggcggtgcaaatatctacattaggtgaaatggacatggagtaactgtgtccaggggacgcgataatttattgttcaaggagtagcagaaggactgctgttaatggtacttaagcaccttagtacaaaaaggagggctttttgtttgtttgtttttgcccgtgtcttatctctccaagagattacaaattccctgctaagttttgtagctacttaaattttagaattaaagaaactgaacacaaaattt

SEQ ID NO: 10374 - protein, 37 aa, Homo sapiens
MVLKHLSTKRRAFCLFVFARVLSLQEITNSLLSFVAT

SEQ ID NO: 10375 - DNA, 2739 bp, Homo sapiens
ataaacccgtgcgaggactccagaagtaggagcagtttacggaagtgtaacgttgaggcccttcttgtgtatctggagaaaatagaggttctgactcctcaggagcaaaaaacataacctgaagagggaggaagtggatttggggttcaccatttcttggggcacacttgattgaaaactgagacttctgaagagaaggccagaagatacaaagacagaccatcccagttgaatgctgtcttccaagaacagaagaaaatgatccaggcccaggaatccataacactggaggatgtggctgtggacttcacttgggaggagtggcaactcctgggcgctgctcagaaggacctgtaccgggatgtgatgttggagaactacagcaacctggtggcagtggggtatcaagccagcaaaccggatgcactcttcaagttggaacaaggagaacaactgtggacaattgaagatggaatccacagtggagcctgttcagacatatggaaagttgatcatgtgctggagcgcttgcagagtgaaagcctggtgaacagaaggaaaccatgtcatgaacatgatgcatttgaaaatattgttcattgcagcaaaagtcagtttctgttagggcaaaatcatgatatatttgacttacgtggaaaaagtttgaaatccaatttaactttagttaaccagagcaaaggctatgaaataaagaactctgttgagtttactggaaatggggactcctttcttcatgctaaccatgaacgacttcatactgcaattaaattccctgcaagtcaaaaactcatcagcactaagtcccaattcatcagtcccaagcatcagaaaacacgaaaattagagaagcatcatgtgtgcagtgaatgtgggaaagccttcatcaagaagtcttggctaactgatcaccaggtaatgcatacaggagagaaaccccacagatgtagtctatgtgagaaagccttctccagaaagttcatgcttactgaacatcagcgaactcatacaggagaaaaaccttatgaatgccctgaatgtggcaaagcctttctcaagaaatcacggctcaacatacatcagaaaacacataccggagagaaaccctatatatgcagtgaatgtggaaaaggcttcatccagaaaggaaatctcattgtacaccagcgaattcatacaggtgagaaaccttatatatgcaatgaatgtggaaaaggcttcattcagaagacgtgtctcatagcacatcagagatttcacacaggaaagacgccctttgtgtgcagtgaatgtggaaaatcctgttctcagaaatcaggtctcattaaacatcaaagaattcacacaggagagaaaccctttgaatgtagtgaatgtgggaaagcctttagcacaaagcaaaagctcattgtccatcaaaggactcatacaggagagagaccctatggctgtaacgagtgtgggaaagcgtttgcgtatatgtcgtgtctggttaagcataagagaatacacacaagggagaaacaagaggcagccaaggtggaaaatcctcctgcagagaggcacagctcattacacaccagtgatgtcatgcaggagaaaaactctgctaacggggcgactacacaagtgccttctgtggcccctcagacatcattaaacatcagcggcctcctcgcaaacaggaacgtagtccttgtgggacagccagtggtcagatgtgcagcctcaggagataacagaggatttgcacaggacagaaaccttgtgaatgcagtgaatgtggttgtgccttccgtgatcaattatgtcttattttatgttacagaaaacccataggaagaaaactcagatctatgtggaaaagggttgagcaaaaatttgtagttcattatgtggccgaaaagcatacactgagagaacatgtataaggctgagatagcctgataaactcatcctattaaaatgtatgctgtgatacacaggcaaatttgatgttaacctaagcacatacacagcaattgctcgactgtgtcaattaaatgagtaaaggaagcccaagtacttttaagtggaggaaatgaagtactgtgaatttttaaaacagatgagataattggtgtcgggagtgttgcagtgactgaaaagcttcataaggggcagttggtgggaaagggctaatactgtaatggtggaatgtgggacacatatgtgtcaattcagtttccttagaccagtgccagtgtggaggattaattgaaaaccaggaccataaactttcagaactttgtattatgcagagggatctgtgaaactagtcaatttgtttcattaaacaaatattttaaaattatttcctttgtaccttgtcctgttccaggagctgaggtcaaagaagaaaaagtttgtggtctcctggagagtttgtggggttaattttaagtggtatcattacactcaggcaatctagtcaggcggtgcaaatatctacattaggtgaaatggacatggagtaactgtgtccaggggacgcgataatttattgttcaaggagtagcagaaggactgctgttaatggtacttaagcaccttagtacaaaaaggagggctttttgtttgtttgtttttgcccgtgtcttatctctccaagagattacaaattccctgctaagttttgtagctacttaaattttagaattaaagaaactgaacacaaaattt

SEQ ID NO: 10376 - protein, 532 aa, Homo sapiens; identical to SEQ ID NO: 1595

SEQ ID NO: 10377 - DNA, 2370 bp, Homo sapiens
ataaacccgtgcgaggactccagaagtaggagcagtttacggaagtgtaacgttgaggcccttcttgtgtatctggagaaaatagaggttctgactcctcaggagcaaaaaacataacctgaagagggaggaagtggatttggggttcaccatttcttggggcacacttgattgaaaactgagacttctgaagagaaggccagaagatacaaagacagaccatcccagttgaatgctgtcttccaagaacagaagaaaatgatccaggcccaggaatccataacactggaggatgtggctgtggacttcacttgggaggagtggcaactcctgggcgctgctcagaaggacctgtaccgggatgtgatgttggagaactacagcaacctggtggcagtggggtatcaagccagcaaaccggatgcactcttcaagttggaacaaggagaacaactgtggacaattgaagatggaatccacagtggagcctgttcagacatatggaaagttgatcatgtgctggagcgcttgcagagtgaaagcctggtgaacagaaggaaaccatgtcatgaacatgatgcatttgaaaatattgttcattgcagcaaaagtcagtttctgttagggcaaaatcatgatatatttgacttacgtggaaaaagtttgaaatccaatttaactttagttaaccagagcaaaggctatgaaataaagaactctgttgagtttactggaaatggggactcctttcttcatgctaaccatgaacgacttcatactgcaattaaattccctgcaagtcaaaaactcatcagcactaagtcccaattcatcagtcccaagcatcagaaaacacgaaaattagagaagcatcatgtgtgcagtgaatgtgggaaagccttcatcaagaagtcttggctaactgatcaccaggtaatgcatacaggagagaaaccccacagatgtagtctatgtgagaaagccttctccagaaagttcatgcttactgaacatcagcgaactcatacaggagaaaaaccttatgaatgccctgaatgtggcaaagcctttctcaagaaatcacggctcaacatacatcagaaaacacataccggagagaaaccctatatatgcagtgaatgtggaaaaggcttcatccagaaaggaaatctcattgtacaccagcgaattcatacaggtgagaaaccttatatatgcaatgaatgtggaaaaggcttcattcagaagacgtgtctcatagcacatcagagatttcacacaggaaagacgccctttgtgtgcagtgaatgtggaaaatcctgttctcagaaatcaggtctcattaaacatcaaagaattcacacaggagagaaaccctttgaatgtagtgaatgtgggaaagcctttagcacaaagcaaaagctcattgtccatcaaaggactcatacaggagagagaccctatggctgtaacgagtgtgggaaagcgtttgcgtatatgtcgtgtctggttaagcataagagaatacacacaagggagaaacaagaggcagccaaggtggaaaatcctcctgcagagaggcacagctcattacacaccagtgatgtcatgcaggagaaaaactctgctaacggggcgactacacaagtgccttctgtggcccctcagacatcattaaacatcagcggcctcctcgcaaacaggaacgtagtccttgtgggacagccagtggtcagatgtgcagcctcaggagataacagaggatttgcacaggacagaaaccttgtgaatgcagtgaatgtggttgtgccttccgtgatcaattatgtcttattttatgttacagaaaacccataggaagaaaactcagatctatgtggaaaagggttgagcaaaaatttgtagttcattatgtggccgaaaagcatacactgagagaacatgtataaggctgagatagcctgataaactcatcctattaaaatgtatgctgtgatacacaggcaaatttgatgttaacctaagcacatacacagcaattgctcgactgtgtcaattaaatgagtaaaggaagcccaagtacttttaagtggaggaaatgaagtactgtgaatttttaaaacagatgagataattggtgtcgggagtgttgcagtgactgaaaagcttcataaggggcagttggtgggaaagggctaatactgtaatggtggaatgtgggacacatatgtgtcaattcagtttccttagaccagtgccagtgtggaggattaattgaaaaccaggaccataaactttcagaactttgtattatgcagagggatctgtgaaactagtcaatttgtttcattaaacaaatattttaaaatt

SEQ ID NO: 10378 - protein, 532 aa, Homo sapiens; identical to SEQ ID NO: 1595

SEQ ID NO: 10379 - DNA, 879 bp, Homo sapiens
ataaacccgtgcgaggactccagaagtaggagcagtttacggaagtgtaacgttgaggcccttcttgtgtatctggagaaaatagaggttctgactcctcaggagcaaaaaacataacctgaagagggaggaagtggatttggggttcaccatttcttggggcacacttgattgaaaactgagacttctgaagagaaggccagaagatacaaagacagaccatcccagttgaatgctgtcttccaagaacagaagaaaatgatccaggcccaggaatccataacactggaggatgtggctgtggacttcacttgggaggagtggcaactcctgggcgctgctcagaaggacctgtaccgggatgtgatgttggagaactacagcaacctggtggcagtggggtatcaagccagcaaaccggatgcactcttcaagttggaacaaggagaacaactgtggacaattgaagatggaatccacagtggagcctgttcagagtcttgctctgtgcccaggctggagcgcaatggtgtgaacttggctcaccgcaacctccacctcctggattcaagcgattcttgtgcctatccccaacaccagcaccatacctggcacacggtgatcattcagtaagagtatgtggaatgaatgaatctgttctttggacgaaatgggcctccagcctctggtctgctggtcacagtgaattgcttgtattttaaggtctgttttgcaaggcacatttagaaagcagccaaatctgtctttattattagtgatctaaccttgttttatgctaactgctttcaccttttagtttgtttatactattactttttgccaatgtgcaaggaacattaaacatggagttttatttac

SEQ ID NO: 10380 - protein, 124 aa, Homo sapiens
MIQAQESITLEDVAVDFTWEEWQLLGAAQKDLYRDVMLENYSNLVAVGYQASKPDALFKLEQGEQLWTIEDGIHSGACSESCSVPRLERNGVNLAHRNLHLLDSSDSCAYPQHQHHTWHTVIIQ

SEQ ID NO: 10381 - DNA, 972 bp, Homo sapiens
gaagtgtaacgttgaggcccttcttgtgtatctggagaaaatagaggttctgactcctcaggagcaaaaaacataacctgaagagggaggaagtggatttggggttcaccatttcttggggcacacttgattgaaaactgagacttctgaagagaaggccagaagatacaaagacagaccatcccagttgaatgctgtcttccaagaacagaagaaaatgatccaggcccaggaatccataacactggaggatgtggctgtggacttcacttgggaggagtggcaactcctgggcgctgctcagaaggacctgtaccgggatgtgatgttggagaactacagcaacctggtggcagtggggtatcaagccagcaaaccggatgcactcttcaagttggaacaaggagaacaactgtggacaattgaagatggaatccacagtggagcctgttcaggtgagagaacccacaagacagaaggctatggaagtcacattctagacagtcagagaaggcagcacagctgtgaagggggtttgaggatatgtaaacagttcctctactcatctgtctcccagtgtgagaccagtttttctttgtaggaatttagagttaaaaaaaaacaaaacaaaacaaaaactctttatctcctcagagatctgattattttatctacatattgtttgtttgcctgcataattttcttcttcctcgggtttcaagtatttcccttcttcatgttgttccacctctcttgttacgaaattccaccttccaggcctctttccaaagaggaaactttgaagtcctcactgttttcggactcccacccctttgtgccccttggctaatgctgacctcccctcctaacacctcccctgtgatggatgtggcttcctcagggtaaactggactttcgctgtgccttggcttccttcgcttctctttttccttattcttaggttctccaaag

SEQ ID NO: 10382 - protein, 127 aa, Homo sapiens
MIQAQESITLEDVAVDFTWEEWQLLGAAQKDLYRDVMLENYSNLVAVGYQASKPDALFKLEQGEQLWTIEDGIHSGACSGERTHKTEGYGSHILDSQRRQHSCEGGLRICKQFLYSSVSQCETSFSL

SEQ ID NO: 10383 - DNA, 1619 bp, Homo sapiens
agtttacggaagtgtaacgttgaggcccttcttgtgtatctggagaaaatagaggttctgactcctcaggagcaaaaaacataacctgaagagggaggaagtggatttggggttcaccatttcttggggcacacttgattgaaaactgagacttctgaagagaaggccagaagatacaaagacagaccatcccagttgaatgctgtcttccaagaacagaagaaaatgatccaggcccaggtaactgacttttggtttgttttattctttcctttgttccataatagatttgtagaagcctataaacatcaatttcactaatataaaaagtataaatttcaaaaagcaggatctggagagaagtaagcttagtttttaaactcaatatcatgcaaaatagtaggataaggaatataatgttcatagcattaacactaaattatgaattttgtgacaccatgcatggctggaggatcctgtggattatattagctgtcagcttgcatctaatatctctgacagccaatgtcacaagaaaatcataatttacatggtatgtcctgtttttgaagataaaacagattacttcctgggggttgccattatttcatggcactttggtctcaggaaatttcttcagtggttcttcctagagttgatgtggtggatggtgtccagaatagcagccttctcataaattcagatgcaggtttcctgtggctgtttcttgaaggactccttatatactgttacggaatagactaagcaaacagtaaacacagggaccaacacaagttaatttcagccttgtggcagtctggatttaacttggaataaaacctagacatcctgggaatatggcaggattccaggactttcaaatggttctcaatgaacagatagctgaactggtgtttgaatatagatttggagacagggagttgaaagtgatattgtctgaacaggacttggattggagtttacagatttcctttagactttcaccttgtagaaaatgccaagtccttattgtatagtaaataattgaacaaagggagttttggcctttgtgttcaagctaatggagggtgagctctgggcttctggaatatcttgctaatggtagtgtctttgtttgcttgggtcctttggccactggacagcctaaaaatacgaactatgatagatctgtgatctatgataggccagaaacttccagaactagaggctaaagttaaaacctgacttctgggagggtgtggacctaagatcagccacataggtcatctgtgattgtgtcccagtaaagtaagaaagtacacatatcaaaaaataaatttcggctgggcgcggtggctcatggctgtaatccagcactttgggagaccgaggtgggtggatcacgaggtctggagatcgagaccatcctggctcacaccgtgaaaccctgtctctactaaaaatacaaaaaattggtcgggtgtggtggcaggtgcctgtagtcccagctactcgggaggctgaggcaggagaatggcgtgaacccaggagacggaaattgcagtgagccgaaatggtgccactgcactccagcctgggtgacagagagactccatctc

SEQ ID NO: 10384 - protein, 59 aa, Homo sapiens [sequence omitted]

SEQ ID NO: 10385 - DNA, 3691 bp, Homo sapiens
gtcgccgtcaggcactgaggaggccgagagatgaggccggagcccaccaagttctgggaagttctttctgacacaagtaagataacatctctgccatggaatccctaacactggaggatgtggctgtggacttcacctgggaggagtggcagttcctgagccctgctcagaaggacctgtaccgggacgtgatgttggagaactacagcaacctggtggcagtggggtatcaagccagcaaaccagatgcactctccaaattggaacgaggagaagaaacttgcacaacagaagatgaaatctactctcgaatctgttctgattcaggaggtgcatcaggaggtgcatatgcagaaatcaggaaaattgatgatcctctgcagcatcacttgcaaaatcaaagtattcagaagagtgtgaaacagtgccatgaacagaatatgtttggaaatattgttaatcagaacaaaggtcatttcctgctgaagcaagattgtgatacgtttgacttacatgaaaaacctttaaaatcaaatttaagttttgaaaaccagaaaaggagctctggcctaaagaactctgctgagtttaatagagatgggaaatccctttttcatgctaaccataaacaattttatactgaaatgaagtttcctgcaattgcaaaacctattaataagtcccagttcattaagcaacagagaactcacaacatagagaatgcccatgtatgcagtgaatgtgggaaagccttcctcaagttgtctcagtttattgatcatcagagagttcacactggagaaaaacctcatgtatgcagtatgtgtgggaaagctttctccagaaaatccagactaatggaccatcagagaactcatacagaactgaaacattatgaatgcactgaatgtgacaaaaccttcctcaagaaatcacagctcaatatacatcagaaaactcatatgggagggaaaccttacacatgtagccaatgtgggaaagccttcatcaagaagtgtcggctcatttatcatcaacgaactcatacaggagagaaaccccatggatgcagtgtatgtgggaaggccttctctacaaagttcagtctcactacacatcagaaaactcatacaggagaaaaaccttatatatgtagtgaatgtggaaaaggcttcattgagaagaggcgtcttactgcacatcatcgaactcatactggtgagaaaccctttatatgcaataaatgtgggaaaggcttcaccttgaagaacagtcttatcacacatcagcaaactcatacaggagagaaattatatacatgtagtgaatgtggaaaaggcttttcaatgaagcactgtctcatggtacatcaacgaactcatactggagagaaaccttataaatgcaatgagtgtggaaagggcttcgctttgaagagcccactcatcagacatcagcgaacacatactggagagaaaccctatgtatgcaccgaatgtcgaaaaggtttcaccatgaagagtgacctcattgtacatcagcgaactcatactgcagagaagccatatatatgcaatgattgtggaaaaggcttcactgtgaagagccgccttattgtgcatcagcgaactcatactggagaaaaaccctatgtatgtggtgagtgtggaaaaggctttccagcaaagatccggctaatgggacatcaacgaactcatacaggagagaaaccttatatatgcaatgaatgtggaaagggcttcaccatgaagagtactctcagtatacatcagcaaactcatactggagagaagccatacaaatgcaatgaatgtgataaaaccttcaggaagaagacatgcctcatacaacatcagcgatttcacacaggaaagacttcctttgcatgtactgaatgtggaaaattctctttgcgcaaaaatgatcttattacacatcagagaattcacacaggagagaaaccgtacaaatgcagtgactgcgggaaagccttcactacaaaatcagggctcaatgttcatcaaagaaaacatacaggagagaggccctatggatgtagtgattgtgggaaagcttttgcgcacttgtctatccttgttaaacacaggagaattcacaggtagtcattttgggaaagcctcttgccagatgtaggcccttaagatatctgcaaagaagagtaatttcatgaatgcagactacatggttgtttatttagtgatcagttacttcatgttttgtgtcagagaaaacatgtacaaaacatttgagaaaatattttaggacattatgtctaaaaattgtatactgagaaaaatcctatgaatgtggcagactataaaagcctttggtgggaagataaaccccctcagaagtgatcatagatcatgaataaactactaattcgtggaaatgtaataattataggaacgtctttgcccaaaaataaaacttcaacagattgagagagttcacactggagaaatactttcctctggcaaacccctgtggcagggttttcagtaaaatgttttgcctcatcgtgtgctaggaaataatgcagaaaaaacttatgaaaacattcaatgtagaagacttttaggaaaatatcagagaatttaatgaaggaaagaagccttggcaaaatgatggatgagagctttctgtcacaattctaaccttaacagataatatgcctcatgtgcatttgggaacaggatagcttgagccatattcctagttgccttgtcactgattttatacattttaaattgtgacttcctctaatcacgaactaaaatttaatattgtatataataccggagtattttatgcctgcctcattttattatatgattagctcctgcatttctttggttctaagtttgtgttatttcagaataactaaagtacttcagaatgaaactggatacagtatattcagttcataagtgtaattgaccatacttgaatatgtttaagtttataagtaacatcaggtgttatgaaattaatataaataagatgtttttgtaagtttttattttgaaataagtttagattcacaaaatcttaccaaaatattccagagttcttgcccttaacccagcttcttccaaagataacaacttacataagcatagttcattaccaaatacaggaaagtgaaattgttacaatactgttaactacagaatttatttggaaatcaccagttttaacatgcatgcatttttgtttgttttttatatgtagctttaagaaatcttaacacatatattgattcatgtcaccaccaccgtaatcgagattcagaatgttgcatcaatgcaaactccctcatgctccttgtttatagtcacaacctctcctcagccctaacccttggcaatcagaaatcttttcatctttagttttgtcattagtagcatgttataaaaatggaatcatacagcatgtacccttttggtattggctatttcaactaaagcagattaacctgaaatccatccaagttgttctgcatatcattgttctgtttttattggccactaataatctatgatacgaatataccactatttgtttattcacccactgaaggacattagttttgttcccggtttttcttactgttacaaataaaaatcctatgaacatttgtacacac

SEQ ID NO: 10386 - protein, 682 aa, Homo sapiens
MESLTLEDVAVDFTWEEWQFLSPAQKDLYRDVMLENYSNLVAVGYQASKPDALSKLERGEETCTTEDEIYSRICSDSGGASGGAYAEIRKIDDPLQHHLQNQSIQKSVKQCHEQNMFGNIVNQNKGHFLLKQDCDTFDLHEKPLKSNLSFENQKRSSGLKNSAEFNRDGKSLFHANHKQFYTEMKFPAIAKPINKSQFIKQQRTHNIENAHVCSECGKAFLKLSQFIDHQRVHTGEKPHVCSMCGKAFSRKSRLMDHQRTHTELKHYECTECDKTFLKKSQLNIHQKTHMGGKPYTCSQCGKAFIKKCRLIYHQRTHTGEKPHGCSVCGKAFSTKFSLTTHQKTHTGEKPYICSECGKGFIEKRRLTAHHRTHTGEKPFICNKCGKGFTLKNSLITHQQTHTGEKLYTCSECGKGFSMKHCLMVHQRTHTGEKPYKCNECGKGFALKSPLIRHQRTHTGEKPYVCTECRKGFTMKSDLIVHQRTHTAEKPYICNDCGKGFTVKSRLIVHQRTHTGEKPYVCGECGKGFPAKIRLMGHQRTHTGEKPYICNECGKGFTMKSTLSIHQQTHTGEKPYKCNECDKTFRKKTCLIQHQRFHTGKTSFACTECGKFSLRKNDLITHQRIHTGEKPYKCSDCGKAFTTKSGLNVHQRKHTGERPYGCSDCGKAFAHLSILVKHRRIHR

SEQ ID NO: 10387 - DNA, 4052 bp, Homo sapiens
aacgctgggaacgcctccgaccctggatagtcgccgtcaggcactgaggaggccgagagatgaggccggagcccaccaagttctgggaacccacaggtgctgagaacaagagaaatcaagtgaaggaaggaggcggagtttccaagacttgggtgtcatcatttctggggacatccttgattggagattgaagtttttgaaccgaaatttagagctgattcagaagagacaaatacagaacgtccaagttagcagtcatttcccaaatttaggagacaatgatgcaggcccaggaatccctaacactggaggatgtggctgtggacttcacctgggaggagtggcagttcctgagccctgctcagaaggacctgtaccgggacgtgatgttggagaactacagcaacctggtggcagtggggtatcaagccagcaaaccagatgcactctccaaattggaacgaggagaagaaacttgcacaacagaagatgaaatctactctcgaatctgttctgattcaggaggtgcatcaggaggtgcatatgcagaaatcaggaaaattgatgatcctctgcagcatcacttgcaaaatcaaagtattcagaagagtgtgaaacagtgccatgaacagaatatgtttggaaatattgttaatcagaacaaaggtcatttcctgctgaagcaagattgtgatacgtttgacttacatgaaaaacctttaaaatcaaatttaagttttgaaaaccagaaaaggagctctggcctaaagaactctgctgagtttaatagagatgggaaatccctttttcatgctaaccataaacaattttatactgaaatgaagtttcctgcaattgcaaaacctattaataagtcccagttcattaagcaacagagaactcacaacatagagaatgcccatgtatgcagtgaatgtgggaaagccttcctcaagttgtctcagtttattgatcatcagagagttcacactggagaaaaacctcatgtatgcagtatgtgtgggaaagctttctccagaaaatccagactaatggaccatcagagaactcatacagaactgaaacattatgaatgcactgaatgtgacaaaaccttcctcaagaaatcacagctcaatatacatcagaaaactcatatgggagggaaaccttacacatgtagccaatgtgggaaagccttcatcaagaagtgtcggctcatttatcatcaacgaactcatacaggagagaaaccccatggatgcagtgtatgtgggaaggccttctctacaaagttcagtctcactacacatcagaaaactcatacaggagaaaaaccttatatatgtagtgaatgtggaaaaggcttcattgagaagaggcgtcttactgcacatcatcgaactcatactggtgagaaaccctttatatgcaataaatgtgggaaaggcttcaccttgaagaacagtcttatcacacatcagcaaactcatacaggagagaaattatatacatgtagtgaatgtggaaaaggcttttcaatgaagcactgtctcatggtacatcaacgaactcatactggagagaaaccttataaatgcaatgagtgtggaaagggcttcgctttgaagagcccactcatcagacatcagcgaacacatactggagagaaaccctatgtatgcaccgaatgtcgaaaaggtttcaccatgaagagtgacctcattgtacatcagcgaactcatactgcagagaagccatatatatgcaatgattgtggaaaaggcttcactgtgaagagccgccttattgtgcatcagcgaactcatactggagaaaaaccctatgtatgtggtgagtgtggaaaaggctttccagcaaagatccggctaatgggacatcaacgaactcatacaggagagaaaccttatatttgcaatgagtgtggaaaaggcttcactgagaagagtcatctcaatgtacatcggcgcactcatacaggagagaaaccctatgtatgcagtgaatgtggcaaaggcttaactgggaaaagcatgctcattgcacatcagcgaactcatactggggagaaaccttatatatgcaatgaatgtggaaagggcttcaccatgaagagtactctcagtatacatcagcaaactcatactggagagaagccatacaaatgcaatgaatgtgataaaaccttcaggaagaagacatgcctcatacaacatcagcgatttcacacaggaaagacttcctttgcatgtactgaatgtggaaaattctctttgcgcaaaaatgatcttattacacatcagagaattcacacaggagagaaaccgtacaaatgcagtgactgcgggaaagccttcactacaaaatcagggctcaatgttcatcaaagaaaacatacaggagagaggccctatggatgtagtgattgtgggaaagcttttgcgcacttgtctatccttgttaaacacaggagaattcacaggtagtcattttgggaaagcctcttgccagatgtaggcccttaagatatctgcaaagaagagtaatttcatgaatgcagactacatggttgtttatttagtgatcagttacttcatgttttgtgtcagagaaaacatgtacaaaacatttgagaaaatattttaggacattatgtctaaaaattgtatactgagaaaaatcctatgaatgtggcagactataaaagcctttggtgggaagataaaccccctcagaagtgatcatagatcatgaataaactactaattcgtggaaatgtaataattataggaacgtctttgcccaaaaataaaacttcaacagattgagagagttcacactggagaaatactttcctctggcaaacccctgtggcagggttttcagtaaaatgttttgcctcatcgtgtgctaggaaataatgcagaaaaaacttatgaaaacattcaatgtagaagacttttaggaaaatatcagagaatttaatgaaggaaagaagccttggcaaaatgatggatgagagctttctgtcacaattctaaccttaacagataatatgcctcatgtgcatttgggaacaggatagcttgagccatattcctagttgccttgtcactgattttatacattttaaattgtgacttcctctaatcacgaactaaaatttaatattgtatataataccggagtattttatgcctgcctcattttattatatgattagctcctgcatttctttggttctaagtttgtgttatttcagaataactaaagtacttcagaatgaaactggatacagtatattcagttcataagtgtaattgaccatacttgaatatgtttaagtttataagtaacatcaggtgttatgaaattaatataaataagatgtttttgtaagtttttattttgaaataagtttagattcacaaaatcttaccaaaatattccagagttcttgcccttaacccagcttcttccaaagataacaacttacataagcatagttcattaccaaatacaggaaagtgaaattgttacaatactgttaactacagaatttatttggaaatcaccagttttaacatgcatgcatttttgtttgttttttatatgtagctttaagaaatcttaacacatatattgattcatgtcaccaccaccgtaatcgagattcagaatgttgcatcaatgcaaactccctcatgctccttgtttatagtcacaacctctcctcagccctaacccttggcaatcagaaatcttttcatctttagttttgtcattagtagcatgttataaaaatggaatcatacagcatgtacccttttggtattggctatttcaactaaagcagattaacctgaaatccatccaagttgttctgcatatcattgttctgtttttattggccactaataatctatgatacgaatataccactatttgtttattcacccactgaaggacattagttttgttcccggtttttcttactgttacaaataaaaatcctatgaacatttgtacac

SEQ ID NO: 10388 - protein, 742 aa, Homo sapiens
MMQAQESLTLEDVAVDFTWEEWQFLSPAQKDLYRDVMLENYSNLVAVGYQASKPDALSKLERGEETCTTEDEIYSRICSDSGGASGGAYAEIRKIDDPLQHHLQNQSIQKSVKQCHEQNMFGNIVNQNKGHFLLKQDCDTFDLHEKPLKSNLSFENQKRSSGLKNSAEFNRDGKSLFHANHKQFYTEMKFPAIAKPINKSQFIKQQRTHNIENAHVCSECGKAFLKLSQFIDHQRVHTGEKPHVCSMCGKAFSRKSRLMDHQRTHTELKHYECTECDKTFLKKSQLNIHQKTHMGGKPYTCSQCGKAFIKKCRLIYHQRTHTGEKPHGCSVCGKAFSTKFSLTTHQKTHTGEKPYICSECGKGFIEKRRLTAHHRTHTGEKPFICNKCGKGFTLKNSLITHQQTHTGEKLYTCSECGKGFSMKHCLMVHQRTHTGEKPYKCNECGKGFALKSPLIRHQRTHTGEKPYVCTECRKGFTMKSDLIVHQRTHTAEKPYICNDCGKGFTVKSRLIVHQRTHTGEKPYVCGECGKGFPAKIRLMGHQRTHTGEKPYICNECGKGFTEKSHLNVHRRTHTGEKPYVCSECGKGLTGKSMLIAHQRTHTGEKPYICNECGKGFTMKSTLSIHQQTHTGEKPYKCNECDKTFRKKTCLIQHQRFHTGKTSFACTECGKFSLRKNDLITHQRIHTGEKPYKCSDCGKAFTTKSGLNVHQRKHTGERPYGCSDCGKAFAHLSILVKHRRIHR

SEQ ID NO: 10389 - DNA, 4058 bp, Homo sapiens
aaacgctgggaacgcctccgaccctggatagtcgccgtcaggcactgaggaggccgagagatgaggccggagcccaccaagttctgggaagttctttctgacacaagtaagataacatctctgccatgcccacaggtgctgagaacaagagaaatcaagtgaaggaaggaggcggagtttccaagacttgggtgtcatcatttctggggacatccttgattggagattgaagtttttgaaccgaaatttagagctgattcagaagagacaaatacagaacgtccaagttagcagtcatttcccaaatttaggagacaatgatgcaggcccaggaatccctaacactggaggatgtggctgtggacttcacctgggaggagtggcagttcctgagccctgctcagaaggacctgtaccgggacgtgatgttggagaactacagcaacctggtggcagtggggtatcaagccagcaaaccagatgcactctccaaattggaacgaggagaagaaacttgcacaacagaagatgaaatctactctcgaatctgttctgaaatcaggaaaattgatgatcctctgcagcatcacttgcaaaatcaaagtattcagaagagtgtgaaacagtgccatgaacagaatatgtttggaaatattgttaatcagaacaaaggtcatttcctgctgaagcaagattgtgatacgtttgacttacatgaaaaacctttaaaatcaaatttaagttttgaaaaccagaaaaggagctctggcctaaagaactctgctgagtttaatagagatgggaaatccctttttcatgctaaccataaacaattttatactgaaatgaagtttcctgcaattgcaaaacctattaataagtcccagttcattaagcaacagagaactcacaacatagagaatgcccatgtatgcagtgaatgtgggaaagccttcctcaagttgtctcagtttattgatcatcagagagttcacactggagaaaaacctcatgtatgcagtatgtgtgggaaagctttctccagaaaatccagactaatggaccatcagagaactcatacagaactgaaacattatgaatgcactgaatgtgacaaaaccttcctcaagaaatcacagctcaatatacatcagaaaactcatatgggagggaaaccttacacatgtagccaatgtgggaaagccttcatcaagaagtgtcggctcatttatcatcaacgaactcatacaggagagaaaccccatggatgcagtgtatgtgggaaggccttctctacaaagttcagtctcactacacatcagaaaactcatacaggagaaaaaccttatatatgtagtgaatgtggaaaaggcttcattgagaagaggcgtcttactgcacatcatcgaactcatactggtgagaaaccctttatatgcaataaatgtgggaaaggcttcaccttgaagaacagtcttatcacacatcagcaaactcatacaggagagaaattatatacatgtagtgaatgtggaaaaggcttttcaatgaagcactgtctcatggtacatcaacgaactcatactggagagaaaccttataaatgcaatgagtgtggaaagggcttcgctttgaagagcccactcatcagacatcagcgaacacatactggagagaaaccctatgtatgcaccgaatgtcgaaaaggtttcaccatgaagagtgacctcattgtacatcagcgaactcatactgcagagaagccatatatatgcaatgattgtggaaaaggcttcactgtgaagagccgccttattgtgcatcagcgaactcatactggagaaaaaccctatgtatgtggtgagtgtggaaaaggctttccagcaaagatccggctaatgggacatcaacgaactcatacaggagagaaaccttatatttgcaatgagtgtggaaaaggcttcactgagaagagtcatctcaatgtacatcggcgcactcatacaggagagaaaccctatgtatgcagtgaatgtggcaaaggcttaactgggaaaagcatgctcattgcacatcagcgaactcatactggggagaaaccttatatatgcaatgaatgtggaaagggcttcaccatgaagagtactctcagtatacatcagcaaactcatactggagagaagccatacaaatgcaatgaatgtgataaaaccttcaggaagaagacatgcctcatacaacatcagcgatttcacacaggaaagacttcctttgcatgtactgaatgtggaaaattctctttgcgcaaaaatgatcttattacacatcagagaattcacacaggagagaaaccgtacaaatgcagtgactgcgggaaagccttcactacaaaatcagggctcaatgttcatcaaagaaaacatacaggagagaggccctatggatgtagtgattgtgggaaagcttttgcgcacttgtctatccttgttaaacacaggagaattcacaggtagtcattttgggaaagcctcttgccagatgtaggcccttaagatatctgcaaagaagagtaatttcatgaatgcagactacatggttgtttatttagtgatcagttacttcatgttttgtgtcagagaaaacatgtacaaaacatttgagaaaatattttaggacattatgtctaaaaattgtatactgagaaaaatcctatgaatgtggcagactataaaagcctttggtgggaagataaaccccctcagaagtgatcatagatcatgaataaactactaattcgtggaaatgtaataattataggaacgtctttgcccaaaaataaaacttcaacagattgagagagttcacactggagaaatactttcctctggcaaacccctgtggcagggttttcagtaaaatgttttgcctcatcgtgtgctaggaaataatgcagaaaaaacttatgaaaacattcaatgtagaagacttttaggaaaatatcagagaatttaatgaaggaaagaagccttggcaaaatgatggatgagagctttctgtcacaattctaaccttaacagataatatgcctcatgtgcatttgggaacaggatagcttgagccatattcctagttgccttgtcactgattttatacattttaaattgtgacttcctctaatcacgaactaaaatttaatattgtatataataccggagtattttatgcctgcctcattttattatatgattagctcctgcatttctttggttctaagtttgtgttatttcagaataactaaagtacttcagaatgaaactggatacagtatattcagttcataagtgtaattgaccatacttgaatatgtttaagtttataagtaacatcaggtgttatgaaattaatataaataagatgtttttgtaagtttttattttgaaataagtttagattcacaaaatcttaccaaaatattccagagttcttgcccttaacccagcttcttccaaagataacaacttacataagcatagttcattaccaaatacaggaaagtgaaattgttacaatactgttaactacagaatttatttggaaatcaccagttttaacatgcatgcatttttgtttgttttttatatgtagctttaagaaatcttaacacatatattgattcatgtcaccaccaccgtaatcgagattcagaatgttgcatcaatgcaaactccctcatgctccttgtttatagtcacaacctctcctcagccctaacccttggcaatcagaaatcttttcatctttagttttgtcattagtagcatgttataaaaatggaatcatacagcatgtacccttttggtattggctatttcaactaaagcagattaacctgaaatccatccaagttgttctgcatatcattgttctgtttttattggccactaataatctatgatacgaatataccactatttgtttattcacccactgaaggacattagttttgttcccggtttttcttactgttacaaataaaaatcctatgaacatttgtacac

SEQ ID NO: 10390 - protein, 731 aa, Homo sapiens
MMQAQESLTLEDVAVDFTWEEWQFLSPAQKDLYRDVMLENYSNLVAVGYQASKPDALSKLERGEETCTTEDEIYSRICSEIRKIDDPLQHHLQNQSIQKSVKQCHEQNMFGNIVNQNKGHFLLKQDCDTFDLHEKPLKSNLSFENQKRSSGLKNSAEFNRDGKSLFHANHKQFYTEMKFPAIAKPINKSQFIKQQRTHNIENAHVCSECGKAFLKLSQFIDHQRVHTGEKPHVCSMCGKAFSRKSRLMDHQRTHTELKHYECTECDKTFLKKSQLNIHQKTHMGGKPYTCSQCGKAFIKKCRLIYHQRTHTGEKPHGCSVCGKAFSTKFSLTTHQKTHTGEKPYICSECGKGFIEKRRLTAHHRTHTGEKPFICNKCGKGFTLKNSLITHQQTHTGEKLYTCSECGKGFSMKHCLMVHQRTHTGEKPYKCNECGKGFALKSPLIRHQRTHTGEKPYVCTECRKGFTMKSDLIVHQRTHTAEKPYICNDCGKGFTVKSRLIVHQRTHTGEKPYVCGECGKGFPAKIRLMGHQRTHTGEKPYICNECGKGFTEKSHLNVHRRTHTGEKPYVCSECGKGLTGKSMLIAHQRTHTGEKPYICNECGKGFTMKSTLSIHQQTHTGEKPYKCNECDKTFRKKTCLIQHQRFHTGKTSFACTECGKFSLRKNDLITHQRIHTGEKPYKCSDCGKAFTTKSGLNVHQRKHTGERPYGCSDCGKAFAHLSILVKHRRIHR

SEQ ID NO: 10391 - DNA, 4135 bp, Homo sapiens
aacgctgggaacgcctccgaccctggatagtcgccgtcaggcactgaggaggccgagagatgaggccggagcccaccaagttctgggaacccacaggtgctgagaacaagagaaatcaagtgaaggaaggaggcggagtttccaagacttgggtgtcatcatttctggggacatccttgattggagattgaagtttttgaaccgaaatttagagctgattcagaagagacaaatacagaacgtccaagttagcagtcatttcccaaatttaggagacaatgatgcaggcccaggaatccctaacactggaggatgtggctgtggacttcacctgggaggagtggcagttcctgagccctgctcagaaggacctgtaccgggacgtgatgttggagaactacagcaacctggtggcagtggggtatcaagccagcaaaccagatgcactctccaaattggaacgaggagaagaaacttgcacaacagaagatgaaatctactctcgaatctgttctgattcaggaggtgcatcaggaggtgcatatgcaggtttgtctcatggatatattgcctgatgccgaggattcactagaagctcaatcctgtcacccaagtagtgaacatagtaccaaatagaaatcaggaaaattgatgatcctctgcagcatcacttgcaaaatcaaagtattcagaagagtgtgaaacagtgccatgaacagaatatgtttggaaatattgttaatcagaacaaaggtcatttcctgctgaagcaagattgtgatacgtttgacttacatgaaaaacctttaaaatcaaatttaagttttgaaaaccagaaaaggagctctggcctaaagaactctgctgagtttaatagagatgggaaatccctttttcatgctaaccataaacaattttatactgaaatgaagtttcctgcaattgcaaaacctattaataagtcccagttcattaagcaacagagaactcacaacatagagaatgcccatgtatgcagtgaatgtgggaaagccttcctcaagttgtctcagtttattgatcatcagagagttcacactggagaaaaacctcatgtatgcagtatgtgtgggaaagctttctccagaaaatccagactaatggaccatcagagaactcatacagaactgaaacattatgaatgcactgaatgtgacaaaaccttcctcaagaaatcacagctcaatatacatcagaaaactcatatgggagggaaaccttacacatgtagccaatgtgggaaagccttcatcaagaagtgtcggctcatttatcatcaacgaactcatacaggagagaaaccccatggatgcagtgtatgtgggaaggccttctctacaaagttcagtctcactacacatcagaaaactcatacaggagaaaaaccttatatatgtagtgaatgtggaaaaggcttcattgagaagaggcgtcttactgcacatcatcgaactcatactggtgagaaaccctttatatgcaataaatgtgggaaaggcttcaccttgaagaacagtcttatcacacatcagcaaactcatacaggagagaaattatatacatgtagtgaatgtggaaaaggcttttcaatgaagcactgtctcatggtacatcaacgaactcatactggagagaaaccttataaatgcaatgagtgtggaaagggcttcgctttgaagagcccactcatcagacatcagcgaacacatactggagagaaaccctatgtatgcaccgaatgtcgaaaaggtttcaccatgaagagtgacctcattgtacatcagcgaactcatactgcagagaagccatatatatgcaatgattgtggaaaaggcttcactgtgaagagccgccttattgtgcatcagcgaactcatactggagaaaaaccctatgtatgtggtgagtgtggaaaaggctttccagcaaagatccggctaatgggacatcaacgaactcatacaggagagaaaccttatatttgcaatgagtgtggaaaaggcttcactgagaagagtcatctcaatgtacatcggcgcactcatacaggagagaaaccctatgtatgcagtgaatgtggcaaaggcttaactgggaaaagcatgctcattgcacatcagcgaactcatactggggagaaaccttatatatgcaatgaatgtggaaagggcttcaccatgaagagtactctcagtatacatcagcaaactcatactggagagaagccatacaaatgcaatgaatgtgataaaaccttcaggaagaagacatgcctcatacaacatcagcgatttcacacaggaaagacttcctttgcatgtactgaatgtggaaaattctctttgcgcaaaaatgatcttattacacatcagagaattcacacaggagagaaaccgtacaaatgcagtgactgcgggaaagccttcactacaaaatcagggctcaatgttcatcaaagaaaacatacaggagagaggccctatggatgtagtgattgtgggaaagcttttgcgcacttgtctatccttgttaaacacaggagaattcacaggtagtcattttgggaaagcctcttgccagatgtaggcccttaagatatctgcaaagaagagtaatttcatgaatgcagactacatggttgtttatttagtgatcagttacttcatgttttgtgtcagagaaaacatgtacaaaacatttgagaaaatattttaggacattatgtctaaaaattgtatactgagaaaaatcctatgaatgtggcagactataaaagcctttggtgggaagataaaccccctcagaagtgatcatagatcatgaataaactactaattcgtggaaatgtaataattataggaacgtctttgcccaaaaataaaacttcaacagattgagagagttcacactggagaaatactttcctctggcaaacccctgtggcagggttttcagtaaaatgttttgcctcatcgtgtgctaggaaataatgcagaaaaaacttatgaaaacattcaatgtagaagacttttaggaaaatatcagagaatttaatgaaggaaagaagccttggcaaaatgatggatgagagctttctgtcacaattctaaccttaacagataatatgcctcatgtgcatttgggaacaggatagcttgagccatattcctagttgccttgtcactgattttatacattttaaattgtgacttcctctaatcacgaactaaaatttaatattgtatataataccggagtattttatgcctgcctcattttattatatgattagctcctgcatttctttggttctaagtttgtgttatttcagaataactaaagtacttcagaatgaaactggatacagtatattcagttcataagtgtaattgaccatacttgaatatgtttaagtttataagtaacatcaggtgttatgaaattaatataaataagatgtttttgtaagtttttattttgaaataagtttagattcacaaaatcttaccaaaatattccagagttcttgcccttaacccagcttcttccaaagataacaacttacataagcatagttcattaccaaatacaggaaagtgaaattgttacaatactgttaactacagaatttatttggaaatcaccagttttaacatgcatgcatttttgtttgttttttatatgtagctttaagaaatcttaacacatatattgattcatgtcaccaccaccgtaatcgagattcagaatgttgcatcaatgcaaactccctcatgctccttgtttatagtcacaacctctcctcagccctaacccttggcaatcagaaatcttttcatctttagttttgtcattagtagcatgttataaaaatggaatcatacagcatgtacccttttggtattggctatttcaactaaagcagattaacctgaaatccatccaagttgttctgcatatcattgttctgtttttattggccactaataatctatgatacgaatataccactatttgtttattcacccactgaaggacattagttttgttcccggtttttcttactgttacaaataaaaatcctatgaacatttgt

SEQ ID NO: 10392 - protein, 98 aa, Homo sapiens
MMQAQESLTLEDVAVDFTWEEWQFLSPAQKDLYRDVMLENYSNLVAVGYQASKPDALSKLERGEETCTTEDEIYSRICSDSGGASGGAYAGLSHGYIA

SEQ ID NO: 10393 - DNA, 3815 bp, Homo sapiens
aaacgctgggaacgcctccgaccctggatagtcgccgtcaggcactgaggaggccgagagatgaggccggagcccaccaagttctgggaagaatccctaacactggaggatgtggctgtggacttcacctgggaggagtggcagttcctgagccctgctcagaaggacctgtaccgggacgtgatgttggagaactacagcaacctggtggcagtggggtatcaagccagcaaaccagatgcactctccaaattggaacgaggagaagaaacttgcacaacagaagatgaaatctactctcgaatctgttctgattcaggaggtgcatcaggaggtgcatatgcagaaatcaggaaaattgatgatcctctgcagcatcacttgcaaaatcaaagtattcagaagagtgtgaaacagtgccatgaacagaatatgtttggaaatattgttaatcagaacaaaggtcatttcctgctgaagcaagattgtgatacgtttgacttacatgaaaaacctttaaaatcaaatttaagttttgaaaaccagaaaaggagctctggcctaaagaactctgctgagtttaatagagatgggaaatccctttttcatgctaaccataaacaattttatactgaaatgaagtttcctgcaattgcaaaacctattaataagtcccagttcattaagcaacagagaactcacaacatagagaatgcccatgtatgcagtgaatgtgggaaagccttcctcaagttgtctcagtttattgatcatcagagagttcacactggagaaaaacctcatgtatgcagtatgtgtgggaaagctttctccagaaaatccagactaatggaccatcagagaactcatacagaactgaaacattatgaatgcactgaatgtgacaaaaccttcctcaagaaatcacagctcaatatacatcagaaaactcatatgggagggaaaccttacacatgtagccaatgtgggaaagccttcatcaagaagtgtcggctcatttatcatcaacgaactcatacaggagagaaaccccatggatgcagtgtatgtgggaaggccttctctacaaagttcagtctcactacacatcagaaaactcatacaggagaaaaaccttatatatgtagtgaatgtggaaaaggcttcattgagaagaggcgtcttactgcacatcatcgaactcatactggtgagaaaccctttatatgcaataaatgtgggaaaggcttcaccttgaagaacagtcttatcacacatcagcaaactcatacaggagagaaattatatacatgtagtgaatgtggaaaaggcttttcaatgaagcactgtctcatggtacatcaacgaactcatactggagagaaaccttataaatgcaatgagtgtggaaagggcttcgctttgaagagcccactcatcagacatcagcgaacacatactggagagaaaccctatgtatgcaccgaatgtcgaaaaggtttcaccatgaagagtgacctcattgtacatcagcgaactcatactgcagagaagccatatatatgcaatgattgtggaaaaggcttcactgtgaagagccgccttattgtgcatcagcgaactcatactggagaaaaaccctatgtatgtggtgagtgtggaaaaggctttccagcaaagatccggctaatgggacatcaacgaactcatacaggagagaaaccttatatttgcaatgagtgtggaaaaggcttcactgagaagagtcatctcaatgtacatcggcgcactcatacaggagagaaaccctatgtatgcagtgaatgtggcaaaggcttaactgggaaaagcatgctcattgcacatcagcgaactcatactggggagaaaccttatatatgcaatgaatgtggaaagggcttcaccatgaagagtactctcagtatacatcagcaaactcatactggagagaagccatacaaatgcaatgaatgtgataaaaccttcaggaagaagacatgcctcatacaacatcagcgatttcacacaggaaagacttcctttgcatgtactgaatgtggaaaattctctttgcgcaaaaatgatcttattacacatcagagaattcacacaggagagaaaccgtacaaatgcagtgactgcgggaaagccttcactacaaaatcagggctcaatgttcatcaaagaaaacatacaggagagaggccctatggatgtagtgattgtgggaaagcttttgcgcacttgtctatccttgttaaacacaggagaattcacaggtagtcattttgggaaagcctcttgccagatgtaggcccttaagatatctgcaaagaagagtaatttcatgaatgcagactacatggttgtttatttagtgatcagttacttcatgttttgtgtcagagaaaacatgtacaaaacatttgagaaaatattttaggacattatgtctaaaaattgtatactgagaaaaatcctatgaatgtggcagactataaaagcctttggtgggaagataaaccccctcagaagtgatcatagatcatgaataaactactaattcgtggaaatgtaataattataggaacgtctttgcccaaaaataaaacttcaacagattgagagagttcacactggagaaatactttcctctggcaaacccctgtggcagggttttcagtaaaatgttttgcctcatcgtgtgctaggaaataatgcagaaaaaacttatgaaaacattcaatgtagaagacttttaggaaaatatcagagaatttaatgaaggaaagaagccttggcaaaatgatggatgagagctttctgtcacaattctaaccttaacagataatatgcctcatgtgcatttgggaacaggatagcttgagccatattcctagttgccttgtcactgattttatacattttaaattgtgacttcctctaatcacgaactaaaatttaatattgtatataataccggagtattttatgcctgcctcattttattatatgattagctcctgcatttctttggttctaagtttgtgttatttcagaataactaaagtacttcagaatgaaactggatacagtatattcagttcataagtgtaattgaccatacttgaatatgtttaagtttataagtaacatcaggtgttatgaaattaatataaataagatgtttttgtaagtttttattttgaaataagtttagattcacaaaatcttaccaaaatattccagagttcttgcccttaacccagcttcttccaaagataacaacttacataagcatagttcattaccaaatacaggaaagtgaaattgttacaatactgttaactacagaatttatttggaaatcaccagttttaacatgcatgcatttttgtttgttttttatatgtagctttaagaaatcttaacacatatattgattcatgtcaccaccaccgtaatcgagattcagaatgttgcatcaatgcaaactccctcatgctccttgtttatagtcacaacctctcctcagccctaacccttggcaatcagaaatcttttcatctttagttttgtcattagtagcatgttataaaaatggaatcatacagcatgtacccttttggtattggctatttcaactaaagcagattaacctgaaatccatccaagttgttctgcatatcattgttctgtttttattggccactaataatctatgatacgaatataccactatttgtttattcacccactgaaggacattagttttgttcccggtttttcttact

SEQ ID NO: 10394 - protein, 747 aa, Homo sapiens
MRPEPTKFWEESLTLEDVAVDFTWEEWQFLSPAQKDLYRDVMLENYSNLVAVGYQASKPDALSKLERGEETCTTEDEIYSRICSDSGGASGGAYAEIRKIDDPLQHHLQNQSIQKSVKQCHEQNMFGNIVNQNKGHFLLKQDCDTFDLHEKPLKSNLSFENQKRSSGLKNSAEFNRDGKSLFHANHKQFYTEMKFPAIAKPINKSQFIKQQRTHNIENAHVCSECGKAFLKLSQFIDHQRVHTGEKPHVCSMCGKAFSRKSRLMDHQRTHTELKHYECTECDKTFLKKSQLNIHQKTHMGGKPYTCSQCGKAFIKKCRLIYHQRTHTGEKPHGCSVCGKAFSTKFSLTTHQKTHTGEKPYICSECGKGFIEKRRLTAHHRTHTGEKPFICNKCGKGFTLKNSLITHQQTHTGEKLYTCSECGKGFSMKHCLMVHQRTHTGEKPYKCNECGKGFALKSPLIRHQRTHTGEKPYVCTECRKGFTMKSDLIVHQRTHTAEKPYICNDCGKGFTVKSRLIVHQRTHTGEKPYVCGECGKGFPAKIRLMGHQRTHTGEKPYICNECGKGFTEKSHLNVHRRTHTGEKPYVCSECGKGLTGKSMLIAHQRTHTGEKPYICNECGKGFTMKSTLSIHQQTHTGEKPYKCNECDKTFRKKTCLIQHQRFHTGKTSFACTECGKFSLRKNDLITHQRIHTGEKPYKCSDCGKAFTTKSGLNVHQRKHTGERPYGCSDCGKAFAHLSILVKHRRIHR

SEQ ID NO: 10395 - DNA, 3986 bp, Homo sapiens
aaacgctgggaacgcctccgaccctggatagtcgccgtcaggcactgaggaggccgagagatgaggccggagcccaccaagttctgggaacccacaggtgctgagaacaagagaaatcaagtgaaggaaggaggcggagtttccaagacttgggtgtcatcatttctggggacatccttgattggagattgaagtttttgaaccgaaatttagagctgattcagaagagacaaatacagaacgtccaagttagcagtcatttcccaaatttaggagacaatgatgcaggcccaggaatccctaacactggaggatgtggctgtggacttcacctgggaggagtggcagttcctgagccctgctcagaaggacctgtaccgggacgtgatgttggagaactacagcaacctggtggcagtggggtatcaagccagcaaaccagatgcactctccaaattggaacgaggagaagaaacttgcacaacagaagatgaaatctactctcgaatctgttctgaaatcaggaaaattgatgatcctctgcagcatcacttgcaaaatcaaagtattcagaagagtgtgaaacagtgccatgaacagaatatgtttggaaatattgttaatcagaacaaaggtcatttcctgctgaagcaagattgtgatacgtttgacttacatgaaaaacctttaaaatcaaatttaagttttgaaaaccagaaaaggagctctggcctaaagaactctgctgagtttaatagagatgggaaatccctttttcatgctaaccataaacaattttatactgaaatgaagtttcctgcaattgcaaaacctattaataagtcccagttcattaagcaacagagaactcacaacatagagaatgcccatgtatgcagtgaatgtgggaaagccttcctcaagttgtctcagtttattgatcatcagagagttcacactggagaaaaacctcatgtatgcagtatgtgtgggaaagctttctccagaaaatccagactaatggaccatcagagaactcatacagaactgaaacattatgaatgcactgaatgtgacaaaaccttcctcaagaaatcacagctcaatatacatcagaaaactcatatgggagggaaaccttacacatgtagccaatgtgggaaagccttcatcaagaagtgtcggctcatttatcatcaacgaactcatacaggagagaaaccccatggatgcagtgtatgtgggaaggccttctctacaaagttcagtctcactacacatcagaaaactcatacaggagaaaaaccttatatatgtagtgaatgtggaaaaggcttcattgagaagaggcgtcttactgcacatcatcgaactcatactggtgagaaaccctttatatgcaataaatgtgggaaaggcttcaccttgaagaacagtcttatcacacatcagcaaactcatacaggagagaaattatatacatgtagtgaatgtggaaaaggcttttcaatgaagcactgtctcatggtacatcaacgaactcatactggagagaaaccttataaatgcaatgagtgtggaaagggcttcgctttgaagagcccactcatcagacatcagcgaacacatactggagagaaaccctatgtatgcaccgaatgtcgaaaaggtttcaccatgaagagtgacctcattgtacatcagcgaactcatactgcagagaagccatatatatgcaatgattgtggaaaaggcttcactgtgaagagccgccttattgtgcatcagcgaactcatactggagaaaaaccctatgtatgtggtgagtgtggaaaaggctttccagcaaagatccggctaatgggacatcaacgaactcatacaggagagaaaccttatatttgcaatgagtgtggaaaaggcttcactgagaagagtcatctcaatgtacatcggcgcactcatacaggagagaaaccctatgtatgcagtgaatgtggcaaaggcttaactgggaaaagcatgctcattgcacatcagcgaactcatactggggagaaaccttatatatgcaatgaatgtggaaagggcttcaccatgaagagtactctcagtatacatcagcaaactcatactggagagaagccatacaaatgcaatgaatgtgataaaaccttcaggaagaagacatgcctcatacaacatcagcgatttcacacaggaaagacttcctttgcatgtactgaatgtggaaaattctctttgcgcaaaaatgatcttattacacatcagagaattcacacaggagagaaaccgtacaaatgcagtgactgcgggaaagccttcactacaaaatcagggctcaatgttcatcaaagaaaacatacaggagagaggccctatggatgtagtgattgtgggaaagcttttgcgcacttgtctatccttgttaaacacaggagaattcacaggtagtcattttgggaaagcctcttgccagatgtaggcccttaagatatctgcaaagaagagtaatttcatgaatgcagactacatggttgtttatttagtgatcagttacttcatgttttgtgtcagagaaaacatgtacaaaacatttgagaaaatattttaggacattatgtctaaaaattgtatactgagaaaaatcctatgaatgtggcagactataaaagcctttggtgggaagataaaccccctcagaagtgatcatagatcatgaataaactactaattcgtggaaatgtaataattataggaacgtctttgcccaaaaataaaacttcaacagattgagagagttcacactggagaaatactttcctctggcaaacccctgtggcagggttttcagtaaaatgttttgcctcatcgtgtgctaggaaataatgcagaaaaaacttatgaaaacattcaatgtagaagacttttaggaaaatatcagagaatttaatgaaggaaagaagccttggcaaaatgatggatgagagctttctgtcacaattctaaccttaacagataatatgcctcatgtgcatttgggaacaggatagcttgagccatattcctagttgccttgtcactgattttatacattttaaattgtgacttcctctaatcacgaactaaaatttaatattgtatataataccggagtattttatgcctgcctcattttattatatgattagctcctgcatttctttggttctaagtttgtgttatttcagaataactaaagtacttcagaatgaaactggatacagtatattcagttcataagtgtaattgaccatacttgaatatgtttaagtttataagtaacatcaggtgttatgaaattaatataaataagatgtttttgtaagtttttattttgaaataagtttagattcacaaaatcttaccaaaatattccagagttcttgcccttaacccagcttcttccaaagataacaacttacataagcatagttcattaccaaatacaggaaagtgaaattgttacaatactgttaactacagaatttatttggaaatcaccagttttaacatgcatgcatttttgtttgttttttatatgtagctttaagaaatcttaacacatatattgattcatgtcaccaccaccgtaatcgagattcagaatgttgcatcaatgcaaactccctcatgctccttgtttatagtcacaacctctcctcagccctaacccttggcaatcagaaatcttttcatctttagttttgtcattagtagcatgttataaaaatggaatcatacagcatgtacccttttggtattggctatttcaactaaagcagattaacctgaaatccatccaagttgttctgcatatcattgttctgtttttattggccactaataatctatgatacgaatataccactatttgtttattcacccactgaaggacattagttttgttcccggtttttcttact

SEQ ID NO: 10396 - protein, 731 aa, Homo sapiens; identical to SEQ ID NO: 10390

SEQ ID NO: 10397 - DNA, 3931 bp, Homo sapiens
aaacgctgggaacgcctccgaccctggatagtcgccgtcaggcactgaggaggccgagagatgaggccggagcccaccaagttctgggaagttctttctgacacaagtaagataacatctctgccatgcccacaggtgctgagaacaagagaaatcaagtgaaggaaggaggcggagtttccaagacttgggtgtcatcatttctggggacatccttgattggagattgaagtttttgaaccgaaatttagagctgattcagaagagacaaatacagaacgtccaagttagcagtcatttcccaaatttaggagacaatgatgcaggcccaggaatccctaacactggaggatgtggctgtggacttcacctgggaggagtggcagttcctgagccctgctcagaaggacctgtaccgggacgtgatgttggagaactacagcaacctggtggcagtggggtatcaagccagcaaaccagatgcactctccaaattggaacgaggagaagaaacttgcacaacagaagatgaaatctactctcgaatctgttctgattcaggaggtgcatcaggaggtgcatatgcagaaatcaggaaaattgatgatcctctgcagcatcacttgcaaaatcaaagtattcagaagagtgtgaaacagtgccatgaacagaatatgtttggaaatattgttaatcagaacaaaggtcatttcctgctgaagcaagattgtgatacgtttgacttacatgaaaaacctttaaaatcaaatttaagttttgaaaaccagaaaaggagctctggcctaaagaactctgctgagtttaatagagatgggaaatccctttttcatgctaaccataaacaattttatactgaaatgaagtttcctgcaattgcaaaacctattaataagtcccagttcattaagcaacagagaactcacaacatagagaatgcccatgtatgcagtgaatgtgggaaagccttcctcaagttgtctcagtttattgatcatcagagagttcacactggagaaaaacctcatgtatgcagtatgtgtgggaaagctttctccagaaaatccagactaatggaccatcagagaactcatacagaactgaaacattatgaatgcactgaatgtgacaaaaccttcctcaagaaatcacagctcaatatacatcagaaaactcatatgggagggaaaccttacacatgtagccaatgtgggaaagccttcatcaagaagtgtcggctcatttatcatcaacgaactcatacaggagagaaaccccatggatgcagtgtatgtgggaaggccttctctacaaagttcagtctcactacacatcagaaaactcatacaggagaaaaaccttatatatgtagtgaatgtggaaaaggcttcattgagaagaggcgtcttactgcacatcatcgaactcatactggtgagaaaccctttatatgcaataaatgtgggaaaggcttcaccttgaagaacagtcttatcacacatcagcaaactcatacaggagagaaattatatacatgtagtgaatgtggaaaaggcttttcaatgaagcactgtctcatggtacatcaacgaactcatactggagagaaaccttataaatgcaatgagtgtggaaagggcttcgctttgaagagcccactcatcagacatcagcgaacacatactggagagaaaccctatgtatgcaccgaatgtcgaaaaggtttcaccatgaagagtgacctcattgtacatcagcgaactcatactgcagagaagccatatatatgcaatgattgtggaaaaggcttcactgtgaagagccgccttattgtgcatcagcgaactcatactggagaaaaaccctatgtatgtggtgagtgtggaaaaggctttccagcaaagatccggctaatgggacatcaacgaactcatacaggagagaaaccttatatttgcaatgagtgtggaaaaggcttcactgagaagagtcatctcaatgtacatcggcgcactcatacaggagagaaaccctatgtatgcagtgaatgtggcaaaggcttaactgggaaaagcatgctcattgcacatcagcgaactcatactggggagaaaccttatatatgcaatgaatgtggaaagggcttcaccatgaagagtactctcagtatacatcagcaaactcatactggagagaagccatacaaatgcaatgaatgtgataaaaccttcaggaagaagacatgcctcatacaacatcagcgatttcacacaggaaagacttcctttgcatgtactgaatgtggaaaattctctttgcgcaaaaatgatcttattacacatcagagaattcacacaggagagaaaccgtacaaatgcagtgactgcgggaaagccttcactacaaaatcagggctcaatgttcatcaaagaaaacatacaggagagaggccctatggatgtagtgattgtgggaaagcttttgcgcacttgtctatccttgttaaacacaggagaattcacaggtagtcattttgggaaagcctcttgccagatgtaggcccttaagatatctgcaaagaagagtaatttcatgaatgcagactacatggttgtttatttagtgatcagttacttcatgttttgtgtcagagaaaacatgtacaaaacatttgagaaaatattttaggacattatgtctaaaaattgtatactgagaaaaatcctatgaatgtggcagactataaaagcctttggtgggaagataaaccccctcagaagtgatcatagatcatgaataaactactaattcgtggaaatgtaataattataggaacgtctttgcccaaaaataaaacttcaacagattgagagagttcacactggagaaatactttcctctggcaaacccctgtggcagggttttcagtaaaatgttttgcctcatcgtgtgctaggaaataatgcagaaaaaacttatgaaaacattcaatgtagaagacttttaggaaaatatcagagaatttaatgaaggaaagaagccttggcaaaatgatggatgagagctttctgtcacaattctaaccttaacagataatatgcctcatgtgcatttgggaacaggatagcttgagccatattcctagttgccttgtcactgattttatacattttaaattgtgacttcctctaatcacgaactaaaatttaatattgtatataataccggagtattttatgcctgcctcattttattatatgattagctcctgcatttctttggttctaagtttgtgttatttcagaataactaaagtacttcagaatgaaactggatacagtatattcagttcataagtgtaattgaccatacttgaatatgtttaagtttataagtaacatcaggtgttatgaaattaatataaataagatgtttttgtaagtttttattttgaaataagtttagattcacaaaatcttaccaaaatattccagagttcttgcccttaacccagcttcttccaaagataacaacttacataagcatagttcattaccaaatacaggaaagtgaaattgttacaatactgttaactacagaatttatttggaaatcaccagttttaacatgcatgcatttttgtttgttttttatatgtagctttaagaaatcttaacacatatattgattcatgtcaccaccaccgtaatcgagattcagaatgttgcatcaatgcaaactccctcatgctccttgtttatagtcacaacctctcctcagccctaacccttggcaatcagaaatcttttcatctttagttttgtcattagtagcatgttataaaaatggaatcatacagcatgtacccttttggtattggctatttcaactaaagcagattaacctgaaatcc

SEQ ID NO: 10398 - protein, 742 aa, Homo sapiens; identical to SEQ ID NO: 10388

SEQ ID NO: 10399 - DNA, 1382 bp, Homo sapiens
ggagaaaaaccctatgtatgtggtgagtgtggaaaaggctttccagcaaagatccggctaatgggacatcaacgaactcatacaggagagaaaccttatatttgcaatgagtgtggaaaaggcttcactgagaagagtcatctcaatgtacatcggcgcactcatacaggagagaaaccctatgtatgcagtgaatgtggcaaaggcttaactgggaaaagcatgctcattgcacatcagcgaactcatactggggagaaaccttatatatgcaatgaatgtggaaagggcttcaccatgaagagtactctcagtatacatcagcaaactcatactggagagaagccatacaaatgcaatgaatgtgataaaaccttcaggaagaagacatgcctcatacaacatcagcgatttcacacaggaaagacttcctttgcatgtactgaatgtggaaaattctctttgcgcaaaaatgatcttattacacatcagagaattcacacaggagagaaaccgtacaaatgcagtgactgcgggaaagccttcactacaaaatcagggctcaatgttcatcaaagaaaacatacaggagagaggccctatggatgtagtgattgtgggaaagcttttgcgcacttgtctatccttgttaaacacaggagaattcacaggtagtcattttgggaaagcctcttgccagatgtaggcccttaagatatctgcaaagaagagtaatttcatgaatgcagactacatggttgtttatttagtgatcagttacttcatgttttgtgtcagagaaaacatgtacaaaacatttgagaaaatattttaggacattatgtctaaaaattgtatactgagaaaaatcctatgaatgtggcagactataaaagcctttggtgggaagataaaccccctcagaagtgatcatagatcatgaataaactactaattcgtggaaatgtaataattataggaacgtctttgcccaaaaataaaacttcaacagattgagagagttcacactggagaaatactttcctctggcaaacccctgtggcagggttttcagtaaaatgttttgcctcatcgtgtgctaggaaataatgcagaaaaaacttatgaaaacattcaatgtagaagacttttaggaaaatatcagagaatttaatgaaggaaagaagcatgcatgcatttttgtttgttttttatatgtagctttaagaaatcttaacacatatattgattcatgtcaccaccaccgtaatcgagattcagaatgttgcatcaatgcaaactccctcatgctccttgtttatagtcacaacctctcctcagccctaacccttggcaatcagaaatcttttcatctttagttt

SEQ ID NO: 10400 - protein, 204 aa, Homo sapiens
MGHQRTHTGEKPYICNECGKGFTEKSHLNVHRRTHTGEKPYVCSECGKGLTGKSMLIAHQRTHTGEKPYICNECGKGFTMKSTLSIHQQTHTGEKPYKCNECDKTFRKKTCLIQHQRFHTGKTSFACTECGKFSLRKNDLITHQRIHTGEKPYKCSDCGKAFTTKSGLNVHQRKHTGERPYGCSDCGKAFAHLSILVKHRRIHR

SEQ ID NO: 10401 - DNA, 809 bp, Homo sapiens
aaacgctgggaacgcctccgaccctggatagtcgccgtcaggcactgaggaggccgagagatgaggccggagcccaccaagttctgggaagttctttctgacacaagtaagataacatctctgccatgcccacaggtgctgagaacaagagaaatcaagtgaaggaaggaggcggagtttccaagacttgggtgtcatcatttctggggacatccttgattggagattgaagtttttgaaccgaaatttagagctgattcagaagagacaaatacagaacgtccaagttagcagtcatttcccaaatttaggagacaatgatgcaggcccaggaatccctaacactggaggatgtggctgtggacttcacctgggaggagtggcagttcctgagccctgctcagaaggacctgtaccgggacgtgatgttggagaactacagcaacctggtggcagtggggtatcaagccagcaaaccagatgcactctccaaattggaacgaggagaagaaacttgcacaacagaagatgaaatctactctcgaatctgttctgattcaggaggtgcatcaggaggtgcatatgcaggtttgtctcatggatatattgcctgatgccgaggattcactagaagctcaatcctgtcacccaagtagtgaacatagtaccaaataggtggttcttcaacccttgccttcctcccttcttcctcttggagtccccagtgtctattgttcctgtcttgatgtccctgtgttcccaatgtttagctcttgcctacaagtgagaatacacagtatttggttttc

SEQ ID NO: 10402 - protein, 98 aa, Homo sapiens; identical to SEQ ID NO: 10392

SEQ ID NO: 10403 - DNA, 1616 bp, Homo sapiens
gtgcccatggtgctccagctaaggctccactctcagctataatgggcacaaagggcgccgccatcttttttccacagcaggctgaatagaatgccactgcgccgtgttggccttggctgggcacccgactcttgagtgtcccttgcaacgaagagagaaaggcactgaggtgactaagagtgattcccacagccattatggccgctcctgtcagaaacgctgcgatgggcgcagccctgtgacctcatagagcggcgcccgcagtctgaactcgcgatcccgggcaggctccgtggtcctcgcctcgcttcacggtctttaccgctcagcttcccggagtccgcgcaggagcgcgtctgaataggaagcgttttcggacgtggatgcggcgttttgtcgctgccagtggtgtctggagaggttcgggctcggtcctcaggtcctggctcccagaagcaaaataactcaagtgaagcaatgaaggaagaagaaggaggttgctggccttggatatcataatttctggggacaactttaagtggacactaatatttctgactaggaaaacttcaaaaacttcatggcaaatgcagaagagacaaagacgtatagtccatgttatccactattttctgagcacagaagaaaatgatcaagacccaggaatcactgaccctggaggatgtggctgtggaattcagctgggaggagtggcagctcctggacactgctcagaagaacctgtaccgggatgtgatggtggagaactataaccacctagtatcactggggtatcaaactagcaaaccagatgtactctccaagttggcacatggacaagaaccatggacaacagatgctaaaattcagaataaaaattgtccaggaatcgggaaagttgacagtcatctgcaagagcactctccaaaccaaagacttctgaagagcgtgcagcaatgcaatggacagaatacacttagaaatattgtacatctcagcaagacacattttcctatagtgcaaaatcatgatacatttgacttgtacagaaaaaatttgaaatcaagtttaagtttaatcaaccagaagagaagacatggaataaataaccctgttgagtttattggagagacagggtctcttgagaggccgaggcaggcggatcacttgaggtcagaagttcaagaccagcctggccaacgtggcgaaaccctgtgtctactaaaaatacacacaaaaaattagctgggtatggtgctgggctgttgggagccgaaggcccatgggatgtgaccaactcagcattccactggaggctatatgatcaaacagcaaactttatcatgaatgcacgatgtgggcaaactcatgactgcttccgctgccagaaggtttgctgagggcaatcgcttcctggtgctgagctccttgaggttatctactgggacatctagagaatgccatcttgcaaaccctactctggactgagtagctgaccccttcttccacccgccttctcactatctcttttgcctaataaatatggagggctgtgtaaagctcagggcccttgtccactagaggcaaggtgtcccctgatcccttcttccaaatat

SEQ ID NO: 10404 - protein, 198 aa, Homo sapiens
MIKTQESLTLEDVAVEFSWEEWQLLDTAQKNLYRDVMVENYNHLVSLGYQTSKPDVLSKLAHGQEPWTTDAKIQNKNCPGIGKVDSHLQEHSPNQRLLKSVQQCNGQNTLRNIVHLSKTHFPIVQNHDTFDLYRKNLKSSLSLINQKRRHGINNPVEFIGETGSLERPRQADHLRSEVQDQPGQRGETLCLLKIHTKN

SEQ ID NO: 10405 - DNA, 4744 bp, Homo sapiens
gtgcccatggtgctccagctaaggctccactctcagctataatgggcacaaagggcgccgccatcttttttccacagcaggctgaatagaatgccactgcgccgtgttggccttggctgggcacccgactcttgagtgtcccttgcaacgaagagagaaaggcactgaggtgactaagagtgattcccacagccattatggccgctcctgtcagaaacgctgcgatgggcgcagccctgtgacctcatagagcggcgcccgcagtctgaactcgcgatcccgggcaggctccgtggtcctcgcctcgcttcacggtctttaccgctcagcttcccggagtccgcgcaggagcgcgtctgaataggaagcgttttcggacgtggatgcggcgttttgtcgctgccagtggtgtctggagaggttcgggctcggtcctcaggtcctggctcccagaagcaaaataactcaagtgaagcaatgaaggaagaagaaggaggttgctggccttggatatcataatttctggggacaactttaagtggacactaatatttctgactaggaaaacttcaaaaacttcatggcaaatgcagaagagacaaagacgtatagtccatgttatccactattttctgagcacagaagaaaatgatcaagacccaggaatcactgaccctggaggatgtggctgtggaattcagctgggaggagtggcagctcctggacactgctcagaagaacctgtaccgggatgtgatggtggagaactataaccacctagtatcactggggtatcaaactagcaaaccagatgtactctccaagttggcacatggacaagaaccatggacaacagatgctaaaattcagaataaaaattgtccaggaatcgggaaagttgacagtcatctgcaagagcactctccaaaccaaagacttctgaagagcgtgcagcaatgcaatggacagaatacacttagaaatattgtacatctcagcaagacacattttcctatagtgcaaaatcatgatacatttgacttgtacagaaaaaatttgaaatcaagtttaagtttaatcaaccagaagagaagacatggaataaataaccctgttgagtttattggaggtgagaaaacacttctacatggtaagcatgaacgtacgcatactaaaactagattttctgaaaatgcaaaatgtatccatactaaattccaagtcttcaagcatcagaggactcagaaaattgagaaaccccatgcatgcattgaatgtgagcaaaccttccttaggaagtctcagctcatttaccatgagaacatttgtatacaagagaatcctggaagtggtcaatgtgagaaattatccagaagtgtcctgttcactaagcatctgaaaactaatacaacagacaaaatctgtatacccaatgaatatagaaaaggctctactgtgaagagtagtctcattacacatcaacaaacccatacagaagagaaatcctatatgtgcagtgagtgtggaaagggctttacaatgaagcgctatctaattgctcatcagcgaactcatagtggagagaaaccttatgtgtgcaaagaatgtggaaaaggtttcactgtgaagagcaatctcattgtacatcagcgaactcatacaggggagaaaccctatatatgcagtgaatgtggaaaaggcttcaccatgaagcgctatcttgttgtacatcagcgaactcatactggagagaaaccctatatgtgcagtgaatgtggaaaaggctttaccgtgaagagcaatctcattgtacatcagcgctcccacacaggagaaaaatcttacatatgcagcgaatgtggaaaaggcttcactgtcaaacgcactctcgttatacatcagcgaactcatacaggagagaaatcttacatatgcaatgaatgtggtaaaggcttcaccacaaagcgcactcttattatacatcagcgaactcatacaggagaaaaaccctatgaatgcaatgaatgtggtaaagccttcagccagaaaatatgcctcatacaacatgagagatgtcatacaggaaagactccctttgtatgtaccgagtgcggaaaatcctattcacacaaatatggcctcattacccatcagagaattcacacaggagagaaaccttatgagtgcaatgaatgtggaaaagccttcaccacaaagtcagtactcaatgtacatcaaagaacgcatacaggagagaggccgtatggatgcagtgattgtgagaaagccttctcccacttatcaaaccttgtcaaacataagaaaatgcacacaagagaaatgggtagaatcagtcaagttgaaaactcctgtaatggagagtcacagctccttccttataagtgaactcatgcagaagaaaaccctactagtgccgtgactatggaaatgccttttgtggcaactcagacttcattaaacatcagtgtgtttctagccaattggaacataaacatggtgctgcctgttgacagatgtgtgtctgtcctcaggaggtgaaataatttgccctagagatcaatttgatgaatacagtaaataaggtagtgcctttagtggtcttttacctcatattttctgtcaatgaaaatacgttgaataaactatattaatgtggagatgttttgagcaataatttctgctcatatgtctgaaaagtatacagagataaattctgtgaatacaaagactaagaaaagtcttctgtggaaagatagactttattatcaggtttcatcatagatttcaacgtaagtgagcttattgttgatagaaacatgatgaccatgacaaagtctttactcagaaatatgacctcagtgagtgtcaaagtttacactggaaaataactttaaggtgacagtattgatggcaggatttcagcgacgcactctgcttcatcatttgtcaggagatcacatagaaagtaaaattgttccgaacatgctatcaaataaatgtggaacacctttagcaaactatcaacagctcatgaaggcatgaaatgtggtgaaaatgatgaatatttgagtgctttttcttaataagtataaccttaaacatcagctaatacacctggtgtgcattttcagtcaggataccttaatcctcatttctagttgccttgccaatgattccataatatactgtctcattactgtttatttttactgttgtgtaaaattgtggtataatgagaaatacatttggtctttgttcctggttcctggcatagagctcctaaaacgcttagaatttcatgagtgataagagttttttggttttgttttgtttttgctgttgttgttattcatagcactgcccttttaattacacctgattatactactgaagtgacttatggttgctcccctagacagcctcagaatggggctgttctctaggaagatcaagtaactagaggatggagactttgtgccccatttctcccacctcctggaaggggaggggtgctggagattagattagacaatgagattaagagaactccaaatagcccaagagggtggtgcacccccaacttcataggggtagaggctcctgagattaggagaaccctttttaggctttactctatgtacctcttcatttgagtgttcatttgcgtcctttataaccagtaaaacaaagtacgctgttttcttgagttttgtgagccctgtagcaaattatcaaacctgagtagggcagtgggaactcggaatttatcaccattcagaactgcaggttgtccttgtgagtggcatctgatgtgggggaagtcttggactgagccccttaacttgtggagtctgcactaatttagactgcactaactaacttgcactgcactaacttggactgcactaacttgtggagtctgcactaacttggagaagttagtgtcagaattgaattatagaacacccagttgttcagaattgaattgtagaacacccaattggtgtgggagaattagagaatttatttgtgtcagaaaatactccagaacaaccaccccatattatgattagctcttttcctttctttggctctgagcttaattgtacattaagcaaacttaagtagaaaagaaactgaatatgttaaatatattaacaacatatttggacttgcttaactaagattatagagatgatcagtttataaaaccaccttcaacttaaataaatttgaactcgaaattgcaaaagcagtctagaggctttgctagtatccttcaaccaatttctagtaaaaatatcctatataaccataattatcaaaaccagaaaaacaacattggtaggatactataaagtactaatcttattttggatttgacgaatttttacatgtttttttcttttttagtttgtactctaagaagttgtattacatgtacagattcgtgtaaccactgcaaccacataaaactaatgaacacaaagtccctcatgctacctttttatgcttacactccatccaaacctaactctgccaaccacttttctcctatcagtataatttcatcatttcatgaatatgataaaaataaaattgtttttgtaaatggtttttataaattttatataaataagttatatgaatttttattgatagagagtatgtaagcttttggcatttttgtcactcagcaaattactcctaaggtttatatgag

SEQ ID NO: 10406 - protein, 585 aa, Homo sapiens; identical to SEQ ID NO: 1599

SEQ ID NO: 10407 - DNA, 3346 bp, Homo sapiens; identical to SEQ ID NO: 1600

SEQ ID NO: 10408 - protein, 204 aa, Homo sapiens; identical to SEQ ID NO: 1601

SEQ ID NO: 10409 - DNA, 749 bp, Homo sapiens
ttttcttctgcacttctgtctggagaggtctgtagccactgagggccccggtcggggccgctttgcaggtccctagtcaggaccgagcaggggagtaggataggaatccccgccgcacctttgtacgagcctgaccccttccgtgggtttgttcctgggtcgccgtcaagctgcggtctctcctcccccgcccttcagccccgcggtctccaggggcggcgccctgggtctggaacgcggttgccaccgaggaggcggcggccctgcgtctggaacgccgttgccaccgaggaggcggcggccccgagcgcgcctggaagccccgggcaaccggccagggtcgggcacaggtggggtccgtcaggccgcccggggctcctctgtcccagctctgcggcccagggggtgacgtgatggcggcagcggtgctgacggaccgggcccaggtgtctgtgacctttgatgatgtggctgtgactttcaccaaggaggagtgggggcagctggacctagctcagcggaccctgtaccaggaggtgatgctggaaaactgtgggctcctggtgtctctggcacctttacagacacacccaggatcaatacgttgcatccttcaatccaatcaagttgacacattaataaaaatcccagagcacactgagcattgaatactttctctttaaatttaacgactgttactggtgggaagtattattgtattgatccagaaataaaggctcagagaaatg

SEQ ID NO: 10410 - protein, 84 aa, Homo sapiens
MAAAVLTDRAQVSVTFDDVAVTFTKEEWGQLDLAQRTLYQEVMLENCGLLVSLAPLQTHPGSIRCILQSNQVDTLIKIPEHTEH

SEQ ID NO: 10411 - DNA, 703 bp, Homo sapiens
ttttcttctgcacttctgtctggagaggtctgtagccactgagggccccggtcggggccgctttgcaggtccctagtcaggaccgagcaggggagtaggataggaatccccgccgcacctttgtacgagcctgaccccttccgtgggtttgttcctgggtcgccgtcaagctgcggtctctcctcccccgcccttcagccccgcggtctccaggggcggcgccctgggtctggaacgcggttgccaccgaggaggcggcggccctgcgtctggaacgccgttgccaccgaggaggcggcggccccgagcgcgcctggaagccccgggcaaccggccagggtcgggcacaggtggggtccgtcaggccgcccggggctcctctgtcccagctctgcggcccagggggtgacgtgatggcggcagcggtgctgacggaccgggcccaggtgtctgtgacctttgatgatgtggctgtgactttcaccaaggaggagtgggggcagctggacctagctcagcggaccctgtaccaggaggtgatgctggaaaactgtgggctcctggtgtctctgggcgacaaaggaaaacctaagaccacagaacctaccacttgtgagccagccttgtcagagggaatctcacttcagggacaagtgacacaaggaaactcagtggactcacagttggggcaagccgaggatca

SEQ ID NO: 10412 - protein, 95 aa, Homo sapiens
MAAAVLTDRAQVSVTFDDVAVTFTKEEWGQLDLAQRTLYQEVMLENCGLLVSLGDKGKPKTTEPTTCEPALSEGISLQGQVTQGNSVDSQLGQAE

SEQ ID NO: 10413 - DNA, 4884 bp, Homo sapiens
ttttcttctgcacttctgtctggagaggtctgtagccactgagggccccggtcggggccgctttgcaggtccctagtcaggaccgagcaggggagtaggataggaatccccgccgcacctttgtacgagcctgaccccttccgtgggtttgttcctgggtcgccgtcaagctgcggtctctcctcccccgcccttcagccccgcggtctccaggggcggcgccctgggtctggaacgcggttgccaccgaggaggcggcggccctgcgtctggaacgccgttgccaccgaggaggcggcggccccgagcgcgcctggaagccccgggcaaccggccagggtcgggcacaggtggggtccgtcaggccgcccggggctcctctgtcccagctctgcggcccagggggtgacgtgatggcggcagcggtgctgacggaccgggcccaggtgtctgtgacctttgatgatgtggctgtgactttcaccaaggaggagtgggggcagctggacctagctcagcggaccctgtaccaggaggtgatgctggaaaactgtgggctcctggtgtctctggggtgtcctgttcccaaagctgagctgatctgccacctagagcatgggcaggagccatggaccaggaaggaagacctctcccaagacacctgtccaggcgacaaaggaaaacctaagaccacagaacctaccacttgtgagccagccttgtcagagggaatctcacttcagggacaagtgacacaaggaaactcagtggactcacagttggggcaagccgaggatcaggatgggctatcagaaatgcaggaaggacacttcagaccaggaatagatccccaggagaagtctcctgggaagatgagccctgaatgtgatggtttagggacagctgatggtgtgtgttcaaggattggacaggagcaagtctctccaggagatagagtccgtagccataactcatgtgagtcaggtaaagatcccatgattcaggaagaggaaaataactttaaatgcagtgaatgtggaaaagtatttaacaagaaacacctccttgctggacatgagaaaattcactctggagttaagccctatgaatgcacagaatgtgggaaaacctttattaagagcacacatctcctgcaacatcacatgatccacactggggagaggccctatgagtgcatggagtgtggaaaggccttcaaccgcaagtcataccttacccagcaccagcggattcacagtggagagaagccttacaagtgcaatgaatgcggaaaggccttcacccaccgctccaattttgtcttgcataacaggagacacactggagaaaaatcctttgtgtgcacagaatgtggccaagtctttcgacataggccaggctttctccggcactatgttgtccacagtggtgagaatccctatgagtgcttggagtgtggcaaggtcttcaaacacaggtcatatctcatgtggcaccagcagactcataccggggagaagccctatgagtgcagtgaatgtgggaaggtcttcttggagagtgcagccctgattcaccactatgtcatccacactggagagaagccctttgagtgcctcgagtgtgggaaggctttcaaccaccgatcctacctcaagaggcaccagcggattcacactggggagaagcccttcgtgtgcagtgaatgtggaaaggccttcacccactgctctacttttatcttgcataaaagggcccacactggagaaaagcctttcgagtgcaaagagtgtgggaaagcctttagcaatcggaaggacctcattcgccacttcagcatccacactggagagaagccctatgagtgcgtggagtgtggaaaggccttcacccgcatgtcgggcctcacgaggcacaagcggattcatagtggagagaagccctatgaatgtgttgagtgtgggaaatcgttttgctggagcacaaacctcattcgacatgccattatccacactggagagaagccctataaatgtagtgaatgtggaaaggccttcagtcgcagctcgtccctcactcagcatcaaaggatgcatactgggaaaaatcccatcagtgtaacagatgtgggaagaccttttacaagtggacaaacctcagttacccttcgagaacttcttttagggaaggactttttgaatgtaaccactgaggcaaatattttgccagaggaaacatcttcctctgcatctgatcaaccataccaaagagaaaccccacaagtgtcttcactgtgagaaaaccttctgttgctgaatattacttgtcatctgaagagtcatattagaaattcgttcagtctagagccttattctccatctgataatttatcctggagagagacccagtggttattgtgcacataggagaaccttcagctgcatctttctccttagtttacagtgcaattttatctcaggaattatttttaaaaggaggaggggacatagaaaaaatgaaatgcaagcacacatcttttcaggcttctctgccaagcctatggcgctttgtcatggatttcttagtgtatttgggggaagggaaatgtttcaaggtaaagaaccttgaccctttatgtgcttgtatgtacatttattgctatccagtgtcagaacagttagtttaggaaaagtatgcaaactttaatcgcacatcttctgtattccacaatagtacttactcttgagaagcataactttatgacaacttagggggcttgagccatgaaatactcacgtttaagtcagtaaggatacacatgttaacattcaggcttttgtcttgatgcccgtcttttggtttacgtcatcattgtagccatatggtaaatttttatttgttaaatttttaaaaattacttagctcaaaatgtcagtggtattttttaacgccaaagaaagactctcagagaatagacaactatattccaaagtcatggttctctggtggtttgtcttgacatttgaatagaaatgttaaactatctgggggaatagaaagcccacagtcttctgagttgtgctacaccaatatttctatgaacagatcttacaactgagagtgatctgcagatttttcagagtcatgttctccatggaatgtttgtaaaattccctagctctctgcactgagctgagatcgtgccactgcactccagcctgggcaacagagcgagactccatctcaaaaaaaaaaaaaattctctagctctctatgccttgttgtatcctcaggaaggagtcacctctcttccaggatcactcttgccttttgttattggacacattttcctacctcctgcccagtcttttttaggctctctgtcatacttcctcgcctagtctttaacttgtctctgataaccagatttttcccccataatctgtatctgtattcaagtctctatcctcatccccaaatggatttcaccccgcttgtccatcagtctctgcccatttcttctgtctcccacagacatggtctgtgtagttgttctgcacactacccgtcctcgccccttctcatttccctcactccacggacagctacaggagggcttccatcatttgtcctcttacttccttgttagaactttgtgctgctgaccaccactctgaaccaaaacttctttcttggttcttgaaagttgctgtctttctcctccagagggtctgtgtcttccttccaactcttaaacatttttgtttcccagaatccatcattggccattgctttttcacttgccatgagctctgtgaatgagatggttcctgctgaagacatttactttcaatgatctacagaatttcccaaatctatgtctccagactggatgtttctcacgtctgtggcccactgggcatcttctgcactttctctgcatttgtaaacactgagcctgtatgcgtgtctatgtggccatggccctggccgtggggatgcacccataattataatgagagcaggtgaatgtcatgtggctatgtatgagacattgttgtgaatgttttacatgcatcagctctttcaacatttacagcatctgtgtgtggtaggtaatgttgtttccttcattttgcagagcagaatatagataggctcaggttaagaatttgcccaaggttacacagttatgaagtttggatttaggaatgggaggccacgtagactggcttcagaattcatgtctttaaccactttattgcttctcatgttggggggtttgttttctggtcactatttttactaaagttgattcaacaatgctataatctgttactctcattcgacaatacatcttgactgtttcttcaacttgaggaaggtaaaccaaagccactctttaatgggtgcaaatatctgttgtaactatgtagaagatacagtgtctgggtttgaggacaggggagtgggaaaactgagtagggaagcggtaagacatgcatctggctttaggagtgtttgaagtgcctaaagatcagggtgaatttcccaaatttgaatcttgttgcccaagccacattgcaaccacctctttttctcttacctcgtccccacatccaggcactgccccattctgttcattccacctttttttttagtagaccctccatatatgtgtgtgttttggtgaatggccacacacagcaaagttatttttattgcaattttgttgttgttgtttgagacacagagtctcatactctgccacccagactgaagtgcagtggtgcgatctcagttcactgcaacctccatccccccatgttcaagcaattctcctgcctcagcctcccaagtagctgggattacaggcatgggcca

SEQ ID NO: 10414 - protein, 627 aa, Homo sapiens; identical to SEQ ID NO: 1603

SEQ ID NO: 10415 - DNA, 740 bp, Homo sapiens
tttcttctgcacttctgtctggagaggtctgtagccactgagggccccggtcggggccgctttgcaggtccctagtcaggaccgagcaggggagtaggataggaatccccgccgcacctttgtacgagcctgaccccttccgtgggtttgttcctgggtcgccgtcaagctgcggtctctcctcccccgcccttcagccccgcggtctccaggggcggcgccctgggtctggaacgcggttgccaccgaggaggcggcggccctgcgtctggaacgccgttgccaccgaggaggcggcggccccgagcgcgcctggaagccccgggcaaccggccagggtcgggcacaggtggggtccgtcaggccgcccggggctcctctgtcccagctctgcggcccagggggtgacgtgatggcggcagcggtgctgacggaccgggcccaggtgtctgtgacctttgatgatgtggctgtgactttcaccaaggaggagtgggggcagctggacctagctcagcggaccctgtaccaggaggtgatgctggaaaactgtgggctcctggtgtctctgggtaaggccttccttccccctccaccatgcaggtgacctgccacttccttcattccatcttctgactccaggcctggctgcacaagaaggcctctagaatctaccttgcctctttcccacagctttagtcattttccacagtaacctcttcctatctggtctcctatat

SEQ ID NO: 10416 - protein, 64 aa, Homo sapiens
MAAAVLTDRAQVSVTFDDVAVTFTKEEWGQLDLAQRTLYQEVMLENCGLLVSLGKAFLPPPPCR

SEQ ID NO: 10417 - DNA, 853 bp, Homo sapiens
ctgagtcttgtttcagtgaagtcacaggatgtgccttatttaagttccatctggtacttatgacaacacatgctatatgtccactgggaagcttattagagactcagtgccagggtttttattgggcatgttttctagcacatcccacaattctggacttccagaaggttagcaggggttcagcttttcagctgaaaacgttatccccctttcagctggggggaaaaaaaggcaccgaaaaacagggcagtgagctactcctgttttgggtgggtggagcagtagtaagcctcccaaaatctaagatcatgccactgcactccagcctgggtgacagagtgagactgtgtctcaaaaaaaaaaaaaaaaaaaaaatgcctcagttttgttaagaggaaaaagcaaatcctaagttacagtggaacttatgaacaccctagcctagagatttaatttagtgatgaaaaggtacagagagagtctttcaagaaaggacctagtctgctcgcgttctctctctctctctctctatatatatatatgtatatgtgtgtgtacatatggaccacttcaagctacacacacacacacacatatacacgtgtatgaatatatatatatggctataagtggtgcgacttgcaggtactccctttgttcacctttgtaaagatgttattgccagttcagtgtgtatttctatagtatatatgtaaacaatttgtcatccttttgttgctgcttttgaaactagttcatggcttcagtgggggagagatttaaataatatgggtttataatttctgcattattaaatgcagataacttgtgattaaagagtatgttattggaa

SEQ ID NO: 10418 - protein, 110 aa, Homo sapiens
MTTHAICPLGSLLETQCQGFYWACFLAHPTILDFQKVSRGSAFQLKTLSPFQLGGKKGTEKQGSELLLFWVGGAVVSLPKSKIMPLHSSLGDRVRLCLKKKKKKKMPQFC

SEQ ID NO: 10419 - DNA, 1316 bp, Homo sapiens
cacaacggccatcaccacctctccgcaccctctgtctccttccttctcgggcctcacccctggccctcgctttcagtgcccagcccggaccgcagcactccagttccgccccaacccgggaaccctggactgaggctcccgtttctgtcctttctattgggcgcacttccgatggcgtcaggaatttcagccaataggagccagccaggaagtacctctctgagcggttggtgccgggtataaaagaaggccgcgcagccacggctgctcacgacgccgcggatcccgaagcctgtgtagcagtgagacatcatggctacagcaaaccaaacagcccagcagcccagcagcccagccatgcggcgcctcacagtcgatgactttgaaatcgggcgtcccctgggcaaggggaaatttgggaatgtgtacctggctcggctcaaggaaagccatttcattgtggccctgaaggttctcttcaagtcgcagatagagaaggaaggactggagcaccagctgcgccgggaaattgagatccaggctcatctacaacaccccaatatcctgcgcctgtataactatttccatgatgcacgccgggtgtacctgattctggaatatgctccaaggggtgagctctacaaggagctgcagaaaagcgagaaattagatgaacagcgcacagccacgataatagaggagttggcagatgccctgacctactgccatgacaagaaagtgattcacagagatattaagccagagaacctgctgctggggttcaggggtgaggtgaagattgcagattttggctggtctgtgcacaccccctccctgaggaggaagacaatgtgtgggacactggactacttgccgccagaaatgattgaggggagaacatatgatgaaaaggtggatttgtggtgcattggagtgctctgctatgagctgctggtgggatatccaccctttgagagcgcctcccacagtgagacttacagacgcatcctcaaggtagatgtgaggtttccactatcaatgcctctgggggcccgggacttgatttccaggcttctcagataccagcccttggagagactgcccctggcccagatcctgaagcacccctgggttcaggcccactcccgaagggtgctgcctccctgtgctcagatggcttcctgagccctgtctgcctctgttccctttgtgtgtgttcagggagctctcctggctctgccacctcatttgtctttatttttttctcttttaagatgtaagatgctaattaataaaagctgaatcatttcatacca

SEQ ID NO: 10420 - protein, 290 aa, Homo sapiens; identical to SEQ ID NO: 1607

SEQ ID NO: 10421 - DNA, 1250 bp, Homo sapiens
ccacggctgctcacgacgccgcggatcccgaagcctgtgtagcagtgagacatcagtgaggctgcaggacgagcaggattggaagcgccccggccagaaagtgaccccccacccctttcaggaccctgtgaacgggaacagccatccagagggttcaggaaggcgtccgcgccctcacctcttctccccatgagctcccccagagctgtggtgcagctgggcaaagctcaacctgcaggcgaagagttggctacagcaaaccaaacagcccagcagcccagcagcccagccatgcggcgcctcacagtcgatgactttgaaatcgggcgtcccctgggcaaggggaaatttgggaatgtgtacctggctcggctcaaggaaagccatttcattgtggccctgaaggttctcttcaagtcgcagatagagaaggaaggactggagcaccagctgcgccgggaaattgagatccaggctcatctacaacaccccaatatcctgcgcctgtataactatttccatgatgcacgccgggtgtacctgattctggaatatgctccaaggggtgagctctacaaggagctgcagaaaagcgagaaattagatgaacagcgcacagccacgataatagaggagttggcagatgccctgacctactgccatgacaagaaagtgattcacagagatattaagccagagaacctgctgctggggttcaggggtgaggtgaagattgcagattttggctggtctgtgcacaccccctccctgaggaggaagacaatgtgtgggacactggactacttgccgccagaaatgattgaggggagaacatatgatgaaaaggtggatttgtggtgcattggagtgctctgctatgagctgctggtgggatatccaccctttgagagcgcctcccacagtgagacttacagacgcatcctcaaggtagatgtgaggtttccactatcaatgcctctgggggcccgggacttgatttccaggcttctcagataccagcccttggagagactgcccctggcccagatcctgaagcacccctgggttcaggcccactcccgaagggtgctgcctccctgtgctcagatggcttcctgagccctgtctgcctctgttccctttgtgtgtgttcagggagctctcctggctctgccacctcatttgtctttatttttttctcttttaagatgtaagatgctaattaataaaagctgaatcatttcatacca

SEQ ID NO: 10422 - protein, 309 aa, Homo sapiens; identical to SEQ ID NO: 1605

SEQ ID NO: 10423 - DNA, 681 bp, Homo sapiens
tcctgggaacgagaactactgatagggctgggtctgtgtgagaagggaaagcggcagaggaaggatacaatgaaagaggaaggggagcattggcatccctgactttccctccgcctaccctacctcccaagctgaggcttttttcttcctctcctgtcaggcggcgcctcacagtcgatgactttgaaatcgggcgtcccctgggcaaggggaaatttgggaatgtgtacctggctcggctcaaggaaagccatttcattgtggccctgaaggttctcttcaagtcgcagatagagaaggaaggactggagcaccagctgcgccgggaaattgagatccaggctcatctacaacaccccaatatcctgcgcctgtataactatttccatgatgcacgccgggtgtacctgattctggaatatgctccaaggggtgagctctacaaggagctgcagaaaagcgagaaattagatgaacagcgcacagccacggtgaggtgcgggtctggaggctctggggtctctgagtttactgtgggctggtgggagctctgtttgtggctgtcaggagggtccgcattgccttctgagaagtttacttctgaatgttattgtgtaaatttaatataatggcacgtatgttctacagctttatccttggataccctaattaacctcattg

SEQ ID NO: 10424 - protein, 30 aa, Homo sapiens
MTLKSGVPWARGNLGMCTWLGSRKAISLWP

SEQ ID NO: 10425 - DNA, 545 bp, Homo sapiens
aggggtgagctctacaaggagctgcagaaaagcgagaaattagatgaacagcgcacagccacggtgaggaggaagacaatgtgtgggacactggactacttgccgccagaaatgattgaggggagaacatatgatgaaaaggtggatttgtggtgcattggagtgctctgctatgagctgctggtgggatatccaccctttgagagcgcctcccacagtgagacttacagacgcatcctcaaggtagatgtgaggtttccactatcaatgcctctgggggcccgggacttgatttccaggcttctcagataccagcccttggagagactgcccctggcccagatcctgaagcacccctgggttcaggcccactcccgaagggtgctgcctccctgtgctcagatggcttcctgagccctgtctgcctctgttccctttgtgtgtgttcagggagctctcctggctctgccacctcatttgtctttatttttttctcttttaagatgtaagatgctaattaataaaagctgaatcatttcatacca

SEQ ID NO: 10426 - protein, 111 aa, Homo sapiens
MCGTLDYLPPEMIEGRTYDEKVDLWCIGVLCYELLVGYPPFESASHSETYRRILKVDVRFPLSMPLGARDLISRLLRYQPLERLPLAQILKHPWVQAHSRRVLPPCAQMAS

SEQ ID NO: 10427 - DNA, 534 bp, Homo sapiens
cggcgctggggaaatgagcaggtaggaggccgacagcgacctccgcgtctcggagcgaaccgtgagcctccccgtaacgagagagtttgactgtcagccaaggtcaccgggcccggcgcagggaaggggtggggctcggctgagcccgcgagacccgccctgctcgccgcagcccccgccccgctagggccacagggtcccggtatggcgatggctttgacggacccggcgcagggtgtcctgttcccagacctgagctgatctaccacctagagcatgggcaggagccatggaccaggaaggaagacctctcccaaggcacctgtccaggtgacaaaggaaaacccaagagcacagaacctaccacctgtgagctagccttgtctgaaggaatctctttttggggacaactaacacaaggagcttcaggggactcccagttggggcaacccaaggatcaggatgggttttcagaaatgcagggagaacgcttgagaccagggttagattcccaaaaggagaagcttcctggaa

SEQ ID NO: 10428 - protein, 33 aa, Homo sapiens
MGRSHGPGRKTSPKAPVQVTKENPRAQNLPPVS

SEQ ID NO: 10429 - DNA, 9303 bp, Homo sapiens
aatgaatgtgaaaaagtgtttaacaagaaacgcctgcttgctcggcatgagaggattcactctggagtgaagccctatgaatgcacagagtgtggaaaaacctttagcaagagtacatacctcctgcagcaccacatggtccacactggggagaagccctataagtgcatggagtgtgggaaggcttttaatcggaagtcacaccttacccagcaccagcggattcacagtggagagaagccttataagtgcagtgaatgtggaaaggccttcacccaccgctccacttttgtcttgcataacaggagccacactggagaaaaaccctttgtgtgcaaagagtgtggcaaagcctttcgagataggccaggtttcattcgacactacatcatccacagtggtgagaatccctacgagtgcttcgaatgtggcaaggtcttcaaacacagatcatacctcatgtggcaccagcagactcataccggggagaagccctatgagtgcagtgaatgtgggaaggccttctgtgagagcgcagcgctgattcaccactatgtcatccacactggagagaagccctttgagtgcctcgagtgtgggaaggctttcaaccaccgatcctacctcaaaaggcaccagcggattcacactggggagaagccatatgtgtgtagtgaatgcggaaaggccttcacccactgctctactttcatcttgcataaaagggcccacactggagaaaaacctttcgagtgcaaagagtgtgggaaagcctttagcaatagggcagacctcattcgccacttcagcatccacactggagagaagccctatgagtgcatggagtgtggaaaggccttcaaccgcaggtcaggcctcacaaggcaccagcggattcatagtggagagaagccctatgaatgcatcgagtgtgggaaaacattttgctggagcacaaacctcattcgacactctatcatccacactggagagaagccgtatgagtgcagtgaatgtggaaaggccttcagtcgcagctcgtccctcactcagcatcaaaggatgcatactgggagaaatcctatcagtgtaacagatgtgggaagaccttttacaagtgggcagacctcagtcaacatccaagaacttttattggggaaaaactttttgaatgtcaccactgaggaaaatcttttgcaagaggaagcatcttacatggcatctgatcgtacataccaaagagaaaccccacaagtgtcttcactgtgagaaaaccttctgttgccaaatgtcatttgtcacctaaggagtcatattagaaaatcacgcagcttagagccttattctccatccgaattcatcctggaaaaacacccagtggttattacgcacttgggaaaacctttagctccatctttctcattagtttacagtgcaatgttatctcaggaatttttataaacagaaagaggtgacatagaaaagaaaatgaaatgcagacactgcttttatactgttgtcttgtatgtacatttctgtcctgtgtcaggaaagttagtaagggaaggtctggaaacttactcaatgtctttgttctacaacattgtctcttcttaagaagcattgtttttatgagaaataatgaagccttgagttatgaaatacttttatatttaaggattaaaagaaacatgaatgcgcacattttattgtaccacttaatactgtttaggtctttgattttttaaaaaaattcttttttaatgggttttaaacactaacactgagaatttttcttgattcccatctgttggtttacttgattgctatagctgtatggtaaatctcaaaattaggtaatgtgatttcttttttcttactatttttatttaaaattcatttagcattcctagtttgactttccatatacactttaggattggtttttctgtttttcaaatattcttgcttggattttgatagaaattgagttaaatctatagatcaatgtgttggaaattggcatcttagtcttccaattcatgaacatagcctatcttttcattatttaaattttctttgatatatttcattactgttttatagtttacacagtataactcctgcacatttaaaataagaattatagctgcatagttttttgagtgattgtaaatggcattgatatttaaagtttcaatattcacatgatgttggctagtatacagaaacattattttttcaatcttattttgctgtcttgcaaccttcctaaactcattatttcttgccatttcttttgggagaatccttaggattttaaatatagaaatgtcatttgcaatttgggacagttttatttcttgcttcccatctgtataccttttatttgcttttctcatgttattgtactaggtaggatttccagtgtgatgttgaatacgaatagtgacaagttatccatgccttgttcctgatattagggggaaatgttcagtttctcattattatgatgttgaaagttgcttccaaagagtttctctatcgagtttagaaagtttccctctattcctaatttgctgggatttttttggttattattaataagtgttgaattttgtcatatgctttttctccaccaattgatttaattatgtgatgttacttctatagtcagttgatatgatgtgttaccttgattgagtttcaagtattgaaccagcctcacatctttgtgataagccctacttgatcatggagtataattttgtttgtgtactatgctacagtatttcatttgctagtattttgttgaggaagctttcctctgatttcatgagtgataatctgtagttttctttcttcaactgttactgtttggttttgatgtctagatgataactaacctcctaacatgaattggaaggaattctcttctgtttttttggaagatcatgtgtagaattggtgttatttgttcctttaatgtttggtagctttctccagtgaagaagtgggacctggagattttccttttgaatgctttttaattatgtatttattttatttaataggtatagaactattcagagtatttcatattggatgaatttttatagattttcttaaggaagtgttcattttatgtaaatgttctaatttgtagcattctttgaaatatttccttttatcctcttgatggcagcaggatctgtacttatgttccttgttgtattcttgatattggaaatgtatcacttattattgtcagtctttgtagacatatgtcaatttcattgatcatttcaaagaaatagcactttatatcactgatttttctccagtctctgttcttaatttcactgatatctgctctgatgtgtattgtatcctttctcctacttgctctggttgtatttgactcagtggtttcctgacgtggatgtttaggttattgatttgaggctttttttcttttttaatataagctttaagttctatacatttttcttacactgctgttagtttcatcccacaagtcttaatatgcttttgattatcttactcagttctaagattgcctgattccttttgagacatcttctctaacccaggaattatttagaagtatattgtttaatagtgtttggagtattccctgctatttgttattgatttctaatttgttttgcatttgatgttactgttgaaatttgttgactttttttccttatgacccaggatataggctgtcttgttttacatagctgcttgaaaagaatgtgtgttctcggtcatttggtggagtttctgtaaaagtttgtatgatcctgttagttggtggtgttatttaggtctcctgtatccttgctgattttctgtctagtatttctatcaattgccaagagaaggatgttgaagtcctgagctataattgtggaattacctattcctcctttaagttctatcagtttttgctccacataatttaaagctctgttgtttggtatatacacatgtaggtttgcttagtattcttggtgtattgacccttttataattaagtaatgtccctttttgttcctgttaatactcttatcaatttttatctgatatttgtgtggtcagtcttacgttttggttaatgcttgcatgatttacacttcatcatttttttaaaccttatctatatcactatattgggagtaagtttcttgtgaatggcgtatatttgggctgtggttttatatccagtttgcgtatctttttttttttttttttttttttttgagacggagttttgttcttgttgcccaggctggagtggagtggtgcgatctccgctcactgcaacctccgcctcctgggttcaagtgattctcctgcctcaggctcttgagtagctgggattacaggcatccgccaccatgcctgactgattttttgtatttttagtagagatggagtttcaccatgttggccaggctggtctcgaactcctgacctcaggtgatccacctgcctcagcctcccaaagtgctaggattactggtatgagcaaccacgcacagcattttttttttttttttttttttgagacggagtcttgctctgtcgccctggctggagtgcagtggcgcagtctgcaacctctgcctcccgggttcaagccattctcttgcctcagcctcccaagtagctgggattacaggtgcctgccaccacacctagctaatttttatatttttagtagagacggggtttcatcatgttggtcaggctggtctcaaactcctgacctcaggtgatctgcccacctcagcctcccaaagtgctgggattacaggtatgtgtcactgtgtctggccccagtttgcatatttctgtcttttattggtgtatttagaccatttaaagtttacaataattatgttagtgctatgtctgctattttatgattagttttttgtgtttcctgttgcttctttcttggtttgtttgggtttttttttttttgtctttaacattttttagaattccatttgatatatttgtagtgttttttaaatatatttctttgtatttttgtattaattttttagtggttgctttaagtagtataatgtacatatgtaacataattacagttaatggtatgaaaaatttagcactttgatgtatagaaaccttacttggtcccttcaccttgcctgttaatataattgtctaaagtaattcctcttcaaaattgagcaccatgttggaaaatgtaatttttgcttccactgtcaaatatattttacaaaagtcacaggaagtattgcttgttgatctctttacccattccactattctttcttgaaattctaagccaccttctattaacattttctttctgtttggcgaacttgtgtaaccttttttctagggtcagtctgctggtgtctctaaaagtgtctttatgttcccttcattcctgagggatatttttgtgggataataggatttagggtctgcagttcttttagtacttgagaaacatgtttgttccttctgtccgctatggtttcagatgagaaatctgttgccatttgaaccattgttccctagttcataatgtgccatttttatcaacctgcgttcaaagtgttttgttttttttgtagtgttcagaagtttggttatgaggtgtgtgacatggaatttttttgagtgtatcatgtttggtttttgtttagctttttgatttgtcggtttatgccctttgccaaatttgggaatttttaaccattatttcttgaaatattttttcatccctactctttctcctctctgtgatatgaatggtagagcttttgttactgtctcagaggtctcttgtgctttcatgtttaccccctttttctggtctatttttccctttttttcatattggttaatttctgttgactttttttcagctcactgattctttttttctgccatatgcagtctactgttgagcttgtccaatgagttttcgttttggtttttgtatttttcagttgtttaatttccatttgttttgttttgttttgttttgtttttttgagacagactctttgctctgttgcccaggctggagtgcagtggcgcgatctctgctcactgcaagctctgcctcccgggttcatgccattctcctgcctcagcctcccgagtagctgggactacaggtgcccgccaccatgcccggctaattttttgtatttttagtagagacggggtttcactgtgttagccaggatggtctcgatttcctgatctggtgatccacctgcctcggcctcccgaagtgctgggattacaggtgtgagccactgtgcctggcctccatttggttcttttgtacatctttgatttctttgcttagtttataatactaaagggctcagaaaacagaaaaaactaaattccagagtcatggttttctggtggtttgtctcaatatttgaatagaaatcctaaattatctggaggagtagaagtcctgtaatcttttatattgggcttcttaaatatttctgtcaacagatcttatatcagggtgatctgcatatcattcagagttacgtactccacgggaaggttgtatgtaaaatcctccagctctgtaagccttgttatatcctcaatggagaaggggtcattccttttctaagatcactcttacacttttttattagacacacacacacccttccccaaccaaacttgtctaagtcctctgtctttcatactcttgtttagtctttaacttctccttattaaccagcttctttcccataatgtatagctttagtcggatctcaagcctcgtttccaacctatttcacccttccttgcctatcaagctctggttattctttcttccacacacatgccctgagtaactattctgtgcactgtcgccacccctttacatttccttttactccccagatactactaaatggcttccaccaccgttgcctgacttaagcacgtctcagaaaggtcccttttgaccccctcactctctttttggacctccatactgctaaatctctgacttgaaggtcctttcctggcttctgtgaattcctggcttttttcctttttagggtctgtgtctttcttccatctgtaaaacagctttacttcccagcatccatcatgatcattgctgttttctaacttgtccttcaccccatgactgagttaatttgcgctgaagacactttactctcaattatctacagtgtttccctaaatctgtgtctccaggttggatgtttctcatgtcgttaaccactggtcatccttccacaccttttctgtatttgcactcactgagcctatatgcatgtatcatgtggccatgaccttggccgtggggatgcacccataatcatcataagagaacacaaattattactgtgtatcagacattgtttcgaatgttttacatgcgtcagctcttttaacctttatgacaactccataatgttatttcccccctttaactgattagaaaactgaggtacagaaagattaaggaatttgtcaaagatttcacaattatgaaatttgggtttggggactggaagccactgcactggcttcagaatccatgtccttaaccactttattgcttctcataaggtgggtctttgtttcctggtcatcacttgtttttactaaaatgggtcaaactgtgctcatttatttataatctactattcttatttgacagtacatcttggccattccttcaagcaaatgagataaaccagactcactctttaatgcctgcataagctattgtgactgtagaaaagacggagaatgtctgggtttgaggatatgtgggaggggtggggagaaggagtagagaagggctaaggcatgcatgttgttttaggtgtgtttgagatgcctgaagaacatcagtgtatccccctaatttctgtcatgttactcaaaccagacacattgtggccatttctttttcctttatcattcccacgtccggccactgccccattcctttttgttccgtagtagaccctcaatatatatgtgtgtgttggtaaatggccatacacagcagggtattttttattattattttcagttccctcagcgcgtttaccacaaagctgtgcatataggtggcaccatatatggcgtaccttgacctcgaagagaatctacatggacttttatggacctacgtacacaattttagaaatcataataaatgaatgctggagtcctcaagaccccttccagatttgatttgctaggaagactcacaggactcagcattttgtcatactcaatggctatgatttaccacaccgaaagaatccagagcaaactcagcaaaaggctcaaacccaagtccagaggaaaccaggcacaatctttgagaatcttaatgaaatcacacaggatgtgcttcattgaagctccatctgggacttaaaacaacacacgtgagatgtgttccaggaagtcgtcttgagcacccattgctcagagtttatattggacttgctttctagcacataccacaattgtagacctccagaagaacaggaggtgttcagcgtaagacaatttaggcacacggagctacttctcattactgggaacaatgggaaacttcccaaaacctaaagtacagactccagccaaggatgaaccttgcaagatcaaagaatagcagtctctggcctgctctgttctctttttcacagtaacttaaatggaaaaatgctgagttagcttaagtttctgtaacaaacattaagcaaataaaattttctataacagaaataagccatagctttgagatgaaggcttatatacgtgtaaaccattgtaaccaagaaaaaaaaaaaaagtcagagtcacagtgaaaatacttaacaaactagccaggatttaattcagtgatgacagggaacagaggaagtcttgtgagaaaggatcttgcctctgcctagtatctttcacagataggcttcaagtggtttgatttgcagatacaccctttcttggcctttatttcggcaaagatgtgatgggtaggtaaatgccgtgttctttccctagcacgtatgtcagtttctcatccactctttgttcttgctattgaaagttgtagcttctggctacaacagagatagttgaagaatatggagttcgccataatttatcattaaatgtggataatttgagattaaagaatatgttgttgcaggcttagtcactttg

SEQ ID NO: 10430 - protein, 377 aa, Homo sapiens
MVHTGEKPYKCMECGKAFNRKSHLTQHQRIHSGEKPYKCSECGKAFTHRSTFVLHNRSHTGEKPFVCKECGKAFRDRPGFIRHYIIHSGENPYECFECGKVFKHRSYLMWHQQTHTGEKPYECSECGKAFCESAALIHHYVIHTGEKPFECLECGKAFNHRSYLKRHQRIHTGEKPYVCSECGKAFTHCSTFILHKRAHTGEKPFECKECGKAFSNRADLIRHFSIHTGEKPYECMECGKAFNRRSGLTRHQRIHSGEKPYECIECGKTFCWSTNLIRHSIIHTGEKPYECSECGKAFSRSSSLTQHQRMHTGRNPISVTDVGRPFTSGQTSVNIQELLLGKNFLNVTTEENLLQEEASYMASDRTYQRETPQVSSL

SEQ ID NO: 10431 - DNA, 2026 bp, Homo sapiens
cactgtcaggcgtcctcctttgggtggctattttaactgctcatttatccttttcttctatgaaaagatccagaaaagaggcaaagcaagcgagaagtcgcgggcccagcccacagcagggagtctgtgaccttcgaggatgtggctgtgacatttacccaggaggagtgggggcagttggacgtgacccagagggccttgtacgtggaggtgatgctggagacctgtgggcttctggtcgcactgggtgacagcacaaaacctgagaccgtagagcctatcccttctcatctggccttgcctgaggaagtctcactccaggaacagctggcacagggagtcccaagatactcctatttggggcaggccatggatcaagatgggccatctgaaatgcaggaatactttttgagaccagggacagacccacagagtgagaaactccatgggaaaatgagccttgaacacgaaggtttggcgacagctgatggtatttgttcaatgatgatacagaaccaagtctcaccagaagatgctctctatggatttgactcatatggaccagttacagattccttgattcatgaaggggaaaattcctataaattcgaggaaatgtttaatgagaattgcttccttgttcagcatgagcagattctccctcgtgtgaagccctatgattgcccagaatgtgggaaagccttcggcaagagcaaacacctccttcagcatcacatcatccatactggggagaagccctataaatgcctggagtgtgggaaagacttcaaccgcaggtcacacctcacacggcaccagcggactcacaatggagataagccctttgtgtgcagtgaatgtggaaggaccttcaatcgcgggtcgcaccttacacggcaccagcgggttcacagtggagagaagccttttgtgtgcaatgaatgtggaaaggcctttacctaccgctccaattttgtcttgcataacaagagccacaatgagaagaaacccttcgcatgcagcgaatgtggaaaaggcttttatgagagtacagccctcattcaacacttcattatccatactggggagaggccctttaagtgccttgagtgtgggaaggccttcaactgcaggtcacacctcaagcagcatgagcggattcacactggtgagaagccctttgtgtgcagtcaatgtggaaaggccttcactcactattccacctatgtcctgcatgaaagagcccacactggagaaaagccttttgagtgcaaagaatgtgggaaagcctttagcattcgaaaagacctcattcgacacttcaacatccacactggagagaagccctatgagtgtttacagtgtggaaaggcttttacccgcatgtcagggctcacaaggcaccagtggattcatactggagagaagccgtatgtatgcatccaatgtgggaaagccttttgtcggaccacaaacctgattcgacactttagcatccacactggagagaagccctatgaatgcgtggagtgcgggaaggccttcaaccgcaggtcacccctcacaaggcaccagcggattcacactgcagagaagtcccacgaacccatccagagtgggaacgtttcttgtgagagcacagatctcattcaacactccatcatccacactgagagtagcccagtgagtgcagtgaatatggaaacgccttcaattgccgctcattcctcctcactcgacatcaacggattcatagtggaagaaaccctaccattgtaacagatgtggaaagactttttacgtacacttcagtcaacatccaagaattcctattagcgaaatagttttttaatataaccactgaagaaaatctgtggtgagaggaaacatcttaccatctggtcattcatactgaagagaaactccataagtatcatctctgtgggaaaacctgttttagatcatcatttgtcatctaaacaattatgttagaaattgacacagccaagagtcttattctacatct

SEQ ID NO: 10432 - protein, 521 aa, Homo sapiens
MLETCGLLVALGDSTKPETVEPIPSHLALPEEVSLQEQLAQGVPRYSYLGQAMDQDGPSEMQEYFLRPGTDPQSEKLHGKMSLEHEGLATADGICSMMIQNQVSPEDALYGFDSYGPVTDSLIHEGENSYKFEEMFNENCFLVQHEQILPRVKPYDCPECGKAFGKSKHLLQHHIIHTGEKPYKCLECGKDFNRRSHLTRHQRTHNGDKPFVCSECGRTFNRGSHLTRHQRVHSGEKPFVCNECGKAFTYRSNFVLHNKSHNEKKPFACSECGKGFYESTALIQHFIIHTGERPFKCLECGKAFNCRSHLKQHERIHTGEKPFVCSQCGKAFTHYSTYVLHERAHTGEKPFECKECGKAFSIRKDLIRHFNIHTGEKPYECLQCGKAFTRMSGLTRHQWIHTGEKPYVCIQCGKAFCRTTNLIRHFSIHTGEKPYECVECGKAFNRRSPLTRHQRIHTAEKSHEPIQSGNVSCESTDLIQHSIIHTESSPVSAVNMETPSIAAHSSSLDINGFIVEETLPL

SEQ ID NO: 10433 - DNA, 1488 bp, Homo sapiens
gaaacagtgtggggcctagagcgctgggtgggcgcgttctgcggcctgagcagggacgggtagtgaagcggttacgccccttcttcgcgtcttggcgggagcctgacgccccgcttctcccctaacgaggtgtcccaccggcgcccgccgaggcctaggcctccgcagccgccctccgtctcctcagccccgacgctgcgccttgggccttgtgcgcatttttttcgggggaaaactgaggctcggagtgcgaaagtcagccgaggtcgccccgcccaggacagagaagggctgtggtcggctgatccgcggcattcccgggatggcggcggcgtggatggctccggcgcaggagtctgtgaccttcgaggatgtggctgtgacatttacccaggaggagtgggggcagttggacgtgacccagagggccttgtacgtggaggtgatgctggagacctgtgggcttctggtcgcactgggtgacagcacaaaacctgagaccgtagagcctatcccttctcatctggccttgcctgaggaaggcctcatcccctttattttccctgtgtatacattcactagcattgtctccactcttgaggagcagaagcatatatctttatgagaaagatggaggcttgagttatgaaatacttttacatttaaggagataaaggatgtacatatgaatgggcacattttactgcacacttcagacgctttgacttttttaaaaaaattgtttctccgtgtgtctttaaccacccagtaccatacttttttcttgatctggatctacttgtcaatttcttctttatttttctgtaggatggagatgatattgtagctgtttgtacataatgtaatccagggagtcctaattcttccctctgattgtggtttctcagcttttttactgctctttagagagagtaaatagttcaaaattcacctcaacaattttctagaggtcaatttggaaccaaaaatgaaataagacatgtagctaaagtaagttaaaagattatgataaactcagaaaataaacacagagaaggaatctcatttttcagtcttacagaagattgtgtgaaggctgactatacataaagtgactggaattttaacaggtgaacctgcatatgtatatgcaggtagttgtcaccatggattgagtccagtcgtagtaattaatatgtttaatcagaatattttggaatttctcttttggtattctttttgtttcttttattgtttttaattgacaatgtttatggggtttggtgtgatatttcaatacatgtgtgctaagagtaatgatcaaatcagggtaattagcatatccatctcaatcatttatcatttctttgtgtttagaaacattcacagtctgcttttctagctatttgaaaatataaaatgtattattgccaattgtactcattctgcagtgccacagaacactacaacttattcaaatggaatctt

SEQ ID NO: 10434 - protein, 100 aa, Homo sapiens
MAAAWMAPAQESVTFEDVAVTFTQEEWGQLDVTQRALYVEVMLETCGLLVALGDSTKPETVEPIPSHLALPEEGLIPFIFPVYTFTSIVSTLEEQKHISL

SEQ ID NO: 10435 - DNA, 3513 bp, Homo sapiens
gaaacagtgtggggcctagagcgctgggtgggcgcgttctgcggcctgagcagggacgggtagtgaagcggttacgccccttcttcgcgtcttggcgggagcctgacgccccgcttctcccctaacgaggtgtcccaccggcgcccgccgaggcctaggcctccgcagccgccctccgtctcctcagccccgacgctgcgccttgggccttgtgcgcatttttttcgggggaaaactgaggctcggagtgcgaaagtcagccgaggtcgccccgcccaggacagagaagggctgtggtcggctgatccgcggcattcccgggatggcggcggcgtggatggctccggcgcaggagtctgtgaccttcgaggatgtggctgtgacatttacccaggaggagtgggggcagttggacgtgacccagagggccttgtacgtggaggtgatgctggagacctgtgggcttctggtcgcactgggtgacagcacaaaacctgagaccgtagagcctatcccttctcatctggccttgcctgaggaagtctcactccaggaacagctggcacagggagtcccaagatactcctatttggggcaggccatggatcaagatgggccatctgaaatgcaggaatactttttgagaccagggacagacccacagagtgagaaactccatgggaaaatgagccttgaacacgaaggtttggcgacagctgatggtatttgttcaatgatgatacagaaccaagtctcaccagaagatgctctctatggatttgactcatatggaccagttacagattccttgattcatgaaggggaaaattcctataaattcgaggaaatgtttaatgagaattgcttccttgttcagcatgagcagattctccctcgtgtgaagccctatgattgcccagaatgtgggaaagccttcggcaagagcaaacacctccttcagcatcacatcatccatactggggagaagccctataaatgcctggagtgtgggaaagacttcaaccgcaggtcacacctcacacggcaccagcggactcacaatggagataagccctttgtgtgcagtgaatgtggaaggaccttcaatcgcgggtcgcaccttacacggcaccagcgggttcacagtggagagaagccttttgtgtgcaatgaatgtggaaaggcctttacctaccgctccaattttgtcttgcataacaagagccacaatgagaagaaacccttcgcatgcagcgaatgtggaaaaggcttttatgagagtacagccctcattcaacacttcattatccatactggggagaggccctttaagtgccttgagtgtgggaaggccttcaactgcaggtcacacctcaagcagcatgagcggattcacactggtgagaagccctttgtgtgcagtcaatgtggaaaggccttcactcactattccacctatgtcctgcatgaaagagcccacactggagaaaagccttttgagtgcaaagaatgtgggaaagcctttagcattcgaaaagacctcattcgacacttcaacatccacactggagagaagccctatgagtgtttacagtgtggaaaggcttttacccgcatgtcagggctcacaaggcaccagtggattcatactggagagaagccgtatgtatgcatccaatgtgggaaagccttttgtcggaccacaaacctgattcgacactttagcatccacactggagagaagccctatgaatgcgtggagtgcgggaaggccttcaaccgcaggtcacccctcacaaggcaccagcggattcacactgcagagaagtcccacgaacccatccagagtgggaacgtttcttgtgagagcacagatctcattcaacactccatcatccacactgagagtagcccagtgagtgcagtgaatatggaaacgccttcaattgccgctcattcctcctcactcgacatcaacggattcatagtggaagaaaccctaccattgtaacagatgtggaaagactttttacgtacacttcagtcaacatccaagaattcctattagcgaaatagttttttaatataaccactgaagaaaatctgtggtgagaggaaacatcttaccatctggtcattcatactgaagagaaactccataagtatcatctctgtgggaaaacctgttttagatcatcatttgtcatctaaacaattatgttagaaattgacacagccaagagtcttattctacatctgataattcacccatgaaagagacccagtggttactgtgcacttaggaaaaccttcagccacatctttcttattagtttacagtgaaatgttatctcagggacattcaaacaaaggaggaggagtcatagggaagagaaagaaatggaagcacagcttctttcagacttccctgacaagcccatggcaatttgtcatcccctccttattttatttgggagagggaaatgtttcagaaacaaaagggcctcatcccctttattttccctgtgtatacattcactgctgtccagtgctgtagacaaacggtttgtttgaaaacattttgtgaaagcctgctttgttccacagcattgtctccactcttgaggagcagaagcatatatctttatgagaaagatggaggcttgagttatgaaatacttttacatttaaggagataaaggatgtacatatgaatgggcacattttactgcacacttcagacgctttgacttttttaaaaaaattgtttctccgtgtgtctttaaccacccagtaccatacttttttcttgatctggatctacttgtcaatttcttctttatttttctgtaggatggagatgatattgtagctgtttgtacataatgtaatccagggagtcctaattcttccctctgattgtggtttctcagcttttttactgctctttagagagagtaaatagttcaaaattcacctcaacaattttctagaggtcaatttggaaccaaaaatgaaataagacatgtagctaaagtaagttaaaagattatgataaactcagaaaataaacacagagaaggaatctcatttttcagtcttacagaagattgtgtgaaggctgactatacataaagtgactggaattttaacaggtgaacctgcatatgtatatgcaggtagttgtcaccatggattgagtccagtcgtagtaattaatatgtttaatcagaatattttggaatttctcttttggtattctttttgtttcttttattgtttttaattgacaatgtttatggggtttggtgtgatatttcaatacatgtgtgctaagagtaatgatcaaatcagggtaattagcatatccatctcaatcatttatcatttctttgtgtttagaaacattcacagtctgcttttctagctatttgaaaatataaaatgtattattgccaattgtactcattctgcagtgccacagaacactacaacttattcaaatggaatctt

SEQ ID NO: 10436 - protein, 562 aa, Homo sapiens; identical to SEQ ID NO: 1611

SEQ ID NO: 10437 - DNA, 1987 bp, Homo sapiens
aatttgagggtcacatacgtccaattacctgccttacatcactgtagctcttaagtttcttaagtcagaaactaacaactggagtctgtgaccttcgaggatgtggctgtgacatttacccaggaggagtgggggcagttggacgtgacccagagggccttgtacgtggaggtgatgctggagacctgtgggcttctggtcgcactgggtgacagcacaaaacctgagaccgtagagcctatcccttctcatctggccttgcctgaggaagtctcactccaggaacagctggcacagggagtcccaagatactcctatttggggcaggccatggatcaagatgggccatctgaaatgcaggaatactttttgagaccagggacagacccacagagtgagaaactccatgggaaaatgagccttgaacacgaaggtttggcgacagctgatggtatttgttcaatgatgatacagaaccaagtctcaccagaagatgctctctatggatttgactcatatggaccagttacagattccttgattcatgaaggggaaaattcctataaattcgaggaaatgtttaatgagaattgcttccttgttcagcatgagcagattctccctcgtgtgaagccctatgattgcccagaatgtgggaaagccttcggcaagagcaaacacctccttcagcatcacatcatccatactggggagaagccctataaatgcctggagtgtgggaaagacttcaaccgcaggtcacacctcacacggcaccagcggactcacaatggagataagccctttgtgtgcagtgaatgtggaaggaccttcaatcgcgggtcgcaccttacacggcaccagcgggttcacagtggagagaagccttttgtgtgcaatgaatgtggaaaggcctttacctaccgctccaattttgtcttgcataacaagagccacaatgagaagaaacccttcgcatgcagcgaatgtggaaaaggcttttatgagagtacagccctcattcaacacttcattatccatactggggagaggccctttaagtgccttgagtgtgggaaggccttcaactgcaggtcacacctcaagcagcatgagcggattcacactggtgagaagccctttgtgtgcagtcaatgtggaaaggccttcactcactattccacctatgtcctgcatgaaagagcccacactggagaaaagccttttgagtgcaaagaatgtgggaaagcctttagcattcgaaaagacctcattcgacacttcaacatccacactggagagaagccctatgagtgtttacagtgtggaaaggcttttacccgcatgtcagggctcacaaggcaccagtggattcatactggagagaagccgtatgtatgcatccaatgtgggaaagccttttgtcggaccacaaacctgattcgacactttagcatccacactggagagaagccctatgaatgcgtggagtgcgggaaggccttcaaccgcaggtcacccctcacaaggcaccagcggattcacactgcagagaagtcccacgaacccatccagagtgggaacgtttcttgtgagagcacagatctcattcaacactccatcatccacactgagagtagcccagtgagtgcagtgaatatggaaacgccttcaattgccgctcattcctcctcactcgacatcaacggattcatagtggaagaaaccctaccattgtaacagatgtggaaagactttttacgtacacttcagtcaacatccaagaattcctattagcgaaatagttttttaatataaccactgaagaaaatctgtggtgagaggaaacatcttaccatctggtcattcatactgaagagaaactccataagtatcatctctgtgggaaaacctgttttagatcatcatttgtcatctaaacaattatgttagaaattgacacagccaagagtcttattctacatct

SEQ ID NO: 10438 - protein, 521 aa, Homo sapiens; identical to SEQ ID NO: 10432

SEQ ID NO: 10439 - DNA, 3759 bp, Homo sapiens
ggagtgcacagcttcagctctagtcgaaggtgacaggacacagcctagcatagggacttgaggggtaggtggtgcagctctcccactgcatggccctacatgggaaggtggaaaagctgcttgtagatgttgggccaccaggtgggggtggatggtgatggcttatcctcagggatgaagaggtgccatggaaccagacagaatccagcctgggcgacagagtgaaggctatgtctcaagaaaaaaaaaaaaaaacttttataataacaactgtaaatagttcaattgacagtcatttgtaagatgtttaagtaaactgtgaaacagtaagtaaatggatgaaaacacactgattaaaactgctgcttttatccaacaagatggatgaatttcccaggaaagaatacttgagttcaggcctgttcaagtcccaacctgtttgtggtttgaggttgctctctgcctcgtagagcaaagtggaaaatttatcttctgggaggacagagttttcttctctgaaaaagtttcctacatagttggctttggcatttgcaaggaatgaaaggtcagggattgaggcctcatgagtctggatttctagctgaggttgagagaaaaggtagtgattgtaaccagaaaatccagagtgggtgtatttacctccagaactcatcacttaaaaaaaaattttttttgaactgacatgcttgaggctttttcttttttttttttttgagatggggtcttgctctatcccccaggctggagtgcagttgtgcagtcatagctcactgtagccttatcctcctggcctaagcagtcctcctgcctcaacctccctagtagctgagaccacaggcgcatgccacctgtgagtttctagagatgaggtctccctatgttccccagcctggtcttgaactcctgggctcaagtgatcctcctgcctcagccttccaaagtgttggattacaggcgtgagccactgtgcctggccagagctcatcactgttaactcagcctgggtttttcacagcagtcatggaaatagattcattaataatagtaacaaatatatagtctccctctcaaagaaaccttgagtggcagtggcataccagatacacagtaggaaatactgtagaattatgttgttaagttcataaccaaacatcatacatgatgataaaagacaagataatggtcacatttatgcagtattaactgagagggcaaatttgtgcctgagaagctattgggaatgttctctctctttgcattactaggaattacatgggaaacacatgtagacagtcttcaggctattaagatttgtccacttaatctttacttatacatgaataaaaaatgggaaaacatgataaatataataaactaatacactcaaccctgccccttgattatataatagaacaaaatcagcatgcccggcatgagcctgccagattgccaattccatcctccaccttcagaggatgccgccatccagaattttgccttactcattttactttcttcatagttcgacaccttaaatgtatattactaatagtagctttgcatttttggctgatttaaaaattgatataaatgaaataatgctgtagagatgctttttggtattaagtggatatactgttattcttaaagatgtttgaaatgaatatacctttctaaatatctttttaaaataatacattaaatgatactgctttagaattcatgaactgcatctcatgagaatatgtagagatgacgtgggcaggtaaagtaaaacttcaggttgaatatcctatgataatttaaaaatgacaaaatagtgtggtgaataatagagcttgagcactttaaggcaccgtagggaccccttcaatgtaatgatgacagtgctgaggtgcagagaagttaggtaatcagcccaagccactactctaaggacagaccctatctacttttcctaatttgtcagaagactgcctatgatactactaataaaaagtcctatgaaattggtattgtcattattttacaaataaaataatcttcaatttttgtttcctctatgcatgggttacttagtattttgtaatttgaatttcaagcataattaaaaagaaatcaggtatctaggctgggcatgatggctcaagcctgtaatctcaacattttgggaggctgaggcaagaggatcacttgaggccaggagtttgaggtatcttttgttgatctctacactgattgtattctctcttttattctatgaaagttaaagattttttctgatactacatattgtcagttttttaaatactcagtttgtgctaaaagaaaacattcggcaactgatatctgctgttctgtatgtatctgtcagtccagatttgtccattatggtgtatgaatctaatagaacctcaccaatgttatacctgccttcttgaaatcattactgagatagctaatattaaaatatcctggtttgtctgtatatttaattctttactctcattatactaaatttttttaatgtaatttgaattgatggtaaaaattgtatacaggccgggtgcagtggctcactcctataatcccagcattttggaagtcctatgcaggaggattgccagaggccaggaatttgagatcagcctgggcaacatagtgaaactctcatctttataaaaagtaatattaaaatttttaaaagtgtataaactgtaaagtatattttactggtgttttcttccttattcctacttgtcagatgcaaatacacatttttgtgtgtttgtgtttagtaattataagtatacatatttcattcttctatttcatatatttctatgacattatatcttagatgtgtaatttatgaactactactggattattttaatccattagaaattactattcacgcattctgtattcaattcatgtgatagctaatatatttggttttaaatgcatcttattttgtggttttcttctaggctgttttttgtgctttcttttaaaaatatataggttttaataatcttaattttcttttagtttgaaatgtatatactcattttattcattagtctaagataagaattgtaacacttctctaacctattatagaattgttaatacctttacccttctcttgaacacatcaaaggatgtcattgagtgttggtattggagtatagcatatctattattctgctcaattagaagatattgttcatgttgtatagagataataagtaattgtattgatctgcagatgcatccatctcttggattctcattccttctaccactgcagaactttcacctgtaatcactttcctttggccttaaggataacttttagggttacttttctactaaatttccaatttttgaccagatataatcttatattgtgctcttcctgaaaaatactattgttgtggatagaaatctgggttggtagttatttcttcagcaatttgaccatgtcattccactgtgtccctggcctcctgtatactggatgtgaatggatacaattatatattgtgtttatagttttcctgtgctataggaacagtattcgaatctgatgcaaaggacaacacaccctagagattgtaacagtgagatgaaccaagtgattggatggggttttgagttgctggaataatggagttacagtgtacaatgcataagcaacataataaattatatatctggtgaacaaatgga

SEQ ID NO: 10440 - protein, 32 aa, Homo sapiens
MLGHQVGVDGDGLSSGMKRCHGTRQNPAWATE

SEQ ID NO: 10441 - DNA, 235 bp, Homo sapiens
tggtgctcaacgtgtgtgacatgtattggatgaaggaatatacctcatccattggaattggagtttttcattcagaaattgaagtctatggcagagaatttttgttttagggagcacggacttcctagaagatgatatagaaaaaattgtagaagaactgggaaaagaatacaaaggcaatgtttatcatttaatgcataaaaactgcaatcatttttcttcagctttatcagag

SEQ ID NO: 10442 - DNA, 3742 bp, Homo sapiens
gtcgcgtgacgtcatctccgtgagcaggattggccctggaacagtgtggggcctggaccgctgggtaggcgcgtccagcggcctgagcaggggagggtaatgaggctgttacgcgccttctccgcatcttggcgggagcctgacgccccgcttcttccctaacggggtgttccaccggcgcctgccgaggcctaggcctccgcagccgccctccgtctcctcagccccgacgctgcgcccgctttgtgcgcatttttctctggggaaactgaggctccgagtgcgaaagtcagccgaggtcgccccgcccaggacagagaagggctgggggtcggctgagccgcggcattcccgggccccgctagggctgcagggtctcaggatggcagcctcggcgcaggtgtctgtgacctttgaggatgtggctgtgacattcacccaggaggagtggggacagttggatgcagcccagagaaccttgtatcaggaggtgatgctggagacctgcggacttctcatgtctctgggctgtcctttgttcaaaccagagctgatctaccagttggatcacagacaggagctatggatggctacaaaagacctctcccaaagctcctatccaggtgacaacacaaaacccaagaccacagagcctaccttttctcacctggccttgcctgaggaagtcttactccaggaacaactgacacaaggagcctcaaagaactcccaattagggcaatccaaggatcaggatgggccatctgaaatgcaagaagtccacttgaaaatagggataggcccccagcgggggaagctgctggagaaaatgagttctgaacgtgatggtttggggtcagatgatggtgtatgtacaaagattacacagaaacaagtttcaacagaaggtgatctctatgaatgtgattcacatggaccagttacagatgccttgattcgcgaagagaaaaattcctataaatgtgaggaatgcgggaaagtgtttaaaaagaatgccctccttgttcagcatgaacggattcacactcaagtgaagccctatgaatgcacagagtgtgggaaaacctttagcaagagcactcatcttcttcagcacctcatcatccacactggggagaagccctataagtgcatggagtgtgggaaggcttttaaccgcaggtcacacctcacacggcaccagcggattcacagtggagagaagccttataagtgcagtgaatgtggaaaggccttcacccaccgctccacttttgtcttgcatcacaggagccacactggagaaaaaccctttgtgtgcaaagagtgtggcaaagcctttcgagataggccaggtttcattcgacactacatcatccacacgggagagaagccctatgagtgcattgagtgtgggaaggccttcaaccgccggtcatacctcacgtggcaccaacagattcacactggagtgaaaccctttgaatgcaacgagtgtggaaaagctttttgcgagagtgcagacctcattcaacactacattatccacactggggagaagccctataagtgcatggagtgtgggaaggcgttcaaccgtaggtcacacctcaagcagcatcaacggattcacactggggagaagccttatgaatgcagtgaatgtggaaaggccttcacccactgctccacttttgtcttgcataaaaggacccacacaggagaaaaaccctatgaatgcaaagaatgtggaaaagcctttagtgatagggcagacctcattcgccacttcagcatccacactggagagaaaccctatgagtgcgtggagtgtggaaaggccttcaaccgcagctcacacctcacgaggcaccaacagattcacactggagagaaaccctatgaatgcatccagtgtgggaaagccttttgccggagcgcaaaccttattcgacactccatcattcacactggagagaagccgtatgaatgcagtgagtgtggaaaggcttttaatcgcggctcatccctcacacatcatcaaaggattcatactgggagaaaccctaccattgtaacagatgtgggaagaccttttatgactgcacagacttcagtcaacatccaggaacttttattagggaaagagtttttgaatatcaccactgaagaaaatctgtggtgaaagggaacatcttaccatctggccattcacactgaagagaaacttcataagcatcctctctttgagaaaacgtgtaatagatgatcatttgtcgtctaaacaatcaagttagaaattgaaccagcctggagtcttattctccacctgagaattcacccatgagagagacccagtggttgctatgcacttaggaaaactttcagccacatctttcttcttagtttacagtgaaatattatctcagggatattttttttttttttttgagacggagtctcgctctgtcgcccaggctggagtgcagtggcgggatctcggctcactgcaagctccgcctcccgggttcacgccattctcctgcctcagcctcccaagtagctgggactacaggcacccgccactacgcctggctaattttttgtatttttagtagagacggggtttcaccgttttagccgggatggtctcgatctcctgacctcgtgatccgcccgcctcagcctcccaaagtgctgggattacaggcgtgagccaccgcgcccggccatctcagggatatttaaacaaaggaagaggaaatatagggaagagaaagaaaccacagcttcttttagacttgtctgacaagcctatggcaattttgtcgtccctttgttattttatgtgggagagggaaatgtttcagaaacgaaagatctcatcccctttatttttctgtgtatgcattcactgctgcccagtgtcagaacagttatacaaacgagggcttgaaaacattttgtgaaaacttgcttagtcctgcaacgttctccactctcgaggtgcagaagcatacatctttataaaaaatatggaggcttgagttatgaaacacttttataaggagataaggatgtacatatgtttggacacattgtccacttcagatgcttgtttaaaaaaatgtttcaccatgtgtctttacccaatacacatactttttcttgatgtggatttactttttttttttttttttaagttttcctgggatagggatgatagtgtaattgttcatgcccacagtaatcctgggaatcttagttttttcctatgattgtggtttctcagcttctttacctctcctttgagttaggtccacctcagttttctaaaggtcaaattaaggcccccccaaaaatacagtatgtagctgaattcctttgaaagatcatgataaactcagaagaacaaacatagaaggaatgtcatttttaatctttttaaagagtgtgtgaaaattcactttaactggaattttaacaggcaagccggcatgcatatatgtagggatgtgtgactttcacagttgtcaccatggacttaggcttgattaaaatgctacacatttagagcgttttgtaattccttttttatatttttaagactagattttgagccatgtgatagttttacctcatattaaatatattgtacagaagtaaaaataatcatgtattcactttgaactcctcaaagccttttttatttatttacttatttacttacttggtttaggag

SEQ ID NO: 10443 - protein, 600 aa, Homo sapiens
MAASAQVSVTFEDVAVTFTQEEWGQLDAAQRTLYQEVMLETCGLLMSLGCPLFKPELIYQLDHRQELWMATKDLSQSSYPGDNTKPKTTEPTFSHLALPEEVLLQEQLTQGASKNSQLGQSKDQDGPSEMQEVHLKIGIGPQRGKLLEKMSSERDGLGSDDGVCTKITQKQVSTEGDLYECDSHGPVTDALIREEKNSYKCEECGKVFKKNALLVQHERIHTQVKPYECTECGKTFSKSTHLLQHLIIHTGEKPYKCMECGKAFNRRSHLTRHQRIHSGEKPYKCSECGKAFTHRSTFVLHHRSHTGEKPFVCKECGKAFRDRPGFIRHYIIHTGEKPYECIECGKAFNRRSYLTWHQQIHTGVKPFECNECGKAFCESADLIQHYIIHTGEKPYKCMECGKAFNRRSHLKQHQRIHTGEKPYECSECGKAFTHCSTFVLHKRTHTGEKPYECKECGKAFSDRADLIRHFSIHTGEKPYECVECGKAFNRSSHLTRHQQIHTGEKPYECIQCGKAFCRSANLIRHSIIHTGEKPYECSECGKAFNRGSSLTHHQRIHTGRNPTIVTDVGRPFMTAQTSVNIQELLLGKEFLNITTEENLW

SEQ ID NO: 10444 - DNA, 700 bp, Homo sapiens
ctggatgcattcatagggtttctctccagtgtgaatctgttggtgcctcgtgaggtgtgagctgcggttgaaggcctttccacactccacgcactcatagggtttctctccagtgtggatgctgaagtggcgaatgaggtctgccctatcactaaaggcttttccacattctttgcattcatagggtttttctcctgtgtgggtccttttatgcaagacaaaagtggagcagtgggtgaaggcctttccacattcactgcattcataaggcttctccccagtgtgaatccgttgatgctgcttgaggtgtgacctacggttgaacgccttcccacactccatgcacttatagggcttctccccagtgtggataatgtagtgttgaatgaggtctgcactctcgcaaaaagcttttccacactcgttgcattcaaagggtttcactccagtgtgaatctgttggtgccacgtgaggtatgaccggcggttgaaggccttcccacactcaatgcactcatagggcttctctcccgtgtggatgatgtagtgtcgaatgaaacctggcctatctcgaaaggctttgccacactctttgcacacaaagggtttttctccatgtgaatccgctggtgccgtgtgaggtgtgacctgcggttaaaagccttcccacactccatgcacttatagggcttctccccag

SEQ ID NO: 10445 - protein, 33 aa, Homo sapiens
MQDKSGAVGEGLSTFTAFIRLLPSVNPLMLLEV

SEQ ID NO: 10446 - DNA, 1044 bp, Homo sapiens
ctcccagcaccctcagaagagaggaccagctcctcgggcggccattccaggcctacctctgaccccctagtccctgttctcaccaggcacagagagttcccggaactccccaaactcattctcctctccatgcatgcatttgtacgaactgcccctgcgccttcgagtccgttccacaccttatgccactgatgaggggagcggaacccctccacataatgcgacggagtgagcaccctgaagtgcgcgatgagagcgaacatcccaggacacaccaaccaggccggggtgcgcttgagggatgcccccactcacctgaacccggtccatcagcaccgccgctgccatgagaagcggatgaacagtctgtgccctgtgggctcagccgaaaccccacgcctccaccgcgctggacgccctcgggctgagtgtagcactccaagtctcaatctacccggtgtaaaaacgctcacaagactaaggcggctgcttctgggggagacaaggacaagaggacgtgtgtggaggcctcggttccacgagagccgcgtagaaagccgacccgatctctagaactcagccttcacaaccagaatgcacggaccgggcataggaaaaatacgtcacgacggcgacgccagaagtctcgcccctgcagcccagagcagcaggaaacgcccagtttctgggctgtcattggctgcacgccggctaacaatgagctgggcacagatttctgggtaacgtagtttgtaccctgcatccaaccaggcaacgagcgcctttcgggttctcccggatgtctgccaagaggcgtcgtgcagggagggggagaaaagactgggaaaacgatatctcggaggccacagctgcttttaaagggtatgcaccctgatttccatggccacctgggacaatgccacgccactgaagtcgccagcaagggacccattcttcaatcctgcttctgaggccctgggaaacctgcttcacctctctcagatttggggattgaaacgtattaataaattgaacgttgtctgt

SEQ ID NO: 10447 - protein, 107 aa, Homo sapiens
MRANIPGHTNQAGVRLRDAPTHLNPVHQHRRCHEKRMNSLCPVGSAETPRLHRAGRPRAECSTPSLNLPGVKTLTRLRRLLLGETRTRGRVWRPRFHESRVESRPDL

SEQ ID NO: 10448 - DNA, 963 bp, Homo sapiens
ttcctatgcccggtccgtgcattctggttgtgaaggctgagttctagagatcgggtcggctttctacgcggctctcgtggaacctagcaaagaaagacagtgaagactgcaggaccttccttcgcgcttttgttacaatccatgacccctgtcgtgggacgggcggcctctcgcggaggtgtctgccggggctgggctcttaccgaggcctccacacacgtcctcttgtccttgtctcccccagaagcagccgccttagtcttgtgagcgtttttacaccgggtagattgagacttggagtgctacactcagcccgagggcgtccagcgcggtggaggcgtggggtttcggctgagcccacagggcacagactgttcatccgcttctcatggcagcggcggtgctgatggaccgggttcagagttgtgtgaccttcgaggatgtgttcgtgtacttctctcgggaggagtgggaactccttgaggaggcacagagattcctgtaccgtgatgtgatgctggagaactttgcacttgtggctacactaggtttttggtgtgaagcagaacatgaggcaccttctgagcagagcgtttctgtagaaggagtgtcacaggtcaggactgctgagtcaggtcttttccagaaagcacacccatgtgagatgtgtgacccactcttgaaagacattttgcacctggctgaacaccagggatcacaccttacacagaaactgtgcacacgtgggctgtgtaggagaagattctcgttcagtgcaaacttttaccagcaccagaagcaacataatggagagaattgcttcagaggggatgatggaggggcctcatttgtgaagagctgtacagtccacatgttagggagatcctttacgtgcagggaggaagggatggacttaccagatagctctggccttttccagcaccagaccacttacaatagggt

SEQ ID NO: 10449 - protein, 190 aa, Homo sapiens
MAAAVLMDRVQSCVTFEDVFVYFSREEWELLEEAQRFLYRDVMLENFALVATLGFWCEAEHEAPSEQSVSVEGVSQVRTAESGLFQKAHPCEMCDPLLKDILHLAEHQGSHLTQKLCTRGLCRRRFSFSANFYQHQKQHNGENCFRGDDGGASFVKSCTVHMLGRSFTCREEGMDLPDSSGLFQHQTTYN

SEQ ID NO: 10450 - DNA, 3438 bp, Homo sapiens
cctatgcccggtccgtgcattctggttgtgaaggctgagttctagagatcgggtcggctttctacgcggctctcgtggaacctagcaaagaaagacagtgaagactgcaggaccttccttcgcgcttttgttacaatccatgacccctgtcgtgggacgggcggcctctcgcggaggtgtctgccggggctgggctcttaccgaggcctccacacacgtcctcttgtccttgtctcccccagaagcagccgccttagtcttgtgagcgtttttacaccgggtagattgagacttggagtgctacactcagcccgagggcgtccagcgcggtggaggcgtggggtttcggctgagcccacagggcacagactgttcatccgcttctcatggcagcggcggtgctgatggaccgggttcagagttgtgtgaccttcgaggatgtgttcgtgtacttctctcgggaggagtgggaactccttgaggaggcacagagattcctgtaccgtgatgtgatgctggagaactttgcacttgtggctacactagctttcattttcccagtcccatgcagttgcgcagttggagggggcagaaaaccttgggtgcctgacagggcagacatcactgcagccacagtaaaggagacctacagagggcatggccctgctgaatgggagctggaagagggtttttggtgtgaagcagaacatgaggcaccttctgagcagagcgtttctgtagaaggagtgtcacaggtcaggactgctgagtcaggtcttttccagaaagcacacccatgtgagatgtgtgacccactcttgaaagacattttgcacctggctgaacaccagggatcacaccttacacagaaactgtgcacacgtgggctgtgtaggagaagattctcgttcagtgcaaacttttaccagcaccagaagcaacataatggagagaattgcttcagaggggatgatggaggggcctcatttgtgaagagctgtacagtccacatgttagggagatcctttacgtgcagggaggaagggatggacttaccagatagctctggccttttccagcaccagaccacttacaatagggtgagtccatgcagaaggactgaatgcatggagtctttcccacacagctccagtctcaggcaacaccaaggagactatgatggacagatgcttttcagttgcggtgatgaagggaaagccttcctggacacctttactcttcttgacagccagatgactcatgctgaggtgagacccttcagatgcctaccatgtggaaatgtgttcaaggagaaatcagctcttattaatcacagaaaaatccacagtggagaaatatctcatgtgtgtaaggagtgtggaaaagccttcattcacttgcaccacctaaaaatgcaccagaaatttcacactggaaaaagacactatacatgcagtgaatgtgggaaggccttcagccgcaaggacacacttgttcagcatcagagagttcacactggagaaagatcttatgactgcagtgaatgtggaaaagcctacagcagaagctcccaccttgttcagcaccagagaattcacacaggagaaaggccttataagtgcaacaaatgtgggaaagcctttagccgtaaagacacacttgttcagcaccagagatttcatactggagaaaggccttatgagtgcagtgaatgtggaaaattctttagccaaagctcccaccttattgagcactggagaattcataccggggcaaggccctatgaatgcatagaatgtggaaaattctttagccataactctagcctcattaaacatcggagagtccacacaggagcaagatcctacgtgtgcagcaaatgtgggaaggcctttggctgcaaagacacacttgttcagcaccagataattcacactggagcaaggccttatgagtgcagtgaatgtgggaaggccttcagccgtaaagacacacttgtgcaacaccaaaaaatccacactggagaaaggccttatgagtgtggtgaatgtggtaaattcttcagccatagctccaaccttattgtacaccagagaattcacactggagcaaagccttatgagtgcaatgaatgtgggaaatgctttagccacaactccagcctcattttgcaccagagagttcacacaggagcaaggccttatgtgtgcagtgaatgtgggaaggcttacattagtagctcccaccttgttcaacacaagaaagttcacactggagcaagaccttatgagtgcagtgaatgtgggaaattctttagccgcaactctggcctcattctgcaccagagggttcacactggagaaaagccttacgtatgcagcgaatgtgggaaagcctatagcagaagctcccatcttgttcgtcaccagaaagctcacactggagaaagagctcacgagtgcaacagttttggtggccctttagctgcatctcttaaacttgtttaacaccagaaaattcacacaagagaaaggccttatgaatgcagaaaatatgtcatcttgttcatcctcataggactcacaccagagcaatgctctgtgagtaccctttgtgagggaaccatcagctagcagatgagcaccgtatattcattccaccctggggagattcctgataagcaccacatatgtgggaggctttcatgaggtgtgttgcactttgtaactgtctagagctcttgatggaattatatcactgccagtgcctgtggcggaagccatcttattgctaccagctgtgtgtgtcaatcactccattttgctcagggaaggcagacttctgtgctttctttcctgttccctacaggtaatcatgaatattttcaaggacttccccccccccccacttcaccccctaccattgagggtcctcatcttttccctcatgattaggttctgagcaaacatgatctagctctcaccaaaaggacctgagctagggtctgctgggatttcctgacacgattttccatcttcatggacaatgttaactgtaaacgtgatagctgtgacttacttgtcttactgccaaatcgcccaaatttggaactgcttgtcccatgctgctctgatttatacagtgataagggcctattgtggcagtctttactcttggggattttgttactgtgtagagtggattgagaaaagaattgggttctgtcatgaagggagtagcaccttttgtgggcaccacctttatgtgcctcagaggggaccaaaggatggcagaaaactgttctcagtctagtttgacctaatttacactattgccctaggcttgctaggaaagactgaaaaaatttttgtgcctaactttgtggcctggctgccaggatttcctgtgagcccagtgaggagggcatagttggtgcga

SEQ ID NO: 10451 - protein, 706 aa, Homo sapiens
MAAAVLMDRVQSCVTFEDVFVYFSREEWELLEEAQRFLYRDVMLENFALVATLAFIFPVPCSCAVGGGRKPWVPDRADITAATVKETYRGHGPAEWELEEGFWCEAEHEAPSEQSVSVEGVSQVRTAESGLFQKAHPCEMCDPLLKDILHLAEHQGSHLTQKLCTRGLCRRRFSFSANFYQHQKQHNGENCFRGDDGGASFVKSCTVHMLGRSFTCREEGMDLPDSSGLFQHQTTYNRVSPCRRTECMESFPHSSSLRQHQGDYDGQMLFSCGDEGKAFLDTFTLLDSQMTHAEVRPFRCLPCGNVFKEKSALINHRKIHSGEISHVCKECGKAFIHLHHLKMHQKFHTGKRHYTCSECGKAFSRKDTLVQHQRVHTGERSYDCSECGKAYSRSSHLVQHQRIHTGERPYKCNKCGKAFSRKDTLVQHQRFHTGERPYECSECGKFFSQSSHLIEHWRIHTGARPYECIECGKFFSHNSSLIKHRRVHTGARSYVCSKCGKAFGCKDTLVQHQIIHTGARPYECSECGKAFSRKDTLVQHQKIHTGERPYECGECGKFFSHSSNLIVHQRIHTGAKPYECNECGKCFSHNSSLILHQRVHTGARPYVCSECGKAYISSSHLVQHKKVHTGARPYECSECGKFFSRNSGLILHQRVHTGEKPYVCSECGKAYSRSSHLVRHQKAHTGERAHECNSFGGPLAASLKLV

SEQ ID NO: 10452 - DNA, 3849 bp, Homo sapiens
tgaaggctgagttctagagatcgggtcggctttctacgcggctctcgtggaacctagcaaagaaagacagtgaagactgcaggaccttccttcgcgcttttgttacagcctccacacacgtcctcttgtccttgtctcccccagaagcagccgccttagtcttgtgagcgtttttacaccgggtagattgagacttggagtgctacactcagcccgagggcgtccagcgcggtggaggcgtggggtttcggctgagcccacagggcacagactgttcatccgcttctcatggcagcggcggtgctgatggaccgggttcagagttgtgtgaccttcgaggatgtgttcgtgtacttctctcgggaggagtgggaactccttgaggaggcacagagattcctgtaccgtgatgtgatgctggagaactttgcacttgtggctacactaggtttttggtgtgaagcagaacatgaggcaccttctgagcagagcgtttctgtagaaggagtgtcacaggtcaggactgctgagtcaggtcttttccagaaagcacacccatgtgagatgtgtgacccactcttgaaagacattttgcacctggctgaacaccagggatcacaccttacacagaaactgtgcacacgtgggctgtgtaggagaagattctcgttcagtgcaaacttttaccagcaccagaagcaacataatggagagaattgcttcagaggggatgatggaggggcctcatttgtgaagagctgtacagtccacatgttagggagatcctttacgtgcagggaggaagggatggacttaccagatagctctggccttttccagcaccagaccacttacaatagggtgagtccatgcagaaggactgaatgcatggagtctttcccacacagctccagtctcaggcaacaccaaggagactatgatggacagatgcttttcagttgcggtgatgaagggaaagccttcctggacacctttactcttcttgacagccagatgactcatgctgaggtgagacccttcagatgcctaccatgtggaaatgtgttcaaggagaaatcagctcttattaatcacagaaaaatccacagtggagaaatatctcatgtgtgtaaggagtgtggaaaagccttcattcacttgcaccacctaaaaatgcaccagaaatttcacactggaaaaagacactatacatgcagtgaatgtgggaaggccttcagccgcaaggacacacttgttcagcatcagagagttcacactggagaaagatcttatgactgcagtgaatgtggaaaagcctacagcagaagctcccaccttgttcagcaccagagaattcacacaggagaaaggccttataagtgcaacaaatgtgggaaagcctttagccgtaaagacacacttgttcagcaccagagatttcatactggagaaaggccttatgagtgcagtgaatgtggaaaattctttagccaaagctcccaccttattgagcactggagaattcataccggggcaaggccctatgaatgcatagaatgtggaaaattctttagccataactctagcctcattaaacatcggagagtccacacaggagcaagatcctacgtgtgcagcaaatgtgggaaggcctttggctgcaaagacacacttgttcagcaccagataattcacactggagcaaggccttatgagtgcagtgaatgtgggaaggccttcagccgtaaagacacacttgtgcaacaccaaaaaatccacactggagaaaggccttatgagtgtggtgaatgtggtaaattcttcagccatagctccaaccttattgtacaccagagaattcacactggagcaaagccttatgagtgcaatgaatgtgggaaatgctttagccacaactccagcctcattttgcaccagagagttcacacaggagcaaggccttatgtgtgcagtgaatgtgggaaggcttacattagtagctcccaccttgttcaacacaagaaagttcacactggagcaagaccttatgagtgcagtgaatgtgggaaattctttagccgcaactctggcctcattctgcaccagagggttcacactggagaaaagccttacgtatgcagcgaatgtgggaaagcctatagcagaagctcccatcttgttcgtcaccagaaagctcacactggagaaagagctcacgagtgcaacagttttggtggccctttagctgcatctcttaaacttgtttaacaccagaaaattcacacaagagaaaggccttatgaatgcagaaaatatgtcatcttgttcatcctcataggactcacaccagagcaatgctctgtgagtaccctttgtgagggaaccatcagctagcagatgagcaccgtatattcattccaccctggggagattcctgataagcaccacatatgtgggaggctttcatgaggtgtgttgcactttgtaactgtctagagctcttgatggaattatatcactgccagtgcctgtggcggaagccatcttattgctaccagctgtgtgtgtcaatcactccattttgctcagggaaggcagacttctgtgctttctttcctgttccctacaggtaatcatgaatattttcaaggacttccccccccccccacttcaccccctaccattgagggtcctcatcttttccctcatgattaggttctgagcaaacatgatctagctctcaccaaaaggacctgagctagggtctgctgggatttcctgacacgattttccatcttcatggacaatgttaactgtaaacgtgatagctgtgacttacttgtcttactgccaaatcgcccaaatttggaactgcttgtcccatgctgctctgatttatacagtgataagggcctattgtggcagtctttactcttggggattttgttactgtgtagagtggattgagaaaagaattgggttctgtcatgaagggagtagcaccttttgtgggcaccacctttatgtgcctcagaggggaccaaaggatggcagaaaactgttctcagtctagtttgacctaatttacactattgccctaggcttgctaggaaagactgaaaaaatttttgtgcctaactttgtggcctggctgccaggatttcctgtgagcccagtgaggagggcatagttggtgcgaaaatctcctgtgcttgtggaagcaacataagttgggtcccttaactgtcacgtactccccagcactgttgagggattgctgtcttctgtacctgtacaggatcaagtccctgatatccagaaccccataggcaagtaacattgactgtaagacctctgtagggcaatgtgaaaatcatgattgctacagaagcactgagataatggagtggggatgactgtggcaaacaaaaggagattcgaacattctagaggggcatccacaagtctcggtgcagttatgatggtgtgggatgggagtgcatagaaattctcaggaccttcagacatctgtatctcctgtggccaaggccactgtcagaggaaataatctaaatgtttgtggattcctgtgtctccctgggcagttgacctgcacagacaggaacctcagcagtgacagaagagagatccagggatgggtcttctctgacccagccagcattccgagtgactgaggtggatgtggacatcattgcttaccaatttttaccaacattgaggcagggctcactctcctaaattgtagggagaggaatatggtaaagccaaaatagttgacagatctaactttcctagtggaacagtatatatagattttaatgaggaaca

SEQ ID NO: 10453 - protein, 659 aa, Homo sapiens
MAAAVLMDRVQSCVTFEDVFVYFSREEWELLEEAQRFLYRDVMLENFALVATLGFWCEAEHEAPSEQSVSVEGVSQVRTAESGLFQKAHPCEMCDPLLKDILHLAEHQGSHLTQKLCTRGLCRRRFSFSANFYQHQKQHNGENCFRGDDGGASFVKSCTVHMLGRSFTCREEGMDLPDSSGLFQHQTTYNRVSPCRRTECMESFPHSSSLRQHQGDYDGQMLFSCGDEGKAFLDTFTLLDSQMTHAEVRPFRCLPCGNVFKEKSALINHRKIHSGEISHVCKECGKAFIHLHHLKMHQKFHTGKRHYTCSECGKAFSRKDTLVQHQRVHTGERSYDCSECGKAYSRSSHLVQHQRIHTGERPYKCNKCGKAFSRKDTLVQHQRFHTGERPYECSECGKFFSQSSHLIEHWRIHTGARPYECIECGKFFSHNSSLIKHRRVHTGARSYVCSKCGKAFGCKDTLVQHQIIHTGARPYECSECGKAFSRKDTLVQHQKIHTGERPYECGECGKFFSHSSNLIVHQRIHTGAKPYECNECGKCFSHNSSLILHQRVHTGARPYVCSECGKAYISSSHLVQHKKVHTGARPYECSECGKFFSRNSGLILHQRVHTGEKPYVCSECGKAYSRSSHLVRHQKAHTGERAHECNSFGGPLAASLKLV

SEQ ID NO: 10454 - DNA, 3331 bp, Homo sapiens
atcgggtcggctttctacgcggctctcgtggaacctagcaaagaaagacagtgaagactgcaggaccttccttcgcgcttttgttacaatccatgacccctgtcgtgggacgggcggcctctcgcggaggtgtctgccggggctgggctcttaccgaggcctccacacacgtcctcttgtccttgtctcccccagaagcagccgccttagtcttgtgagcgtttttacaccgggtagattgagacttggagtgctacactcagcccgagggcgtccagcgcggtggaggcgtggggtttcggctgagcccacagggcacagactgttcatccgcttctcatggcagcggcggtgctgatggaccgggttcaggttgagaacagactgtgagcatgagggagcagctactgcagtagtgttgatggtgtctggtctagaggtgtggctgtggagagttgtgtgaccttcgaggatgtgttcgtgtacttctctcgggaggagtgggaactccttgaggaggcacagagattcctgtaccgtgatgtgatgctggagaactttgcacttgtggctacactaggtttttggtgtgaagcagaacatgaggcaccttctgagcagagcgtttctgtagaaggagtgtcacaggtcaggactgctgagtcaggtcttttccagaaagcacacccatgtgagatgtgtgacccactcttgaaagacattttgcacctggctgaacaccagggatcacaccttacacagaaactgtgcacacgtgggctgtgtaggagaagattctcgttcagtgcaaacttttaccagcaccagaagcaacataatggagagaattgcttcagaggggatgatggaggggcctcatttgtgaagagctgtacagtccacatgttagggagatcctttacgtgcagggaggaagggatggacttaccagatagctctggccttttccagcaccagaccacttacaatagggtgagtccatgcagaaggactgaatgcatggagtctttcccacacagctccagtctcaggcaacaccaaggagactatgatggacagatgcttttcagttgcggtgatgaagggaaagccttcctggacacctttactcttcttgacagccagatgactcatgctgaggtgagacccttcagatgcctaccatgtggaaatgtgttcaaggagaaatcagctcttattaatcacagaaaaatccacagtggagaaatatctcatgtgtgtaaggagtgtggaaaagccttcattcacttgcaccacctaaaaatgcaccagaaatttcacactggaaaaagacactatacatgcagtgaatgtgggaaggccttcagccgcaaggacacacttgttcagcatcagagagttcacactggagaaagatcttatgactgcagtgaatgtggaaaagcctacagcagaagctcccaccttgttcagcaccagagaattcacacaggagaaaggccttataagtgcaacaaatgtgggaaagcctttagccgtaaagacacacttgttcagcaccagagatttcatactggagaaaggccttatgagtgcagtgaatgtggaaaattctttagccaaagctcccaccttattgagcactggagaattcataccggggcaaggccctatgaatgcatagaatgtggaaaattctttagccataactctagcctcattaaacatcggagagtccacacaggagcaagatcctacgtgtgcagcaaatgtgggaaggcctttggctgcaaagacacacttgttcagcaccagataattcacactggagcaaggccttatgagtgcagtgaatgtgggaaggccttcagccgtaaagacacacttgtgcaacaccaaaaaatccacactggagaaaggccttatgagtgtggtgaatgtggtaaattcttcagccatagctccaaccttattgtacaccagagaattcacactggagcaaagccttatgagtgcaatgaatgtgggaaatgctttagccacaactccagcctcattttgcaccagagagttcacacaggagcaaggccttatgtgtgcagtgaatgtgggaaggcttacattagtagctcccaccttgttcaacacaagaaagttcacactggagcaagaccttatgagtgcagtgaatgtgggaaattctttagccgcaactctggcctcattctgcaccagagggttcacactggagaaaagccttacgtatgcagcgaatgtgggaaagcctatagcagaagctcccatcttgttcgtcaccagaaagctcacactggagaaagagctcacgagtgcaacagttttggtggccctttagctgcatctcttaaacttgtttaacaccagaaaattcacacaagagaaaggccttatgaatgcagaaaatatgtcatcttgttcatcctcataggactcacaccagagcaatgctctgtgagtaccctttgtgagggaaccatcagctagcagatgagcaccgtatattcattccaccctggggagattcctgataagcaccacatatgtgggaggctttcatgaggtgtgttgcactttgtaactgtctagagctcttgatggaattatatcactgccagtgcctgtggcggaagccatcttattgctaccagctgtgtgtgtcaatcactccattttgctcagggaaggcagacttctgtgctttctttcctgttccctacaggtaatcatgaatattttcaaggacttccccccccccccacttcaccccctaccattgagggtcctcatcttttccctcatgattaggttctgagcaaacatgatctagctctcaccaaaaggacctgagctagggtctgctgggatttcctgacacgattttccatcttcatggacaatgttaactgtaaacgtgatagctgtgacttacttgtcttactgccaaatcgcccaaatttggaactgcttgtcccatgctgctctgatttatacagtgataagggcctattgtggcagtctttactcttggggattttgttactgtgtagagtggattgagaaaagaattgggttctgtcatgaagggagtagcaccttttgtgggcaccacctttatgtgcctcagaggggaccaaaggatggcagaaaactgttctcagtctagtttgacctaatttacactattgccctaggcttgctaggaaagactgaaaaaatttttgtgcctaactttgtggcctggctgccaggatttcctgtgagcccagtgaggagggcatagttggtgcga

SEQ ID NO: 10455 - protein, 617 aa, Homo sapiens
MLENFALVATLGFWCEAEHEAPSEQSVSVEGVSQVRTAESGLFQKAHPCEMCDPLLKDILHLAEHQGSHLTQKLCTRGLCRRRFSFSANFYQHQKQHNGENCFRGDDGGASFVKSCTVHMLGRSFTCREEGMDLPDSSGLFQHQTTYNRVSPCRRTECMESFPHSSSLRQHQGDYDGQMLFSCGDEGKAFLDTFTLLDSQMTHAEVRPFRCLPCGNVFKEKSALINHRKIHSGEISHVCKECGKAFIHLHHLKMHQKFHTGKRHYTCSECGKAFSRKDTLVQHQRVHTGERSYDCSECGKAYSRSSHLVQHQRIHTGERPYKCNKCGKAFSRKDTLVQHQRFHTGERPYECSECGKFFSQSSHLIEHWRIHTGARPYECIECGKFFSHNSSLIKHRRVHTGARSYVCSKCGKAFGCKDTLVQHQIIHTGARPYECSECGKAFSRKDTLVQHQKIHTGERPYECGECGKFFSHSSNLIVHQRIHTGAKPYECNECGKCFSHNSSLILHQRVHTGARPYVCSECGKAYISSSHLVQHKKVHTGARPYECSECGKFFSRNSGLILHQRVHTGEKPYVCSECGKAYSRSSHLVRHQKAHTGERAHECNSFGGPLAASLKLV

SEQ ID NO: 10456 - DNA, 591 bp, Homo sapiens
ctcttgccgtggttgatttgattttctctggtgttttcactagttccggcctttggcgctctatgacgtcaccgaagtgacggagcggaaaagcgcgagaagcggcttggttccttgtacgcagaggcggtagtgacacaggcacaactgacagtggcagaagctcagctgacaaggactggggacggcggtgtccttgtcttgcctttgtcgcccccgcccctctcttccctggctggacttgcggagtccccgccgaagaacccgaggagccatatattgaagaccatgtctggaagcttctactttgtaattgttggtcaccatgataatccagtttttgaaatggagtttttgccagctgggaaggcagaatccaaagacgaccatcgtcatctgaaccagttcatagctcatgctgctctcgacctcgtagatgagaacatgtggctgtcgaacaacatgtacttgaaaactgtggacaagttcaacgagtggtttgtgtcagcatttgtcaccgcggggcatatgaggtttattatgcttcatgacataagacaagaagatggaataaagaacttctttactgat

SEQ ID NO: 10457 - protein, 100 aa, Homo sapiens
MSGSFYFVIVGHHDNPVFEMEFLPAGKAESKDDHRHLNQFIAHAALDLVDENMWLSNNMYLKTVDKFNEWFVSAFVTAGHMRFIMLHDIRQEDGIKNFFT

SEQ ID NO: 10458 - DNA, 762 bp, Homo sapiens
ctcttgccgtggttgatttgattttctctggtgttttcactagttccggcctttggcgctctatgacgtcaccgaagtgacggagcggaaaagcgcgagaagcggcttggttccttgtacgcagaggcggtagtgacacaggcacaactgacagtggcagaagctcagctgacaaggactggggacggcggtgtccttgtcttgcctttgtcgcccccgcccctctcttccctggctggacttgcggagtccccgccgaagaacccgaggagccatatattgaagaccatgtctggaagcttctactttgtaattgttggtcaccatgataatccagtttttgaaatggagtttttgccagctgggaaggcagaatccaaagacgaccatcgtcatctgaaccagttcatagctcatgctgctctcgacctcgtagatgagaacatgtggctgtcgaacaacatgtacttgaaaactgtggacaagttcaacgagtggtttgtgtcagcatttgtcaccgcggggcatatgaggtttattatgcttcatgacataagacaagaagatggaataaagaacttctttactgatgtttatgatttatatataaaattttcaatgaatccattttatgaacccaattctcctattcgatcaagtgcatttgacagaaaagttcagtttcttgggaagaaacaccttttaagctgaatggagaaaattccaaaataaattatatcaccacaatggtgtatactcagg

SEQ ID NO: 10459 - protein, 140 aa, Homo sapiens [sequence omitted]

SEQ ID NO: 10460 - DNA, 834 bp, Homo sapiens
ctcttgccgtggttgatttgattttctctggtgttttcactagttccggcctttggcgctctatgacgtcaccgaagtgacggagcggaaaagcgcgagaagcggcttggttccttgtacgcagaggcggtagtgacacaggcacaactgacagtggcagaagctcagctgacaaggactggggacggcggtgtccttgtcttgcctttgtcgcccccgcccctctcttccctggctggacttgcggagtccccgccgaagaacccgaggagccatatattgaagaccatgtctggaagcttctactttgtaattgttggtcaccatgataatccagtttttgaaatggagtttttgccagctgggaaggcagaatccaaagacgaccatcgtcatctgaaccagttcatagctcatgctgctctcgacctcgtagatgagaacatgtggctgtcgaacaacatgtacttgaaaactgtggacaagttcaacgagtggtttgtgtcagcatttgtcaccgcggggcatatgaggtttattatgcttcatgacataagacaagaagatggaataaagaacttctttactgatgtttatgatttatatataaaattttcaatgaatccattttatgaacccaattctcctattcgatcaagtgcatttgacagaaaagttcagtttcttgggaagaaacaccttttaagctgaatggagaaaattccaaaataaattatatcaccacaatggtgtatactcaggaatgtgtacattgtaaattacttgattaaatagcctggaaatcttttgtgtattctcagcttatctaaactt

SEQ ID NO: 10461 - protein, 140 aa, Homo sapiens [sequence omitted]

SEQ ID NO: 10462 - DNA, 950 bp, Homo sapiens
ctcttgccgtggttgatttgattttctctggtgttttcactagttccggcctttggcgctctatgacgtcaccgaagtgacggagcggaaaagcgcgagaagcggcttggttccttgtacgcagaggcggtagtgacacaggcacaactgacagtggcagaagctcagctgacaaggactggggacggcggtgtccttgtcttgcctttgtcgcccccgcccctctcttccctggctggacttgcggagtccccgccgaagaacccgaggagccatatattgaagaccatgtctggaagcttctactttgtaattgttggtcaccatgataatccagtttttgaaatggagtttttgccagctgggaaggcagaatccaaagacgaccatcgtcatctgaaccagttcatagctcatgctgctctcgacctcgtagatgagaacatgtggctgtcgaacaacatgtacttgaaaactgtggacaagttcaacgagtggtttgtgtcagcatttgtcaccgcggggcatatgaggtttattatgcttcatgacataagacaagaagatggaataaagaacttctttactgatgtttatgatttatatataaaattttcaatgaatccattttatgaacccaattctcctattcgatcaagtgcatttgacagaaaagttcagtttcttgggaagaaacaccttttaagctgaatggagaaaattccaaaataaattatatcaccacaatggtgtatactcaggaatgtgtacattgtaaattacttgattaaatagcctggaaatcttttgtgtattctcagcttatctaaacttaatgaaatttcttttatatttaaaaatagtacattctgtctcatgtcacatatcagtagatcaattagtatttccttgtgaacaatgttatttataaagaactcattatcaataat

SEQ ID NO: 10463 - protein, 140 aa, Homo sapiens [sequence omitted]

SEQ ID NO: 10464 - DNA, 1652 bp, Homo sapiens
tagttccggcctttggcgctctatgacgtcaccgaagtgacggagcggaaaagcgcgagaagcggcttggttccttgtacgcagaggcggtagtgacacaggcacaactgacagtggcagaagctcagctgacaaggactggggacggcggtgtccttgtcttgcctttgtcgcccccgcccctctcttccctggctggacttgcggagtccccgccgaagaacccgagggtcccctggcgatggcagaaatgaaccctgcacagggtcatgtggtttttgaagacgtggccatatatttctcccaggaggagtgggggcatctcgatgaggctcagagattgctgtaccgtgatgtgatgctggagaatttggcccttttgtcctcactaggttgttgccatggagctgaggatgaggaggcacctttagagccaggtgtttctgtaggagtgtcacaggtcatggctccaaagccctgtctatctacccagaatacccagccctgtgagacatgtagctcacttctgaaggacattctgcgtctggctgagcatgacggaacacaccccgagcagggactgtacacgtgtccagcacatcttcaccagcaccaaaaggagcagattagagagaaactttctagaggggatggaggaagaccgacatttgtgaagaaccacagagttcacatggcagggaagaccttcttgtgcagtgaatgtgggaaagcctttagccacaaacataaactttctgaccatcagaaaatccacactggagaaagaacttataagtgcagcaaatgtgggatattgtttatggaaaggtccacactcaatagacatcagagaactcacactggagaaaggccttatgagtgcaatgaatgtgggaaagcctttctttgtaagtctcaccttgttcgtcaccagacaatccactctggagaaaggccttatgagtgcagtgaatgtgggaaattgtttatgtggagttccacactcattacacatcagagggttcacactggaaagaggccttatggttgcagtgaatgtgggaagttctttaagtgcaactcaaacctctttaggcattacagaattcatacaggaaaaaggtcttatggttgcagtgaatgtgggaaattctttatggaaaggtctacactcagtagacatcagagagttcacactggagaaaggccttatgagtgcaatgaatgtgggaaattcttcagcttgaaatccgtcctcattcaacaccaaagaagtttacactgaagaagagtcttttcaataaagtagaaagtggtaaagattcaacatgcaagattgtacttattgggcttcagaatatccacactagtgaaagtcttctgagtacagcaaatgtgtgacattattttgctactactccacactacttagacatcatgtagttcacactggaaaaaggccacgtatgtgccttgaatgtagccaaaatgacgaacaacacccagaaatctgtgatttagcactgagaactagtattatatggtttttaaaaaacaatggtgaagtacatgccacataaaatttgccatcttaactattgtaatgtcttgtttaatacttgaagtacattaacattgttgagcaaagaata

SEQ ID NO: 10465 - protein, 347 aa, Homo sapiens [sequence omitted]

SEQ ID NO: 10466 - DNA, 324 bp, Homo sapiens
gtcaccgaagtgacggagcggaaaagcgcgagaagcggcttggttccttgtacgcagaggcggtagtgacacaggcacaactgacagtggcagaagctcagctgacaaggactggggacggcggtgtccttgtcttgcctttgtcgcccccgcccctctcttccctggctggacttgcggagtccccgccgaagaacccgagggtcccctggcgatggcagaaatgaaccctgcacagatggagtcttgctgtgttgtcacccaggctggagtgcagtggcatgatcttggctcactgcaacctgcacctcctggattcaagca

SEQ ID NO: 10467 - protein, 35 aa, Homo sapiens
MAEMNPAQMESCCVVTQAGVQWHDLGSLQPAPPGF

SEQ ID NO: 10468 - DNA, 2095 bp, Homo sapiens
gtcaccgaagtgacggagcggaaaagcgcgagaagcggcttggttccttgtacgcagaggcggtagtgacacaggcacaactgacagtggcagaagctcagctgacaaggactggggacggcggtgtccttgtcttgcctttgtcgcccccgcccctctcttccctggctggacttgcggagtccccgccgaagaacccgagggtcccctggcgatggcagaaatgaaccctgcacagggtcatgtggtttttgaagacgtggccatatatttctcccaggaggagtgggggcatctcgatgaggctcagagattgctgtaccgtgatgtgatgctggagaatttggcccttttgtcctcactaggttgttgccatggagctgaggatgaggaggcacctttagagccaggtgtttctgtaggagtgtcacaggtcatggctccaaagccctgtctatctacccagaatacccagccctgtgagacatgtagctcacttctgaaggacattctgcgtctggctgagcatgacggaacacaccccgagcagggactgtacacgtgtccagcacatcttcaccagcaccaaaaggagcagattagagagaaactttctagaggggatggaggaagaccgacatttgtgaagaaccacagagttcacatggcagggaagaccttcttgtgcagtgaatgtgggaaagcctttagccacaaacataaactttctgaccatcagaaaatccacactggagaaagaacttataagtgcagcaaatgtgggatattgtttatggaaaggtccacactcaatagacatcagagaactcacactggagaaaggccttatgagtgcaatgaatgtgggaaagcctttctttgtaagtctcaccttgttcgtcaccagacaatccactctggagaaaggccttatgagtgcagtgaatgtgggaaattgtttatgtggagttccacactcattacacatcagagggttcacactggaaagaggccttatggttgcagtgaatgtgggaagttctttaagtgcaactcaaacctctttaggcattacagaattcatacaggaaaaaggtcttatggttgcagtgaatgtgggaaattctttatggaaaggtctacactcagtagacatcagagagttcacactggagaaaggccttatgagtgcaatgaatgtgggaaattcttcagcttgaaatccgtcctcattcaacaccaaagagttcacactggagaacggccttatgaatgcagtgagtgtgggaaggccttccttacaaagtcccacctcatttgtcatcagacagttcacactgcagcaaagcagtgcagtgaatgtgggaaattctttaggtataactctacacttctcagacatcagaaagtccacactggataaggcccttatgaatgcagtggatatgggaaagccttcagtcaccaacatattgtggctggacagcaggcagtacacactggagaaagactgaatgccgtgaacgtgggtaattatgtaggtacagctctccagtcgctatgtatcagagaattcacactgcagaaatgtgtgttcagcaaactcgggacattattttggtttgactctcatctcattagacattggagagtttacactgaagaagagtcttttcaataaagtagaaagtggtaaagattcaacatgcaagattgtacttattgggcttcagaatatccacactagtgaaagtcttctgagtacagcaaatgtgtgacattattttgctactactccacactacttagacatcatgtagttcacactggaaaaaggccacgtatgtgccttgaatgtagccaaaatgacgaacaacacccagaaatctgtgatttagcactgagaactagtattatatggtttttaaaaaacaatggtgaagtacatgccacataaaatttgccatcttaactattgtaatgtcttgtttaatacttgaagtacattaacattgttgagcaaagaatatcctgaactctttatcttgtaaaatgaaactctataaccaccattaaaaaaacaactcattcccac

SEQ ID NO: 10469 - protein, 402 aa, Homo sapiens; identical to SEQ ID NO: 1617

SEQ ID NO: 10470 - DNA, 2793 bp, Homo sapiens
gtcaccgaagtgacggagcggaaaagcgcgagaagcggcttggttccttgtacgcagaggcggtagtgacacaggcacaactgacagtggcagaagctcagctgacaaggactggggacggcggtgtccttgtcttgcctttgtcgcccccgcccctctcttccctggctggacttgcggagtccccgccgaagaacccgagggtcccctggcgatggcagaaatgaaccctgcacagggtcatgtggtttttgaagacgtggccatatatttctcccaggaggagtgggggcatctcgatgaggctcagagattgctgtaccgtgatgtgatgctggagaatttggcccttttgtcctcactaggttgttgccatggagctgaggatgaggaggcacctttagagccaggtgtttctgtaggagtgtcacaggtcatggctccaaagccctgtctatctacccagaatacccagccctgtgagacatgtagctcacttctgaaggacattctgcgtctggctgagcatgacggaacacaccccgagcagggactgtacacgtgtccagcacatcttcaccagcaccaaaaggagcagattagagagaaactttctagaggggatggaggaagaccgacatttgtgaagaaccacagagttcacatggcagggaagaccttcttgtgcagtgaatgtgggaaagcctttagccacaaacataaactttctgaccatcagaaaatccacactggagaaagaacttataagtgcagcaaatgtgggatattgtttatggaaaggtccacactcaatagacatcagagaactcacactggagaaaggccttatgagtgcaatgaatgtgggaaagcctttctttgtaagtctcaccttgttcgtcaccagacaatccactctggagaaaggccttatgagtgcagtgaatgtgggaaattgtttatgtggagttccacactcattacacatcagagggttcacactggaaagaggccttatggttgcagtgaatgtgggaagttctttaagtgcaactcaaacctctttaggcattacagaattcatacaggaaaaaggtcttatggttgcagtgaatgtgggaaattctttatggaaaggtctacactcagtagacatcagagagttcacactggagaaaggccttatgagtgcaatgaatgtgggaaattcttcagcttgaaatccgtcctcattcaacaccaaagagttcacactggagaacggccttatgaatgcagtgagtgtgggaaggccttccttacaaagtcccacctcatttgtcatcagacagttcacactgcagcaaagcagtgcagtgaatgtgggaaattctttaggtataactctacacttctcagacatcagaaagtccacactggataaggcccttatgaatgcagtggatatgggaaagccttcagtcaccaacatattgtggctggacagcaggcagtacacactggagaaagactgaatgccgtgaacgtgggtaattatgtaggtacagctctccagtcgctatgtatcagagaattcacactgcagaaatgtgtgttcagcaaactcgggacattattttggtttgactctcatctcattagacattggagagtttacactgaagaagagtcttttcaataaagtagaaagtggtaaagattcaacatgcaagattgtacttattgggcttcagaatatccacactagtgaaagtcttctgagtacagcaaatgtgtgacattattttgctactactccacactacttagacatcatgtagttcacactggaaaaaggccacgtatgtgccttgaatgtagccaaaatgacgaacaacacccagaaatctgtgatttagcactgagaactagtattatatggtttttaaaaaacaatggtgaagtacatgccacataaaatttgccatcttaactattgtaatgtcttgtttaatacttgaagtacattaacattgttgagcaaagaatatcctgaactctttatcttgtaaaatgaaactctataaccaccattaaaaaaacaactcattcccacattcttcagtccctggcgaccaccatatttttaagtcattatgactctgactattcttggtacttctcagaagaagaatcttagagtgtttttcattattttttttcacttaggataatatcctcaaagttcattcattttttagcatgtgtcagaaattttaaggctgagcaatatttcattgtttgcatttaccacatttcctttatttctgacatctattcatggacacttgggttacttctacctctggctattgtgaatattgctactacaagcataagggcacaaatatctctttgagaccctgctttcaattcttattgggtaccccaaaaagtggaactgctggatcacatggtacttctaactttaattctttgatgaactgagaaacttttccataaaacttgcaccgttttacattcctaacattccacaaaagttgtgatttgtcctcattctaatccatagaaggcaacatttctaacaggtttctaggtgattttgttgttgctgatgtagggactacattttgagaactgtcctatcccatttttataacaatgcagagcttctctgtaaataccccttgtttctatgttctatcctgtgagccttttcattttgttaatttttcccagtgtttacaaccaggaaatagcttgtcatctttgatacaaaacagaaatctttgc

SEQ ID NO: 10471 - protein, 402 aa, Homo sapiens; identical to SEQ ID NO: 1617

SEQ ID NO: 10472 - DNA, 2008 bp, Homo sapiens
gtgcccaggatggtaggggagatggaaacacatttagctgttagtttgtccctgtgtttaatgggtggtaaatataagtagaaaataaatagagaacttaagtaaatacagtttgaaaagctgctcatgtattcatctttcccaatttggcagggtcatgtggtttttgaagacgtggccatatatttctcccaggaggagtgggggcatctcgatgaggctcagagattgctgtaccgtgatgtgatgctggagaatttggcccttttgtcctcactaggttgttgccatggagctgaggatgaggaggcacctttagagccaggtgtttctgtaggagtgtcacaggtcatggctccaaagccctgtctatctacccagaatacccagccctgtgagacatgtagctcacttctgaaggacattctgcgtctggctgagcatgacggaacacaccccgagcagggactgtacacgtgtccagcacatcttcaccagcaccaaaaggagcagattagagagaaactttctagaggggatggaggaagaccgacatttgtgaagaaccacagagttcacatggcagggaagaccttcttgtgcagtgaatgtgggaaagcctttagccacaaacataaactttctgaccatcagaaaatccacactggagaaagaacttataagtgcagcaaatgtgggatattgtttatggaaaggtccacactcaatagacatcagagaactcacactggagaaaggccttatgagtgcaatgaatgtgggaaagcctttctttgtaagtctcaccttgttcgtcaccagacaatccactctggagaaaggccttatgagtgcagtgaatgtgggaaattgtttatgtggagttccacactcattacacatcagagggttcacactggaaagaggccttatggttgcagtgaatgtgggaagttctttaagtgcaactcaaacctctttaggcattacagaattcatacaggaaaaaggtcttatggttgcagtgaatgtgggaaattctttatggaaaggtctacactcagtagacatcagagagttcacactggagaaaggccttatgagtgcaatgaatgtgggaaattcttcagcttgaaatccgtcctcattcaacaccaaagagttcacactggagaacggccttatgaatgcagtgagtgtgggaaggccttccttacaaagtcccacctcatttgtcatcagacagttcacactgcagcaaagcagtgcagtgaatgtgggaaattctttaggtataactctacacttctcagacatcagaaagtccacactggataaggcccttatgaatgcagtggatatgggaaagccttcagtcaccaacatattgtggctggacagcaggcagtacacactggagaaagactgaatgccgtgaacgtgggtaattatgtaggtacagctctccagtcgctatgtatcagagaattcacactgcagaaatgtgtgttcagcaaactcgggacattattttggtttgactctcatctcattagacattggagagtttacactgaagaagagtcttttcaataaagtagaaagtggtaaagattcaacatgcaagattgtacttattgggcttcagaatatccacactagtgaaagtcttctgagtacagcaaatgtgtgacattattttgctactactccacactacttagacatcatgtagttcacactggaaaaaggccacgtatgtgccttgaatgtagccaaaatgacgaacaacacccagaaatctgtgatttagcactgagaactagtattatatggtttttaaaaaacaatggtgaagtacatgccacataaaatttgccatcttaactattgtaatgtcttgtttaatacttgaagtacattaacattgttgagcaaagaatatcctgaactctttatcttgtaaaatgaaactctataaccaccattaaaaaaacaactcattccc

SEQ ID NO: 10473 - protein, 403 aa, Homo sapiens
MYSSFPIWQGHVVFEDVAIYFSQEEWGHLDEAQRLLYRDVMLENLALLSSLGCCHGAEDEEAPLEPGVSVGVSQVMAPKPCLSTQNTQPCETCSSLLKDILRLAEHDGTHPEQGLYTCPAHLHQHQKEQIREKLSRGDGGRPTFVKNHRVHMAGKTFLCSECGKAFSHKHKLSDHQKIHTGERTYKCSKCGILFMERSTLNRHQRTHTGERPYECNECGKAFLCKSHLVRHQTIHSGERPYECSECGKLFMWSSTLITHQRVHTGKRPYGCSECGKFFKCNSNLFRHYRIHTGKRSYGCSECGKFFMERSTLSRHQRVHTGERPYECNECGKFFSLKSVLIQHQRVHTGERPYECSECGKAFLTKSHLICHQTVHTAAKQCSECGKFFRYNSTLLRHQKVHTG

SEQ ID NO: 10474 - DNA, 992 bp, Homo sapiens
acctttactccagtccccaacaagttcctcatctccgtctacactcagtagacatcagagagttcacactggagaaaggccttatgagtgcaatgaatgtgggaaattcttcagcttgaaatccgtcctcattcaacaccaaagagttcacactggagaacggccttatgaatgcagtgagtgtgggaaggccttccttacaaagtcccacctcatttgtcatcagacagttcacactgcagcaaagcagtgcagtgaatgtgggaaattctttaggtataactctacacttctcagacatcagaaagtccacactggataaggcccttatgaatgcagtggatatgggaaagccttcagtcaccaacatattgtggctggacagcaggcagtacacactggagaaagactgaatgccgtgaacgtgggtaattatgtaggtacagctctccagtcgctatgtatcagagaattcacactgcagaaatgtgtgttcagcaaactcgggacattattttggtttgactctcatctcattagacattggagagtttacactgaagaagagtcttttcaataaagtagaaagtggtaaagattcaacatgcaagattgtacttattgggcttcagaatatccacactagtgaaagtcttctgagtacagcaaatgtgtgacattattttgctactactccacactacttagacatcatgtagttcacactggaaaaaggccacgtatgtgccttgaatgtagccaaaatgacgaacaacacccagaaatctgtgatttagcactgagaactagtattatatggtttttaaaaaacaatggtgaagtacatgccacataaaatttgccatcttaactattgtaatgtcttgtttaatacttgaagtacattaacattgttgagcaaagaatatcctgaactctttatcttgtaaaatgaaactctataaccaccattaaaaaaacaactcattccc

SEQ ID NO: 10475 - protein, 81 aa, Homo sapiens [sequence omitted]

SEQ ID NO: 10476 - DNA, 3387 bp, Homo sapiens
cgtcggagggcgggacttccgccgtcctcctggtggtggtcgttttggttctgtgtggtgtttcaccaacttcggcctatggctctgtctgacgtcaccgaagtgacggaacggaaaagcgcgagaagcggctcggttcccaccacggagaggcgggagtgagtcaactgacaagcgctggggacagtggcgtccttgtcttgcctttgtcgctcccgccccgctcttccctggctgggctggcggaggccttgctgatgaacctgactgagggccgtgtggtctttgaggacgtggccatatatttctcccaggaggagtgggggcaccttgatgaggctcagagattgctgtaccgtgatgtgatgctggagaatttggcccttttgtcctcactaggttcttggcatggagctgaggatgaggaggcaccttcacagcaaggtttttctgtaggagtgtcagaggttacagcttcaaagccctgtctgtccagccagaaggtccaccctagtgagacatgtggcccacccttgaaagacattctgtgcctggttgagcacaatggaattcatcctgagcaacacatatatatttgtgaggcagagctttttcagcacccaaagcagcaaattggagaaaatctttccagaggggatgattggataccttcatttgggaagaaccacagagttcacatggcagaggagatcttcacatgcatggagggctggaaggacttaccagccacctcatgccttctccagcaccagggccctcaaagcgagtggaagccatacagggacacagaggacagagaagcctttcagactggacaaaatgattacaaatgtagtgaatgtgggaaaaccttcacctgcagctattcatttgttgagcaccagaaaatccacacaggagaaaggtcttatgaatgtaacaaatgtgggaaattctttaagtacagtgccaatttcatgaaacatcagacagttcacactagtgaaaggacttatgagtgcagagaatgtggaaaatcctttatgtacaactaccgactcatgagacataagcgagttcacactggagaaaggccttatgagtgcaacacatgtgggaaattctttcggtacagctccacatttgttagacatcagagagttcacaccggagaaaggccgtatgagtgcagggaatgtgggaaattctttatggacagctccacactcattaaacatcagagagttcacaccggagaaagaccttataagtgcaatgattgtgggaaattttttaggtatatctccacactcattagacatcagagaattcacactggagaaaggccttatgagtgcagtgtatgtggggaattgtttaggtacaactccagccttgttaaacattggagaaatcacactggagaaaggccttataaatgcagtgaatgtgggaaatcatttaggtaccactgcaggctcattagacaccagagagtccacacgggagaaaggccttatgagtgcagcgaatgcgggaaattctttcgttacaactccaacctcattaaacattggagaaatcacactggagaaaggccttacgagtgcagagagtgtgggaaagcctttagccacaagcatatacttgttgagcaccagaaaatccacagtggagaaagaccttatgagtgcagcgaatgccagaaggcctttattagaaagtctcacctggttcatcaccagaaaatccacagtgaagagaggcttgtgtgctccatgaatgtggggaattctttagctaaaactccaacctcattaaacatcagagatttcacaatggagaaagtttaccattgactattgtaattgggtagtaatgttatataaattccacatttttatgcaactaatctccagaacatttttcctcttaccaagaagtaaaatgctgtacccattaacaacaactcattccccttccctacttccccagaaatgtctcaactatatttctatactctatggtacttatatgaggtaccaatagatatctatgaatttgatatatatttgtacctcatataagtggattctacagtatttatcttttgagactggcttatttcacttaggataaggtcttcacggttcacccatgttgtataatgtgtcagaatatccttcctttttaggtgaaataatattctatggtatttatataccacatttatttatccattcatctgttagtggatacttgggctacttccaccttttgcctattgaaataatgctgctatgaagatgagtgtacaagtgtctattcaagattctactttcaattcttatagggtatatactcagaaatggtggtgctggatcatataggatttctattttttttttttgtttgtttttgagacagagtcttgctctgtcacccaggctggagtgcagtgctgtgatcttggctcactgcaagctccgcctcccaggttcatgccattctcctgcctcaccctcccgagtagctgggactacaggtgcctgccaccacgcctggctaatttttttgtatttttagtagagacggggtttcaccgtgttagccaggatggtcctgatctcctgaccttgtgatctgcctgccttggcctctcaaagtgctgggattacgggcgtgagccaccgcgcctggccaggatttctatttttaatatttttgggaaaatttttccatagtacctgtgccattttacattcccaccagcagtgcacaaggattgcaatctatatacatcctcaccaacattgttcattttctatttctgtttttggggttttttgtagtgccttttgttttggatagcagctatcttgttggatgtgaggtggaatctatagtgtctttcatttttattttgtgaatgattgatgatgttgaggatcttttcatgtgcttgttaggcatttgtgtatctggaaaaatattcaagtcttttttttccatttttaatgggactatttgctttttgttgttgagttgtagttctttatacattctggatattaactccttaccaaatatatgctttttacatattacctcccagtccataggttgctttttcgctctgttgattgtgtcctttgatgaaattttaagttttgatgtactgttgactctttctgtctgtgggttctgtattcatggatcgaagcaaccatggatcaaaagtatttggagcatccatggattgcagtgatcattaatcaaaaatatttggaaaacaaaaagggtagttgcatctgtactaaacatgaacagacattttttcttgtcattattccctaaactatatagtataataaatatttacatagc

SEQ ID NO: 10477 - protein, 533 aa, Homo sapiens
MNLTEGRVVFEDVAIYFSQEEWGHLDEAQRLLYRDVMLENLALLSSLGSWHGAEDEEAPSQQGFSVGVSEVTASKPCLSSQKVHPSETCGPPLKDILCLVEHNGIHPEQHIYICEAELFQHPKQQIGENLSRGDDWIPSFGKNHRVHMAEEIFTCMEGWKDLPATSCLLQHQGPQSEWKPYRDTEDREAFQTGQNDYKCSECGKTFTCSYSFVEHQKIHTGERSYECNKCGKFFKYSANFMKHQTVHTSERTYECRECGKSFMYNYRLMRHKRVHTGERPYECNTCGKFFRYSSTFVRHQRVHTGERPYECRECGKFFMDSSTLIKHQRVHTGERPYKCNDCGKFFRYISTLIRHQRIHTGERPYECSVCGELFRYNSSLVKHWRNHTGERPYKCSECGKSFRYHCRLIRHQRVHTGERPYECSECGKFFRYNSNLIKHWRNHTGERPYECRECGKAFSHKHILVEHQKIHSGERPYECSECQKAFIRKSHLVHHQKIHSEERLVCSMNVGNSLAKTPTSLNIRDFTMEKVYH

SEQ ID NO: 10478 - DNA, 2341 bp, Homo sapiens
gcgggacttccgccgtcctcctggtggtggtcgttttggttctgtgtggtgtttcaccaacttcggcctatggctctgtctgacgtcaccgaagtgacggaacggaaaagcgcgagaagcggctcggttcccaccacggagaggcgggagtgagtcaactgacaagcgctggggacagtggcgtccttgtcttgcctttgtcgctcccgccccgctcttccctggctgggctggcggaggccttgctgatgaacctgactgagggtcccctggcgatggcagaaatggaccctacacagggccgtgtggtctttgaggacgtggccatatatttctcccaggaggagtgggggcaccttgatgaggctcagagattgctgtaccgtgatgtgatgctggagaatttggcccttttgtcctcactaggttcttggcatggagctgaggatgaggaggcaccttcacagcaaggtttttctgtaggagtgtcagaggttacagcttcaaagccctgtctgtccagccagaaggtccaccctagtgagacatgtggcccacccttgaaagacattctgtgcctggttgagcacaatggaattcatcctgagcaacacatatatatttgtgaggcagagctttttcagcacccaaagcagcaaattggagaaaatctttccagaggggatgattggataccttcatttgggaagaaccacagagttcacatggcagaggagatcttcacatgcatggagggctggaaggacttaccagccacctcatgccttctccagcaccagggccctcaaagcgagtggaagccatacagggacacagaggacagagaagcctttcagactggacaaaatgattacaaatgtagtgaatgtgggaaaaccttcacctgcagctattcatttgttgagcaccagaaaatccacacaggagaaaggtcttatgaatgtaacaaatgtgggaaattctttaagtacagtgccaatttcatgaaacatcagacagttcacactagtgaaaggacttatgagtgcagagaatgtggaaaatcctttatgtacaactaccgactcatgagacataagcgagttcacactggagaaaggccttatgagtgcaacacatgtgggaaattctttcggtacagctccacatttgttagacatcagagagttcacaccggagaaaggccgtatgagtgcagggaatgtgggaaattctttatggacagctccacactcattaaacatcagagagttcacaccggagaaagaccttataagtgcaatgattgtgggaaattttttaggtatatctccacactcattagacatcagagaattcacactggagaaaggccttatgagtgcagtgtatgtggggaattgtttaggtacaactccagccttgttaaacattggagaaatcacactggagaaaggccttataaatgcagtgaatgtgggaaatcatttaggtaccactgcaggctcattagacaccagagagtccacacgggagaaaggccttatgagtgcagcgaatgcgggaaattctttcgttacaactccaacctcattaaacattggagaaatcacactggagaaaggccttacgagtgcagagagtgtgggaaagcctttagccacaagcatatacttgttgagcaccagaaaatccacagtggagaaagaccttatgagtgcagcgaatgccagaaggcctttattagaaagtctcacctggttcatcaccagaaaatccacagtgaagagaggcttgtgtgctccatgaatgtggggaattctttagctaaaactccaacctcattaaacatcagagatttcacaatggagaaagtttaccattgactattgtaattgggtagtaatgttatataaattccacatttttatgcaactaatctccagaacatttttcctcttaccaagaagtaaaatgctgtacccattaacaacaactcattccccttccctacttccccagaaatgtctcaactatatttctatactctatggtacttatatgaggtaccaatagatatctatgaatttgatatatatttgtacctcatataagtggattctacagtatttatcttttgagactggcttatttcacttaggataaggtcttcacggttcacccatgttgtataatgtgtcagaatatccttcctttttaggtgaaataatattctatggtatttatataccacatttatttatccattcatctgttagtggatacttgggctacttccaccttttgcctattgaaataatgctgctatgaagatgagtgt

SEQ ID NO: 10479 - protein, 545 aa, Homo sapiens
MNLTEGPLAMAEMDPTQGRVVFEDVAIYFSQEEWGHLDEAQRLLYRDVMLENLALLSSLGSWHGAEDEEAPSQQGFSVGVSEVTASKPCLSSQKVHPSETCGPPLKDILCLVEHNGIHPEQHIYICEAELFQHPKQQIGENLSRGDDWIPSFGKNHRVHMAEEIFTCMEGWKDLPATSCLLQHQGPQSEWKPYRDTEDREAFQTGQNDYKCSECGKTFTCSYSFVEHQKIHTGERSYECNKCGKFFKYSANFMKHQTVHTSERTYECRECGKSFMYNYRLMRHKRVHTGERPYECNTCGKFFRYSSTFVRHQRVHTGERPYECRECGKFFMDSSTLIKHQRVHTGERPYKCNDCGKFFRYISTLIRHQRIHTGERPYECSVCGELFRYNSSLVKHWRNHTGERPYKCSECGKSFRYHCRLIRHQRVHTGERPYECSECGKFFRYNSNLIKHWRNHTGERPYECRECGKAFSHKHILVEHQKIHSGERPYECSECQKAFIRKSHLVHHQKIHSEERLVCSMNVGNSLAKTPTSLNIRDFTMEKVYH

SEQ ID NO: 10480 - DNA, 2465 bp, Homo sapiens
gcgggacttccgccgtcctcctggtggtggtcgttttggttctgtgtggtgtttcaccaacttcggcctatggctctgtctgacgtcaccgaagtgacggaacggaaaagcgcgagaagcggctcggttcccaccacggagaggcgggagtgagtcaactgacaagcgctggggacagtggcgtccttgtcttgcctttgtcgctcccgccccgctcttccctggctgggctggcggaggccttgctgatgaacctgactgagaatggagttggggaagtcagcataaagagcagatttccgggagaagatcacaggttggattttggacatggtgattctcaaatgtctcaagatggatatgtcacacagacaggtggacataaagggtcccctggcgatggcagaaatggaccctacacagggccgtgtggtctttgaggacgtggccatatatttctcccaggaggagtgggggcaccttgatgaggctcagagattgctgtaccgtgatgtgatgctggagaatttggcccttttgtcctcactaggttcttggcatggagctgaggatgaggaggcaccttcacagcaaggtttttctgtaggagtgtcagaggttacagcttcaaagccctgtctgtccagccagaaggtccaccctagtgagacatgtggcccacccttgaaagacattctgtgcctggttgagcacaatggaattcatcctgagcaacacatatatatttgtgaggcagagctttttcagcacccaaagcagcaaattggagaaaatctttccagaggggatgattggataccttcatttgggaagaaccacagagttcacatggcagaggagatcttcacatgcatggagggctggaaggacttaccagccacctcatgccttctccagcaccagggccctcaaagcgagtggaagccatacagggacacagaggacagagaagcctttcagactggacaaaatgattacaaatgtagtgaatgtgggaaaaccttcacctgcagctattcatttgttgagcaccagaaaatccacacaggagaaaggtcttatgaatgtaacaaatgtgggaaattctttaagtacagtgccaatttcatgaaacatcagacagttcacactagtgaaaggacttatgagtgcagagaatgtggaaaatcctttatgtacaactaccgactcatgagacataagcgagttcacactggagaaaggccttatgagtgcaacacatgtgggaaattctttcggtacagctccacatttgttagacatcagagagttcacaccggagaaaggccgtatgagtgcagggaatgtgggaaattctttatggacagctccacactcattaaacatcagagagttcacaccggagaaagaccttataagtgcaatgattgtgggaaattttttaggtatatctccacactcattagacatcagagaattcacactggagaaaggccttatgagtgcagtgtatgtggggaattgtttaggtacaactccagccttgttaaacattggagaaatcacactggagaaaggccttataaatgcagtgaatgtgggaaatcatttaggtaccactgcaggctcattagacaccagagagtccacacgggagaaaggccttatgagtgcagcgaatgcgggaaattctttcgttacaactccaacctcattaaacattggagaaatcacactggagaaaggccttacgagtgcagagagtgtgggaaagcctttagccacaagcatatacttgttgagcaccagaaaatccacagtggagaaagaccttatgagtgcagcgaatgccagaaggcctttattagaaagtctcacctggttcatcaccagaaaatccacagtgaagagaggcttgtgtgctccatgaatgtggggaattctttagctaaaactccaacctcattaaacatcagagatttcacaatggagaaagtttaccattgactattgtaattgggtagtaatgttatataaattccacatttttatgcaactaatctccagaacatttttcctcttaccaagaagtaaaatgctgtacccattaacaacaactcattccccttccctacttccccagaaatgtctcaactatatttctatactctatggtacttatatgaggtaccaatagatatctatgaatttgatatatatttgtacctcatataagtggattctacagtatttatcttttgagactggcttatttcacttaggataaggtcttcacggttcacccatgttgtataatgtgtcagaatatccttcctttttaggtgaaataatattctatggtatttatataccacatttatttatccattcatctgttagtggatacttgggctacttccaccttttgcctattgaaataatgctgctatgaagatgagtgt

SEQ ID NO: 10481 - protein, 559 aa, Homo sapiens
MVILKCLKMDMSHRQVDIKGPLAMAEMDPTQGRVVFEDVAIYFSQEEWGHLDEAQRLLYRDVMLENLALLSSLGSWHGAEDEEAPSQQGFSVGVSEVTASKPCLSSQKVHPSETCGPPLKDILCLVEHNGIHPEQHIYICEAELFQHPKQQIGENLSRGDDWIPSFGKNHRVHMAEEIFTCMEGWKDLPATSCLLQHQGPQSEWKPYRDTEDREAFQTGQNDYKCSECGKTFTCSYSFVEHQKIHTGERSYECNKCGKFFKYSANFMKHQTVHTSERTYECRECGKSFMYNYRLMRHKRVHTGERPYECNTCGKFFRYSSTFVRHQRVHTGERPYECRECGKFFMDSSTLIKHQRVHTGERPYKCNDCGKFFRYISTLIRHQRIHTGERPYECSVCGELFRYNSSLVKHWRNHTGERPYKCSECGKSFRYHCRLIRHQRVHTGERPYECSECGKFFRYNSNLIKHWRNHTGERPYECRECGKAFSHKHILVEHQKIHSGERPYECSECQKAFIRKSHLVHHQKIHSEERLVCSMNVGNSLAKTPTSLNIRDFTMEKVYH

SEQ ID NO: 10482 - DNA, 712 bp, Homo sapiens
gggacttccgccgtcctcctggtggtggtcgttttggttctgtgtggtgtttcaccaacttcggcctatggctctgtctgacgtcaccgaagtgacggaacggaaaagcgcgagaagcggctcggttcccaccacggagaggcgggagtgagtcaactgacaagcgctggggacagtggcgtccttgtcttgcctttgtcgctcccgccccgctcttccctggctgggctggcggaggccttgctgatgaacctgactgagggtcccctggcgatggcagaaatggaccctacacagggccgtgtggtctttgaggacgtggccatatatttctcccaggaggagtgggggcaccttgatgaggctcagagattgctgtaccgtgatgtgatgctggagaatttggcccttttgtcctcactagactgccttccgggaaaatctggatgcttgccgtttaaaagccaatgaagcccctccacgtccttggagccccgcaactgcatttctcaaagcctcaggaggatcctcctggctttcatcctgaacgcgagttaacttaagttcagaagcggggcaggcagtggcctgggaactacattacccaaaagacacagcggcggacacaagcagcgagtgtagccaatgaaggcctagcagagcggcgtctacgggggttcgcaatgcgtgtgggcgggacttcctgcaacgc

SEQ ID NO: 10483 - protein, 74 aa, Homo sapiens
MNLTEGPLAMAEMDPTQGRVVFEDVAIYFSQEEWGHLDEAQRLLYRDVMLENLALLSSLDCLPGKSGCLPFKSQ

SEQ ID NO: 10484 - DNA, 566 bp, Homo sapiens
ggttctgtgtggtgtttcaccaacttcggcctatggctctgtctgacgtcaccgaagtgacggaacggaaaagcgcgagaagcggctcggttcccaccacggagaggcgggagtgagtcaactgacaagcgctggggacagtggcgtccttgtcttgcctttgtcgctcccgccccgctcttccctggctgggctggcggaggccttgctgatgaacctgactgagggtcccctggcgatggcagaaatggaccctacacagggccgtgtggtctttgaggacgtggccatatatttctcccaggaggagtgggggcaccttgatgaggctcagagattgctgtaccgtgatgtgatgctggagaatttggcccttttgtcctcactaggtaaggccctcacacttgcccagtgtcctgggttaggctgtgttacccctttttacccaaaggcagctctgcgtttcccacagtgagaccgtgggtgctgcttcttttccctgtttcttggcatatatgctgtgggaggcagggctgggccgtgtgttttataccccctttttccta

SEQ ID NO: 10485 - protein, 87 aa, Homo sapiens
MNLTEGPLAMAEMDPTQGRVVFEDVAIYFSQEEWGHLDEAQRLLYRDVMLENLALLSSLGKALTLAQCPGLGCVTPFYPKAALRFPQ
